United States Patent Application Publication US 2005/0228172 A9 - sequence listing, part 85

SEQ ID NO: 382384 - DNA, 535 bp, Homo sapiens
atgtaattcaaattttacaaggaaaaacagagagataataggacagaaaaatatctgaatactgttcattaaaaatatccccaatctgatgataaacaacaatttatagatccaaaaacttcagtaaaccccaagcaagttaaaaacaaagaaaacaaggagccatatcacagacaaaatcctgaaaactgaagaattatgttaaagtaacaaaatgttgaaagcagccagaaaaatgacttattccataaaggaagaaggtggtaacaccaatgactgacttatcagaawgaataaaagccataagacactaaaaacatctttacagtgctgaaagaaaaggaaaaataactgtcaacctagaattttatagtcagcaaaaatatcctctggaaatgatgccaaaatataggtatttattagatagcaaaactgagaatttactgctaagtaaattacatcaggatgcagagaaatgacaccagatagatatgtgaatctacaggaggtaaagaagagcaacagatatggtaaa

SEQ ID NO: 382385 - DNA, 611 bp, Homo sapiens
aatatgaagcaagaaaggcttaaatgtctttattcaggggattaggcatcataagtttttttttttagagaaattgttttcatgatatttcctatctccttttgtcactttgcttttgtcggtaaattttacaactaaatraggattaccaggcataaaaagcagcagacaatcatgatgcaaactgaaaataatcaatcaaaactgacccagaacttaaatagatgttaaaattagcagaggaggacattaaaactgtttttatacatgtatctcatataatcaaaacattaaatagagacatgggagataaacaagaaaagccaaaatcaaactttcaaagacaaaaacatttgagatgaaaattacattggatgaactaaagcagattagaaactgcagaagaaaagattagcaaacttgaagatacaagaacagacactagctaaagtacaaaaagaaaaaaaaatcttaaaaagtgatttttaaaaagcatcagtgagcagtcaggcaacttcaaatggcctaataatatgcaggtaactggagttcccaaaggagaaaaaaaagaaagagaaaaaaatacttgaagaaacaactgctgaaaatgt

SEQ ID NO: 382386 - DNA, 611 bp, Homo sapiens
aatatgaagcaagaaaggcttaaatgtctttattcaggggattaggcatcataagtttttttttttagagaaattgttttcatgatatttcctatctccttttgtcactttgcttttgtcggtaaattttacaactaaatgaggattaccaggcataaaaagcagcagacaatcatgatgcaaactgaaaataatcaatcaaaactgacccagaacttaaatagatgttaaaattagcagaggaggacattaaaactgtttttatacatgtatctcatataatcaaaacattaaatagagacatgggagataaacaagaaaagccaaaatcaaactttcaaagacaaaaacatttgagatgaaaattacattggatgaactaargcagattagaaactgcagaagaaaagattagcaaacttgaagatacaagaacagacactagctaaagtacaaaaagaaaaaaaaatcttaaaaagtgatttttaaaaagcatcagtgagcagtcaggcaacttcaaatggcctaataatatgcaggtaactggagttcccaaaggagaaaaaaaagaaagagaaaaaaatacttgaagaaacaactgctgaaaatgt

SEQ ID NO: 382387 - DNA, 590 bp, Homo sapiens
ctaaagcagattagaaactgcagaagaaaagattagcaaacttgaagatacaagaacagacactagctaaagtacaaaaagaaaaaaaaatsttaaaaagtgatttttaaaaagcatcagtgagcagtcaggcaacttcaaatggcctaataatatgcaggtaactggagttcccaaaggagaaaaaaaagaaagagaaaaaaatacttgaagaaacaactgctgaaaatgttctagccataagaagacctattaactcacggatccaagaaactcagcaaaccccaagcacaagaaacatgaagaaaattacactaagggataacataatcaaattgttcaaaatcaaggaaacattattaatagcaggtgtataaaaagacatgttacctatagaagaacaaagataagaacaacatcagatttcttttgagaaacaatgcaagtgagaagacagcggtacatctctaaagttctagaagaaaaaaggccaactagaattctatgcctggcaaaaatatctttcaaaaatgaaggtgaaataaagacacaccagaaacataaataatgaaataattcatcaccaggag

SEQ ID NO: 382388 - DNA, 614 bp, Homo sapiens
tatcatctccttctccgctcccacctctcaaatcctcgtagaggccaatatgatatccatctaatgaatgaagaaatcagagcgccacacaggaagtgacagagctgattgttcagttagtggttgagcttgcattgtattaggaaatatttgcttctaactccacacccaccgccctgcgcttagcctgtgctacaccatcaacttcctgatttgaaatttcatttgcgaatgtgtactcagatttttattagttctgtcctagttttcacttaatccagagagtttaaaattgtcrgctgccttttctcaggcctggaaattcttgtaaatagtgttagtgggcagtgaggcaccaggtctgtagttgcctttgcctcagctgctgtaataaaatagcatttcttcttgtagccccacattctaactatgtgggtttccaggcttgctcaagcaacagagcaccaccaaacagtagccctttcaataaatgagccaggacttgcataagcgtccactgggatgacagtaggggatgagagtgaggtcctgcaagtcattctcctgcttaagacaagtgaaaggattttcttccttgatgctgcagttgccct

SEQ ID NO: 382389 - DNA, 590 bp, Homo sapiens
ctaaagcagattagaaactgcagaagaaaagattagcaaacttgaagatacaagaacagacactagctaaagtacaaaaagaaaaaaaaatcttaaaaagtgatttttaaaaagcatcagtgagcagtcaggcaacttcaaatggcctaataatatgcaggtaactggagtycccaaaggagaaaaaaaagaaagagaaaaaaatacttgaagaaacaactgctgaaaatgttctagccataagaagacctattaactcacggatccaagaaactcagcaaaccccaagcacaagaaacatgaagaaaattacactaagggataacataatcaaattgttcaaaatcaaggaaacattattaatagcaggtgtataaaaagacatgttacctatagaagaacaaagataagaacaacatcagatttcttttgagaaacaatgcaagtgagaagacagcggtacatctctaaagttctagaagaaaaaaggccaactagaattctatgcctggcaaaaatatctttcaaaaatgaaggtgaaataaagacacaccagaaacataaataatgaaataattcatcaccaggag

SEQ ID NO: 382390 - DNA, 590 bp, Homo sapiens
ctaaagcagattagaaactgcagaagaaaagattagcaaacttgaagatacaagaacagacactagctaaagtacaaaaagaaaaaaaaatcttaaaaagtgatttttaaaaagcatcagtgagcagtcaggcaacttcaaatggcctaataatatgcaggtaactggagttcccaaaggagaaaaaaaagaaagagaaaaaaatacttgaagaaacaactgctgaaaatgttctagccataasaagacctattaactcacggatccaagaaactcagcaaaccccaagcacaagaaacatgaagaaaattacactaagggataacataatcaaattgttcaaaatcaaggaaacattattaatagcaggtgtataaaaagacatgttacctatagaagaacaaagataagaacaacatcagatttcttttgagaaacaatgcaagtgagaagacagcggtacatctctaaagttctagaagaaaaaaggccaactagaattctatgcctggcaaaaatatctttcaaaaatgaaggtgaaataaagacacaccagaaacataaataatgaaataattcatcaccaggag

SEQ ID NO: 382391 - DNA, 621 bp, Homo sapiens
gcccatacctaacaaagctattccctcattagcatggaatgaaaagataccttgagatttgctaaaaccaaggaagattagatttgcttctcattggggtaaagaggcttctatcaacatttatctgcttggatataatcagtatattagattttaaacgaccagtctgtgactttgctgggaaagaaacttgttatgtcaggtcttcctgtttatcaggagacatcggttgtcctcagcaaytttatgtcccactccctgggactgtgtcaccaccttccttgcaggtcgggatggtggtgcttttggatacttccagtaaagatggcagccccgagtggtttttgtccttaacagagtcctccattttcttacccctctgagattagaattacatttgttttctaaagcttaatcctaaagattgacctgctttttgcagtaattatatggctcagatttctgtcttagaaacttcctccagtgattgcgtttcctgatcagctcagttcctgtgtccatactcagcacctgtgtggacccagtcagatggaacttgggggacaaattttggatgtccagtactggtgttttttttttttttaagcatcctggaaggtt

SEQ ID NO: 382392 - DNA, 566 bp, Homo sapiens
aaacattattaatagcaggtgtataaaaagacatgttacctatagaagaacaaagataagaacaacatcagatttcttttgagaaacaatgcaagtgagaagacagcggtacatctctaaagttctagaagaaaaaaggccaactagaattctatgcctrgcaaaaatatctttcaaaaatgaaggtgaaataaagacacaccagaaacataaataatgaaataattcatcaccaggagaccttcactgcaagaaatgttaaaggatattcttcagaaacaaaatgatgtcagatgaaaatctggatcaatactaaggaataaagagcaccaaagtggtaactatatgagcaaacatcttttaaattttttattatttaaatctctaagagatacatgtttaataaaaaaacagcaaaatattacagagtttatgacatatgtaaaagtcaaatgcatggcagcaatagcacaaagtgcaggagggaggaaaagaaagtaaatgaaggaatgcttttattatagatgaagtgtacaatattacttgaaggtagacctctctaaatg

SEQ ID NO: 382393 - DNA, 566 bp, Homo sapiens
aaacattattaatagcaggtgtataaaaagacatgttacctatagaagaacaaagataagaacaacatcagatttcttttgagaaacaatgcaagtgagaagacagcggtacatctctaaagttctagaagaaaaaaggccaactagaattctatgcctggcaaaaatatctttcaaaaatgaaggtgaaataaagacacaccagaaacataaataatgaaataattcatcaccaggagaccttcactgcaagaaatgttaaaggatattcttcagaaacaaaatgatgtcagatgaaaatctggatcaatackaaggaataaagagcaccaaagtggtaactatatgagcaaacatcttttaaattttttattatttaaatctctaagagatacatgtttaataaaaaaacagcaaaatattacagagtttatgacatatgtaaaagtcaaatgcatggcagcaatagcacaaagtgcaggagggaggaaaagaaagtaaatgaaggaatgcttttattatagatgaagtgtacaatattacttgaaggtagacctctctaaatg

SEQ ID NO: 382394 - DNA, 566 bp, Homo sapiens
aaacattattaatagcaggtgtataaaaagacatgttacctatagaagaacaaagataagaacaacatcagatttcttttgagaaacaatgcaagtgagaagacagcggtacatctctaaagttctagaagaaaaaaggccaactagaattctatgcctggcaaaaatatctttcaaaaatgaaggtgaaataaagacacaccagaaacataaataatgaaataattcatcaccaggagaccttcactgcaagaaatgttaaaggatattcttcagaaacaaaatgatgtcagatgaaaatctggatcaatactaaggaataaagagcaccaaagtggtaactatatgagcaaacatcttttaaattttttattatttaaatctctaagagatacatgtttaataaaaaaacagcaaaatrttacagagtttatgacatatgtaaaagtcaaatgcatggcagcaatagcacaaagtgcaggagggaggaaaagaaagtaaatgaaggaatgcttttattatagatgaagtgtacaatattacttgaaggtagacctctctaaatg

SEQ ID NO: 382395 - DNA, 566 bp, Homo sapiens
aaacattattaatagcaggtgtataaaaagacatgttacctatagaagaacaaagataagaacaacatcagatttcttttgagaaacaatgcaagtgagaagacagcggtacatctctaaagttctagaagaaaaaaggccaactagaattctatgcctggcaaaaatatctttcaaaaatgaaggtgaaataaagacacaccagaaacataaataatgaaataattcatcaccaggagaccttcactgcaagaaatgttaaaggatattcttcagaaacaaaatgatgtcagatgaaaatctggatcaatactaaggaataaagagcaccaaagtggtaactatatgagcaaacatcttttaaattttttattatttaaatctctaagagatacatgtttaataaaaaaacagcaaaatattacagagtttatracatatgtaaaagtcaaatgcatggcagcaatagcacaaagtgcaggagggaggaaaagaaagtaaatgaaggaatgcttttattatagatgaagtgtacaatattacttgaaggtagacctctctaaatg

SEQ ID NO: 382396 - DNA, 575 bp, Homo sapiens
tggttggcagaggagacttatgagtatcactgtacttgggctgttatgaggcctctacttaaaggtgcacagtaatatacttttatgaccctttggaggctaggaagagcaaaggtgggtgcttgaggccgtgcaggactcccagagggcagctgaggcaccaggagagtgcatccccttaagtgttactgtctctcctctattaaatatttatgcatttagcacttaatattttccagagagcttcataagagtttttactctttcttatatattttggtgctggtgcattcattttggggaaatagaagtggaaaaatacatgagagctgactgtgcgctggagactgttggacacttggtgtatattatctcacttaatcttcactgcaaccctgggaggaacatattgctttcccattttataaatgaagtaacagaggctctgagaggttctcagttcctcaaattaaacacctrgtgagtgggggaaagttgggatttgaatccaggtgtgccttgttaaaaagtaattgtggtagggagactttgacctttttaaaggctatgtaatc

SEQ ID NO: 382397 - DNA, 374 bp, Homo sapiens
cagtttgctgatggtgtagaagttttatcttgtgcctcttttaactcctgattcttccagcttctgccacaaggtggctctaagacctggggataccagagctcagaaccagcgctgtcctctcttcttttgctctccctgcataccytgcccctcaaaacatagattcttagccctgctctggtgtcgtccatagaagtgtcccctgctacccccgttttaaagaatattgtgttaaatattcgtattccatcagaatcaaataggaacccagggactgttgactcactcatgctggtccatttaccatcagccttccactgctgtgatatcatttatcacagcaagcttctctgtggtctgtgccccagact

SEQ ID NO: 382398 - DNA, 374 bp, Homo sapiens
cagtttgctgatggtgtagaagttttatcttgtgcctcttttaactcctgattcttccagcttctgccacaaggtggctctaagacctggggataccagagctcagaaccagcgctgtcctctcttcttttgctctccctgcataccttgcccctcaaaacatagattcttagccctgctctggtgtcktccatagaagtgtcccctgctacccccgttttaaagaatattgtgttaaatattcgtattccatcagaatcaaataggaacccagggactgttgactcactcatgctggtccatttaccatcagccttccactgctgtgatatcatttatcacagcaagcttctctgtggtctgtgccccagact

SEQ ID NO: 382399 - DNA, 374 bp, Homo sapiens
cagtttgctgatggtgtagaagttttatcttgtgcctcttttaactcctgattcttccagcttctgccacaaggtggctctaagacctggggataccagagctcagaaccagcgctgtcctctcttcttttgctctccctgcataccttgcccctcaaaacatagattcttagccctgctctggtgtcgtccatagaagtgtcccctgctaccccygttttaaagaatattgtgttaaatattcgtattccatcagaatcaaataggaacccagggactgttgactcactcatgctggtccatttaccatcagccttccactgctgtgatatcatttatcacagcaagcttctctgtggtctgtgccccagact

SEQ ID NO: 382400 - DNA, 374 bp, Homo sapiens
cagtttgctgatggtgtagaagttttatcttgtgcctcttttaactcctgattcttccagcttctgccacaaggtggctctaagacctggggataccagagctcagaaccagcgctgtcctctcttcttttgctctccctgcataccttgcccctcaaaacatagattcttagccctgctctggtgtcgtccatagaagtgtcccctgctacccccgttttaaagaatattgtgttaaatattcgtattccatcagaatcaaataggaacccagggactgttgrctcactcatgctggtccatttaccatcagccttccactgctgtgatatcatttatcacagcaagcttctctgtggtctgtgccccagact

SEQ ID NO: 382401 - DNA, 461 bp, Homo sapiens
tctgattcaccgctgggagatgctccgcagtgttgctcagtcatggcattgggaattggactttgccacaccttggcttgctaaatccttccatccattcagaacatttgtctgtgtgttacagggagaccaagtggcagtctgtggctttcacaagttttggttctgtgatgcatgggactcaatcaacccttgatgctgccaaaccaagcttaagccagctggcaggccagggtcatgaccagtgggctgggtcctgggtctggatgcagttcctggggttgagctggactaaagagacaagagtctgaccagcagagtgctggagcctggccaggcatccctgccctgcccctgcccctgccctccacacaagctcggttggaggaggcctagattrctgtccctgggtggaatctccaccttgcccctgctttctttctcagctgggaagtggtttg

SEQ ID NO: 382402 - DNA, 461 bp, Homo sapiens
tctgattcaccgctgggagatgctccgcagtgttgctcagtcatggcattgggaattggactttgccacaccttggcttgctaaatccttccatccattcagaacatttgtctgtgtgttacagggagaccaagtggcagtctgtggctttcacaagttttggttctgtgatgcatgggactcaatcaacccttgatgctgccaaaccaagcttaagccagctggcaggccagggtcatgaccagtgggctgggtcctgggtctggatgcagttcctggggttgagctggactaaagagacaagagtctgaccagcagagtgctggagcctggccaggcatccctgccctgcccctgcccctgccctccacacaagctcggttggaggaggcctagattactgtccctgggtggaatctscaccttgcccctgctttctttctcagctgggaagtggtttg

SEQ ID NO: 382403 - DNA, 535 bp, Homo sapiens
aacaaaaattaacaacgcagatctgagactattatattatcctgtgaaggagggtctgtctgtctgcacagttggtcctaggctggcttctgaggacttgaatttcaagagggttccctaactggtaatcatggtttactgtatctagactatggaaataatgtggcttatcctgctattctttttgtgagtctggaaatttcacacatgctaggcagagtacacatatgtgaccagccaagataaaamctgtgtttcttgggaagtcacataggttgttgtattttcattaagggggaaagaaggtagtctgtgtgatcctcatggaaggcacagcacataaggaagccggtacatggatttttccagactctgtcagtgtcttttgccattgagatctttctactatatatccatactatgttacagtaataaatcttagccattacaaccctaagctgatcccatgagtccttctagcaaatctccaaacatggaggcagtcttgtggatccctgacacaaatatagtgttg

SEQ ID NO: 382404 - DNA, 400 bp, Homo sapiens
gcagacccacaggaaaagaaatactaaagattattcttcaggtagaagagccatgatccctgatgaaagtttgcatttagaagaacaatttttttaatgaaagaaataaacatagagagaaatttaattggatatcgactgtataacagaatgctatctcatwaagtttaaaatgtatcttccatacaacggcagaagcatataagttgtgagttggataaattaattttaaaatattgtcaagttttttttttttttttgcaaatagacaaatgtaccaattatattagaccctgaattcaataatgcacgttgtattaaaccaggtaaaatataaccagaccagatttttaaaatggactctaagtttttataatttatattcatatttcacatatgt

SEQ ID NO: 382405 - DNA, 400 bp, Homo sapiens
gcagacccacaggaaaagaaatactaaagattattcttcaggtagaagagccatgatccctgatgaaagtttgcatttagaagaacaatttttttaatgaaagaaataaacatagagagaaatttaattggatatcgactgtataacagaatgctatctcattaagtttaaaatgtatcytccatacaacggcagaagcatataagttgtgagttggataaattaattttaaaatattgtcaagttttttttttttttttgcaaatagacaaatgtaccaattatattagaccctgaattcaataatgcacgttgtattaaaccaggtaaaatataaccagaccagatttttaaaatggactctaagtttttataatttatattcatatttcacatatgt

SEQ ID NO: 382406 - DNA, 400 bp, Homo sapiens
gcagacccacaggaaaagaaatactaaagattattcttcaggtagaagagccatgatccctgatgaaagtttgcatttagaagaacaatttttttaatgaaagaaataaacatagagagaaatttaattggatatcgactgtataacagaatgctatctcattaagtttaaaatgtatcttccatacaacggcagaagcatwtaagttgtgagttggataaattaattttaaaatattgtcaagttttttttttttttttgcaaatagacaaatgtaccaattatattagaccctgaattcaataatgcacgttgtattaaaccaggtaaaatataaccagaccagatttttaaaatggactctaagtttttataatttatattcatatttcacatatgt

SEQ ID NO: 382407 - DNA, 400 bp, Homo sapiens
gcagacccacaggaaaagaaatactaaagattattcttcaggtagaagagccatgatccctgatgaaagtttgcatttagaagaacaatttttttaatgaaagaaataaacatagagagaaatttaattggatatcgactgtataacagaatgctatctcattaagtttaaaatgtatcttccatacaacggcagaagcatataagttgtgagttggataaattaattttaaaatattgtcaagttttttttttttttttgcaaatagacaaatgtaccaattatattagaccctgaattcaataatgcacgttgtattaaaccaggtaaaatataaccagaccagatttttwaaatggactctaagtttttataatttatattcatatttcacatatgt

SEQ ID NO: 382408 - DNA, 475 bp, Homo sapiens
tgttcaaaagtagccaataaaatctagatattcaatagcataacatcaaaatacccaaaaaaaaaactctgacatgcaaagaagccgtaagatatatacaattaagatatatattaacaggataaaaataagtcatttataaatgacagaraagaaggaaatttcaaggtccttaaagtaaatatattttataaatacatatagataaatacatatatatgtcaaggtacttaaatgaaaattgaacataggagaaaaatagaagttataaaatgaaaaatggggcatgtatagatgaaaaataaatattttaaataaaaattccatgagattgaataagtaatggattttaccctaacatcagaaaatttatagaacaaaatagaagctttacaaactaaaggacaaagggtaaactaaaataagaaagccagaaactcactgatacgtcagacaatatgcagcagtgtaacat

SEQ ID NO: 382409 - DNA, 475 bp, Homo sapiens
tgttcaaaagtagccaataaaatctagatattcaatagcataacatcaaaatacccaaaaaaaaaactctgacatgcaaagaagccgtaagatatatacaattaagatatatattaacaggataaaaataagtcatttataaatgacagaaaagaaggaaatttcaaggtccttaaagtaaatatattttataaatacatatagataaatacatatatatgtcaaggtacttaaatgaaaattgaacataggagaaaaatagaagttataaaatgaaaaatggggcatgtatagatgaaaaataaatatttkaaataaaaattccatgagattgaataagtaatggattttaccctaacatcagaaaatttatagaacaaaatagaagctttacaaactaaaggacaaagggtaaactaaaataagaaagccagaaactcactgatacgtcagacaatatgcagcagtgtaacat

SEQ ID NO: 382410 - DNA, 572 bp, Homo sapiens
gtcatttataaatgacagaaaagaaggaaatttcaaggtccttaaagtaaatatattttataaatacatatagataaatacatatatatgtcaaggtacttaaatgaaaattgaacataggagaaaaatagaagttataaaatgaaaaatggggcatgtatagatgaaaaataaatattttaaataaaaattccatgagatwgaataagtaatggattttaccctaacatcagaaaatttatagaacaaaatagaagctttacaaactaaaggacaaagggtaaactaaaataagaaagccagaaactcactgatacgtcagacaatatgcagcagtgtaacatacatgtaattaatatctcaaaaaggatgggtaaaggaattacaggtgaataaagaatggtacactcattcctgagggcaccgaggagggaggatagctttagatttctaagggagggtattatccattcatgaaggtccaaccccatgaccaaacacctcccagtaagccccacctgcaacattggggatcaaattttaacatgagattggaaggggcaatcattcaa

SEQ ID NO: 382411 - DNA, 475 bp, Homo sapiens
tgttcaaaagtagccaataaaatctagatattcaatagcataacatcaaaatacccaaaaaaaaaactctgacatgcaaagaagccgtaagatatatacaattaagatatatattaacaggataaaaataagtcatttataaatgacagaaaagaaggaaatttcaaggtccttaaagtaaatatattttataaatacatatagataaatacatatatatgtcaaggtacttaaatgaaaattgaacataggagaaaaatagaagttataaaatgaaaaatggggcatgtatagatgaaaaataaatattttaaataaaaattccatgagattgaataagtaatggattttaccctaacatcagaaaatttatagaacaaaatagaagmtttacaaactaaaggacaaagggtaaactaaaataagaaagccagaaactcactgatacgtcagacaatatgcagcagtgtaacat

SEQ ID NO: 382412 - DNA, 572 bp, Homo sapiens
gtcatttataaatgacagaaaagaaggaaatttcaaggtccttaaagtaaatatattttataaatacatatagataaatacatatatatgtcaaggtacttaaatgaaaattgaacataggagaaaaatagaagttataaaatgaaaaatggggcatgtatagatgaaaaataaatattttaaataaaaattccatgagattgaataagtaatggattttaccctaacatcagaaaatttatagaacaaaatagaagctttacaaactaaaggacaaagggtaaactaaaataagaaagccagaaactcactgatacgtcagacaatatgcagcagtgtaacatacatgtaattaatatctcaaaaaggatgggtaaaggaattacaggtgaataaagaatggtacactcattcctgagggcaccgaggagggaggatagctttagattyctaagggagggtattatccattcatgaaggtccaaccccatgaccaaacacctcccagtaagccccacctgcaacattggggatcaaattttaacatgagattggaaggggcaatcattcaa

SEQ ID NO: 382413 - DNA, 572 bp, Homo sapiens
gtcatttataaatgacagaaaagaaggaaatttcaaggtccttaaagtaaatatattttataaatacatatagataaatacatatatatgtcaaggtacttaaatgaaaattgaacataggagaaaaatagaagttataaaatgaaaaatggggcatgtatagatgaaaaataaatattttaaataaaaattccatgagattgaataagtaatggattttaccctaacatcagaaaatttatagaacaaaatagaagctttacaaactaaaggacaaagggtaaactaaaataagaaagccagaaactcactgatacgtcagacaatatgcagcagtgtaacatacatgtaattaatatctcaaaaaggatgggtaaaggaattacaggtgaataaagaatggtacactcattcctgagggcaccgaggagggaggatagctttagatttctaagggagggtattatccattcatgaaggtccaaccccatgaccaaacacctcccagtaagccccacctgcaayattggggatcaaattttaacatgagattggaaggggcaatcattcaa

SEQ ID NO: 382414 - DNA, 311 bp, Homo sapiens
gctgggtaggcctcacaatcatggcgcaaggtgaaaggcacgtctcacatggcagcagacaagacaagagagcttgtgcagggaaactcctctttataaaaccatcagatcttgtgagacttattcactatcagaagaacagcatgggaaatacctgcccccatgattcaattacctcccacctgttccctcccacaacatgtgggaattcaagatgagatttggctggggacacagctaaaccctctyttcagctaccctcttctctctggatctgtgagtaataaacctacttctgtgatttcccatgt

SEQ ID NO: 382415 - DNA, 311 bp, Homo sapiens
gctgggtaggcctcacaatcatggcgcaaggtgaaaggcacgtctcacatggcagcagacaagacaagagagcttgtgcagggaaactcctctttataaaaccatcagatcttgtgagacttattcactatcagaagaacagcatgggaaatacctgcccccatgattcaattacctcccacctgttccctcccacaacatgtgggaattcaagatgagatttggctggggacacagctaaaccctctcytcagctaccctcttctctctggatctgtgagtaataaacctacttctgtgatttcccatgt

SEQ ID NO: 382416 - DNA, 405 bp, Homo sapiens
taataaacctacttctgtgatttcccatgtttggttctgtggcctccatgtgtctgagctgacctacactggaacctaactctcctcctggccagggtctctgagagtggctcttgtcagaaatacacaggrcacaggtcaggcaacagtcaccaggcatctcctagtctcaacagatgttctgtgagagggaggcctggtcgtgggatgcacacctggccactgctggagtaaggaagtgtcctgtgaaagggacatgttaagcatccacaaccccctgaccagaaccccagaaaggcagggctccaattgatggtcactctccagagacaaacctcaagccctaactggaggaaaagaaaacaatgtaaaagttgaatttatcttactatttcaatgatccag

SEQ ID NO: 382417 - DNA, 365 bp, Homo sapiens
ggctcttgtcagaaatacacagggcacaggtcaggcaacagtcaccaggcatctcctagtctcaacagatgttctgtgagagggaggcctggtcgtgggatgcacacctggccactgctggagtaaggaagtgtcctgtgaaaggsacatgttaagcatccacaaccccctgaccagaaccccagaaaggcagggctccaattgatggtcactctccagagacaaacctcaagccctaactggaggaaaagaaaacaatgtaaaagttgaatttatcttactatttcaatgatccagtaaagacattctatgcctgtacaccacatattttcttcgattgtggatttattttagatagaattgta

SEQ ID NO: 382418 - DNA, 365 bp, Homo sapiens
ggctcttgtcagaaatacacagggcacaggtcaggcaacagtcaccaggcatctcctagtctcaacagatgttctgtgagagggaggcctggtcgtgggatgcacacctggccactgctggagtaaggaagtgtcctgtgaaagggacatgttaagcatccacaaccccctgaccagaaccycagaaaggcagggctccaattgatggtcactctccagagacaaacctcaagccctaactggaggaaaagaaaacaatgtaaaagttgaatttatcttactatttcaatgatccagtaaagacattctatgcctgtacaccacatattttcttcgattgtggatttattttagatagaattgta

SEQ ID NO: 382419 - DNA, 365 bp, Homo sapiens
ggctcttgtcagaaatacacagggcacaggtcaggcaacagtcaccaggcatctcctagtctcaacagatgttctgtgagagggaggcctggtcgtgggatgcacacctggccactgctggagtaaggaagtgtcctgtgaaagggacatgttaagcatccacaaccccctgaccagaaccccagaaaggcagggctccaattgatggtcactctccagagacaaacctcaagccctaactggaggaaaagaaaacaatgtaaaagttgaatttatcttactatttcaatgatccagtaaagacattctatgcctgtacaccacatattttcttygattgtggatttattttagatagaattgta

SEQ ID NO: 382420 - DNA, 358 bp, Homo sapiens
acaaatgttctatggagtgacagtatgtatgtaaccatgctatgcccattcacagatgcagtagagggaagaatttctcaaagacaactgttctaagactcmaattaaaccgtactgggtttgaaaagagaaagtccaggaattaccaaatattttagatatcagataaaagagaatgccaggtatgcaatgataatcagcaatggttgttcacacaatacatcaaatcagtatttgaattagcttttgaattacaaggacaaatggatcaagtctagactctttagtagataaatcttattaggctgagatgtgttttcccctgtttttccacaaggagattacaaatttgcaaacc

SEQ ID NO: 382421 - DNA, 358 bp, Homo sapiens
acaaatgttctatggagtgacagtatgtatgtaaccatgctatgcccattcacagatgcagtagagggaagaatttctcaaagacaactgttctaagactccaattaaaccgtactgggtttgaaaagagaaagtccaggaattaccaaatattttagatatcagataaaagagaatgccaggtatgcratgataatcagcaatggttgttcacacaatacatcaaatcagtatttgaattagcttttgaattacaaggacaaatggatcaagtctagactctttagtagataaatcttattaggctgagatgtgttttcccctgtttttccacaaggagattacaaatttgcaaacc

SEQ ID NO: 382422 - DNA, 486 bp, Homo sapiens
ggaaggaaaaccacaaatattagaaattctgtgtttgttagagaatatgccatactgttttttttttttttcacttgaaaggaaagagtatctgccattgaagattggatgtcttgttggtgatattgttgttcttatcttccacatgattactgagtttgtgcctagtctttccattactaagacraaagtgttgaagtctgcaaatataattttggatttttctagttcacctttgatttctttcatgttttacctcacgtatttggaggctctgttgttagctgcataccctaattagtaggatgtttacatcttcttgagaattgattattctattatctctcatctctgatactatttcttgttccgaactctgttgtgtctaatatcaatgtagtccttccacagccttattttagtgtttccatgatatggctttctccatatcttgatgataacctatttatatctctatatatttgg

SEQ ID NO: 382423 - DNA, 486 bp, Homo sapiens
ggaaggaaaaccacaaatattagaaattctgtgtttgttagagaatatgccatactgttttttttttttttcacttgaaaggaaagagtatctgccattgaagattggatgtcttgttggtgatattgttgttcttatcttccacatgattactgagtttgtgcctagtctttccattactaagacgaaagtgttgaagtctgcaaatataattttggatttttctagttcacctttgatttctttcrtgttttacctcacgtatttggaggctctgttgttagctgcataccctaattagtaggatgtttacatcttcttgagaattgattattctattatctctcatctctgatactatttcttgttccgaactctgttgtgtctaatatcaatgtagtccttccacagccttattttagtgtttccatgatatggctttctccatatcttgatgataacctatttatatctctatatatttgg

SEQ ID NO: 382424 - DNA, 437 bp, Homo sapiens
aggagtattctaagtgtggcagtttttgttgccttcccctacatattaagtggaatatcttggtctatttggactcttataacaaaataacataaactgggtgactaaaaaacaacagatatttcttttttcacacttcttgaggctgtaagatctcaggtcaagatgctcccaaattcagtgttgatgagagcccatttcatggttcatagatggtgccttctttctatgtcctcacacagtggaaggcacacaagaactccattgagcttcttttataaaggcactaatccgattcataagagctcrgcccccaagacctggtcacctcccaagtgttctgctctccctgatctgtatcatatacagactctcttggattccttaccaattgcttgagagatcatagtgggtttgtggagaaaaagttttcaaga

SEQ ID NO: 382425 - DNA, 524 bp, Homo sapiens
cagttttattcccctacatgtggctcgccaattatcccaacatcatrtgttgaaaagggtgtcctttccccactttattttttgcttactttgtcgaagatcaggtggccgtaagtatttgggttaatttatgggttctctcttctggtacattagtctatgtgcgtatttttaaaccagtaccatgctgttttggtaactatggccttattgtacagtttgaaatcaagtactgtgatgcctctaggtttgttctttttgcttagccttggttgggctacatggctctcttttggttccatattaattttagaattgtttttgtaattctgtgaagaatgatggtggtattcagatggggattgcattgaatttgtagattgcctttaacagaatggtaattttcacaatattggttctacccatccacgagcatggggatgcgtttccatctgtttgtgtcatctatgatttcttttctttctttcttttttttttttcttcagagggagtttcgctcttgt

SEQ ID NO: 382426 - DNA, 524 bp, Homo sapiens
cagttttattcccctacatgtggctcgccaattatcccaacatcatgtgttgaaaagggtgtcctttccccactttattttttgcttactttgtcgaagatcaggtggccgtaagtatttgggttaatttatgggttctctcttctggtacattagtctatgtgcgtatttttaaaccagtaccatgctgttttggtarctatggccttattgtacagtttgaaatcaagtactgtgatgcctctaggtttgttctttttgcttagccttggttgggctacatggctctcttttggttccatattaattttagaattgtttttgtaattctgtgaagaatgatggtggtattcagatggggattgcattgaatttgtagattgcctttaacagaatggtaattttcacaatattggttctacccatccacgagcatggggatgcgtttccatctgtttgtgtcatctatgatttcttttctttctttcttttttttttttcttcagagggagtttcgctcttgt

SEQ ID NO: 382427 - DNA, 524 bp, Homo sapiens
cagttttattcccctacatgtggctcgccaattatcccaacatcatgtgttgaaaagggtgtcctttccccactttattttttgcttactttgtcgaagatcaggtggccgtaagtatttgggttaatttatgggttctctcttctggtacattagtctatgtgcgtatttttaaaccagtaccatgctgttttggtaactatggccttattgtacagtttgaaatcaagtactgtgatgcctcyaggtttgttctttttgcttagccttggttgggctacatggctctcttttggttccatattaattttagaattgtttttgtaattctgtgaagaatgatggtggtattcagatggggattgcattgaatttgtagattgcctttaacagaatggtaattttcacaatattggttctacccatccacgagcatggggatgcgtttccatctgtttgtgtcatctatgatttcttttctttctttcttttttttttttcttcagagggagtttcgctcttgt

SEQ ID NO: 382428 - DNA, 425 bp, Homo sapiens
ggattgcattgaatttgtagattgcctttaacagaatggtaattttcacaatattggttctacccatccacgagcatggggatgcgtttccatctgtttgtgtcatctatgatttcttttctttctttcttttttttttttcttcagagggagtttygctcttgtcgctgaggtgggagtgcaatggtgtgatctcggctcactacaacttctgcctcccaggttcaagcgattctcctgcctcagcttcccgagtagctgggattataggcatgtgccaacatgcttggctccaactatgatttctttcagcagtgttttgtaattttcatcgtagaggtcttttgattcctttgctaggtatattcctaagtttttttttttttttttttttttttttgcagctattgtaaaaggggttgagt

SEQ ID NO: 382429 - DNA, 425 bp, Homo sapiens
ggattgcattgaatttgtagattgcctttaacagaatggtaattttcacaatattggttctacccatccacgagcatggggatgcgtttccatctgtttgtgtcatctatgatttcttttctttctttcttttttttttttcttcagagggagtttcgctcttgtcgctgaggtgggagtgcaatggtgtgatctcggctcactacaacttctgcctcccaggttcaagcgattctcctgcctcagcttcccgagtagctgggattataggcatgtgccaacatgcttggctccaactatgatttctttcagcagtgttttgtaattttcatcgtagaggtcttttgattcctttgctaggtatattcctaagttttttkttttttttttttttttttttgcagctattgtaaaaggggttgagt

SEQ ID NO: 382430 - DNA, 485 bp, Homo sapiens
ccagtgatagtttgacttcctttttaccgatttggatttcctctgtttccttcttttgtctgattgttctggcaagcacttccagtactatgttgaagaggactggtgagagtaggctcctcatcttgttctagttctcagagagaatgctttcaccttttccccattcagtattatgttggctgtgggtttgtcatagacggsttttattacattaaggtatgtcccttgtatgcctattttgctgagagctttaatcataaagcaatgctagattttgtcgaatgctttttctgcatctgttgatataatcatttgagttttttttaattctgtttatttggtatatcacatttattgacttgcatatgttaaaccattcctgtatcactggtatgaaacccacttgatcatggtggattatctttttgatatgttgttggattcagttagatagtattttgttaaggattttggcatctgtg

SEQ ID NO: 382431 - DNA, 539 bp, Homo sapiens
tcaaataaccaactttttgttttatttatgttttgtatttgttgttgttgttgttgtgtcaatttcatttagttctgctctgatcttggttatttcctttgtttgctgggattgggtttggcttgttcctgcttctctagttccctgagatgtgaacttagattgtctgtttgtgctctttcagactttttgacataggtgtttagggctacaaackttcctcttcgcactgcctttgctgtctcccagaggtctgggtaggttgtgtcatccagttcgaagaaattttttacatttccatcttgatttcatttttcacccaatgctcattcaggagcaggttatttaatttccatgtatttgcatggttttgaagattccttttggagttgattttcagttttattccactgtgatctgagagagtgcatgatacaatttcaattttcttaaatttattgagactcgttttatggcctatcatatggtctatcttggagaaaattccatgtgctgtggaatagaatgtgtattctgtg

SEQ ID NO: 382432 - DNA, 539 bp, Homo sapiens
tcaaataaccaactttttgttttatttatgttttgtatttgttgttgttgttgttgtgtcaatttcatttagttctgctctgatcttggttatttcctttgtttgctgggattgggtttggcttgttcctgcttctctagttccctgagatgtgaacttagattgtctgtttgtgctctttcagactttttgacataggtgtttagggctacaaactttcctcttcgcactgcctttgctgtctcccagaggtctgggtaggttgtgtcatccagttcgaagaaattttttacatttccatcttgatttcatttttcacccaatgctcattcaggagcaggttatttaatttccatgtatttgcatggttttgaagattccttttggagttgattttcagttttattccactgtgatctgagagagtgcrtgatacaatttcaattttcttaaatttattgagactcgttttatggcctatcatatggtctatcttggagaaaattccatgtgctgtggaatagaatgtgtattctgtg

SEQ ID NO: 382433 - DNA, 552 bp, Homo sapiens
ttacaaccaacattagtattaaaaagtgaggtaccattgctttcatcatgctctttgttgcctctatactttgttttttttttgtttttgctttttaacttgtatttttgttttatagctcttgtgtgatttatgctttartgaagttctgttttgatgtgtttccagaatttgtttcatgatttagagctccttttagcagttcttacagtgctggtttggtaatggcaaattctgtcagcatttgtttgtctgaatatgactgtatctttccttcatatatgatgtttagttttgctggatacaaaattcttggctgataattgttttgtttgaggaggctgaagaaagtgccccaattccatttagcttgtaaggtttctgctgcaaaatctgctgttagtttgataggttttcctttataggttacctagtgcttctgtctcacagcccttaagattatttcctttgtcttaactttggataacctaatgacaatgtgcctaggctaagatctttttgtggtgaatttcccaggtgttatttgtgctc

SEQ ID NO: 382434 - DNA, 552 bp, Homo sapiens
ttacaaccaacattagtattaaaaagtgaggtaccattgctttcatcatgctctttgttgcctctatactttgttttttttttgtttttgctttttaacttgtatttttgttttatagctcttgtgtgatttatgctttagtgaagttctgttttgatgtgtttccagaatttgtttcatgatttagagctccttttagcagttcttacagtgctggtttggtaatggcaaattctgtcrgcatttgtttgtctgaatatgactgtatctttccttcatatatgatgtttagttttgctggatacaaaattcttggctgataattgttttgtttgaggaggctgaagaaagtgccccaattccatttagcttgtaaggtttctgctgcaaaatctgctgttagtttgataggttttcctttataggttacctagtgcttctgtctcacagcccttaagattatttcctttgtcttaactttggataacctaatgacaatgtgcctaggctaagatctttttgtggtgaatttcccaggtgttatttgtgctc

SEQ ID NO: 382435 - DNA, 552 bp, Homo sapiens
ttacaaccaacattagtattaaaaagtgaggtaccattgctttcatcatgctctttgttgcctctatactttgttttttttttgtttttgctttttaacttgtatttttgttttatagctcttgtgtgatttatgctttagtgaagttctgttttgatgtgtttccagaatttgtttcatgatttagagctccttttagcagttcttacagtgctggtttggtaatggcaaattctgtcagcatttgtttgtctgaatatgactgtatctttccttcatatatgatgtttagttttgctggatacaaaattcttggctgataattgttttgtttgaggaggctgaagaaagtgccccaatyccatttagcttgtaaggtttctgctgcaaaatctgctgttagtttgataggttttcctttataggttacctagtgcttctgtctcacagcccttaagattatttcctttgtcttaactttggataacctaatgacaatgtgcctaggctaagatctttttgtggtgaatttcccaggtgttatttgtgctc

SEQ ID NO: 382436 - DNA, 552 bp, Homo sapiens
ttacaaccaacattagtattaaaaagtgaggtaccattgctttcatcatgctctttgttgcctctatactttgttttttttttgtttttgctttttaacttgtatttttgttttatagctcttgtgtgatttatgctttagtgaagttctgttttgatgtgtttccagaatttgtttcatgatttagagctccttttagcagttcttacagtgctggtttggtaatggcaaattctgtcagcatttgtttgtctgaatatgactgtatctttccttcatatatgatgtttagttttgctggatacaaaattcttggctgataattgttttgtttgaggaggctgaagaaagtgccccaattccatttagcttgtaaggtttctgctgcaaaatctgctgttagtttgataggttttcctttataggttacctagtgcttctgtctcacagcccttaagattatttcctttgtcttaactttggataacctaatgacaatgtgcctaggctaagatctttttgtgrtgaatttcccaggtgttatttgtgctc

SEQ ID NO: 382437 - DNA, 392 bp, Homo sapiens
tgggcttcacctttctctggcccctccctgattagcttaataactaacctgaattctttttcagataaatcagtgattccttctttgtttggatccattggtgatgaactggtgtgattatttgggggttgttgaagagtcttgttttgtcagattaccagggttggtctcctggttccttctcatttaggtagactctgtcagaggaaagktctagggctgaagactgttgttcagactcttttgtcgcacggagtgttcccttgatgtagtactctcccacttttcctatgggcatggcttcctgtgagccaaagtgcattgattgttgtctctcctctgggtctagccacccagcaggtctacctggctttgggctggtactaggggtt

SEQ ID NO: 382438 - DNA, 392 bp, Homo sapiens
tgggcttcacctttctctggcccctccctgattagcttaataactaacctgaattctttttcagataaatcagtgattccttctttgtttggatccattggtgatgaactggtgtgattatttgggggttgttgaagagtcttgttttgtcagattaccagggttggtctcctggttccttctcatttaggtagactctgtcagaggaaagttctagggctgaagactgttgttcagactcttttgtcrcacggagtgttcccttgatgtagtactctcccacttttcctatgggcatggcttcctgtgagccaaagtgcattgattgttgtctctcctctgggtctagccacccagcaggtctacctggctttgggctggtactaggggtt

SEQ ID NO: 382439 - DNA, 392 bp, Homo sapiens
tgggcttcacctttctctggcccctccctgattagcttaataactaacctgaattctttttcagataaatcagtgattccttctttgtttggatccattggtgatgaactggtgtgattatttgggggttgttgaagagtcttgttttgtcagattaccagggttggtctcctggttccttctcatttaggtagactctgtcagaggaaagttctagggctgaagactgttgttcagactcttttgtcgcacrgagtgttcccttgatgtagtactctcccacttttcctatgggcatggcttcctgtgagccaaagtgcattgattgttgtctctcctctgggtctagccacccagcaggtctacctggctttgggctggtactaggggtt

SEQ ID NO: 382440 - DNA, 565 bp, Homo sapiens
cttctttgtttggatccattggtgatgaactggtgtgattatttgggggttgttgaagagtcttgttttgtcagattaccagggttggtctcctggttccttctcatttaggtagactctgtcagaggaaagttctagggctgaagactgttgttcagactcttttgtcgcacggagtgttcccttgatgtagtactctcccacttttcctatgggcatggcttcctgtgagccaaagtgcattgattgttgtctctcctctgggtctagccacccagcaggtctacctggctttgggctggtactaggggttgtctgcatagagccctgtgatgtgaaccatctatgggtctctcagccatggataccagcgcctgttccagtggaggtggtgaagggtgcaatagactctgtgagggtcyttagctttagtggtttaatgctctatatttgtgctggttggcctcctgccaggaggtgttgctttccagaaagcatcagctgtagtagcatggaggaactggcagcgggcagggccctaggactcccaagattatatgtcctt

SEQ ID NO: 382441 - DNA, 510 bp, Homo sapiens
tttagtggtttaatgctctatatttgtgctggttggcctcctgccaggaggtgttgctttccagaaagcatcagctgtagtagcatggaggaactggcagcgggcagggccctaggactcccaagattatatgtcctttgtcttccactaccaacttaaacatttgtgagaatttcaatatcagaaatttatgtgtaatcgaatttattctggtagcctaaattctggtagcttattttcttatatgcttcaatctttataatttagttctcacatgagagagatctaatattggaaatactttcaatctgtatgtttatgtatttattctagttgtcctggmacaaggttatcaatgttgctgcgtgaccagccattggcttttcacatttacagctcctctgaattttttcttgcctcatttctggtgctgggaaattctgatattttctcctcatctccattgtacattttagggattcttgaaacttgtgatgcacaaacatccac

SEQ ID NO: 382442 - DNA, 556 bp, Homo sapiens
tggtagcctaaattctggtagcttattttcttatatgcttcaatctttataatttagttctcacatgagagagatctaatattggaaatactttcaatctgtatgtttatgtatttattctagttgtcctggcacaaggttatcaatgttgctgygtgaccagccattggcttttcacatttacagctcctctgaattttttcttgcctcatttctggtgctgggaaattctgatattttctcctcatctccattgtacattttagggattcttgaaacttgtgatgcacaaacatccacaccttccacataagtaaaatattttacttagatattttctagcagacactgagttctcatgagaaatcctcagtctctttatttggaacacccccaccccagtattccatatggagtagttatgtgtagaatgtgattacttcattaatatgtcgaagtatgggtacattttgaacacatttgtgaacttgtaatccctttcttgatgaatagtacctgcggatgagcagaattgatattttctctggagcagtaa

SEQ ID NO: 382443 - DNA, 556 bp, Homo sapiens
tggtagcctaaattctggtagcttattttcttatatgcttcaatctttataatttagttctcacatgagagagatctaatattggaaatactttcaatctgtatgtttatgtatttattctagttgtcctggcacaaggttatcaatgttgctgcgtgaccagccattggcttttcacatttacagctcctctgaattttttcttgcctcatttctggtgctgggaaattctgatattttctcctcatctccattgtacattttagggattcttgaaacttgtgatgcacaaacatccacaccttccacataagtaaaatattttacttagatattttctagcagacactgagttctcatgagaaatcctcagtctctttatttggaacacccccaccccagtattccatatggagtagtyatgtgtagaatgtgattacttcattaatatgtcgaagtatgggtacattttgaacacatttgtgaacttgtaatccctttcttgatgaatagtacctgcggatgagcagaattgatattttctctggagcagtaa

SEQ ID NO: 382444 - DNA, 431 bp, Homo sapiens
ccacaccttccacataagtaaaatattttacttagatattttctagcagacactgagttctcatgagaaatcctcagtctctttatttggaacacccccaccccagtattccatatggagtagttatgtgtagaatgtgattacttcattaatatgtcgaagtatgggtacattttgaacacatttgtgaacttgtaatccctttcttgatgaatagtacctgcggatgagcagaattgatattttctytggagcagtaagttagcactggtagaatctgttctgtaatcccaggtccctgggctccagtgtcaatgcttcctccttagatcctccctgaccctgtaaatttacctcagtctctatttcttaatccaatagctatttcaattgatcttcaattactttgcatgtggccagatattatttat

SEQ ID NO: 382445 - DNA, 566 bp, Homo sapiens
aactccttctgacaggtacttgagcctcagtatttcaacatgaacaaatgcagcatctattccctatcatgagcactctaaatggcagttgagtgtttatatcaaaaaaaagtcaggaatcataatcatttagagataaaagagatcccagatctgaaaagtcagctagcttaggagtttcaagactttaggatttcacaaatcaataaaattaaaaagaaaaaaatgtaaggtttaacatagagatatcacttaaacaatgactactattgtgataaaaggacattcaacggtaaaggygtgggaaatataacctcagagatgaaaatgtaatagcttgggccaagctcattaagtgtccttatttttgtgtttccaccatggatggctgacactgtcacctctggcatgagtccacatcagcaccctggaaatgcctcctatagggtaatcctgcagaaggcactagcacccccagactcgggcagacagctggctagacagtgctgctgggagagtactgcctctcaaaacccgtctctctgtaccagctgcccagtgtttct

SEQ ID NO: 382446 - DNA, 566 bp, Homo sapiens
aactccttctgacaggtacttgagcctcagtatttcaacatgaacaaatgcagcatctattccctatcatgagcactctaaatggcagttgagtgtttatatcaaaaaaaagtcaggaatcataatcatttagagataaaagagatcccagatctgaaaagtcagctagcttaggagtttcaagactttaggatttcacaaatcaataaaattaaaaagaaaaaaatgtaaggtttaacatagagatatcacttaaacaatgactactattgtgataaaaggacattcaacggtaaaggtgtgggaaatataacctcagagatgaaaatgtaatagcttgggccaagctcattaagtgtccttatttttgtgtttccaccatggatggctgacactgtcacctctggcatgagtccacatcagcaccctggaaatgcctcctatagggtaatcctgcagaaggcactagcamccccagactcgggcagacagctggctagacagtgctgctgggagagtactgcctctcaaaacccgtctctctgtaccagctgcccagtgtttct

SEQ ID NO: 382447 - DNA, 577 bp, Homo sapiens
tcacttctgcttaccatgttaacttttaaaatagttaactgcagcctgcattatgaggatagcatgccagcataaggaagttagcatcatctagagtgaccacagaagctgcatctgtccgtgtgactggacactgtatatgtccagatctctgcaaggaagagtcatgtcrtactttagagtatgactgagtcacactcagagggaagtgattcccacaagcagctcccagccagtaactgagcttggcagggatactgaggcaggccccttcctgggagaaatgggactccagaagtcctggaccctctctacttctttttatacctgcttacaatttagccaattcttttctgagctcatctctttcttacagtagtgaccaagggatgttactaacgttcagtttccccatcttttcaccttaagcttcaagttccttcagcacatcatccgcccttcaagttattcctacaacagctttaccaaatatttcaccactgcataacatagattaccatctttccaaccctcagtaacggttctcttgctgactgccatctggccctagagccac

SEQ ID NO: 382448 - DNA, 572 bp, Homo sapiens
tgttactaacgttcagtttccccatcttttcaccttaagcttcaagttccttcagcacatcatccgcccttcaagttattcctacaacagctttaccaaatatttcaccactgcataacatagattaccatctttccaaccctcagtaacggttctcttgctgactgccatctggccctagagccacatattttagggtttgtgttttggctgctccccactcctggtaccataacaccatctatcaaatctacctgtagatcatgaaattacatagggcttcaccaaaactgctatggaggtggggagagggacaattggaatgragctcagaaagctgcacttgcagagtcatttatgtaagactgtgagtgtgctgctggtccacatcagaggatggggactaccatggtctgaatgtctgtgtctctccaaatttcatatgtggaaacttaatcaaggtgatagttttaagaggtggggcatttaggagctgattaaggcatttggacagagcccttctgaatgggattaatgaccttataaaagaaatgaagatgaacaaatgaccc

SEQ ID NO: 382449 - DNA, 572 bp, Homo sapiens
tgttactaacgttcagtttccccatcttttcaccttaagcttcaagttccttcagcacatcatccgcccttcaagttattcctacaacagctttaccaaatatttcaccactgcataacatagattaccatctttccaaccctcagtaacggttctcttgctgactgccatctggccctagagccacatattttagggtttgtgttttggctgctccccactcctggtaccataacaccatctatcaaatctacctgtagatcatgaaattacatagggcttcaccaaaactgctatggaggtggggagagggacaattggaatgaagctcagaaagctgcacttgcagagtcatttatgtaagactgtgagtgtgctgcyggtccacatcagaggatggggactaccatggtctgaatgtctgtgtctctccaaatttcatatgtggaaacttaatcaaggtgatagttttaagaggtggggcatttaggagctgattaaggcatttggacagagcccttctgaatgggattaatgaccttataaaagaaatgaagatgaacaaatgaccc

SEQ ID NO: 382450 - DNA, 613 bp, Homo sapiens
aatcaaggtgatagttttaagaggtggggcatttaggagctgattaaggcatttggacagagcccttctgaatgggattaatgaccttataaaagaaatgaagatgaacaaatgaccccttccaccacatgaggacatagcaagaaggyaccatcttaaagcagagagcaagccctcaccaagacactgaatctgcagatgccttgatcttagacttcccagcctctgaaactgcaaaaaaaaaataaataaataaacttctgttgtttataaattacccaatctaaggtattttgttttagcggctcaaaggaactaagacaaaggtcatggagaccatagggtgagtctcaagacttcccccagctctacttggctggtctcctgctggtatttgccgtctgtagagaggaaaaagaactcccattttatcttgcttacctgcacttatgaaaagtcaaactgagtcatgttgagagccagggaacataggagtcggttcttcagcaggagcactcagctagttgaaggcaatgtggagtgatgggaagagagcagtgatgcagtgatgctggcaccaactcctttactatggcatccattgtaccagctg

SEQ ID NO: 382451 - DNA, 583 bp, Homo sapiens
tcatttatgtaagactgtgagtgtgctgctggtccacatcagaggatggggactaccatggtctgaatgtctgtgtctctccaaatttcatatgtggaaacttaatcaaggtgatagttttaagaggtggggcatttaggagctgattaaggcatttggacagagcccttctgaatgggattaatgaccttataaaagaaatgaagatgaacaaatgaccccttccaccacatgaggacatagcaagaaggtaccatcttaaagcagagagcaagccctcaccaagacactgaatctgcagatgccttgatcttagacttcccagcctctgamactgcaaaaaaaaaataaataaataaacttctgttgtttataaattacccaatctaaggtattttgttttagcggctcaaaggaactaagacaaaggtcatggagaccatagggtgagtctcaagacttcccccagctctacttggctggtctcctgctggtatttgccgtctgtagagaggaaaaagaactcccattttatcttgcttacctgcacttatgaaaagtcaaactgagtcatgttgagagc

SEQ ID NO: 382452 - DNA, 534 bp, Homo sapiens
aaaactgctatggaggtggggagagggacaattggaatgaagctcagaaagctgcacttgcagagtcatttatgtaagactgtgagtgtgctgctggtccacatcagaggatggggactaccatggtctgaatgtctgtgtctctccaaatttcatatgtggaaacttaatcaaggtgatagttttaagaggtggggcatttaggagctgattaaggcatttggacagagcccttctgaatgggattaatgaccttataaaagaaatgaagatgaacaaatgaccccttccaccacatgaggacatagcaagaaggtaccatcttaaagcagagagcaagccctcaccaagacactgaatctgcagatgccttgatcttagacttcccagcctctgaaactgcaaaaaaaaaataaataaataaacttctrttgtttataaattacccaatctaaggtattttgttttagcggctcaaaggaactaagacaaaggtcatggagaccatagggtgagtctcaagacttcccccag

SEQ ID NO: 382453 - DNA, 546 bp, Homo sapiens
tcttgcttacctgcacttatgaaaagtcaaactgagtcatgttgagagccagggaacataggagtcggttcttcagcaggagcactcagctagttgaaggcaatgtggagtgatgggaagagagcagtgatgcagtgatkctggcaccaactcctttactatggcatccattgtaccagctgccatacacctggctacttctacaccttatctctaatcactccagaatacgtattagtttccccatcttctagaaaggaaaactcagacccagagacactaagcaagtagctcaagatcacacacgttatctgtgattaagcctcagttagaactggagtcttggatttccacatttatacccttttcatgaagctacctaactttgatcctcaagttttcccatctatagcatgggactgctggactagaaatctctaagtcccctttacctcttgaattctgtgtctctaaggatgagaataacaaaactcctttgcctctagcactttccaactcaaagccctatcactctcattacatcta

SEQ ID NO: 382454 - DNA, 586 bp, Homo sapiens
aagtagctcaagatcacacacgttatctgtgattaagcctcagttagaactggagtcttggatttccacatttatacccttttcatgaagctacctaactttgatcctcaagttttcccatctatagcatgggactgctggactagaaatctctaagtcccctttacctcttgaattctgtgtctctaaggatgagaataacaaaactcctttgcctctagcactttccaactcaaagccctatcactctcattacatctaatcactgcagccagaagcattaaataaaatggaaggactgacattgggagtgggcgaggcagagaagttgggggcgtggagaaacagctctttttacataatgattgctactatgatttggttataaataaccagtgaagacaatcaggcttttctggcagtccctaattgtagtgaatgttggaatacagtgaccacccaaatgctctagactgattgggaaggtgccacttctaaatcagctgggctaartgcattgcataagctgagtatttagcttaatgattagagccagttgacgaaacacaagaatatggaagcctcc

SEQ ID NO: 382455 - DNA, 586 bp, Homo sapiens
atatggaagcctcctgctacttctcagaagataagacaatggcattccaccaccagtgtttactgtggtacccaaagggagctccagttacttccctctgtgcctataacccttggatcacctggttgcaccagacccatcctgactaaaatccctccaaaggaccaaagaggagatatggacaaaaataaaaaataaatctcatctgctctctttcctaaggacccagcagcctctatccatccgtcgttcattcactcattccacacactttcatctagcccctgctgaatgccaagcactgggctggaactctggggactgtggaggtggaataggagaatatgggctttctgtgagcagtgattgcctaaaatatatacatcaaggttgtaggatcatgtgcaccactgcactctagccggggtgacagagtgagaccctgtttcaaaaaaatwaaaaaaaaattgtaggatcatggagaaagtgtcttaagtgtttggtgctgtggacaggcaacacaggcagaaactggtggctagggaatcagagaagttttcaggagggagcatttgacttgggcttg

SEQ ID NO: 382456 - DNA, 431 bp, Homo sapiens
tggggattactttttatgtgacatcatcacaacaaagcctgactaatatattgtataaagttaattgagtactaacaacatgccaggtattgttctaagtcctttatataaagaatcccatctaatcsttacagcactgcataaggaggtatcataagtatctccattcagctgattagaattgaggcatctggtcaatccccttcatgttattcctcctcacttcctgcatccgaatgaaccaagcctcctgtgttcattagaaccacagaccaagcctgctggagaaagacagggctgtgaagatgggaatgaattggcaaacagctttggaatgacaatgttaaggccaggcaaatgctctcagtaacctcaaatgagtgttgatgttcatgaagcctgctcaaaaaagacacagaaattgacgtctt

SEQ ID NO: 382457 - DNA, 587 bp, Homo sapiens
caagaagaatcctccttgaagttttaactttcacctacaagcaagttttctcactgctctgtacagcagggtaaggacagcagcctcacagcatcagtctgaggatagaatgggttaatgcagccaggcacagtggctcatgcctgtaatcccagcactttaggaggccgaagcaggcgkatcatgaggtcaagagatcaagacaccctggccaacatggtgaaaccccgtctatactaaaatacaaaaatactagctgagtgtggtggtgcatgcctgtaggcccagctacttgggaggctgaggcaggagaattgcttgaacctgggagacggaggttgcagtgagccaagatcgcaccactgcactccagcctgggtgacagagtgagactttgtctctgccaaaaaaaaaaaaaaaagaatgggttaatgcctgagaactctttggcacagtgcccagcacaaattcagcagtcactcagtgttggctatcatctttggtgatgttggtcccaaacccagacctctgctcttgtcctcggctcatacacccacctgtatagcccatatgcactttaaacatga

SEQ ID NO: 382458 - DNA, 636 bp, Homo sapiens
gtcctcggctcatacacccacctgtatagcccatatgcactttaaacatgagtccaaaatggaatccaaaatattagatgccctcgttgccaccaccaggtttgctttcctctcaagccactgagggatccayagaagcagagaccatgatgagaacccatctttaactctgggtcgctagcacaggggcagagtaggcagtcactacatcttcagagcttgtgagttttattttgctttgttttgcaatctgtcatccccacactcttactatataagacagtgcctagccagacaagcataggtttaaatctccaccttgtcacttcttagctgtgtgaccctgagcgacaagcttgagttttctgagcctcagcacctttagctgtacagtgagaatgaacagacctcctcacaaggctgctataaagaattaacgaggctgggcatggtggctcccacctgcaatcctagcacttgaggccgaggtgggtggatcacctgaagtcaggagttcgagaccagcctgaccaacatggtgaaaccccgtctctactaataatacaaaaaattagccgggcatggtggtgggtgcctgtaatcccagctactcgggaggctgaggcaggagaatcg

SEQ ID NO: 382459 - DNA, 636 bp, Homo sapiens
gtcctcggctcatacacccacctgtatagcccatatgcactttaaacatgagtccaaaatggaatccaaaatattagatgccctcgttgccaccaccaggtttgctttcctctcaagccactgagggatccacagaagcagagaccatgatgagaacccatctttaactctgggtcgctagcacaggggcagagtaggcagtcactacatcttcagagcttgtgagttttattttgctttgttttgcaatctgtcatccccacactcttactatataagacagtgcctagccagacaagcataggtttaaatctccaccttgtcayttcttagctgtgtgaccctgagcgacaagcttgagttttctgagcctcagcacctttagctgtacagtgagaatgaacagacctcctcacaaggctgctataaagaattaacgaggctgggcatggtggctcccacctgcaatcctagcacttgaggccgaggtgggtggatcacctgaagtcaggagttcgagaccagcctgaccaacatggtgaaaccccgtctctactaataatacaaaaaattagccgggcatggtggtgggtgcctgtaatcccagctactcgggaggctgaggcaggagaatcg

SEQ ID NO: 382460 - DNA, 556 bp, Homo sapiens
cccacactcttactatataagacagtgcctagccagacaagcataggtttaaatctccaccttgtcacttcttagctgtgtgaccctgagcgacaagcttgagttttytgagcctcagcacctttagctgtacagtgagaatgaacagacctcctcacaaggctgctataaagaattaacgaggctgggcatggtggctcccacctgcaatcctagcacttgaggccgaggtgggtggatcacctgaagtcaggagttcgagaccagcctgaccaacatggtgaaaccccgtctctactaataatacaaaaaattagccgggcatggtggtgggtgcctgtaatcccagctactcgggaggctgaggcaggagaatcgcttgaaaccaaaaccgggtggcagagagaggttgcagtgagccaagattgcaccactgcactccagcctgggtgacaagagtgaaattccatctcaaaaaaaaaaaaaggaattaatgagatcactccgcacaaatcctaatgtggcatctgatacagggtgagttctagtaaatgag

SEQ ID NO: 382461 - DNA, 636 bp, Homo sapiens
gtcctcggctcatacacccacctgtatagcccatatgcactttaaacatgagtccaaaatggaatccaaaatattagatgccctcgttgccaccaccaggtttgctttcctctcaagccactgagggatccacagaagcagagaccatgatgagaacccatctttaactctgggtcgctagcacaggggcagagtaggcagtcactacatcttcagagcttgtgagttttattttgctttgttttgcaatctgtcatccccacactcttactatataagacagtgcctagccagacaagcataggtttaaatctccaccttgtcacttcttagctgtgtgaccctgagcgacaagcttgagttttctgagcctcagcaccttyagctgtacagtgagaatgaacagacctcctcacaaggctgctataaagaattaacgaggctgggcatggtggctcccacctgcaatcctagcacttgaggccgaggtgggtggatcacctgaagtcaggagttcgagaccagcctgaccaacatggtgaaaccccgtctctactaataatacaaaaaattagccgggcatggtggtgggtgcctgtaatcccagctactcgggaggctgaggcaggagaatcg

SEQ ID NO: 382462 - DNA, 636 bp, Homo sapiens
gtcctcggctcatacacccacctgtatagcccatatgcactttaaacatgagtccaaaatggaatccaaaatattagatgccctcgttgccaccaccaggtttgctttcctctcaagccactgagggatccacagaagcagagaccatgatgagaacccatctttaactctgggtcgctagcacaggggcagagtaggcagtcactacatcttcagagcttgtgagttttattttgctttgttttgcaatctgtcatccccacactcttactatataagacagtgcctagccagacaagcataggtttaaatctccaccttgtcacttcttagctgtgtgaccctgagcgacaagcttgagttttctgagcctcagcacctttagctgtacagtgagaatgaacagacctcctcacaaggctgctataaagaattaacgaggctgggcatggtggctcccacctgcaatcctagcacttgaggccgaggtgggtggatcacctgaagtcaggagttcgagaccagcctgaccaacatggtgaarccccgtctctactaataatacaaaaaattagccgggcatggtggtgggtgcctgtaatcccagctactcgggaggctgaggcaggagaatcg

SEQ ID NO: 382463 - DNA, 593 bp, Homo sapiens
acagcaggtggctgcatgcaggggcactaataattactcattttatacaaactgtttagcaacaatgttagctattctactgctgactttacgaacagagaaaatgtggccggacacmatggctcctacctgtaatcctagcactttgtaggggctgaggcagaagaagcccttgagctcaggagtttgagaccaacctgggtgacgtagtgcgacctagtctctaataaaaattaaaaaaaaaaaaaactatccaggtgtggtggtgcatgcctataatcccagctacttgggaggctgtagcaggaggatcaccagagcccaagagtttcagactgcagtgaaccatgattgctccacttcactctagcctggatgacagagcaggaccctgtccccctgccacaaaaaaagaaaagaaaagaaaagaaaaaagaaacatagaatagaaaacgtctcctggtttgcatcctggaatagagaaatgagcacaggctttcaaatcaaacagtagtgattcatatcctgcccctggcactcacccagcatctctgaacctgaatattttcatccaggttgacttaaggatgaaa

SEQ ID NO: 382464 - DNA, 593 bp, Homo sapiens
acagcaggtggctgcatgcaggggcactaataattactcattttatacaaactgtttagcaacaatgttagctattctactgctgactttacgaacagagaaaatgtggccggacacaatggctcctacctgtaatcctagcactttgtaggggctgaggcagaagaagcccttgagctcaggagtttgagaccaacctgggtgacrtagtgcgacctagtctctaataaaaattaaaaaaaaaaaaaactatccaggtgtggtggtgcatgcctataatcccagctacttgggaggctgtagcaggaggatcaccagagcccaagagtttcagactgcagtgaaccatgattgctccacttcactctagcctggatgacagagcaggaccctgtccccctgccacaaaaaaagaaaagaaaagaaaagaaaaaagaaacatagaatagaaaacgtctcctggtttgcatcctggaatagagaaatgagcacaggctttcaaatcaaacagtagtgattcatatcctgcccctggcactcacccagcatctctgaacctgaatattttcatccaggttgacttaaggatgaaa

SEQ ID NO: 382465 - DNA, 573 bp, Homo sapiens
gagaccaacctgggtgacgtagtgcgacctagtctctaataaaaattaaaaaaaaaaaaaactatccaggtgtggtggygcatgcctataatcccagctacttgggaggctgtagcaggaggatcaccagagcccaagagtttcagactgcagtgaaccatgattgctccacttcactctagcctggatgacagagcaggaccctgtccccctgccacaaaaaaagaaaagaaaagaaaagaaaaaagaaacatagaatagaaaacgtctcctggtttgcatcctggaatagagaaatgagcacaggctttcaaatcaaacagtagtgattcatatcctgcccctggcactcacccagcatctctgaacctgaatattttcatccaggttgacttaaggatgaaatggaaaaaggtttacaaagtacctggggcatagcaaaggattcaataaatgttctctcccttttcttctatattagttatctattgctaaataacaaattaacccagaacttagcagcttaaaacagcaagtgtttttctgatagtttctatgagtcaggagcccagg

SEQ ID NO: 382466 - DNA, 573 bp, Homo sapiens
gagaccaacctgggtgacgtagtgcgacctagtctctaataaaaattaaaaaaaaaaaaaactatccaggtgtggtggtgcatgcctataatcccagctacttggkaggctgtagcaggaggatcaccagagcccaagagtttcagactgcagtgaaccatgattgctccacttcactctagcctggatgacagagcaggaccctgtccccctgccacaaaaaaagaaaagaaaagaaaagaaaaaagaaacatagaatagaaaacgtctcctggtttgcatcctggaatagagaaatgagcacaggctttcaaatcaaacagtagtgattcatatcctgcccctggcactcacccagcatctctgaacctgaatattttcatccaggttgacttaaggatgaaatggaaaaaggtttacaaagtacctggggcatagcaaaggattcaataaatgttctctcccttttcttctatattagttatctattgctaaataacaaattaacccagaacttagcagcttaaaacagcaagtgtttttctgatagtttctatgagtcaggagcccagg

SEQ ID NO: 382467 - DNA, 593 bp, Homo sapiens
acagcaggtggctgcatgcaggggcactaataattactcattttatacaaactgtttagcaacaatgttagctattctactgctgactttacgaacagagaaaatgtggccggacacaatggctcctacctgtaatcctagcactttgtaggggctgaggcagaagaagcccttgagctcaggagtttgagaccaacctgggtgacgtagtgcgacctagtctctaataaaaattaaaaaaaaaaaaaactatccaggtgtggtggtgcatgcctataatcccagctacttgggaggcygtagcaggaggatcaccagagcccaagagtttcagactgcagtgaaccatgattgctccacttcactctagcctggatgacagagcaggaccctgtccccctgccacaaaaaaagaaaagaaaagaaaagaaaaaagaaacatagaatagaaaacgtctcctggtttgcatcctggaatagagaaatgagcacaggctttcaaatcaaacagtagtgattcatatcctgcccctggcactcacccagcatctctgaacctgaatattttcatccaggttgacttaaggatgaaa

SEQ ID NO: 382468 - DNA, 573 bp, Homo sapiens
gagaccaacctgggtgacgtagtgcgacctagtctctaataaaaattaaaaaaaaaaaaaactatccaggtgtggtggtgcatgcctataatcccagctacttgggaggctgtagcaggaggatcaccagagcccaagagtttcagrctgcagtgaaccatgattgctccacttcactctagcctggatgacagagcaggaccctgtccccctgccacaaaaaaagaaaagaaaagaaaagaaaaaagaaacatagaatagaaaacgtctcctggtttgcatcctggaatagagaaatgagcacaggctttcaaatcaaacagtagtgattcatatcctgcccctggcactcacccagcatctctgaacctgaatattttcatccaggttgacttaaggatgaaatggaaaaaggtttacaaagtacctggggcatagcaaaggattcaataaatgttctctcccttttcttctatattagttatctattgctaaataacaaattaacccagaacttagcagcttaaaacagcaagtgtttttctgatagtttctatgagtcaggagcccagg

SEQ ID NO: 382469 - DNA, 598 bp, Homo sapiens
gctgcagtgaggtttgagtttagctgattagaccatcaaccacaaagactayacattcaaatacttttatgtggcagaatatctaagaataattcaagctaataaaagatctagagaataattagatatattcattgttaataagagccatttaatattgtagcaaaggcaagatcagggcaggatcaaggcagataattttcaaacatgcctaatgatagtgtagaccaatggtgtttttcaattgtggctatatacattctaacacattcaattttttttaaaaagtgaagcttaggtcctattccttagaaattcagatttaactaatttggagtgggccccagacatcaatattttaactttcaagtgattctaggaaagacaggtttaggggctgtggagagacacagaatggcaagtacttagaacattcacacatcccccacctcccaagctcctaatagaaatcatttattagccagtcccctcaatgtcattggttggaatgcaattgtgtagtctttctcatcccaggactccaggcagcccctacccatgaagccaagttgacatatgaaggcatatgtgttagccc

SEQ ID NO: 382470 - DNA, 598 bp, Homo sapiens
gctgcagtgaggtttgagtttagctgattagaccatcaaccacaaagactatacattcaaatacttttatgtggcagaatatctaagaataattcaagctaataaaagatctagagaataattagatatattcattgttaataagagccatttaatattgtagcaaaggcaagatcagggcaggrtcaaggcagataattttcaaacatgcctaatgatagtgtagaccaatggtgtttttcaattgtggctatatacattctaacacattcaattttttttaaaaagtgaagcttaggtcctattccttagaaattcagatttaactaatttggagtgggccccagacatcaatattttaactttcaagtgattctaggaaagacaggtttaggggctgtggagagacacagaatggcaagtacttagaacattcacacatcccccacctcccaagctcctaatagaaatcatttattagccagtcccctcaatgtcattggttggaatgcaattgtgtagtctttctcatcccaggactccaggcagcccctacccatgaagccaagttgacatatgaaggcatatgtgttagccc

SEQ ID NO: 382471 - DNA, 598 bp, Homo sapiens
gctgcagtgaggtttgagtttagctgattagaccatcaaccacaaagactatacattcaaatacttttatgtggcagaatatctaagaataattcaagctaataaaagatctagagaataattagatatattcattgttaataagagccatttaatattgtagcaaaggcaagatcagggcaggatcaaggcagataattttcaaacatgcctaatgatagtgtagaccaatggtgtttttcaattgtggctatatacattctaacacattcaattttttttaaaaagtgaagcttaggtcctattccttagaaattcagatttaactaatttggagtgggccccagacatcaatattttaactttcaagtgattctaggaaagacaggtttaggggctgtggagagacacagaatggcaagtacttagaacattcacacatcccccacctcccaagctcctaayagaaatcatttattagccagtcccctcaatgtcattggttggaatgcaattgtgtagtctttctcatcccaggactccaggcagcccctacccatgaagccaagttgacatatgaaggcatatgtgttagccc

SEQ ID NO: 382472 - DNA, 457 bp, Homo sapiens
cacatcccccacctcccaagctcctaatagaaatcatttattagccagtcccctcaatgtcattggttggaatgcaattgtgtagtctttctcatcccaggactccaggcagcccctacccatgaagccaagttgacatatgaaggcatatgtgttagccctgacaagccacactgggcatgctttcccaaacctacaaattatcaagggtgtagaaaaatagagccctctccatgctgagcagatctcactcatgtagacaacaggtctaattacccattggaaagggccaytggaagagcacaggaaaaggtccaagatggagagggaatttacagccaagtctgataatggtttcagaacctcaaaatacttcacctggagaggacccatgggcaatatacatgaaggagttctcctcttcctgagtccctccaaagagttgtgtaaagcccaa

SEQ ID NO: 382473 - DNA, 594 bp, Homo sapiens
gtgttttccctggaactggcattgtattattaatatcctacaaatgggagacatgyatcccctggtctcatacctggaatatcaaaatggtacttcattaacagtgtcaaagcaaaagtctgatggctctgactgctcttgtgagtaggggtactcatattccctttaagcccttcccccaaattggcctagaggtccagggggttccacatgggctcaacattctctgattaactctcccctcatatcaacaacttcctcctatcaagcttgacatcttgtcctatttcttcctattctaggtgtaggcaagtctagtttgctcttcagctactctatccctctcctgcatattgactcttgaattcttgatccctagtagcttctcacagtctgtgaaatggagcatggaaccactacatagaaacaggaaggttctgccctgtactctcagctcttaagggcacagtcacaagaagaccatttttaaattctcattgtgtaacacccttacacattccacatgcatcatagcacataactctgacaataaactacaaggtaagcaactaattattccctttttaatatttt

SEQ ID NO: 382474 - DNA, 594 bp, Homo sapiens
gtgttttccctggaactggcattgtattattaatatcctacaaatgggagacatgtatcccctggtctcatacctggaatatcaaaatggtacttcattaacagtgtcaaagcaaaagtctgatggctctgmctgctcttgtgagtaggggtactcatattccctttaagcccttcccccaaattggcctagaggtccagggggttccacatgggctcaacattctctgattaactctcccctcatatcaacaacttcctcctatcaagcttgacatcttgtcctatttcttcctattctaggtgtaggcaagtctagtttgctcttcagctactctatccctctcctgcatattgactcttgaattcttgatccctagtagcttctcacagtctgtgaaatggagcatggaaccactacatagaaacaggaaggttctgccctgtactctcagctcttaagggcacagtcacaagaagaccatttttaaattctcattgtgtaacacccttacacattccacatgcatcatagcacataactctgacaataaactacaaggtaagcaactaattattccctttttaatatttt

SEQ ID NO: 382475 - DNA, 580 bp, Homo sapiens
ctggtactcatagttcactaagagtttttaggacagcaatgatcttagaagagaatcagatcaaagttctgagtgttttccctggaactggcattgtattattaatatcctacaaatgggagacatgtatcccctggtctcatacctggaatatcaaaatggtacttcattaacagtgtcaaagcaaaagtctgatggctctgactgctcttgtgagtaggggtactcatattccctttaagcccttcccccaaattggcctagaggtccagggggttccacatgggctcaacattctctgattaactctcccctcatatcaacaacttcctcctatcaagcttgacatcttgtsctatttcttcctattctaggtgtaggcaagtctagtttgctcttcagctactctatccctctcctgcatattgactcttgaattcttgatccctagtagcttctcacagtctgtgaaatggagcatggaaccactacatagaaacaggaaggttctgccctgtactctcagctcttaagggcacagtcacaagaagaccatttttaaattctcattgtgtaacac

SEQ ID NO: 382476 - DNA, 647 bp, Homo sapiens
ccagaggtgatggtttttaaaatatgtctgctagatatcaaaatgagtgcatgggatttgatatatgtacacaggtaggcatagaaatagatagagatgctcaaggatatgtgtatatgcacatatgaatatgtgtgcatgtatatacatgtatccatttccaaactctgtcttttaggaggatatagaaacaatatcaccccagtaacaataaacaccctagtgcccacatcttgatttctccatatcattttctgctagaaggaaccctggtctccttggaaaaatggatgattccaaggcttggacagggaatacacaagatgagtctgacatatctcatgttgaaaagtaacaaactactcaaagaataatgacagcatgtcaaaaggacacaagaaccaacttaaagggctcccactcaccaaatctagggcaacctaaatatcatgataagtatggataccctcagttcactgagagatttgaggtcagggacagtcttagaagacaatagaaaacagtgttctgagtgttgcccctagaatgagcattgtgttaatatcatagaaatgggacacatgtgtcccmaggtcccatacctggaatgtaaaaatagtatccattaacagcgtcaagtaaaagat

SEQ ID NO: 382477 - DNA, 619 bp, Homo sapiens
gtgtatatgcacatatgaatatgtgtgcatgtatatacatgtatccatttccaaactctgtcttttaggaggatatagaaacaatatcaccccagtaacaataaacaccctagtgcccacatcttgatttctccatatcattttctgctagaaggaaccctggtctccttggaaaaatggatgattccaaggcttggacagggaatacacaagatgagtctgacatatctcatgttgaaaagtaacaaactactcaaagaataatgacagcatgtcaaaaggacacaagaaccaacttaaagggctcccactcaccaaatctagggcaacctaaatatcatgataagtatggataccctcagttcactgagagatttgaggtcagggacagtcttagaagacaatagaaaacagtgttctgagtgttgcccctagaatgagcattgtgttaatatcatagaaatgggacacatgtgtccccaggtcccatacctggaatgtaaaaatagtatccattaacagcrtcaagtaaaagattataacctattataaaaactagaaacccgggctgggcatggtgactcaagcctgtaaatctcagcacattgggaggctgagg

SEQ ID NO: 382478 - DNA, 578 bp, Homo sapiens
attctatgccgatgtcaataatataaacaagtgttcttccttacagtagaaaaccaacaatacatttagaaagattacagaatttttttaaaaaacatgatttgacaaccacagtaataactgattcagggaagggctactaataaatgctaaaaccaatggatgcaagtttgagaaataataggatatcttcatagtctcaaagtatttctccaaaggaaatacatattaattataaagagtaaaayggtggacagcaccgtaaccccatgaacaaagttaacattgctagtaatgggactaattaatagcacctgcccctcatgccttgagctacaggagctcagcatggcatcagtgatattcctgcccaacatgcataacagaatctaatcatggaaaagcaccaaaaaaccgaagttgaaggacaattataccaagtaactggccaggtaatcttcacaaaggtctgtgtcaagaaagacaaagcagcagaaactttcaaattgcaggggacagctaaatgcaacacatggtcttggattgttttgttataaaggacattattgtgaagtctg

SEQ ID NO: 382479 - DNA, 578 bp, Homo sapiens
tgttttgttataaaggacattattgtgaagtctgaataaagtctgtagatgagaygagagaattccctgtttttaggaaatatgcaacaaaatattcaagagtaaatgggcatcacaccttagatgactcagaagaaaaagggaagaacagagataagtgatacagtgaaaccctgatgtttgggggatctgggtaaacaatatttagaaattctttgtaccgtgttgcaaggtttctgtaagtctgaaactatgtgagaacaagtgtttaaaaataaagcataaaatgtaaaacatctcttctgcaaattctttggcactcctcccatgaagaggtaaagtctaatcacctccccttgaatatgatttggacgtaatgactcatttctaaccaatgaatatggtgtatggatgcctaattataaaagaagattcagcatgtatcagaacaaggaagttctggggcatgtgttttgtgtaattcatgctctgtgtggttcatgtgcccattgctcagataaagaagctggagctcagaaaggtgcccaaattcagaagactaataaatggtggagcca

SEQ ID NO: 382480 - DNA, 578 bp, Homo sapiens
tgttttgttataaaggacattattgtgaagtctgaataaagtctgtagatgagacgagagaattccctgtttttaggaaatatgcaacaaaatattcaagagtaaatgggcatcacaccttagatgactcagaagaaaaagggaagaacagagataagtgatacagtgaaaccctgatgtttgggggatctgggtaaacaatrtttagaaattctttgtaccgtgttgcaaggtttctgtaagtctgaaactatgtgagaacaagtgtttaaaaataaagcataaaatgtaaaacatctcttctgcaaattctttggcactcctcccatgaagaggtaaagtctaatcacctccccttgaatatgatttggacgtaatgactcatttctaaccaatgaatatggtgtatggatgcctaattataaaagaagattcagcatgtatcagaacaaggaagttctggggcatgtgttttgtgtaattcatgctctgtgtggttcatgtgcccattgctcagataaagaagctggagctcagaaaggtgcccaaattcagaagactaataaatggtggagcca

SEQ ID NO: 382481 - DNA, 578 bp, Homo sapiens
tgttttgttataaaggacattattgtgaagtctgaataaagtctgtagatgagacgagagaattccctgtttttaggaaatatgcaacaaaatattcaagagtaaatgggcatcacaccttagatgactcagaagaaaaagggaagaacagagataagtgatacagtgaaaccctgatgtttgggggatctgggtaaacaatatttagaaattctttgtaccgtgttgcaaggtttctgtragtctgaaactatgtgagaacaagtgtttaaaaataaagcataaaatgtaaaacatctcttctgcaaattctttggcactcctcccatgaagaggtaaagtctaatcacctccccttgaatatgatttggacgtaatgactcatttctaaccaatgaatatggtgtatggatgcctaattataaaagaagattcagcatgtatcagaacaaggaagttctggggcatgtgttttgtgtaattcatgctctgtgtggttcatgtgcccattgctcagataaagaagctggagctcagaaaggtgcccaaattcagaagactaataaatggtggagcca

SEQ ID NO: 382482 - DNA, 578 bp, Homo sapiens
tgttttgttataaaggacattattgtgaagtctgaataaagtctgtagatgagacgagagaattccctgtttttaggaaatatgcaacaaaatattcaagagtaaatgggcatcacaccttagatgactcagaagaaaaagggaagaacagagataagtgatacagtgaaaccctgatgtttgggggatctgggtaaacaatatttagaaattctttgtaccgtgttgcaaggtttctgtaagtctgaaactatgtgagaacaagtgtttwaaaataaagcataaaatgtaaaacatctcttctgcaaattctttggcactcctcccatgaagaggtaaagtctaatcacctccccttgaatatgatttggacgtaatgactcatttctaaccaatgaatatggtgtatggatgcctaattataaaagaagattcagcatgtatcagaacaaggaagttctggggcatgtgttttgtgtaattcatgctctgtgtggttcatgtgcccattgctcagataaagaagctggagctcagaaaggtgcccaaattcagaagactaataaatggtggagcca

SEQ ID NO: 382483 - DNA, 559 bp, Homo sapiens
actccacagccaggctacctgggttcaagttgagctctgccactcaggagttatgtgasctcaggctggttatttagcctgccaatgccttcatttccttatctgtaaaatggggtaataaaagtgcttacctcacagggcagtgagagtgaaatgaattaatacatgtattgtacccagcacaggctgggtctccatcatgcctgctgcaattgctgctacagcaattaacattaatcctatcacactcctcttttatagccctccagccacactcctccgagggtgccaagaacaatcccatttccaagcctttgcacttgccactccctctgcctggattgctctccttcccagacattagcagccctccaatccttacttcatcaaggtctctcttcatgtggctctttggaaagtcctcccctgaccaccataaataaaacagcagcttcaccaccctactcaccctgggctttttgcaacatagcaattacccctgcctggcattatctatcctggtcagtacagcacagtgcaatgcagtgcagtatagtac

SEQ ID NO: 382484 - DNA, 559 bp, Homo sapiens
actccacagccaggctacctgggttcaagttgagctctgccactcaggagttatgtgagcwcaggctggttatttagcctgccaatgccttcatttccttatctgtaaaatggggtaataaaagtgcttacctcacagggcagtgagagtgaaatgaattaatacatgtattgtacccagcacaggctgggtctccatcatgcctgctgcaattgctgctacagcaattaacattaatcctatcacactcctcttttatagccctccagccacactcctccgagggtgccaagaacaatcccatttccaagcctttgcacttgccactccctctgcctggattgctctccttcccagacattagcagccctccaatccttacttcatcaaggtctctcttcatgtggctctttggaaagtcctcccctgaccaccataaataaaacagcagcttcaccaccctactcaccctgggctttttgcaacatagcaattacccctgcctggcattatctatcctggtcagtacagcacagtgcaatgcagtgcagtatagtac

SEQ ID NO: 382485 - DNA, 559 bp, Homo sapiens
actccacagccaggctacctgggttcaagttgagctctgccactcaggagttatgtgagctcaggctggttatttagcctgccaatgccttcatttccttatctgtaaaatggggtaataaaagtgcttacctcacagggcartgagagtgaaatgaattaatacatgtattgtacccagcacaggctgggtctccatcatgcctgctgcaattgctgctacagcaattaacattaatcctatcacactcctcttttatagccctccagccacactcctccgagggtgccaagaacaatcccatttccaagcctttgcacttgccactccctctgcctggattgctctccttcccagacattagcagccctccaatccttacttcatcaaggtctctcttcatgtggctctttggaaagtcctcccctgaccaccataaataaaacagcagcttcaccaccctactcaccctgggctttttgcaacatagcaattacccctgcctggcattatctatcctggtcagtacagcacagtgcaatgcagtgcagtatagtac

SEQ ID NO: 382486 - DNA, 559 bp, Homo sapiens
actccacagccaggctacctgggttcaagttgagctctgccactcaggagttatgtgagctcaggctggttatttagcctgccaatgccttcatttccttatctgtaaaatggggtaataaaagtgcttacctcacagggcagtgagagtgaaatgaattaatacatgtattgtacccagcacaggctgggtctccatcatgcctgctgcaattgctgctacagcaattaacattaatcctatcacactcctcttttatagccctccagccacactcctcygagggtgccaagaacaatcccatttccaagcctttgcacttgccactccctctgcctggattgctctccttcccagacattagcagccctccaatccttacttcatcaaggtctctcttcatgtggctctttggaaagtcctcccctgaccaccataaataaaacagcagcttcaccaccctactcaccctgggctttttgcaacatagcaattacccctgcctggcattatctatcctggtcagtacagcacagtgcaatgcagtgcagtatagtac

SEQ ID NO: 382487 - DNA, 604 bp, Homo sapiens
tattacaaatcctgtagacactagaaggctagaatggacactacaaaaacaaaacaaacaactatatgcttctaaattctacaaattaggtgaaatagatcaattccttgaaagacagactaccgaaactcaagaagaaacagacagcttgaatacccctgtatttattaaagaaacagaagtggcacagcactttggaagacaatttggcaggttctgataaagtcaaacgtacatggaccatgtgactcggcaatcctacccttaggcatttgcacaagtgaaatgaaaacctatgctcagacaaaaagcactttgtgaattccartccacttataatttatcaaaaagtgaaaatagtccatattcctccaatgacaaaccaataagcaaaccatgtagtatttatacaatggattactatttggcaattaaaaggaataactgttgatacagtatatgaaagtagccagactcaaaaggctacatcctgaacgattccatttgtataaaattctgaaaaaaaagcaatgctagaggaacacagatcagttattgccagaagtttacaatggaaggttttattctaaagggcaaggtaatt

SEQ ID NO: 382488 - DNA, 516 bp, Homo sapiens
aagcttttaaaaaattctaagcaagggcctcacctaatttcataaaaggttgcgtagaaccaaccattgctgcaaacgatgtgctgccctgagatgtgaggatcccagtggtccctctgggtcaacagcagctaccgcagstgagcccaaattctgatacattatctatctacaatcattatttttaacaatttatatcaatgctacccataaggcacagagaagcagaaatgtttatgtggcctcctgccaaaaacaatcacttgcacttatttctagtactccagaagacagtaatagaagtttttcaatttagaaaaacatttacagcaaagaaaaaaatctctgtaaacttcctgcttaaccaatctagtgaattgtgatgagccatataaattcatttagccaccttatgaaagacttaatccaaagtcacttctaacttctagaagagctaatgtattataatcacagttgtgaaagactcaaaggccagaaatgtcaaggtgtggtcta

SEQ ID NO: 382489 - DNA, 572 bp, Homo sapiens
catcctggttttgccacctgctcaccccactgcctgtccttctctccaaggaggcttctgccagccctgcttgtccttccctagaaaaggaaagccttttcctgtctgatcctgagacacctgtagattgagtttggaatattctccctattgcaatagtattkttgaataagttttatttttccctacctctggttgatttttaattaataccagtaagcttggatgaaagcctgcacaccttaggtgtgtgtgtgtgtgtgtgtatgtatgtactttagcattatcatgaaagtaataacagtaaaatcaaacaaacacagatggataagcaatatgttggactagtatgaaaatggcattgccagcagtgatatgattttttttcaaaatggtacactttttgaagtataatcttattttaacctaaaatcttactatcagaaaatgcagtgtacattaaaatgttctgaactgcttttattcatatattaaatggttgtactcaaatatctacaaatttgtttttcacttatgtaattgtcttatagaatgttcaaaagtcttgcaga

SEQ ID NO: 382490 - DNA, 526 bp, Homo sapiens
acaaacacagatggataagcaatatgttggactagtatgaaaatggcattgccagcagtgatatgattttttttcaaaatggtacactttttgaagtataatcttattttaacctaaaatcttactatcagaaaatgcagtgtacattaaaatgttctgaactgcttttattcatatattaaatggttgtactcaaatatctacaaatttgtttttcacttatgtaattgtcttatagaatgttcaaaagtcttgcagaatgtgagacaattttctattgaatacgatygctttatcattgcaagacatcaaacatccctgtttcctgccaaataaatgtacaatagcaataaatgtaaagatgtgttttgtaaaaaagatatatttttgagttacaaaacaaggattttaaaacttgaattgttacagtgaatatgtcttaatacaggccagagtcatttaggtaaaaaattacctcatatctattctttgcagtatcacttaaaggtgtttatttagcggcaaa

SEQ ID NO: 382491 - DNA, 491 bp, Homo sapiens
ttttaaaaattgtgaagattaccaaagtgtgaaaccaagacacaaagtgagcacaggctgtttgttaaatggcaccaatagacttgcttcaccagggttgtcamaaacatctcatttgtaaataaagaaaaaatgttcctatctgtgaagcacaataaagagaagtgcaataaaatatgtttgtattaatttggttaactttattccaacttaatgtaaattagttttaaaacagtttataaaattcttacatgaacctggcaaatttagagcaataataacattatttaaattagaaaagtcttttttaaaaaggataaataacaaatgtctcattggaattattaaagttgtttcaagttcagctctgaggttcttagaaactaaagtaaaaaagtatgaccagtttctgaagtcaagataaaatcatacaatctttaacttagaaaattatcttctgtgttgtgtcctaagcataaacaaatgtaagg

SEQ ID NO: 382492 - DNA, 491 bp, Homo sapiens
ttttaaaaattgtgaagattaccaaagtgtgaaaccaagacacaaagtgagcacaggctgtttgttaaatggcaccaatagacttgcttcaccagggttgtcaaaaacatctcatttgtaaataaagaaaaaatgttcctatctgtgaagcacaataaagagaagtgcaataaaatatgtttgtattaatttggttaactttattccaacttaatgtaaattagttttaaaacagtttataaaattcttamatgaacctggcaaatttagagcaataataacattatttaaattagaaaagtcttttttaaaaaggataaataacaaatgtctcattggaattattaaagttgtttcaagttcagctctgaggttcttagaaactaaagtaaaaaagtatgaccagtttctgaagtcaagataaaatcatacaatctttaacttagaaaattatcttctgtgttgtgtcctaagcataaacaaatgtaagg

SEQ ID NO: 382493 - DNA, 491 bp, Homo sapiens
ttttaaaaattgtgaagattaccaaagtgtgaaaccaagacacaaagtgagcacaggctgtttgttaaatggcaccaatagacttgcttcaccagggttgtcaaaaacatctcatttgtaaataaagaaaaaatgttcctatctgtgaagcacaataaagagaagtgcaataaaatatgtttgtattaatttggttaactttattccaacttaatgtaaattagttttaaaacagtttataaaattcttacatgaacctggcaaatttagagcaataataamattatttaaattagaaaagtcttttttaaaaaggataaataacaaatgtctcattggaattattaaagttgtttcaagttcagctctgaggttcttagaaactaaagtaaaaaagtatgaccagtttctgaagtcaagataaaatcatacaatctttaacttagaaaattatcttctgtgttgtgtcctaagcataaacaaatgtaagg

SEQ ID NO: 382494 - DNA, 603 bp, Homo sapiens
tttgtgtgcataggataagaataattgggttaaataaaattcacttttaatctaaaatgtcattcattagtttgaccaactttccttaccactrgccacttggtccttgtcttgtttgaccagggttgtcaaacaaggtttgttgtttccttctttgaaggaaagagtcagtgtttcttccattccaatgcatccacttgaggaatttttaataaaatgggcaatgaatgggcagcagaagaagttacaggcctgctgatcaaatgctaagtaataaaccctggaaattctaaactcgtttgcatgaagaccttgcttattttgtaactattatgtattatcaaatgtatacttaattctttgaatgtgttagtatgtgttcaaagtacaccttaattttatatatatatatttaaattacataaaataaataagccactaaaaatttttaaacattttcttatatttcctttcagtatttttatgtgcatgcatctgtacttggtaatattgctgaatgcatgtttgcattgacaaagcctctccccttgcccaaactctagttgggatcctctaagccacctctcagcctcagctttcagt

SEQ ID NO: 382495 - DNA, 622 bp, Homo sapiens
ctctccccttgcccaaactctagttgggatcctctaagccacctctcagcctcagctttcagtgttcatcctagtctggcccacatctctcaggtttaggaagaaacttgcaaagaatcccccactctcagtactgatcacctttgatatctgatcaaatttgttatctcccaccaccctccagatgatttctgatcagtctggcctgccttcagtaagaatcctgttcgatctgtttaacccaaatcccctttgcccctgatatttcctcttagtatccccagttgagccaattttcaaccattaaaaaaatcttggacaaaattaagttcagataggttccagagtgcttatgttcagttcttggctttytgaagacctggcatatcctctttaaattgcctcaatacaagaaaatacaaaatggaaagaagtagacattagaaattggaaaaatggagaaatacaggaatgaacataagtttctatttcaagtaattaggtaaattgtaagatgtttatatttaactttttctcattagctttagccccttgaatctttgagaacatgttattactatagttatcgaatgttatattttttattttaacgtagaatggt

SEQ ID NO: 382496 - DNA, 622 bp, Homo sapiens
ctctccccttgcccaaactctagttgggatcctctaagccacctctcagcctcagctttcagtgttcatcctagtctggcccacatctctcaggtttaggaagaaacttgcaaagaatcccccactctcagtactgatcacctttgatatctgatcaaatttgttatctcccaccaccctccagatgatttctgatcagtctggcctgccttcagtaagaatcctgttcgatctgtttaacccaaatcccctttgcccctgatatttcctcttagtatccccagttgagccaattttcaaccattaaaaaaatcttggacaaaattaagttcagataggttccagagtgcttatgttcagttcttggctttctgaagacctggcatatcctctttaaattgcctcaatacaagaaaatacaaaatggaaagaagtagacattagaaattggaaaaatggagaaatacaggaatgaacataagtttctatttcaagtaattaggtaaattgtaagatgtttatatttaactttttctcattrgctttagccccttgaatctttgagaacatgttattactatagttatcgaatgttatattttttattttaacgtagaatggt

SEQ ID NO: 382497 - DNA, 576 bp, Homo sapiens
attcttaaagtgtgatttacttttatttactttttggtgcagtaattgcagttcatgagtcaatgttgatgtcatataaaccttaatttttaatgtttcattgtagtgatgtctctgtagcagcaaacatttaagttatttgttatacttaaatgtttaartcactgttagtgattagcttattttgccttccttgaagcaatttgtcctaaatttccatatgtttgcatttgtttttgctgttctaaaattccttagttgctggctttgaccttttatgttgctgagttttacacatctattttctcaactgccatatcctaggaggcttggagtacccataatacagtgagcccaccttcctggtccccagacatttcaggaggtcgggaaatttttaaacccaggcagcttcctggcagtgccatttggagcatcaaaatggtaaataaaattgcatttacgttcatatatcatttctgtctgatttgttttgccctactgggtgtaaagaattaaatctttcttttctagattgagcttccagaaacactttttaaatctaaaaattttaat

SEQ ID NO: 382498 - DNA, 576 bp, Homo sapiens
attcttaaagtgtgatttacttttatttactttttggtgcagtaattgcagttcatgagtcaatgttgatgtcatataaaccttaatttttaatgtttcattgtagtgatgtctctgtagcagcaaacatttaagttatttgttatacttaaatgtttaagtcactgttagtgattagcttattttgccttccttgaagcaatttgtcctaaatttccatatgtttgcatttgtttttgctgttctaaaattccttagttgctggctttgaccttttatgttgctgagttttacacatctattttctcaactgccatatcctaggaggcttggagtacccataatacagtgagcccaccttcctggtccccagacatttcaggaggtcgggaaatttttaaacccaggcagcttcctggcagtgccatttggagcatcaaartggtaaataaaattgcatttacgttcatatatcatttctgtctgatttgttttgccctactgggtgtaaagaattaaatctttcttttctagattgagcttccagaaacactttttaaatctaaaaattttaat

SEQ ID NO: 382499 - DNA, 602 bp, Homo sapiens
aaatttttaaacccaggcagcttcctggcagtgccatttggagcatcaaaatggtaaataaaattgcatttacrttcatatatcatttctgtctgatttgttttgccctactgggtgtaaagaattaaatctttcttttctagattgagcttccagaaacactttttaaatctaaaaattttaatgtaaagaaataatatgcttgcatttaaaaatcaagtatacatttttaatacctctttttatggttaattccttttgttgtgattactaccggttttatgagggagaagtccttgacatgtagaccaaaaggtaattaaggaccttttcattcatgatatcataaaactttgttgcttagaaaaaagcaaaagaaaaaactccattaatttattatgttcttatggagaagaaataccaaaattgtggcagatttcattgtctgtttaataccttaaaatgacaaggctttttcccccatgacattggttgatggctgtgccagtccttgaagtgagttaagtagtgtgatgcattttgaagagaaaaaaattaatttgaaaaagtattaactcaaaagttaaaatacttcattgact

SEQ ID NO: 382500 - DNA, 602 bp, Homo sapiens
aaatttttaaacccaggcagcttcctggcagtgccatttggagcatcaaaatggtaaataaaattgcatttacgttcatatatcatttctgtctgatttgttttgccctactgggtgtaaagaattaaatctttcttttctagattgagcttccagaaacactttttaaatctaaaaattttaatgtaaagaaataatatgcttgcatttaaaaatcaagtatacatttttaatacctctttttatggttaattccttttgttgtgattactaccggttttatgagggagaagtccttgacatgtagaccaaaaggtaattaaggaccttttcattcatgatatcataaaactttgttgcttagaaaaaagcaaaagaaaaaactccattaatttattatgttcttatggagaagaaataccaaaattgtggcagatttcattgtctgtttaataccttaaaatgacaaggctttttyccccatgacattggttgatggctgtgccagtccttgaagtgagttaagtagtgtgatgcattttgaagagaaaaaaattaatttgaaaaagtattaactcaaaagttaaaatacttcattgact

SEQ ID NO: 382501 - DNA, 371 bp, Homo sapiens
ttccttcatcaacacctttctatacaaccaatagtcctccatctaatcaatgctcctccatccaaccaatactctgcaatttaaccactgtccctccatccattcaatgtccctccatccatcccatggtcccccagccctaccccatgagcagcatggaggcagacccacatctgtcttgtgcgccatcatctccctgatgctcttcaggaaagggaggtgtctcacaattgcattgaatggaggaaggcacatctttccagtgatccccactctagggctgcattgggaaatcgctcccagggaaaacacaaacacaaagcagagggttgcccagtgtgaccctytgatgtgaccacggtggctgtcca

SEQ ID NO: 382502 - DNA, 611 bp, Homo sapiens
catcattcttcacagaattacaaaaacaattctaaaattaatatggaaccaaaagagagccatgtagcccaaccaaggctaagcaaaaagaacaaacctagaggcatcacagtacttgatttcaaactgtacaataaggccatagttaccaaaacagcatggtactggttttaaaaatccgcacatagactaatgtaacagaagagagaacccataaattaacccaaatacttacagccractgatcttcgacaaagtaagcaaaaaataaagtggggaaaggacacccttttcaacacatgatgttgggataattggcgagccacatgtaggggaataaaactggattctcatctctcaccttatacaaaaatctactcaagatggattaaaactttaaacctaattcctgaactataaaaattctagaagataacactggataaactcttctagacattggcataggcaaggatttcatgaccaagaacccaaatgcaaatgcaataaaaacaaagataaatagctgggacttaattaaactaaagagcttttgcatggcaaagggaacagtcagtagagtaaatagccaacagagtggacccctgacc

SEQ ID NO: 382503 - DNA, 255 bp, Homo sapiens
catgtttttatattatagtgctatacctcaaatactgttctgcaatttattttttcatcaataacgtcttttgataatttctttcatggcagtctatacaagtttctacctccctacttttaaaatgttgcataatttyctaatgtttggatttgtcatggctttacttactccctaatgatgaatattggcattattaacacttgtagtcattagggttcatatgactataaattgctcttataaagcattagt

SEQ ID NO: 382504 - DNA, 255 bp, Homo sapiens
catgtttttatattatagtgctatacctcaaatactgttctgcaatttattttttcatcaataacgtcttttgataatttctttcatggcagtctatacaagtttctacctccctacttttaaaatgttgcataattttctaatgtttggatttgtcatkgctttacttactccctaatgatgaatattggcattattaacacttgtagtcattagggttcatatgactataaattgctcttataaagcattagt

SEQ ID NO: 382505 - DNA, 255 bp, Homo sapiens
catgtttttatattatagtgctatacctcaaatactgttctgcaatttattttttcatcaataacgtcttttgataatttctttcatggcagtctatacaagtttctacctccctacttttaaaatgttgcataattttctaatgtttggatttgtcatggctttacttactccctaatgatkaatattggcattattaacacttgtagtcattagggttcatatgactataaattgctcttataaagcattagt

SEQ ID NO: 382506 - DNA, 516 bp, Homo sapiens
tggtcaacaagagtgaaactcctctcgaaacaaaataaaggttatagtgaacaggcgaaattaattttaatgccttccattttgaccgatatatctaaaatattaccatttcaacatgtaatatgyaattatgtgctgtattttatgtttgcaggacatctcagttcagactaactacattgcagatcccaagtgtgtgtcattaaaatagtgatagatttgtgtgtgtacatacctataatattatcatttatagtttcttgattagaattctgcataatcaagtcttactaagacagctttattatattttctcattacttcttggtctaaaggaattctacctctaaagagagaatgagttgaataataaaatgtcatgactccattttgctgtagtatcttagcattaatatttggaattgttattctagaccttagcaaaaatatatgttttgattatgaattttctgaagctttccagttaagtgtaaaacaagtgaaaaatataacttc

SEQ ID NO: 382507 - DNA, 553 bp, Homo sapiens
aagaaaacaagtgtcatatttaatgcaatcggtaataatcgagagtcagcactgctcactttcaagcatttcaggatagaggctttctggggaaccttttaagyggtatcgtgtgcttggttttaaatatggacaggtctcaatacttcactagttgtatctaaggttcttggttttttctttttaagaactcagtcttaataaaacttacatatttgaataaagtgtcatggccactggaagcaagcatggaggtatagctgtacagcagaggtcttaaactgtatactccacaaggaaatcttttctagtattgccataccatgtaatataaatactaacctcagtttcaataataggttgtgaaccatgagtgatttttataccattctcccctgcccttcagacatcactgtgttatatcattgtcagtaaaatgtcagtatagtaagcaaatcaacattatctccttcagaattctttgttgataactacactagtatttattttatagggtaatacaggtttttgtgaatttaggaatcaaaatgaa

SEQ ID NO: 382508 - DNA, 537 bp, Homo sapiens
ccctaacctcagcgaggccattgattgtactctgctgmggttctccctccctgggcaggattctggaaaatgtttctaggcagaatatcataggactccctgagtgtttccttcctctcagagaccactgtctcctttactatgtgttgtccaatatctgaaaacagttgtttcatacactttgtccaattttctactatcttatgggaaaacagcctggtcccatatactccattatcgttgaagcatgtatccgtattagattataaaacatatctgtaacaactttggacatggtaccatggatggaatcctggatgacatcttatttgaaaaaacttttaaaactaaggctaaactggttcaacggaagaaaaaaatgatagtacaaccccagtacctaagttaaaaggaaatttcaaagacggagaaattgttgaagtgttgaagtactagaagtcaagaaacacaaacactaatgtttccattagatttgagaataagaaggtcttgacaagcctggcttaagcagttatg

SEQ ID NO: 382509 - DNA, 537 bp, Homo sapiens
ccctaacctcagcgaggccattgattgtactctgctgcggttctccctccctgggcagsattctggaaaatgtttctaggcagaatatcataggactccctgagtgtttccttcctctcagagaccactgtctcctttactatgtgttgtccaatatctgaaaacagttgtttcatacactttgtccaattttctactatcttatgggaaaacagcctggtcccatatactccattatcgttgaagcatgtatccgtattagattataaaacatatctgtaacaactttggacatggtaccatggatggaatcctggatgacatcttatttgaaaaaacttttaaaactaaggctaaactggttcaacggaagaaaaaaatgatagtacaaccccagtacctaagttaaaaggaaatttcaaagacggagaaattgttgaagtgttgaagtactagaagtcaagaaacacaaacactaatgtttccattagatttgagaataagaaggtcttgacaagcctggcttaagcagttatg

SEQ ID NO: 382510 - DNA, 537 bp, Homo sapiens
ccctaacctcagcgaggccattgattgtactctgctgcggttctccctccctgggcaggattctggaaaatgtttctaggcagaatatcataggactccctgagtgtttccttcctctcagagaccactgtctcctttactatgtgttgtccaatatctgaaaacagttgtttcatacactttgtccaattttctactatcttatgggaaaacagcctggtcccatatactccattatcgttgaagcatgtatccgtattagattataaaacatatctgtaacaactttggacatggtaccatggatggaatcctggatgacatcttatttgaaaaaacttttaaaactaaggctaaactggttcaayggaagaaaaaaatgatagtacaaccccagtacctaagttaaaaggaaatttcaaagacggagaaattgttgaagtgttgaagtactagaagtcaagaaacacaaacactaatgtttccattagatttgagaataagaaggtcttgacaagcctggcttaagcagttatg

SEQ ID NO: 382511 - DNA, 602 bp, Homo sapiens
tatctgtaacaactttggacatggtaccatggatggaatcctggatgacatcttatttgaaaaaacttttaaaactaaggctaaactggttcaacggaagaaaaaaatgatagtacaaccccagtacctaagttaaaaggaaatttcaaagacggagaaattgttgaagtgttgaagtactagaagtcaagaaacacaaacactaatgtttccattagatttgagaataagaaggtcttgacaagcctggcttaagcagttatgagtggatgtgggtgtagagaccagactgtagtgttttgaagagtgaatataagcggagaaacttgagagtttggttgtaaaagggaccacaggtatctgtgaagaaaacttagtaggaatgaagataaatattttaaaarttctgccactaaacacctcagatctgtctgccactttgtcttcaggtcattgtttaagccaggatcaggcagactggcccatagactaaatctggcccatttcctgtgtttgcaaataaacttttattgaaatatggccaagttcttttgtttacatatatttgtagcggtttttgcattacactggcagagttttta

SEQ ID NO: 382512 - DNA, 602 bp, Homo sapiens
tatctgtaacaactttggacatggtaccatggatggaatcctggatgacatcttatttgaaaaaacttttaaaactaaggctaaactggttcaacggaagaaaaaaatgatagtacaaccccagtacctaagttaaaaggaaatttcaaagacggagaaattgttgaagtgttgaagtactagaagtcaagaaacacaaacactaatgtttccattagatttgagaataagaaggtcttgacaagcctggcttaagcagttatgagtggatgtgggtgtagagaccagactgtagtgttttgaagagtgaatataagcggagaaacttgagagtttggttgtaaaagggaccacaggtatctgtgaagaaaacttagtaggaatgaagataaatattttaaaagttctgccactaaacacctcagatctgtctgccactttgtcttcaggtcattgtttaagccaggrtcaggcagactggcccatagactaaatctggcccatttcctgtgtttgcaaataaacttttattgaaatatggccaagttcttttgtttacatatatttgtagcggtttttgcattacactggcagagttttta

SEQ ID NO: 382513 - DNA, 611 bp, Homo sapiens
catcattcttcacagaattacaaaaacaattctaaaattaatatggaaccaaaagagagccatgtagcccaaccaaggctaagcaaaaagaacaaacctagaggcatcacagtacttgatttcaaactgtacaataaggccatagttaccaaaacagcatggtactggttttaaaaatccgcacatagactaatgtaacagaagagagaacccataaattaacccaaatacttacagccaactgatcttcgacaaagtaagcaaaaaataaagtggggaaaggacacccttttcaacayatgatgttgggataattggcgagccacatgtaggggaataaaactggattctcatctctcaccttatacaaaaatctactcaagatggattaaaactttaaacctaattcctgaactataaaaattctagaagataacactggataaactcttctagacattggcataggcaaggatttcatgaccaagaacccaaatgcaaatgcaataaaaacaaagataaatagctgggacttaattaaactaaagagcttttgcatggcaaagggaacagtcagtagagtaaatagccaacagagtggacccctgacc

SEQ ID NO: 382514 - DNA, 607 bp, Homo sapiens
tttgtgccattctgatgggtgttcctttgaatttaactcttttattttcttctctggtagcttttaggctttcttgtacctcatgatctgaatttttattctgtaccctcattacttgctgtttcattataatgtgggcacttgattggttctgtctgaggatcctagtcttttgagatctttaagaagttccgcaatcttaatattacatggtgtggcttccttcaggagtttgttagggatttggaaattcccaaatattctgctaacttatacccttgagagaggggagaataaacagaggagtgaatgtgaacttcagaattcctagcttcatagtctaaatagaaatcttctaagatcataaaatgtccctaagaactcatgctttacattawtttttttggtattttttctattgattctaagcatggaaatgtagatggagattttgttgatgtattttcaaattatgtatcaataatagtgaagcttacttgatttctttaaaatctggtcactatatctataaatacagtggacattaaatgtacagcataaggtaattatgtggactttaaaaaggcattaaaatatgtgccatttt

SEQ ID NO: 382515 - DNA, 620 bp, Homo sapiens
atgtatgaacatgcccaacccagtattgggcctccgtaggcgctcaataaatgttagttgattgcccctttctgcttctaggtacataagcaccatattaatttatatagtatatttgattatgttaggttaatgcataaatcacatggattggttgtttcttttacagatcactaaagtggttcttagcaaaggttggaggtgtcttgagtgcactgtgtgtgaggcctgtgggaaggcaactgacccaggaagactcctgctgtgtgatgattgtgacataakttatcacacctactgcctagaccctccattgcagacagttcccaaaggaggctggaagtgcaaatggttctctagggtttgtttgccttgttagtctttcaagttcagagctttctcataccactttagtttttaaaaattagccatacctatttaattgaataatacacatattctatgatagataccactaatcagaaaaattttcacatacacattaaatcatttgccccattatgttcgtatgtagcttcctgaattacagtaactgaataactaagaaaataaaattgagacttttcggggggatttggatttcaggtgtgtttggtgca

SEQ ID NO: 382516 - DNA, 620 bp, Homo sapiens
atgtatgaacatgcccaacccagtattgggcctccgtaggcgctcaataaatgttagttgattgcccctttctgcttctaggtacataagcaccatattaatttatatagtatatttgattatgttaggttaatgcataaatcacatggattggttgtttcttttacagatcactaaagtggttcttagcaaaggttggaggtgtcttgagtgcactgtgtgtgaggcctgtgggaaggcaactgacccaggaagactcctgctgtgtgatgattgtgacataagttatcacacctactgcctagaccctccattgcagacagttcccaaaggaggctggaagtgcaaatggttctctagggtttgtttgccttgttagtctttcaagttcagagctttctcataccactttagtttttaaaaattagccatacctatttaattgaataatacacatattctatgatagataccactaatcagaaaaattttcacatacacattaaatcatttgccccattatrttcgtatgtagcttcctgaattacagtaactgaataactaagaaaataaaattgagacttttcggggggatttggatttcaggtgtgtttggtgca

SEQ ID NO: 382517 - DNA, 611 bp, Homo sapiens
catcattcttcacagaattacaaaaacaattctaaaattaatatggaaccaaaagagagccatgtagcccaaccaaggctaagcaaaaagaacaaacctagaggcatcacagtacttgatttcaaactgtacaataaggccatagttaccaaaacagcatggtactggttttaaaaatccgcacatagactaatgtaacagaagagagaacccataaattaacccaaatacttacagccaactgatcttcgacaaagtaagcaaaaaataaagtggggaaaggacacccttttcaacacatgatgttgggataattggcgagccayatgtaggggaataaaactggattctcatctctcaccttatacaaaaatctactcaagatggattaaaactttaaacctaattcctgaactataaaaattctagaagataacactggataaactcttctagacattggcataggcaaggatttcatgaccaagaacccaaatgcaaatgcaataaaaacaaagataaatagctgggacttaattaaactaaagagcttttgcatggcaaagggaacagtcagtagagtaaatagccaacagagtggacccctgacc

SEQ ID NO: 382518 - DNA, 488 bp, Homo sapiens
cttcctgaattacagtaactgaataactaagaaaataaaattgagacttttcggggggatttggatttcaggtgtgtttggtgcagacactgtggagcaacatctgcaggtctaagatgtgaatggcagaacaattacacacagtgcgctccttgtgcaagtttatcttcctgtccagtctgctattgaaactatagagaagaagatcttattctgcaatgaagacaatgtgataggtattgtgctattttttcatctttttaaagcttttctctttgaaatgtagcaaaaaaaaaaaaatggaaaatagcttttccttaatcacaagttttaggtacagagctttttgccttgtagatttttagtcacctagaaacttacagaattgatttcctgttttgaaytctcaactccagactaaagttttgttttgttttgttttgtttttaaatttacagacagagtcttgctctgtcgccaggctggag

SEQ ID NO: 382519 - DNA, 436 bp, Homo sapiens
acaaatatggtctttttagatggatgcatgcagttcgtcagaacttaaatactgaggaagaagtggaaaatgtagcagacattggttttgattgyaacatgtgcagaccctatatgcctgcgtctaatggtaaaagaataatttaaactgtgagtctgcactcttgtaccactcacttgcaccttactgtccataaccaatgaattagcttagctctactctattttgtctttgtgaaacttactttgacaagtattttatgaaaaatattattgttgattatacatgacttatcacaacttgttataaaacaatttacatgaaacaataaaaagcgtatactttagatgtaaactataattttgcttccaaggaacatgatcttgtagttattgacaatatgttaaaatccaatgtgttgattctttcttagcca

SEQ ID NO: 382520 - DNA, 515 bp, Homo sapiens
aaacaaaacaacttgacacacttagaaaatgaaggtttgtgctattagttttcttttattttagaaaaacaaagcattgtttaaatatttcttacaagtacaaatataatttaaatttaataaatgttcaaaaatatctgtaattragtttcattcagcagacatatgtctaatagagaacttgctaagtaagatataaaggatgattacatgaaaaaatcacaaaattgtcagtaagagtcttaaaagtcagtgataggacagtagttaaaagatatcaaatagttatttattcttaaacattaaacaggatattaatagttttaataatcttgaagtttgacaacactgtaaaaacattacagaccacttttatttatgaaaatacgtgcaaatagcaaacaccagttgggcttaaggctgctacttacttactcagtaagtgacaaagctggaattcaaaccaggtttgagctataccactactacccttgaaaaggtttcattacactcag

SEQ ID NO: 382521 - DNA, 515 bp, Homo sapiens
aaacaaaacaacttgacacacttagaaaatgaaggtttgtgctattagttttcttttattttagaaaaacaaagcattgtttaaatatttcttacaagtacaaatataatttaaatttaataaatgttcaaaaatatctgtaattgagtttcattcagcagacatatgtctaatagagaacttgctaagtaagatataaaggatgattacatgaaaaaatcacaaaattgtcagtaagagtcttaaaagtcagtgataggacagtagttaaaagatatcaaatagttatttattcttaaacattaaacaggatattaatagttttaataatcttgaagtttgacaacactgtraaaacattacagaccacttttatttatgaaaatacgtgcaaatagcaaacaccagttgggcttaaggctgctacttacttactcagtaagtgacaaagctggaattcaaaccaggtttgagctataccactactacccttgaaaaggtttcattacactcag

SEQ ID NO: 382522 - DNA, 515 bp, Homo sapiens
aaacaaaacaacttgacacacttagaaaatgaaggtttgtgctattagttttcttttattttagaaaaacaaagcattgtttaaatatttcttacaagtacaaatataatttaaatttaataaatgttcaaaaatatctgtaattgagtttcattcagcagacatatgtctaatagagaacttgctaagtaagatataaaggatgattacatgaaaaaatcacaaaattgtcagtaagagtcttaaaagtcagtgataggacagtagttaaaagatatcaaatagttatttattcttaaacattaaacaggatattaatagttttaataatcttgaagtttgacaacactgtaaaaacattacagaccacttttatttatgaaaatacgtgcaaatagcaaacaccagttgggcttaaggctgctacttacttacycagtaagtgacaaagctggaattcaaaccaggtttgagctataccactactacccttgaaaaggtttcattacactcag

SEQ ID NO: 382523 - DNA, 581 bp, Homo sapiens
cttattattacattatgctgagatttctaataacgctgcccttttctgggtattttgtattaaacctaaaatttgtgatgttttagactgtttcactaacatgttttgataacgtctcagtacccttgggaaagcattataaagtagtgggcaaygatgaaacctactctggatgtttttaggcaaattttttaacttctctgatgctagtgttctcttttataaaataggtgaaccaggatgagcccataggatagttgtgctgatgaggtgcaaggatgcatgccaggcacccagcactggctcttcccagacatggagtgctcagtaatcgtgagctattagaatacaggtgcccaaccagtgcttgagcaattgtgttctgtgtccaacagaactcaacagaatcccacgtttgtctttatatgtgaattcagttccttttgagttagtaagaaattttgcctgtgttggggtaattgaactttcaggaggagggaattgtctgccacaattattctctgaacttaatgtttccatgtctttttcttcattttggaagttgtggaaaaattataatg

SEQ ID NO: 382524 - DNA, 581 bp, Homo sapiens
cttattattacattatgctgagatttctaataacgctgcccttttctgggtattttgtattaaacctaaaatttgtgatgttttagactgtttcactaacatgttttgataacgtctcagtacccttgggaaagcattataaagtagtgggcaacgatgaaacctactctggatgtttttaggcaaattttttaacttctctgatkctagtgttctcttttataaaataggtgaaccaggatgagcccataggatagttgtgctgatgaggtgcaaggatgcatgccaggcacccagcactggctcttcccagacatggagtgctcagtaatcgtgagctattagaatacaggtgcccaaccagtgcttgagcaattgtgttctgtgtccaacagaactcaacagaatcccacgtttgtctttatatgtgaattcagttccttttgagttagtaagaaattttgcctgtgttggggtaattgaactttcaggaggagggaattgtctgccacaattattctctgaacttaatgtttccatgtctttttcttcattttggaagttgtggaaaaattataatg

SEQ ID NO: 382525 - DNA, 469 bp, Homo sapiens
tgtttgttatgtttttccttttttctttctttgaatttaacttgttctttgtctgatttattgactgatgcttagttttttgtttttttttttttttttgagacgtagtctcactctttcaccaggctggagtgctgtggcacaatctcggctcactgcaacctccagctcccgggttcaagygattctcctgcctcagcctcccaagtagctgggactataggtttgcgccaccacacccaggtaatttttgtatttttagtagagctggggattcaccatgttggccagcacaaagtgctcggattacaggcatgagccactgtgcctggccagtgcaagtgtctttagccagcttcatttactccctaactccttgcctcaggttctgcatccgtaaagtgaggtcactaggagtatttacctcagagggctgttgcaaggttaaagctggttatacaagcagagt

SEQ ID NO: 382526 - DNA, 425 bp, Homo sapiens
ggagcatctttgaacaacaaatatcttgaaaaactagttaagtggtatcatatatttgtgggatgggtgatttcaaaacccartctaaaaggacaggaccttgctcattgacaatttattgtctgatgcaatgtttcttaatctttttgggtcttggattcccttgagaatcttttgaagtttatggactcttttcccagaagaacacactcatgtgtatgtaacacaattttgcattcaatcttagggactgcaggtgtctacattagttatatattggtgtaaaaaaaaaaagccccaaacttaaggcttaaaggaacaatagatgcttattatctcacagtttctgtggttcagaaagtcagtaacatcttaactggatacttctgactcagagtctcccaggaggttgcagtcaagatgtt

SEQ ID NO: 382527 - DNA, 425 bp, Homo sapiens
ggagcatctttgaacaacaaatatcttgaaaaactagttaagtggtatcatatatttgtgggatgggtgatttcaaaacccagtctaaaaggacaggaccttgctcattgacaatttattgtctgatgcaatgtttcttaatctttttgggtcttggattccyttgagaatcttttgaagtttatggactcttttcccagaagaacacactcatgtgtatgtaacacaattttgcattcaatcttagggactgcaggtgtctacattagttatatattggtgtaaaaaaaaaaagccccaaacttaaggcttaaaggaacaatagatgcttattatctcacagtttctgtggttcagaaagtcagtaacatcttaactggatacttctgactcagagtctcccaggaggttgcagtcaagatgtt

SEQ ID NO: 382528 - DNA, 518 bp, Homo sapiens
tttattgtctgatgcaatgtttcttaatctttttgggtcttggattcccttgagaatcttttgaagtttatggactcttttcccagaagaacacactcatgtgtatgtaacacaattttgcattcaatcttagggactgcaggtgtctacattagttatatattggtgtaaaaaaaaaaagccccaaacttaaggcttaaaggaacaatagatgcttattatctcacagtttctgtggttcagaaagtcagtaacatcttaactggatacttctgactcrgagtctcccaggaggttgcagtcaagatgttgttggggggaaaggggcaggttcagtggctcatgcctgtaatctctacactctgggaagcaaagccaggaggattacttgagcccaggagtttgagaccagcctgggcaacacagtgagaccctatgtattagtcagttctcacattgctataaatacatgagactggagaatttataaagaaaaggggtttaattgtctcacagtt

SEQ ID NO: 382529 - DNA, 613 bp, Homo sapiens
caatttcattcttgtgtgaacatcatagggtgtatttcaacaaacctagatgggatayatattttcatttatatattttattatggaaaatcaaatgtcccagcactgttactaaatatcagtcatttcccctacttgatctgccatgccaacattaagtgccatatattagatctctatatatgctccattataatcttacaggatcactgttgcacatgtgtttcctcattgactgaaatgttattcagtgcatgactgtacatatagtaaaaatgttatgcaccatattttaacatactgatattactaatgagttgtcctcatggtgactttaaatatcataattaatgccatcaaccagaatatatcaaataaattcagataccacttgttctgtttatttccttcccctgccaattttttatttttcctgattctgctgaagccaagatggggttctgtgtaagattttgtttgtgaggaaaggttctgcatgaattaaagttttgcaagccatgggcatttcattgtatgggctgttttgaggtctgccatcttgcagattagattagcttacactgaggcacagtcacctgctgggctgggcaga

SEQ ID NO: 382530 - DNA, 613 bp, Homo sapiens
caatttcattcttgtgtgaacatcatagggtgtatttcaacaaacctagatgggatatatattttcatttatatattttattatggaaaatcaaatgtcccagcactgttactaaatatcagtcatttcccctacttgatctgccatgccaacattaagtgccatatattagatctctatatatgctccattataatcttacaggatcactgttgcacatgtgtttcctcattgactgaaatgttattcagtgcatgactgtacatatagtaaaaatgttatgcaccatattttaacatactgatattactaatgagttgtcctcatggtgactttaaatatcataattaatgccatcaaccagaatatatcaaataaattcagataccacttgttctgtttatttccttcccctgccaattttttatttttcctgattctgctgaagccaagatggggttctgtgtaagattttgtttgtgaggaaaggttctgyatgaattaaagttttgcaagccatgggcatttcattgtatgggctgttttgaggtctgccatcttgcagattagattagcttacactgaggcacagtcacctgctgggctgggcaga

SEQ ID NO: 382531 - DNA, 613 bp, Homo sapiens
caatttcattcttgtgtgaacatcatagggtgtatttcaacaaacctagatgggatatatattttcatttatatattttattatggaaaatcaaatgtcccagcactgttactaaatatcagtcatttcccctacttgatctgccatgccaacattaagtgccatatattagatctctatatatgctccattataatcttacaggatcactgttgcacatgtgtttcctcattgactgaaatgttattcagtgcatgactgtacatatagtaaaaatgttatgcaccatattttaacatactgatattactaatgagttgtcctcatggtgactttaaatatcataattaatgccatcaaccagaatatatcaaataaattcagataccacttgttctgtttatttccttcccctgccaattttttatttttcctgattctgctgaagccaagatggggttctgtgtaagattttgtttgtgaggaaaggttctgcatgaattaaagttttgcaagccatgggcatttcattgtatgggctgttttgaggtctgycatcttgcagattagattagcttacactgaggcacagtcacctgctgggctgggcaga

SEQ ID NO: 382532 - DNA, 611 bp, Homo sapiens
catcattcttcacagaattacaaaaacaattctaaaattaatatggaaccaaaagagagccatgtagcccaaccaaggctaagcaaaaagaacaaacctagaggcatcacagtacttgatttcaaactgtacaataaggccatagttaccaaaacagcatggtactggttttaaaaatccgcacatagactaatgtaacagaagagagaacccataaattaacccaaatacttacagccaactgatcttcgacaaagtaagcaaaaaataaagtggggaaaggacacccttttcaacacatgatgttgggataattggcgagccacatgtaggggaataaaactggattctcatctctcaccttatacaaaaatctactcaagatggattaaaactttaaacctaattcctgaactataaaaattctagaagataacactggataaactcttctagacattggcataggcaaggatttcatgaccaagaacccaaatgcaaatgcaataaaaacaaagataaatagctgggacttaattaaactaaakagcttttgcatggcaaagggaacagtcagtagagtaaatagccaacagagtggacccctgacc

SEQ ID NO: 382533 - DNA, 634 bp, Homo sapiens
tcaaacctatagaaatacatggaaattaagccacttgctcctgaatgatttttgggttaatgataaattcaggatcaaaatttaaaaattcattgaaatgaataacaatagagatacaagctatcacaaatttacaacttaatgtcacacctgaagaaacttgagaaacaagaacaaactaaacctgaagctagcagaaggaaataaataacaaagagcagaaataaattgaaacaaaaaagtagaaaaagcaatgaaacaaaacttggttttttgaaaagacagacaaaattgttagacaattagctagattaaccaagaaaagaagagaagattcaaataaattcaattataaatgaaactagagacattacagtttatggtacagaaatgcaaaagattatttgagactactatgaacacctctatgcatgcaaactagaaaatctagrggaaatggataaattcctgcaaacatgcaaccctcctggatgaagtcagaaataaatagaaactgtgaacagatgaataacatgcagtgagattgaatcagtaatttaaaaattgccaaggaaaacaaaaatcctagggccagatggattcagaggtgaattctaccagagattaaaagaag

SEQ ID NO: 382534 - DNA, 579 bp, Homo sapiens
attcatgactaagaacccagaagcaaatgcaacaaatagaaaaataaataaataaataggacctaatttaactagtatagtaaaagtaacaatcatctgagtaaacatacagcccacaaaatgggagaaaatattcacaaactatgcatctaacaaagaactaatatctagaatctacaagaaactcaaacaaattgcaaaacaattaataatcttatctaaaggtggtcaatgatatgaactgacrcttctcaaaaggtatgcaaatggccaacaaatatatgaaaaaatgttcaacatcactaatcactggggaaatacaaatttaaaccacaaaaagatatcattttactcttgcaagaatgaccattatcaaaaagccaaaaaagaatagttgttggcatggatgtggtgaaatgagatcgcttgtatactgctggtggtaatgtcagttagtacaacctgtatggaaaacattgtagagactttttaaaaattattttttctgaaacagagtcttgttccattgcccaggctggagtgcagtggtgattacagctcactgtagcctcgacctcc

SEQ ID NO: 382535 - DNA, 550 bp, Homo sapiens
gcccctgtcattactactactaccatttctctcactgcagctgcctaaaagccatgaatctgaaccaagtcctggaatgtgaagtctgacaaccacaaaaaaactatatcctcggagcttgcttgccactcttcgcggccatgggaagaagccctcttatcacctctactttttataattcgtgcaagtgcttctcattaccaatacctcacttaggttacttttagcttcagaggatctgagaaatgccattttaaaaatacacttgccctgttgtaacagagaatttaaaaggaaaaaggaagaaatgtcataaacaataaaccgttttacagataaaaaaatttatctctacctcaatatggaacatgaaaaaacagaactatwatatagagagaaaaataattaaaattgtgtaagtctagttaaagataactaaaattttattccactgggttgtaattatctaaatccattaactgcaaaacaatatatctttctcattcacatgtgtaaaaaaaagtgtcaacatacagaaaaatttaaaatt

SEQ ID NO: 382536 - DNA, 619 bp, Homo sapiens
tatcaaaagatgtaagccataaccatagagatggaaaatgttttttgcgtacctttttaaggagataatattatattaattagaaagttatgtgtagttagaaactgaaaatgcagtgaatggggtaaataaagaaattataaatagctgtgaatggacaatttggcaagcaactaatggttttagtggtcaataaattaataatattgaaaaaatatgtttcaattcataagaacagattatttgaaaaactcattcaggttaattgaaggttatataacacagacmatttcaaatcttccccaaataacaattcttatattcagttctatatcaagctaactaaagtacctcttttattgtgcttcactttgttgtgctttgcagatagtacattttttcacaaactgaggatttgcataaaccatgcatgaagtaagtctattggcaccatttttccagtaacatgtcctcacttagtgcctttgtgtcatgttttggtaattctcacaatctttcaaacttttcattattattatatctgttacagcgatctttgatcagtgatcttaaatgttactattgcaattgctctgggaagccatcaacctgacccata

SEQ ID NO: 382537 - DNA, 594 bp, Homo sapiens
taccagtaaactccaccattttgcctcttagtgcacgtgcttcagcctgctcacccagctcctgagatcttatcaagaagtcgttgctcatcagcttcatatgttttctatctattggaagattgctgtgccctggtgccagctgtaaccaattattattttacagaaacagtttaacaacctcctgaccatcacctggtgctcacctgacactcctggtggagggacatttgttgcctgcttatgtcctcctagcttgaacacttggtcaaaatgggatcacaggtcactgcaaaataatagtcattcatttagcagaggtgagaattaaaaaatttttaaaagcaaaaacctttctcattaatatggtttggctgtgtccccacccatattttatcttgaactgtaaytcccgcaattcccatgtgtctttcttgtactgttcatgtgagagtgaatatgtctcatgacatctgatgtctttaaaaagagaagttctccagcacaagttctctctctttgccttctgccatccatgtaagatatgactttctcctccttgccttctgccatgattgcgaggcttcctcagcc

SEQ ID NO: 382538 - DNA, 594 bp, Homo sapiens
gctgaaaaaaaaagagaaaataatcctgctaaagttgactttctacctgaatgttgctcagtggtactgttttataagaataacataatgatttgagcaaaaataaaacacaagcccaaaatatataacaaaagatatatttttaaaatggctatatatatgtaaatatataggtatataattttagtcttatttactcatatttctatacttatttacatagaccttacatgtttttatgagtggtgttccctgcagctgacaatacttayaccacaggaatttaataaatatcaataaggcgctcaacgaatgtttcctgcttgaaataaaatgcttttctttgttctaacataaataccaatataaagtctctgtaaactcttaaaatcatcaaaatattatgcaacaactctaagtaccatagataagaacttgaaatggatggaaatttattattcttacatgtgatttaaagtaaattcagcaatttaagacaatatttttaaaaaataaaatgctaaaataagaaatatttcagttctttccaccaaagctaatgttaaatattcaatttaaattttcttcacagag

SEQ ID NO: 382539 - DNA, 534 bp, Homo sapiens
ttgacaaaaatacaaaagttagctgggcatggtggtgggcacctgtagtcacagcagcttgggaagccaaggcgagaatatcactttaacccaggagttcaaggttatggtgagcaatgattctgccactgcaccctagtctgggtgacaragtgagatcttgtctcaaaatgaaaaaagtgggtttgaaacatttcaaattttataaaaaatatttactcatggttaataatgataattaaataataactaatatttgttaaaacaatttaagccagccacttagctaggtgattatgctatttcatttaaaaagaataaaatgcaaaataaaatttaaaaagacatttaatatttggtgttttataaaggaaaaagttacttaaatcctattattgaatgagtcatagcatttaattcttaaaatttctttataatgtctattttcaaaactgcaccaataaattattattaatctacaataaaaataataaataccatgaacacagtttttctgaagaagttctttaaaat

SEQ ID NO: 382540 - DNA, 530 bp, Homo sapiens
atttgatatagaccaacacttcacgctgggagcaaacgttcaggcaaatagaaaaattagatatggaaatgtgatgtgcttaaaccaataaaatgtgagatgtaggggaatgtagcacttttaagtgaaagcatttaagaattgctttgtgattttcatatctattcctgccattatgatattggaattgaaggctagtaggagggtgccataacatcaaaccagcctgaaatgattgacagtgtattgatggatgccttaaaaaatgtttggatatacagaagactgtgggtatamaaagaaaaaaaaaagttatgttacaaagtcactaataactcaaggttgtttattattacagcataatccagtgtacttttactgatataaaaaatttgtatttagttttgtaaatatccaagacctgacataaattggttctattttcagccttctattaaaaacagtatcttgaatattcttattaatacatttcccagtgtctttccctggaagaatttttaataccattt

SEQ ID NO: 382541 - DNA, 530 bp, Homo sapiens
atttgatatagaccaacacttcacgctgggagcaaacgttcaggcaaatagaaaaattagatatggaaatgtgatgtgcttaaaccaataaaatgtgagatgtaggggaatgtagcacttttaagtgaaagcatttaagaattgctttgtgattttcatatctattcctgccattatgatattggaattgaaggctagtaggagggtgccataacatcaaaccagcctgaaatgattgacagtgtattgatggatgccttaaaaaatgtttggatatacagaagactgtgggtatacaaagaaaaaaaaaagttatgttacaaagtcactaataactcaaggttgtttattattacagcataatccagtgtacttttactgatataaaaaatttgtatttarttttgtaaatatccaagacctgacataaattggttctattttcagccttctattaaaaacagtatcttgaatattcttattaatacatttcccagtgtctttccctggaagaatttttaataccattt

SEQ ID NO: 382542 - DNA, 595 bp, Homo sapiens
tttttaatatttaatttttatttttaagtttgtattaagaaggtttaactgttgagggttaaaaaaaagatcagaatcaaaagattctaccaatatgtttatatatgtctgtgtgtatatgtttaaaggaaggaaatcttctcatatgataaaatatctagaaatctgtagttctaatattgccttaacacatatacacacagacacgtataaacatatatgtgtttaatttgtcaatattttcttttacttaaagtatcacatgggacacttcaagtaaaagaaaatttctcaacaaattaaattaaacagaattaattggagcaaagaacaattcatgaattgagagagcactcccaaccagaagaggtacggagaactcttcccagcagtgtgagtggtgagctttgatagttcaacactgcagcaaaatggagaaatcactggattgtctgcagctaggaatgtggtttatttgtgaaggatgtgagggggyatttaccttatttgaccatcatgtgatcagttggcttcccaggattggtggaagctccattgttaatgattgtatgaaaagtgggctgtgtattagtgc

SEQ ID NO: 382543 - DNA, 283 bp, Homo sapiens
aaagataatttgacaatttgtggacaaatggattaccttaatcccttaactctcagtagcctctaaccatacaatgatttaatcatggagcctttgcacttccctattcgtgaccccaaawacaagaaagcatcccacagttactgtctgatgaaatcctcaaggatttgcttctatctatagatggtaacatacaggtaagcaaatcctgtctcagtcagtggtattttcttattttaggctcaatgtagatttgaattagattattccatattcaaataga

SEQ ID NO: 382544 - DNA, 583 bp, Homo sapiens
gagaattagtgagttgtgagctgttacataactacaagtggtctaacatatgagtaattggaggactcaaaaaatagaagattatgatgggacagaaaattaactgaacaaataaaggccaatttttccacatatatgatgaaaattataaactcaaaggtacaccaagctcaagaaaatctaaagcaggagaatcatgaggaaatctataccaatgcacatcatattctagttgctcaaaaccagtgataaagaaacaaccttaaaagtatacatggaaaaaaactttgttatataaaaagcaacaaagrtaaggaagacagcacatttctcattgaaaacactgtagtccaaaagataatagagcaatgtgtttaaaataatgaaataaaaaactcaacttaaattttacacaaggaaaaaatatatttcaaaagtaaagacaaatacgaacttttccagacataaaaaagttaaaaaaaattatcaccagaattcacactatgagaaatgctaataaaattcaagcagaagaaaagtggcactggataaatatctgaatcaacacaaaagaaaaaagaac

SEQ ID NO: 382545 - DNA, 491 bp, Homo sapiens
gatgtggaagtccttaatacttaacaaaacacatataataggctgggtacgtacctatatcatctgatataaaactcctgtgaggtaactagggctgactctggataacaagctatcatcaatataccacagtacttctcacataagctatatttgtgacacagcttgatgtgtggtataatattcatagttatgaataagcatatgtttggataatacaggaggatgcaactcgctcttccttgaatagtaatgatttcacagagaaactaatatttatattgggacacgaggaatgcataggaatttatccagtccaatttaattcttgtacaacgaaagttaaaaagagaaaacgccattgactttggaaagtaggaactccagctatgaaagttggaggtgaagagtattccaacaaaaagagtrgtatgaaataatatagtcagttaagggaaagccaagaaattgaagttcataagattgggaag

SEQ ID NO: 382546 - DNA, 553 bp, Homo sapiens
agaccttacaggagagttcttttctgtcattctccctctcttgccctctgccttctccaatctccattacttcccttttgcctcttttccctccacaaatatttattgagagattactgaatgagtacaaaatgtattaatgtagtgacaaatatattgctgtacaaacaaatgcaaaactttcttagactaaaatactgttaaggttagttttgagcaatatttgaagaaggaaagggctgcagtgttggagggaagwtatcaagagtggacagtaactacatcaggataaaactgaccatttaggagcaagtccaaaagcccaattaggtaaaaggagtcttagaggcatggtagcactggcaggcaagaagtcatgttcaagctagcagagggggaagttctattagatgatgactcaagtaaggaaataataaactacagttctagcaggctttcatgagggaaaattgcatggtacagaaaggggcattggcaatgagaagggaggcacaagcagtgttgggctatcaaagaggatagattcatttta

SEQ ID NO: 382547 - DNA, 431 bp, Homo sapiens
agttaaaataaagacgggcaggcataagagtgagaagttcagaggatgattttgctgacagctaagaaaggagctaaaactcaaaccagataccagaattattactatgcccaggttttggatcatgactttcatttgcatctttttgttagcagaaacttgctgatatttagaatcacatccgtatttgtgacaaagaattgcatctgctttaaaaatttttaaatatatttataaatgcatttatagacatttatgagcttattttwtcactaagctatgccatacattcagactttgctttatttcagattaaagctggaattattttttaaatgctggttccctgcacatagccaaacaatcagatctataactaagcccagcctgttcagttttatagtccatttcgttttgttttcatggcgaag

SEQ ID NO: 382548 - DNA, 527 bp, Homo sapiens
ttgtgaattatatctcaataaagctgttaccagaaaaaaatttattagtcttggctgagaacaacgtatcacttttaatatgtacagaaagagacttggcatgctaagtaacatcaactacataacagcgtcatctaagcattcttattatcagtgatttgatgagcaatccctctttccaacaataaaaccaaaagrtgacttttagaacagctatgtcagtcttgaggttgttttcttgctctgctgagtgaatatgtattctaaaaaaagctttaatcaggcttcccttgctccaataaaatagaaaacaactttggctttaacttagagactgtttgcaatagtagaaatctggaaatagagttaacatttctgccctctatttgcaagtatgccttcaaaccaacattattaagctcagatgaaactctttggagagtggaatgagaccagaaatagacacttgtttaagaaatatttacttaaagcatgtaaaattttatacttaattgccagaaaattcc

SEQ ID NO: 382549 - DNA, 527 bp, Homo sapiens
ttgtgaattatatctcaataaagctgttaccagaaaaaaatttattagtcttggctgagaacaacgtatcacttttaatatgtacagaaagagacttggcatgctaagtaacatcaactacataacagcgtcatctaagcattcttattatcagtgatttgatgagcaatccctctttccaacaataaaaccaaaagatgacttttagaacagctatgtcagtcttgaggttgttttcttgctctgctgagtgaatatgtattctaaaaaaagctttaatcaggcttcccttgctccaataaaatagaaaacaactttggctttaacttagagactgtttgcartagtagaaatctggaaatagagttaacatttctgccctctatttgcaagtatgccttcaaaccaacattattaagctcagatgaaactctttggagagtggaatgagaccagaaatagacacttgtttaagaaatatttacttaaagcatgtaaaattttatacttaattgccagaaaattcc

SEQ ID NO: 382550 - DNA, 521 bp, Homo sapiens
tgtatatagtcccaagttgtggagaagtatgtagtgcatactctttccaaaatttatttttaattgaactttttttaaagacacagtagaattggtgtttgacagatatcactttgttcacacagtgggtggtttatctgactgtctccaactaaattgtaaactttacagcagcatctatatcttctatctctctgtccgtattgcctgagatataaatgtttattgaatgactcacagtgcgtgagtgattcaatgagtcagctttgtagtctaatctaataatcaaggctatcctaaagcattttcaatgttaccttcaacgtctactcctgccaagctattcctgatatacatcttatactttctccatctggtgccttgatagttctgtgttttccaacaagagcagacttcctcaagctcagttttgttgatatttagggctggataattctctgttgtggtgggcygtcctgtgttttgtaggatgtttagtagcttcccactagatgcaagta

SEQ ID NO: 382551 - DNA, 611 bp, Homo sapiens
caaacctctttttgtaataatgagctgggagcaatactcgctcactcaatgggatttgagagaggcgtataaacatgaaaaaaacaaaattcggaaaaaaaacttacctattatttcacaagttaagcatcaagatagaaagcagaatttcatatgtttcctaagtgttgttttaaaattttttaattaacacctggatccgaatagagcatttaaaaacaagtttaaaagaccaaatgaatgactttgactggttaccataaaaaattacctttaataatgaggcctataaaattgttttcatcttcaaagtactttaaagctttaattaattattgcaagactcctgtgcaataaataattaggtattattattgctccatttattgatgggaaaatgaaagataattgtttaagaaytttctccaatttatttaggtcagctacaatgttaaatatctaattcctttcagaataatttttaaaaaatgtataacctgagttaagaatgctttttatgaaatatattttgtgaagtttggtaacagaaacctcaagtaatttctaatatcagagctacaaataacaaactctcctgtttctaccaaata

SEQ ID NO: 382552 - DNA, 635 bp, Homo sapiens
gtgcctctttcagaaacgcaaatgtcaacacttgtcacctcacttttttccagctgatatgtgaataattaatctttcaatgtgtccacaccctgaaggaagtcacaagaaggattccctactcaaataaagaagagttagagtacataagtgatagtgctgagataagtctccaagtccattttcagcacttaaacatgaatggcaatacatatatagtaagtggtttggtttkgttttgttgatggaaattctaaggacaaagtcttgttcactctgtcatctgtgcagaaataatggagatatctattctagttgttctggcagataacacattaaagtcatatagaaaatgggatgactggaggaatgaaaaactttacacaaatattataggcctccttttaaaattagctttagaaaaaacagaaaatttgtaatgttaactaagaaagcaagcacaaaagagaagaaagaaaaggttaaaaaaaacatatttagaagtgagggaaaagcacaggcaaaggttattttttgttttaaatgtagtggagaaaagagaccaaaaaaaatgatgagatataacaaagagcccaaagtaattcaggcttgtcctgttttactttattccaatt

SEQ ID NO: 382553 - DNA, 635 bp, Homo sapiens
gtgcctctttcagaaacgcaaatgtcaacacttgtcacctcacttttttccagctgatatgtgaataattaatctttcaatgtgtccacaccctgaaggaagtcacaagaaggattccctactcaaataaagaagagttagagtacataagtgatagtgctgagataagtctccaagtccattttcagcacttaaacatgaatggcaatacatatatagtaagtggtttggtttggttttgttgatggaaattctaaggacaaagtcttgttcactctgycatctgtgcagaaataatggagatatctattctagttgttctggcagataacacattaaagtcatatagaaaatgggatgactggaggaatgaaaaactttacacaaatattataggcctccttttaaaattagctttagaaaaaacagaaaatttgtaatgttaactaagaaagcaagcacaaaagagaagaaagaaaaggttaaaaaaaacatatttagaagtgagggaaaagcacaggcaaaggttattttttgttttaaatgtagtggagaaaagagaccaaaaaaaatgatgagatataacaaagagcccaaagtaattcaggcttgtcctgttttactttattccaatt

SEQ ID NO: 382554 - DNA, 590 bp, Homo sapiens
ccagcaatatggtggaatagatggttccagcccttgtcatcccacagaaattaatttaacaaacatccatggacaaaacatcttgataagaactctggaatccaggtgaaagactgcagcacataaatagagcacataaattagaaaaggcacaatatgcagagtagaaaggatggtttcacttccacattagtatttccctagcccacttaatgaactgcccaaagagatcttattggctcaggagttcacctgtggaagaaagggagagaaaagtgtatattagactttatcatgaccccaaaaccagacctaccacagtggaaaccagaaccaggcctgctcccagaaacccaggttacaggctaccttcccaaagacatcaacagcagtcctgcccmcagcggaccaaccagctcacccagaatctctgactggactgattagtctgtaaagactggaaaaaatgatgtcttcaaatgcatggacataaatacaagtcctaaaattcacaaagaatcagggaaacatgacatcaacaaaggaacaaaataaaatggcagtaaccagccgtgaagaaatggagatct

SEQ ID NO: 382555 - DNA, 596 bp, Homo sapiens
gataatatattcaaagtgctgaaagaaagaaactgctaaccaataataatatacctggaaaatctttcctctaataatgaagaagatacaaaggctttcccagagaaaccaaaactaagaagtttattaccattagaactgccatgcaagaagtgctaaaaggagttcttcaaattgaaattaaagaacacyaaacagtaatatgaaaatatatgaaagcataactctcaatggtaaaggtaaatatatacacaaatacataataacgtaaaatagtaatgagggtgcgtaaatcactcttaaccctagcatagagcttaaaaggcaaaacatagaaagaaactataactgcagaaagttggataatgaatacatagtacaaaaataagttaattctgacattaataaagtggggcagggaagtgcaagtatagtttttgcatgcaattgaagttgtcattagtcaaaatggactgttacagtaataaagagttttatgcaagcctcattgtaaccacaaagaaaaaacttgcagcagatacagaaaagagaaaggagactgcatatagttgcattctggttttattttttaacac

SEQ ID NO: 382556 - DNA, 596 bp, Homo sapiens
gataatatattcaaagtgctgaaagaaagaaactgctaaccaataataatatacctggaaaatctttcctctaataatgaagaagatacaaaggctttcccagagaaaccaaaactaagaagtttattaccattagaactgccatgcaagaagtgctaaaaggagttcttcaaattgaaattaaagaacactaaacagtaatatgaaaatatatgaaagcataactctcaatggtaaaggtaaatatatacacaaatacataataacgtaaaatagtaatgagggtgcgtaaatcactcttaaccctagcatagagcttaaaaggcaaaacatagaaagaaactataactgcagaaagttggataatgaatacatagtacaaaaataagttaattctgacattaataaagtggggcagggragtgcaagtatagtttttgcatgcaattgaagttgtcattagtcaaaatggactgttacagtaataaagagttttatgcaagcctcattgtaaccacaaagaaaaaacttgcagcagatacagaaaagagaaaggagactgcatatagttgcattctggttttattttttaacac

SEQ ID NO: 382557 - DNA, 601 bp, Homo sapiens
ctgctaatgaacatacagtgcagtggtggttcaagaagttttgcaaaggaggtgagagtgttgaagatgtgaagcatagtggccagccatcagaagttgacaatgactaattgagagccatcattgaagctaatcctcctacaactacacaagaagttgcagaagaactcaacattgaccattctatggtcgtttggcatttgaagcaaattggaaaggtgaaaaagctcagtaagtgagtgcctcatgagctgactgaaaatttaaaaaaatgtcatttggaagtgtcatattctcttattcaacacaaaaacgacaaaccatttctagatcgaattgtgacatgcaatgaaaagtggattttatacaactgttgatgaccagctcagtggctggactcagaagaagctccaaagcacttcccaaagccaaacttgaacccaaaataggtcatggtcaacatcactaatgatcagggaaatgcaaattcaaaycacaatgagataccaacttactcatgcaaaaattggccataatttaaaaaaattaaaaaaatagatgttggcttggatgtggtgaaaagggaccacttttacactgc

SEQ ID NO: 382558 - DNA, 561 bp, Homo sapiens
aagctgtcactttcagctgctgagtcaaaaatgttctgcagggatgatagcagcttctgctcatcaccttttttcctgcacaggtggaagccaaatgctctgcaccaaaaaaatacaaagagagattttaggacattatttttctggggcaacatgactgatgtcactttgtattctttctagccaatttaaaatctatattttgcaatcgatttttccaatttccttataattcaatacatggttatgacataaatccttatcttaaaaaagcactatgtctaacatccttttaactttgtaatgtctaaataatgaacctgcttttccttcctaaatatcatcccttcattgtttagatrtctcactgtaccttctaccttcctaaggttgttcctaatgcatttaatccaaactaccaaacacatagtatcagagctgtattgccccttctccttccaccgaaatgtggttgccccaggtaagatccttcaattgttaaactaggtaactagtgatttgaatgagtaattttcattcaagtttccatttgtaactttc

SEQ ID NO: 382559 - DNA, 577 bp, Homo sapiens
tttctggaagcatttgtgtcaccatactaaatccactcattagttctagcaggcttttgcttttgtttttgctttatttttacaatgtttagaatttttttatgtatacaatgtgtcatgtcatcctcaacaaaaaaaaatttacttcttccgttctaatcttcctactttttaaaaaaataacttttttaaaaaattaatttttttgagcagtttcaggtgcacagcaaaattgagagtaaggtacagagatttcaacattatcatcatycttcactagaatggtacatttgttaacagttgatgaacctatactgactcattattatcaccagaaattagttgtttacaccagggttgtatatgtaaatacaattgcagtatcatatagaatatttccactgccctccaaattctctgtgttttgccttttcatcccttttcccatcgccaccctactccctgtttttttcttttttttttttctgtccccttagttttgccttttacagaatgtcatatagttgggcttacacagtaggtagctttttcagattggcttctttcacttaataat

SEQ ID NO: 382560 - DNA, 567 bp, Homo sapiens
aaaaatgaagcaagtcactgcagaattttgtgcctcagttgctgtatatttttactttgtcttattttttcttctctaaaataaacatatattactatatggaaacaaacagatacatctgttggtcaaaactgtagttaaatgcttaagtgctaaagtacaataatggggtgggggatagataagggcaacagagaggaagagagagaaaggatttccaggaaagagaaaaaaaaattatgtcttaaaagtttcatagtaatatgtagagaaaatattctataaatccctaagtggatttattttatgttatgaaatactgctctccagaagaaactaaaatcttttctctattataacttgtttctacaattttatcyctgctattaaaaatatgaaatattgtaactttttaatatacagcattgaatttgtagagaattctcagaatcaaagataaaaccaatttcaaaggactaggtaaccatattaggattcttctgcaagaatgtacttgtttcactcagattctccaggggaagtgaacacattttgaatatacaacga

SEQ ID NO: 382561 - DNA, 612 bp, Homo sapiens
ctggtttatacttccatcctgtggkttcactaatttcataagttcagacagtcctataacaaggaggataattttctgggacagtgatgatgcacagtccttttctggtatcagagataagtgggtgaaaacaggcattggcatgcagctgagatctgtcagttcctgctcatggcacctggttcttgggtgagaatcagagccaatttcatcatatcaaaattactaatcctattcactatgtaaattattttacatccatcagtctaatttctgagctttgagagatacactttttttgttatgtcttgaactttctttttgtctattaaatatctgtgtatataaactcatcagaattatatttttttagtatacattcattgatttatgttaaaaatatattcattgagctcctactatgtgccaaacattgtcctaagtcatgggcacagaacaatcactacaacaaagtctttgctctcataaagtttatagcctggttgcaacttacaattttatagtctggctggtaaagattttacacacactgatatacgtgtgtgtgtgtgtatatatatatgtatatatatatacacacatgcatatata

SEQ ID NO: 382562 - DNA, 612 bp, Homo sapiens
ctggtttatacttccatcctgtgggttcactaatttcataagttcagacagtcctataacaaggaggataattttctgggacagtgatgatgcacagtccttttctggtatcagagataagtgggtgaaaacaggcattggcatgcagctgagatctgtcagttcctgctcatggcacctggttcttgggtgagaatcagagccaatttcatcatatcaaaattactaatcctattcactatgtaaattattttacatccatcagtctaatttctgagctttgagagatacactttttttgttatgtcttgaastttctttttgtctattaaatatctgtgtatataaactcatcagaattatatttttttagtatacattcattgatttatgttaaaaatatattcattgagctcctactatgtgccaaacattgtcctaagtcatgggcacagaacaatcactacaacaaagtctttgctctcataaagtttatagcctggttgcaacttacaattttatagtctggctggtaaagattttacacacactgatatacgtgtgtgtgtgtgtatatatatatgtatatatatatacacacatgcatatata

SEQ ID NO: 382563 - DNA, 467 bp, Homo sapiens
gtcttatgcattttggggtgcaaagcttccagaatcctgctggaaatgaattcaatggtaaaacaaaactattgaaagttgtagcccaaaccagctcaatatgaccccagtggaatttgaatgataagccccttaccctagccactaggcctgcccactctgagatacaaacactatgtttmgagttagatagaaattatgagatatgttaagaaacaggaaaatgtgataaatattcaagaatgaaagtcaatagagacaaactcacagatcatccagattttttaattaggaagtattacattgaaataagtatcataaatatgttaaaggatttgcaaaaaagatggatataatgaatgaagataaatggagcttcagaagaaaaatagataccttttagaaatataaacaaatgagaatctagaaatcaaaactaaaatatctcaaaaaaaggtttttaattt

SEQ ID NO: 382564 - DNA, 539 bp, Homo sapiens
taacccagaaattttagtcctaggtatctacccaagagaaataaaaacatatgtttacataacacttgtgtgtgagaaatcattattcataatcgcttgttcagaacaattcataataggcaaatgctagaaataatccaaacatctatcaactgatgactgaataaacaaaatatatccaaatgtggaatgctactcatcaataaaaggaacaaagtactaatacatgtggcaagttaatagttcaaaaacatacaaatataattagacacaaaagactacatattgtatgrttccttttatacaaaatttctagaaaaggcaaaattatagagacagaaaaattagtggctgttgttagggctgcagcgggagcaagaattaactgcaaaggggcatgagggaaacttcttggtaactgaaatgttatataactggattgtggtgatggttgcacaattataaaaatttactaaatttcattgaactgtacacttaaaatgggtgtacacctgaatacactaccagaataaagcatg

SEQ ID NO: 382565 - DNA, 564 bp, Homo sapiens
cactggggcctgcttgggggtaaagggtggaaatagggagaggatcaaaaaaccacctatagggtactatgcttattacctggctgacaaaatgatctgtacaccaaactcaagtgacatgaaatttacccataacacaaaccagcacatgtacccttgaacctaaaatgaaagttaaaaaatacatacatcaaacaaaatcattatggaagccagaaatcaatagaatgacaccttaaaaatgctacagaaaaattgcctacctgaattctatatcaagcaaataaccctccaaaaatgtagacaaaataattaatgacattttcagaaaaacaaagaatgagaagtcaccaccagcagatctgaatgaacacaaacacttaagaaattcctcaggcagaagtaaaataatttgagattgaaacacgtaaattcaagaggtaaagataaatatgtggataaatccamtcacatactattcttaaaacaataatagtaattatttgtagttgttaaaatatgtgaaaaattaaaatacacagcaatacaaaatatcataggggg

SEQ ID NO: 382566 - DNA, 555 bp, Homo sapiens
tttcagtaggaatggtactaacamttatttttcttttcttttttttttcttttgagacagagtcttgctgtgtcttccagtctggagtgcagtggcgtaatctcagctcaccgcaatctctgcctcccagggtcaagccattctcgtgcctcagactcttgagtagctgggattaaggcatgggccaccatgtccagctaatttttgcatttttaatagagatggggtttcaccatgttggccaggctggtctcaaactcctggcctcaagtgatccaactgcctcagctttccaaagtgctgggattacaggcgtgtgccactgtgcctggccctggaatagtactaacacttctttacatgtctggtagaagtcagctctgaatcagtctggtccaggcctttcttgattgctaggatttttattactgattcaatttttgaatgttgttggtctgttcatggtttcagtgttttcctggttcaatcttgggaggttgcatgtttccaggaatgtatccatttcttgtagggtgtctagtttgtgggtagaga

SEQ ID NO: 382567 - DNA, 555 bp, Homo sapiens
tttcagtaggaatggtactaacacttatttttcttttcttttttttttcttttgagacagagtcttgctgtgtcttccagtctggagtgcagtggygtaatctcagctcaccgcaatctctgcctcccagggtcaagccattctcgtgcctcagactcttgagtagctgggattaaggcatgggccaccatgtccagctaatttttgcatttttaatagagatggggtttcaccatgttggccaggctggtctcaaactcctggcctcaagtgatccaactgcctcagctttccaaagtgctgggattacaggcgtgtgccactgtgcctggccctggaatagtactaacacttctttacatgtctggtagaagtcagctctgaatcagtctggtccaggcctttcttgattgctaggatttttattactgattcaatttttgaatgttgttggtctgttcatggtttcagtgttttcctggttcaatcttgggaggttgcatgtttccaggaatgtatccatttcttgtagggtgtctagtttgtgggtagaga

SEQ ID NO: 382568 - DNA, 609 bp, Homo sapiens
attcagtaactaaacttcttgcttaagagtcttgaataccccaaacaaaatatggtaaaaataacaaaatagtgtttcaaacaatcaactcataaaagataaatagaaaattctcattagtataaatgawgtataagaaaaaaaggcataaagctaagatatcacaggcaatttatctttcctccaaaaatacacctttctttatttcctggctctaataagaaagaagtttcagagcagacattgtgtttatggagatgaacattgtttaaaggttcttcacgaaattcaggtcttttatgtaaacatttttcactaatgtgacaaaattttcttatatttataacttagttccatttctaaaaatactcatgaaagaggaatacaatctcaaaattctagaaaattgcttgttatcgatttgatatagaaaacagaaaaaatgttcaatttcaattttagctcagtacaatcatacgctcacaaatttgtgaaacatgagattataatataaaggaacctcacttcaatattttaatttaagattgttttcatagaacaccaacttaaagtaatcctatgtctgccatcaatctccttggcttgtct

SEQ ID NO: 382569 - DNA, 609 bp, Homo sapiens
attcagtaactaaacttcttgcttaagagtcttgaataccccaaacaaaatatggtaaaaataacaaaatagtgtttcaaacaatcaactcataaaagataaatagaaaattctcattagtataaatgatgtataagaaaaaaaggcataaagctaagatatcacaggcaatttatctttcctccaaaaatacacctttctttatttcctggctctaataagaaagaagtttcagagcagacattgtgtttatggagatgaacattgtttaaaggttcttcacgaaattcaggtcttttatgtaaacatttttcactaatgtgacaaaattttcttatatttataacttagttccatttctaaaaatactcatgaaagaggaatacaatctcaaaattctagaaaattgcttgttatcgatttgatatagaaaacagaaaaaatgttcaatttcaattttagctcagtacaatcatacrctcacaaatttgtgaaacatgagattataatataaaggaacctcacttcaatattttaatttaagattgttttcatagaacaccaacttaaagtaatcctatgtctgccatcaatctccttggcttgtct

SEQ ID NO: 382570 - DNA, 609 bp, Homo sapiens
attcagtaactaaacttcttgcttaagagtcttgaataccccaaacaaaatatggtaaaaataacaaaatagtgtttcaaacaatcaactcataaaagataaatagaaaattctcattagtataaatgatgtataagaaaaaaaggcataaagctaagatatcacaggcaatttatctttcctccaaaaatacacctttctttatttcctggctctaataagaaagaagtttcagagcagacattgtgtttatggagatgaacattgtttaaaggttcttcacgaaattcaggtcttttatgtaaacatttttcactaatgtgacaaaattttcttatatttataacttagttccatttctaaaaatactcatgaaagaggaatacaatctcaaaattctagaaaattgcttgttatcgatttgatatagaaaacagaaaaaatgttcaatttcaattttagctcagtacaatcatacgctcacaaatttgtgaaacatgagattataatataaaggaaccycacttcaatattttaatttaagattgttttcatagaacaccaacttaaagtaatcctatgtctgccatcaatctccttggcttgtct

SEQ ID NO: 382571 - DNA, 557 bp, Homo sapiens
tgtcatatcaacttgctgtgtgttacttccttcccactcctcctcacttttgtcatcttttggtacctttctttttacagtgacttatactttgcttcaccttctgtaatgccatattttcaaaaactgatctttatctgttccaacctgccctttcaacttgaacatccttcatcctgagacgccaaatatttttccactgtaatttatatacatcattattcagacttgrccctacttgtcacaactgcctttaaatacattttttaaaagaggccacaggtaatattcacgttgtagtactgtgtcaccaagataaaacagttagagttcggacttctttaagtctggtgtttgcagtttatgttcctgcagtactgtgtacacacaactgaaaatcaataggaagttaatggaaagcaaataccatagggagaatcaggcactacacaaaacatacttatagagcaagagagaaaacatttcaagcaaatggataaaaacaagtttggaaagttgaagaaaaaatggatcggttgttttatatgatgcttact

SEQ ID NO: 382572 - DNA, 619 bp, Homo sapiens
ctacacaaaacatacttatagagcaagagagaaaacatttcaagcaaatggataaaaacaagtttggaaagttgaagaaaaaatggatcggttgttttatatgatgcttacttttagggaatctataacttggccttaggttcaatatgctttcactttctcatattataaaaaatgtctgtttggaataccttgagggaaacaccctgattaagatgattcaccagggtgtactaggaggttcatatatcttcatattttcagaattgtaagaaacaaactctcaaaggcttgagtatatcttaaatgatgaatgtaatgaacagctcagatagaatgtgctaagctcaaagttgctccagccatgacgcctckatccagggaggtagaataactctggcttgctgaatattcctatgggccaaaaagccactcttcagataagcatttataagcatttgctgagtacttcgtatgtgctccaaatgagcacagacttgatgttccgtatttcaatcattcattgaattattaatttaaaaaagaggttgtatagcacaatggttaagactgtatattctgcagtcagatagaactaaaaatacatgtgtgtaaagta

SEQ ID NO: 382573 - DNA, 619 bp, Homo sapiens
ctacacaaaacatacttatagagcaagagagaaaacatttcaagcaaatggataaaaacaagtttggaaagttgaagaaaaaatggatcggttgttttatatgatgcttacttttagggaatctataacttggccttaggttcaatatgctttcactttctcatattataaaaaatgtctgtttggaataccttgagggaaacaccctgattaagatgattcaccagggtgtactaggaggttcatatatcttcatattttcagaattgtaagaaacaaactctcaaaggcttgagtatatcttaaatgatgaatgtaatgaacagctcagatagaatgtgctaagctcaaagttgctccagccatgacgcctctwtccagggaggtagaataactctggcttgctgaatattcctatgggccaaaaagccactcttcagataagcatttataagcatttgctgagtacttcgtatgtgctccaaatgagcacagacttgatgttccgtatttcaatcattcattgaattattaatttaaaaaagaggttgtatagcacaatggttaagactgtatattctgcagtcagatagaactaaaaatacatgtgtgtaaagta

SEQ ID NO: 382574 - DNA, 603 bp, Homo sapiens
ccccctgaaatccacacaataactccaaacgtccctggccttggtgagaaagctctgttctgttggagaattacataaagagatcattgaggaaaagaatggatttctaatgctaaagatgcagcccaaaatggccaagcacctcctattggacctggtgcatagctcatgcttaaaatcttctagtttccttgttctcttttccttcccagtgcctgaaggtttcgagaagtctgagcatgtgagttaggaagcagaaaaaagaaaagcctaaatgaaatggtgtaaggaggtatcaaataaagtagcatcgggtttatttgatatttgaagcctttccayttaggatgttagatttcttaggcaagataattctttgcactcactgcatccctctgacaaagctagacaatgtgtatcattttctgcattttaagtcacatgactaacacttatttcaagaagaaaattaatgtcaaaggcataaaaaaaagaacacagaaatttaaatccatacacttttgcatttctaccagtttttgttacaagtaattataaagtgattttaaaaaaaaatccacatgcccactggaacaagtctac

SEQ ID NO: 382575 - DNA, 499 bp, Homo sapiens
ataggtgatttccaaatattttctcccagtcagtggcttttattttatcagctaacttaacctaatagacatttaacggagtctttacagagcaaatattttaaattttttatgaggttcaatttatctactttttctcttatggatcattcttttgatgttatgtctagcaagtctttgcctaatgctaaatcatgaagattttttccaatattctcctttaaatgtttgtagctttatgttttatatacatgattaattttaagcaaattcctgtaaatggtttttgcgtaagcttgttttttttgttttttttgtttgtttgttttgtcaactgacattcaaatgtgcataaatcacttgaaactacaattatacaatccttcctccatcttgttgggaatttgacaaraaacgtgtttaatccacaaattggtttaaggagaattaacctctttattatgttgagctttgccgtccaggaacatggtttgtctct

SEQ ID NO: 382576 - DNA, 598 bp, Homo sapiens
ctacctgctgctcctgtttacacctcatcagtctagttacaaaatctgccaatttcccatgtttgcccacgacatttttactcacacttgatttttctggagttgagaaaccctctttgagatttaagaagtcatggagaagacttaaatcatggaaatttaagaagtcacatgccgacttctatattggctttgttctgtgcacttaacccattccatctctctcctcttttctctgagcaaatccttctcctggcctcaggcagcyttggtaccagcaagtggagggaagggaagaaattagcaagaaagttttcacttgactgatgcgttcaagagctggcgttgagctctctgtgtcttgatcttgttttgagctacctttttcctcttaaagcacttttggggttccttacagactctcccacttccacctcatgttgtagatgacctcacacctgtagttctcttgagagggaaagtttcttctccacctttaaatttagacatacattactctctaaatggtttcttcaaagacctctgcttggttttgagatcaagaaaaaagaactcctaattctatttcccttgcaga

SEQ ID NO: 382577 - DNA, 565 bp, Homo sapiens
tttagccatgtcttcgtctcataactaaacaatccaggtactgagtctatgtttcctgctctggcctggagcatcacttattaatttgtatgatatttgtaaatacataaggaaggaattaaccataaaagaaaaatagatgcatttaccatacaaatgagaaatgttatttcaaaaarcaatgtaaacccatgtgaaatccaagtgacaaactcaaaacatgttttcacatctatgtcagagctggtgaattcttatttttcacacttgatgcttttgctcgcccactaatatttctccgatttgagctagcttcccgggacttctcatcctcagaagagttgctccttgcccactttgtcagtgtgattgtctcagtgctttcagtctctgtgagtaaaataatcaaaatgaaaatataaaaatacgtattttttctagtctttgagcagcaaagatctttcttaccatgaaaaattcacaggagccataaggaaagagtcagatttggccgcgtagacatttaaacaaaattcgtaatagacaatgagatgagacaaatgtt

SEQ ID NO: 382578 - DNA, 660 bp, Homo sapiens
ttctacatttttttcatcatcaagccaattagcctaccaagaaatttaccrtaatgaatagcagtggactggaatgttgtggtattcaaaggattattttctatgtaaggggtcattttgtgcctatcatatgggcaagatgcccactgctgaactaaactgtaaaaatgaataatgtctttatattcaaaattaaaagcttacaatatatgtattgtcctgttactacaaaatattgtttgcaatccagtttcttttgcattgtaatggagcaaatcttttaattatgcagtcacataagtgacatgaaagcatgttaaagctcagagaaaatagaaaggtcatttactctacatcttgtattttgcaaatgagatattttgaattttccaaggtattattgattgagctgagtctaaaactcagaaaacttctgcttctcaagctagtgcttcttccactaccaaacataaaaacataatatggcattatgtcccttgcaaataaattcactctgctaatgcagactctccaatgcatattgaagaaagctttgacccctcacactcctctccagtaactccatctccactaccatcctgatagatcgtgaaagcctttaaaggggtctttgttgttgctgttattaattcttgattc

SEQ ID NO: 382579 - DNA, 660 bp, Homo sapiens
ttctacatttttttcatcatcaagccaattagcctaccaagaaatttaccgtaatgaatagcagtggactggaatgttgtggtattcaaaggattattttctatgtaaggggtcattttgtgcctatcatatgggcaagatgcccactgctgaactaaactgtaaaaatgaataatgtctttatattcaaaattaaaagcttacaatatatgtattgtcctgttactacaaaatattgtttgcaatccagtttcttttgcattgtaatggagcaaatcttttaattatgcagtcacataagtgacatgaaagcatgttaaagctcagagaaaatagaaaggtcatttactctacatcttgtattttgcaaatgagatattttgaattttccaaggtattattgattgagctgagtctaaaactcagaaaacttctgcttctcaagctagtgcttcttccactaccaaacataaaaacataatatggcattatgtcccttgcaaataaattcactctgctaatgcagactctccaatgcatattgaagaaagctttgacccctcacactcctctcyagtaactccatctccactaccatcctgatagatcgtgaaagcctttaaaggggtctttgttgttgctgttattaattcttgattc

SEQ ID NO: 382580 - DNA, 570 bp, Homo sapiens
tattttgcaaatgagatattttgaattttccaaggtattattgattgagctgagtctaaaactcagaaaacttctgcttctcaagctagtgcttcttccactaccaaacataaaaacataatatggcattatgtcccttgcaaataaattcactctgctaatgcagactctccaatgcatattgaagaaagctttgacccctcacactcctctccagtaactccatctccactaccatcctgatagatcgtgaaagcctttaaaggggtctttgttgttgctgttattaattcttgattctgcaaaatctatcacagtgcytgacatacaataggcagttaataatgttcactgcagaataaaggatgtgtcagatctatatgtcaacaattgcaaagctttatctaaaagaaaaatgattgccacttgtcaataagaaggcagacatgatgtgtttctaatatagagacataattaggtttggggcactattgttggtgtgaatgtttgatttttgaaaagaaatcgcctcatttccaatagtgcagattgtatatgcagtatgttaaa

SEQ ID NO: 382581 - DNA, 570 bp, Homo sapiens
tattttgcaaatgagatattttgaattttccaaggtattattgattgagctgagtctaaaactcagaaaacttctgcttctcaagctagtgcttcttccactaccaaacataaaaacataatatggcattatgtcccttgcaaataaattcactctgctaatgcagactctccaatgcatattgaagaaagctttgacccctcacactcctctccagtaactccatctccactaccatcctgatagatcgtgaaagcctttaaaggggtctttgttgttgctgttattaattcttgattctgcaaaatctatcacagtgcctgacatacaataggcagttaataatgttcactgcagaataaaggatgtgtcagatctatatgtcaacaattgcaaagctttatctaaaagaaaaatgattgccacttgtcaataagaaggcagacatgatgtgtttctaatatagagacataattaggtttggggcactattgttggtgtgaatgtttgatttttgaaaagaaatcgcytcatttccaatagtgcagattgtatatgcagtatgttaaa

SEQ ID NO: 382582 - DNA, 621 bp, Homo sapiens
ctaagcaaaaagaacgaatctggaggcatcacattacccaacttcaagctatactgcaaggctatcgttaacaaaatggcaaggtactggtataaagaccaatggaacagaatagaaaagccagaattaaggccaaatacttaacagccaactgatctttgacaaagcaaacaaaacataaagtggggaaaggtgaccctattcaacaaatggtgctgggaaaactgcaagccatatgtaaaagaatgaaactagatcctcttctctcaccttatacaaaaatcagctcaagatggatcaaagatctaaatctaagacctgaagccattaaaaattctagaagataacatcggaaaaactcttctagatattggcttaggcaaagaattcctggccaacaacttaaaagcaaatgcaacaaaaacaaaaataaataaatgggacctaattaaactaaaaagcttctgcacagcaaaagaaataatcagcagagtaaaygtgggagaagatatttgcaaactatgcatccaacaaaggactaatatccagaatctataaggaactcaaacaaatcagcaagtaaaaaacaaccccatcaaaaagtgggcaaaggacatgaat

SEQ ID NO: 382583 - DNA, 520 bp, Homo sapiens
aacttttctttcctgataaagaagagaaagctaatttcttcctgccagccttggacactgtcatttgaagatacaatgattggcaatgtagctgtcatcctgtggcaatgaggggaaatccaagagggtcgttgagaaactgaactgctaaaatcatctacctctggagtaaaggragatttattattaaactacctttctttagttcacttttagtcaaatattctcttacagccttatgcctccgagctgatacccagtttcaaggagtctgtcacagttcttgctaattgtatgaaataaagactcagtgctgccaaattgctctattattcagaggagatagaaaacaagacttgattttatattccaataagtaaatgtttgcatctaatattttaaaacattctgtgaggcaaacaaaaacgtttgcaggttgaatttaatccttgaacaaaaaatttgagatttcagaaaaaatgaacttttagaaaagtattaaaattacatttctacacac

SEQ ID NO: 382584 - DNA, 548 bp, Homo sapiens
ttactttggaccaacaggtttctttgtgttatactattctaaagataacattcaataatattccatggatatgtggctttatagcttcttggtaactgaagaagtacaatgaggatatttcagaaatgagaaaaatatccagaattttaaaaacaataagaaccttcaagtttgataatataggtaacattaacagttgaggtgggtcacaggacttagcatacaagtcctgtggccttatttttaacttacggtgtttttaatagtggcccaattccattcctttgtctgagatctgtagaagtttggaagtattttacagaatagtctttgtagtcctaaaatgtcttaaatttctgtttcatayttctcacatccagttcaaggccccacccctattataactctggccccaacatgttacagaatattaaaatggattagtgtttattttctaaaggaattagaaactaggaattaaacattagggataatcctgaccctccttaagtctgaatgaattcctgatagctgtgggcatcagtgta

SEQ ID NO: 382585 - DNA, 548 bp, Homo sapiens
ttactttggaccaacaggtttctttgtgttatactattctaaagataacattcaataatattccatggatatgtggctttatagcttcttggtaactgaagaagtacaatgaggatatttcagaaatgagaaaaatatccagaattttaaaaacaataagaaccttcaagtttgataatataggtaacattaacagttgaggtgggtcacaggacttagcatacaagtcctgtggccttatttttaacttacggtgtttttaatagtggcccaattccattcctttgtctgagatctgtagaagtttggaagtattttacagaatagtctttgtagtcctaaaatgtcttaaatttctgtttcatatttctcacatccagttcaaggccccacccctattataactctggccccaacatgttacagaatattaaaatggattagtgtttattttctaaaggaattagaaactaggaattaaacattagggrtaatcctgaccctccttaagtctgaatgaattcctgatagctgtgggcatcagtgta

SEQ ID NO: 382586 - DNA, 490 bp, Homo sapiens
aggtctggcagtacatgcaatcccaatatcctatctaggcatctagttagttcgggcaatgtatttccaaaacctstaagtcattttcctaaggctcctttctagacttgttaaaaggatagacccctaacctttctctaaatggatggagtgagggatttatagaacagtgatagttcttttaaccaatattttcttccaccctctgtgatgccttttactgtctttgatttgggtggtgaatccaagagttatggaacaagttcttcaacaatgttcttgtaaattccttacatctacaagatggtcccaggaagatccgctccttatataagtctgggatcctaatgaaagagagagaaattgagagaaacagttgcagagaaaaagagagggagagagagagaggaaacacagctgagataaaatattctgaggcattggattctgtagcagcagcagcagcagctgattttaccatttttattgt

SEQ ID NO: 382587 - DNA, 559 bp, Homo sapiens
aaacaaaaacatgctttgggatagaaagattattctctaaaaccgatataaaaaaawaagtttccatcaagacacaaatgacttaaatgccaactaatagtaaatgatgaaagaaatcccagataaaatgcacttatagccagcacaaatacagtaatgattccgtgggtaatatagaatcatccttgatagtttaggaaaacaatttataacaagagaaaaagttacatatagtaaaaaagcaaaacaaaagaaacacaaaaatgggctttgaactagagatacctggctttgctgtttttgagatgaatacatttgggcaagttaattaacctttctgagcccattacattatcaataaaatgaggatcccagtatttgaactgcatgattgttttaggattaatagttgtgtcctaaggcctttgtgacatggccagtcctccacaatccatatccatcatatcatttcctaaaataaattttatcaaaacaatgctatactgtctggggctgaaagtttgaagaacaacctaggatttcaaacaatttgcaaaca

SEQ ID NO: 382588 - DNA, 559 bp, Homo sapiens
aaacaaaaacatgctttgggatagaaagattattctctaaaaccgatataaaaaaataagtttccatcaagacacaaatgacttaaatgccaactaatagtaaatgatgaaagaaatcccagataaaatgcacttatagccagcacaaatacagtaatgattccstgggtaatatagaatcatccttgatagtttaggaaaacaatttataacaagagaaaaagttacatatagtaaaaaagcaaaacaaaagaaacacaaaaatgggctttgaactagagatacctggctttgctgtttttgagatgaatacatttgggcaagttaattaacctttctgagcccattacattatcaataaaatgaggatcccagtatttgaactgcatgattgttttaggattaatagttgtgtcctaaggcctttgtgacatggccagtcctccacaatccatatccatcatatcatttcctaaaataaattttatcaaaacaatgctatactgtctggggctgaaagtttgaagaacaacctaggatttcaaacaatttgcaaaca

SEQ ID NO: 382589 - DNA, 649 bp, Homo sapiens
gtgcttgatattgtccatagtttcattgaattttcatttttcccttaaagttgtaaaatagctctaaaataaagtgtatttgtaggacatgttagaggacatgctagcacttttaactgtcttttctatgctttgctttcttcgttacaatgtgtaaatagaaatattttttataaactccataaaacttttatcataagtgatgtttcamggcctttagataaaagctttcctttaggcttatgcaaatttttgatactagtattactatcagagtatctgtttaagattctacagctgtttttattatatgtcaggcagtgcagttacattaataagcattaccaaaaatttcactcaagatatttttagcataactatattcacaatatgtattttcatatggcaagaataattttccatgaatttactaggaattattaaagacacttcaaatgtattttatattatgcaacatccaatgttttcaaaagtgtggaaaaatcttttaaataatgtgaacttgtttttcatttcttgttcatttacttttcatattcaaacttctcttttttagttcatacaaccttcatcagtttgctcttaactatttctcatcttttactatcctgtcaaccatctcctatct

SEQ ID NO: 382590 - DNA, 326 bp, Homo sapiens
tttttttcaaataaagacatacaaacaataatgtctgctttgtattgggaaattatactggtctaacaggaaaactggtctaacacaggtagtcaagaaacttattgatatgcagggtttaaaaattgaaatgattttaaggcctctgtatctctacatttttaggaaaaagtgatgggagtgtcttgtgccttttgtatagtcttttgcttatattcagcaagaatgktttactatactcactgaaggctaagctctgatttttttttttaatcttgcccaaattcctatctaaggggcctggggagcatgccctacaaagcata

SEQ ID NO: 382591 - DNA, 488 bp, Homo sapiens
aaccttcaacgaaatactagcaaactagacccaccagtgcatcagaaaactaatccaccatatcaagtaggctttatccttgggatgcaaatttggttcagcacatgcaaatcaagaaatgtaattcattacataaatagaactttaaaagaccacatgattatttatctcaatagaggcagaaaacagttwcaatagaattcaatatcgcttcatatcgaacatctcaacaaattaggcactgaaggaacatatttcaaaataataagagccacctatgacaaactcacagccaacatcatactaagtgggcaaaagctagaagcattccccttgaatactggaacaagacaaggatgttatttctcaccattcctattcaacatagtactctaagtcctagcaagagcaatcaggcaagagaaagaaataaaaggcatccaaataggaagagaggaagtcaaaccacccttgtttaccaatgatat

SEQ ID NO: 382592 - DNA, 623 bp, Homo sapiens
acatcttggttgtttccaattttgacaattatgaataaagttcttataaacattcatgtgcargttttttgtctatataaattttcaacttatttgggtaaatacaagtgtgatttttgcatcatatgataagactatattagcttcataagacgctgccagattgtcttctaaagtggctgtaccttttgcatttccatcagcaatgaaagcgatccctgcttgattcacatcctcatcaataatctttattatcagtgtcttggattttggccattctgataggtatgtagttgtattttattattgttttaaaattacaattccctgatggcatataattttgggcatctttttatatgcttacttgccatctcgtatatcttctttagtgaggtgtctgttcatatctttttcctattttataatttttaaaaaattgtatattttggataaaagtcctttgtttaaaatatatatgttttgaaaatgtattcttccaatttttggcttgtctcttcattctcctaatagtgtttctctcagagcagaagtttttaattttaatgaagagcaacttatcaaatttttgcttatatgtgttgtttttagtgttgtatcta

SEQ ID NO: 382593 - DNA, 623 bp, Homo sapiens
acatcttggttgtttccaattttgacaattatgaataaagttcttataaacattcatgtgcaggttttttgtctatataaattttcaacttatttgggtaaatacaagtgtgatttttgcatcatatgataagactatattagcttcataagacgctgccagattgtcttctaaagtggctgtaccttttgcatttccatcagcaatgaaagcgatccctgcttgattcacatcctcatcaataatctttattatcagtgtcttggattttggccattctgataggtatgtagtkgtattttattattgttttaaaattacaattccctgatggcatataattttgggcatctttttatatgcttacttgccatctcgtatatcttctttagtgaggtgtctgttcatatctttttcctattttataatttttaaaaaattgtatattttggataaaagtcctttgtttaaaatatatatgttttgaaaatgtattcttccaatttttggcttgtctcttcattctcctaatagtgtttctctcagagcagaagtttttaattttaatgaagagcaacttatcaaatttttgcttatatgtgttgtttttagtgttgtatcta

SEQ ID NO: 382594 - DNA, 636 bp, Homo sapiens
ttgagattcttttattataaagagaattttggtaaaattcaccttatttttgggcatagttacttttccaacaatacctatagcctacaaactgggccttacaaactgggaatcaccaggaaataagttatagtaaatttacctcaaagaaggagatgaatgtcttttaaacatgattttcaatctttctaatctcaagtattttaaattctgaaagtctagacttgaattgatatggcaaagttcacctgccacctgtccagtgacttaagagaatgaaatttaaagagggggtgatgcttatttgatgtaacctttgatcttttgacaaacctatgaaaaacaaatagagctttargaaaacctttccttttaaaatgggcatgcttatatattatttaagagaagtacctgagtgacatatttcttttgacaataaaatgaaaaaaaatgtttgtaaagcatctcaaacacatacagcatcaggatacattagtttctttccctttcaaagaaaaccaaacacaaattgttacaagaactcatggagaaaataagtcttctgtctctcccatgtcactgcttttgacaaatgaattaccttttgttagtccccagccaaacaaataagaacct

SEQ ID NO: 382595 - DNA, 550 bp, Homo sapiens
aaatttttatttaaattcattttaagtaatctgacaaatggatcttttctctttagttttaaatttctttatcatcatacagttatttgttagttacatgcttatcatttcatcaactaatattaatatcttctgtcttttaactatttttactgttggtctgtgaagaacttgcagggttattctgcatgcttttgatattgaagtatgcaactaaaataaatattccagaagcaacttcaatataattgtttagtgaagaattcacttcttggttttgatatgagatgtcttgtacttatcagaaaatagcaatggcctattttcctgatgcattttaaygtcaatccagaaagcaattaatttgctttacatttccatcccctctttatgcaaaatctgagaataaaactgcatcatgttttcttctctaatttcttgtgttgtagtaacttatttgtgcaatatataggcattaatattattaatttctttatcattctaatttttacacctgcatttttgttaatacttgagtcaggtatacttc

SEQ ID NO: 382596 - DNA, 553 bp, Homo sapiens
tttctttctttttttaatgcagctttctttcttagctttagaggaagttgaaagaaagaaatattaatggaatcatgtaaattaacagccacagatctaaatgaatagcacctatattcaaccagggttgcttaaacaagcttgaacacctaaactctctttctcccgagtgagttgtttgctaaatatgttatggagagagatgttaggtgattgcttttctcagtactggttaagaatattggaccttggagcagattgtccctatcagtttgtataatcattatacatcaggaatggtcctcagtttatatacataggacctattgcctactcttggtggtactatattagtattgatttgcccrtatagatttctggttttgccctgaggactaaaagtggctaccttctggctacctcctgttgtcagtggcctacagttttgtaacatagtccattttgtgtcctggaaaacattaatttcttgataattgactcggatatgatagcttgaacttaattatcctgagtctgaaatatataagtcatt

SEQ ID NO: 382597 - DNA, 561 bp, Homo sapiens
gaaacaccttggcttattatttctcggaagtcttttaccaattatatttccactaataatgtatgagagtgtatttttctcacatcataaaaaatcactttaaaaatataattttaatatgcaaagtccaaatattttaaaatgtgtattgcttggtgatttatgatgttctttatttttttgtgactrttgaacatttgtgcatttttaatatatattaccagttcatgtcatctgctccatgtagccaatgctgtagataccttccatttgtctggaggtgtaccattttattgagttccagccaactttcagcatctctttccttaaagatattctccaaagctactctgccttctcacatagtaaaacacaagcaccctggaatgaacattccataggggctgctttgcagcaatggcaggcaggagttggtgataaaaacctgtcttccttaacccttgcatttatatctctgaggccagagttctacaccatttccccaagtttccctgtgggatcaaactgttaccacctgcagtggtagccgatatgataaag

SEQ ID NO: 382598 - DNA, 561 bp, Homo sapiens
gaaacaccttggcttattatttctcggaagtcttttaccaattatatttccactaataatgtatgagagtgtatttttctcacatcataaaaaatcactttaaaaatataattttaatatgcaaagtccaaatattttaaaatgtgtattgcttggtgatttatgatgttctttatttttttgtgactgttgaacatttgtgcatttttaatrtatattaccagttcatgtcatctgctccatgtagccaatgctgtagataccttccatttgtctggaggtgtaccattttattgagttccagccaactttcagcatctctttccttaaagatattctccaaagctactctgccttctcacatagtaaaacacaagcaccctggaatgaacattccataggggctgctttgcagcaatggcaggcaggagttggtgataaaaacctgtcttccttaacccttgcatttatatctctgaggccagagttctacaccatttccccaagtttccctgtgggatcaaactgttaccacctgcagtggtagccgatatgataaag

SEQ ID NO: 382599 - DNA, 561 bp, Homo sapiens
gaaacaccttggcttattatttctcggaagtcttttaccaattatatttccactaataatgtatgagagtgtatttttctcacatcataaaaaatcactttaaaaatataattttaatatgcaaagtccaaatattttaaaatgtgtattgcttggtgatttatgatgttctttatttttttgtgactgttgaacatttgtgcatttttaatatatattaccagttcatgtcatctgctccatgtagccaatgctgtagataccttccrtttgtctggaggtgtaccattttattgagttccagccaactttcagcatctctttccttaaagatattctccaaagctactctgccttctcacatagtaaaacacaagcaccctggaatgaacattccataggggctgctttgcagcaatggcaggcaggagttggtgataaaaacctgtcttccttaacccttgcatttatatctctgaggccagagttctacaccatttccccaagtttccctgtgggatcaaactgttaccacctgcagtggtagccgatatgataaag

SEQ ID NO: 382600 - DNA, 561 bp, Homo sapiens
gaaacaccttggcttattatttctcggaagtcttttaccaattatatttccactaataatgtatgagagtgtatttttctcacatcataaaaaatcactttaaaaatataattttaatatgcaaagtccaaatattttaaaatgtgtattgcttggtgatttatgatgttctttatttttttgtgactgttgaacatttgtgcatttttaatatatattaccagttcatgtcatctgctccatgtagccaatgctgtagataccttccatttgtctggaggtgtaccattttattgagttccagccaactttcagcatctctttccttaaagatattctccaaagctactctgccttctcacatagtaaaacacaagcaccctggaatgaacattccataggggctgctttgcagcaatggcaggcaggarttggtgataaaaacctgtcttccttaacccttgcatttatatctctgaggccagagttctacaccatttccccaagtttccctgtgggatcaaactgttaccacctgcagtggtagccgatatgataaag

SEQ ID NO: 382601 - DNA, 480 bp, Homo sapiens
tttaattttattccaaatataggagagaaattattatagttttttatagttattttttgtttctcaaatagagctagatgttttatcattctattttagtttaatgcagtaaaatcttcaagttagtgttctggcttattaaatacttgggtttttttgttgagagaacagaataaaaatatgcagattgtgtgaattcaggtgtgtgatgttttcaacagcctccaaatcataaaatgcaattttctscttttagtgcctggttcatgatactaaatggcttagaaaattgtattaggtaattttctctagtgcatttgatgcacattgcactaatattgtgaagtgcctttgttttaacacattttcttataagttagataaattaaaatttctgaaggatggaattggatcaagatgattatgattaggaagatggctcattcctctccaataacattaaatatggttaattccatg

SEQ ID NO: 382602 - DNA, 494 bp, Homo sapiens
tcagttgcttcatctttataaataaatattgggctcaatgatctgattctttccaactagagaagaccatgggctstaagtcttcccatgtgcaatccatcacaagctctatgctggtttaagtagaccctaacttggctttcaaaaattaaaatatgtggttttgaagatttgtgagagtccttgaagttctatgacaaatagcaatttttagttttgcttaggaacaaattttatttgcacacagtgaggctatatgcaggaaagtaggatttattataagaaaatctagtcctctatccaccatttgtatatcaatgtagttgcatgttatcttctcattatcagtcttattacggttgcaaagcggccacttaatatttttcttttttagtatatcttctttcatttcatgaaggaaatcaataatgtaatatatcctattactttgaaaaattagtcttttatataaagtgtgaattatacattgaggt

SEQ ID NO: 382603 - DNA, 546 bp, Homo sapiens
cttcacccctttgtacacacatctgctatatcataagttggtaattagtcttctttttaagtacacttctccccagggcaaagtctgtctcactcatttyggaatttgaaatattccaaaatattctagtatttatggggagtctcaatattttcaaatatatgtagatattttaaccaaatatattggatttttcctcctccttctcttcctccttttcttcttttgcttatcctcctcttccattttcatttttagataattttaatgtctttccatatacttttacttataattcttgtgttagatttatttctatgtaccgcatattttttgctatttacatagtagcttttaagtaattttacattgcctaatcactactgggatatagaaatgcaattgctttttatataaagatcttatgactacaggttggcaaaatttcttacacattttattgtctataggttccttttttctatgttgtcgacatcatcttcaaataataccagttgttgacttattctttcattttattaattt

SEQ ID NO: 382604 - DNA, 609 bp, Homo sapiens
gtctttttgtcctattcagacattcaaaggattgaatgagacccgcccacattggggagggcaaactgctttactcagaccacaggttcgaatgctaatctcagccagaaacactattatagacacatcagaaataatgtttaatctgggcacctcatgtcccagtcaagttgacacataaaattagccattataattttgcattctattcagtgtgtagtatagtcaggcaaacagtattcttggagaactgtgtgtaargaggtattgctcctgatattagcaggattatcagtaagaatcctgtgagactgagtaagacatcgtaacatctccttttaaaggtggataataaattgattgcatgagtctatttttcaccaaccatgttaccttgctcaaaaaataaagctgtgccagagtgaataatttgaactacatagttctgattgacaagcctagatttttgcaaacattctcaataaatattaccaaaactaaactgaaagtttgaaagtctgaagaaatggaaactaaatacactcctataatttgtgatttgtattttaaaatcataatactctaatatttattaaatgtttattttat

SEQ ID NO: 382605 - DNA, 583 bp, Homo sapiens
gttgtaggtgtgcagcttgatattgggctctctaccctgttccattgttctatatgtctgttttttttttttttaccagtaccatgctgtttgggctactgtagtcttgtagtgtagtttgaagttgggtagtgtgaagcctgcagctttggtttttgctgttgttgttgttgtgtgtttgcttgtttttgcttaggattgctttggctatttagtttcttttttggttccatatgaattttaaaatgtttttttttctaattccgtgaagaatgtcattggtagtttggaatagtgttgaatctataaactgctttgtgcagtactgtcgttttaacaatattgattcttcctatcagtaagcatggactgtttttccatttgtatgtttcatctctgatytcttttagcagtcttttgtaattcttctgtagagatatttcaccttccctgttagctgtattcctacgtatttgtttctttttgtggctattgtgaatgggattgcattattgatttgactctcagcttggatgttgttggtgtatgagaatgctactgattttgtacattatttttgtat

SEQ ID NO: 382606 - DNA, 589 bp, Homo sapiens
tacggcttaggagtcatgcaactggaggctacaagattctaaccctccaccctccccaaatttctcctggagataacatcactattgtaaagcctaagataagtgcttgagttattttccagaccctgcacttgatggatgatggatcagctggcacacccagataaataaactgactcatctgatttttttttttttttgagatggagactcgttctgtcccccaggctggagtgcagtggcacaaattccacactcctatgattttatccccaaccaatcagtagcacctattccctagccccctggccatcaaattgtccataaaaaccctaacctccaagamcttgggagactgatttgagtagaaattctgtctcccacagggccagcctcacatcaattaaactctttctttacagcaatgccatggtctcagtgagttgattttgtctatgcagctatcaggaagaacatgtcaggtgattacattgccaccaaagtctcacagttatgtgtttaataggtgaaacttctggagagagaatggcttgactctctcaggcctgagtctggataccagtttggt

SEQ ID NO: 382607 - DNA, 589 bp, Homo sapiens
tacggcttaggagtcatgcaactggaggctacaagattctaaccctccaccctccccaaatttctcctggagataacatcactattgtaaagcctaagataagtgcttgagttattttccagaccctgcacttgatggatgatggatcagctggcacacccagataaataaactgactcatctgatttttttttttttttgagatggagactcgttctgtcccccaggctggagtgcagtggcacaaattccacactcctatgattttatccccaaccaatcagtagcacctattccctagccccctggccatcaaattgtccataaaaaccctaacctccaagaacttgggagactgatttgagtagaaattctgtctcccacakggccagcctcacatcaattaaactctttctttacagcaatgccatggtctcagtgagttgattttgtctatgcagctatcaggaagaacatgtcaggtgattacattgccaccaaagtctcacagttatgtgtttaataggtgaaacttctggagagagaatggcttgactctctcaggcctgagtctggataccagtttggt

SEQ ID NO: 382608 - DNA, 570 bp, Homo sapiens
tatttttatttaaataggaagaataaagaaatacttgtacattttatttttatttccctcccctcacatcacagtttttgttggaataatctcggttaatataactagattaatttattttataattacatatcatgtcttttaaaaattgatgttcattaagtttcacatgttagcaaatattttaacattatgcatacatattactgatatcagtagtaaccacaattgcttttaaattacattttctctctattggaattatttattgtgattctttttttttttttggtttgtcagtttaccattttcctaaaaacgttattcagagctctttgctgattgtatactttttaagttctttcatggctatgaatggctcacaattttgttgatgatgttttagtgccttctgacaattagtattgcagaagaaagttttgatgtcaggctgaccttttaagattattttaccataggtaacttattttccccttgcctggatgattttacrgttaaaaaaaatctttgctatatcctaaggattgctttttaaattttaaagcaaga

SEQ ID NO: 382609 - DNA, 594 bp, Homo sapiens
ggatattaaactagggttaggaggaggtctatggagagacaggtttatagcaagatagagataaaggtgttgatctggactataattattcctcctcacactagacaagggattggattagatcttgctgattataattttatgaaagcagaccaatcgtgtgtgtgtgtgtgtgtgtgtgtgtgtgtgtgwgagagagagagagagagagagagagagagagagagactatttcctaaacagaagcactagattgctaatgaaagtcctctggactactgatataagcacgcatataacaggacaggaacccagtaagaattcagccattttctgctctgaggtgtctggcaggtgttcacactttgtaaatttaggggaagtggaaaataaaaaggcccttctgattcatgcagcatctgttctggttctgtctggctatcttacttccattaggttctataattatgtctaaattaactgacattttaaagaagtttgggggagggtaaatctcaattttattcactagaatttttaaatttccggttgtcctagcaaaacgtatagatcagtctgtgttttcccattgat

SEQ ID NO: 382610 - DNA, 610 bp, Homo sapiens
accaacactactaaggagttccgtggtggctatcctctgtgggccagggctgatgttaggaggagtactcacatagtttggctcattaacagcaatggggatgatggccacagctcacccaagcaatgtaggcctagtgaagctcttcacttgtttctttccctcttgctgtctctctcctcttattgctgcactcaagttgcctagtttccccatctaggtcaaatttggcaattggcagtacttgtatcatggtgctattctgagtgtggctaattcagttacagggatatctggcaactctatgtcctataatgtcctgggtcttctgtgttttatgagctgatgccctagttagaaactggcagaggcaattttcaacctcttttcagaagggataatctcagggatgggccttgattctggctgcctacttayatgaagattttaaacctggtcatctctgttttcagccttaatgtccagccagcttgtgacttcagccctgttcccaattctggtttctatttcacatcttattattattttttgcaatgcttatcttgcctataagcccagttgtagcttcttatgttctctttttaatata

SEQ ID NO: 382611 - DNA, 433 bp, Homo sapiens
acatattgtacctttgtatttcaattgaaactttaatccatataaaattaatattatatatgttacttaatatttaaatgtggaaaatacggttgatcacttatgatatctatccacgacaaaatgttgtcatgctttcactttttttcactccatgcccctcccccacaacgcatgtacacacatatgtgcaaccagttgacattctctggagttttcaatctaaactaatattaaattctgtgacacaatacattaggaaatatttaaagagaaayaaaagttttgctactttgcttagcaaaatgaaaactaaatcttgggagaggaagatattgacctcaagaaaaggtagagaaagaagatgtcgctttaaaagagggttttgtggactgcaaactttctaactccttaaatgtccaaaattttcttt

SEQ ID NO: 382612 - DNA, 609 bp, Homo sapiens
gttctgcctcttgctggctgtgttattggctgcactcatttgcctcactctgctattcacttccataacacagcctggaaatgttatttctcctctcccctgtacaaccctctctactagtgacttgtccactgcttcaytcctgaaaccacagctactgagctctgtatcctcctctgtattgcagtcatttctgcttccatggctcttcacagttggacactaaaagcagtgatgactaatgccttcattttttctcttgacatcatctccccatgtttaagcttttctgtcacagtgggagacagcaccactagaaaaattcggtcacccagcaaggatgtcttagagtaatgttgacccttccctctcttttgtttctttagtattttaagcaatctctatatgctgctgaaatgtgtttactctaatctttatcatcttatccattattgtagtcaaatacctagtcctatctctaatccaacctgttgtaatagtatcctcactgaacatcacatctggggctataattcaacaaatgtttactgagaaatgaggaaacatttattgagaagttgcttctgtatgtagactccctttttgtcc

SEQ ID NO: 382613 - DNA, 609 bp, Homo sapiens
gttctgcctcttgctggctgtgttattggctgcactcatttgcctcactctgctattcacttccataacacagcctggaaatgttatttctcctctcccctgtacaaccctctctactagtgacttgtccactgcttcattcctgaaaccacagctactgagctctgtatcctcctctgtattgcagtcatttctgcttccatggctcttcacagttggacactaaaagcagtgatgactaatgccttcattttttctcttgacatcrtctccccatgtttaagcttttctgtcacagtgggagacagcaccactagaaaaattcggtcacccagcaaggatgtcttagagtaatgttgacccttccctctcttttgtttctttagtattttaagcaatctctatatgctgctgaaatgtgtttactctaatctttatcatcttatccattattgtagtcaaatacctagtcctatctctaatccaacctgttgtaatagtatcctcactgaacatcacatctggggctataattcaacaaatgtttactgagaaatgaggaaacatttattgagaagttgcttctgtatgtagactccctttttgtcc

SEQ ID NO: 382614 - DNA, 581 bp, Homo sapiens
gttttgttctgaatgtaccaatctcttaggggagtttgtcttaaataagaagctccattcataggagtttttgttgtttcaactgtggttgcctggyttgtcctgggaaagtccaatctcaggagagcctggtgtcatgaattaatgggtctggaactggcaggcccccacaaatttgtgggatactggtggaacaggacatacaaacaccatccttaagtatctatggcaacaagtctttcactggcttagcctcttcctgggaataagtttttttggaattattaagaatatctcttctatgccctctccaggaacaccgcttgcttatgtgctaaaaacttattctaaacttggaaaatcacctcttaggctttccatgaaaaggctttttggattcaattgctactggaataagtaagtacatgattggaaattctaattgtcagtgagcaaaagatggatccttcaacttataaagacgattaatttaaaaaaaaaagattttagagatctctcattctaaacaattaccttgtatctatgagaggatcaaattttaaaaagacacatgactagtg

SEQ ID NO: 382615 - DNA, 542 bp, Homo sapiens
ggcataaaattaaagtgtagagttttcgtcagttttctctattactttggttgtttacaaaatcagtcttctgttgtcatcagttcaaaataatgggttataagatattatttgcaagcctcatggtaacctcaaataaaaaaaaatacaacagatacacaaaaactaaaaatcaggaaagtaaaacataccaccagagaaaatcatcttcactacaagaaagataggaaggaagcaaagaaggaagagaataccacaaaacagccagaaagcaaataacaaaatggcaggaataagtccttactcatcagtaataacactgaatatccatggactaaactctccaatcaaaatacatagagtacctaaatgaatttttttaaaaaaagacccgaagatatgttgcctacaagaaatacaatccatctgtaaagacacacatagaaaataaagrgatggaagaagacagctcatgcaaatggaaaccaaaaagagagcaggagtagctctacttagacaaaatatatttcaacagaaaaact

SEQ ID NO: 382616 - DNA, 467 bp, Homo sapiens
agtctatctgaagagtgtgttaccaaggacactgtaatctgaatttcgttgatattgatctaaaggaaaacattgttttaactatgttgaaaatagactgttttggtacatttattyagtgacattttcattacaaaaagatctctgcttccaggtttccttggccccatttgttttccaatttttccatcccaggtcctccctcagcaattatagattgcaggatggaagagaagagggaaaggtggcaaacaagcagcagaatcaggctggaggagggtgtgatgctctttgcccatttatatccagaactcaaatgttcaactcagcttcagcaacaattcatcttataaatcagtttggcagggcatcagctttaaaatccattacattgaatcaagaatggaggttgcagctaatttgccgacagggaacccttacatggcagtgaccttttaagctagcat

SEQ ID NO: 382617 - DNA, 531 bp, Homo sapiens
tttccttggccccatttgttttccaatttttccatcccaggtcctccctcagcaattatagattgcaggatggaagagaagagggaaaggtggcaaacaagcagcagaatcaggctggaggagggtgtgatgctctttgcccatttatatccagaactcaaatgttcaactcagcttcagcaacaattcatcttataaatcagtttggcagggcatcagctttaaaatccattacattgaatcaagaatggagkttgcagctaatttgccgacagggaacccttacatggcagtgaccttttaagctagcataaaccaatgttcttgctcgcctctgcttctctccacaccactgagtcagttttgctcctgcctgttttttcatgtggaaagaagaattgaaatgtttactctcactctccttagaaaaatagatattagcagaatgatgacattgttccttattctagattatctcttcgacttttacttaccacaatagctgtcaccaaatcatttttcttaataaga

SEQ ID NO: 382618 - DNA, 531 bp, Homo sapiens
tttccttggccccatttgttttccaatttttccatcccaggtcctccctcagcaattatagattgcaggatggaagagaagagggaaaggtggcaaacaagcagcagaatcaggctggaggagggtgtgatgctctttgcccatttatatccagaactcaaatgttcaactcagcttcagcaacaattcatcttataaatcagtttggcagggcatcagctttaaaatccattacattgaatcaagaatggaggttgcagctaatttgccgacagggaacccttacatggcagtgaccttttaagctagcataaaccaatgttcttgctcgcctctgcttctctccacaccactgagtcagttttgctcctgcctgttttttcatgtggaaagaagaattgaaatgtttactctcactctccttagaaaaatagatattagcagaatgatkacattgttccttattctagattatctcttcgacttttacttaccacaatagctgtcaccaaatcatttttcttaataaga

SEQ ID NO: 382619 - DNA, 595 bp, Homo sapiens
agttgcctggagctgggggaggggtgacacaaggacccctgtggccaccaccagtgggactgtgctgggtgagtcctgaagccagcacagcactgggtctcacccaaggcccatggtaaccactgcctggctattgccaatgttcactgaaggccctagggccctataatcaacaggtggaaaagctgtccaagcttgtgtccttctcttcagggtggtgagttcctcacagtctcagttggatccagagatgccaccaaggagccagggcctggggttggaaacgttaggaatctacctggtgctctgttctactgtatctgagctggcacccaagccacaagacaaaatccttcccactcttcccttcccttccacaaatagaggaatttctcccyatggccacggttacctcaggcccagattgtacactgtctgctactgctgatgttcattcaaggcacaagggctcttcagtcagcttgtgctgactgctgcctggtctgggactctactttcagagcagtgggctcccctctggcccagggcaggttcagatgctatacaagagccaaggcctggaatcaggggcccc

SEQ ID NO: 382620 - DNA, 474 bp, Homo sapiens
gtcactgattagacactgatgggggtakaaagagcctctaaatgactctgcctaaatctcatgtcactgactttcagttttctgaaagtttttcctttcgtgcttcatctgccaggttagacctcctgagccctgtgccatgaactgcccaacattctatctcaagctctgcagcctctgggtaaggttctccagtctatacctaaatgttagaaatgatcctagctcaacttcatcttgctggccctcttttgctcaccataatacattgagacttgaatccactgccattatgacaacagcccttctgccaagtcaaacttccctttctcttcacattcaatttgtacctctaatggatctgccaccctgatatccaaatacatgagtctgggagcagcactctcacatctactgctctccactaaaacttctttcttatcccacacttatcccattctgctagatttcatc

SEQ ID NO: 382621 - DNA, 550 bp, Homo sapiens
ggcattctattggtcaaagcaaatcccaagaccagggggtgagacctggtgtattacttcrttctctcattgctataaagaactaccttatactgagtaatttataaagaaaagaagttttcatcagtgtgctatgactattttaaaaaaaaagaaagaaagaaagaggtttagttggctcacagttccacagtctatacaggaatcaaagcaggggaagcctcaggaaactttcaatcatggaagaaggtgaaggggaagcaggaacatcctacatggttggagcagaagaaagagagagaagggggaggtgctacacacttttaaacagctagatctcatgagaactcaatcattatcaagagaacagcaagggggaaatctgcccccatgatccagtcacctcccaccaggccccttctccaacactgaggattacaattcaacatgagatttgggtggggtcacaaatccaaattatatcacccggtaaatcacaaaaaaagaagattcagagatgctaaagcagataccttgccccaagaatagg

SEQ ID NO: 382622 - DNA, 597 bp, Homo sapiens
cagagagaaagacagaaagggtgttcctcttctcctcttccctcccaactcctctgggtcccagcaacatcatagatgccacccatggatgcagggataatgctcacctatgcatctggaggagctaggtagcagaaatagtcaygctcacctatgagaccccagttctccactggtgatttccctttaatttccttgacttgtgtaacctttgtggctccctgatagatggatctcagaagagactatgtaacagtagcatttagtccaggacccttaatggaggaagtattctgggctgagccctatattctgctattatggcctgggctaaaatatttattcttaagcagtggttccagttgacttccagacataaaatcccctttctatttaaatactattctaattgaatgcacattaggtgtcttaaaaagaacgtagggactgaatggctgtcttcttgctgatggagacagtattgaggttaaaatttggttcaaaagacatttttctcctcactgttgaagacagagttttcccattcacagaaggggcataaagcctggtatctagtacaggggcacaaaagggaga

SEQ ID NO: 382623 - DNA, 656 bp, Homo sapiens
tttggcttcataaagaagtcacttccaagtcttgagcaaaggaatgctctgggggtctgtgttaagataggctataggtgaggcaggggcagaaggagggagaacaggtggaacgctattgtaataatccaggagacagatgatgatggcttaactagrgttgagtccatggaggtggggagaagcagttacattctggatcttttctgatggcagagctcatgagtcagccactcagtcacctttgtattatgtttaggaatagaatataatacgcataaatataggccagctgattgctttcttttccaagtagaaagatccccaataaaaggtcctgaagatattttttctctattttttatactgtaactaagaataattaaatctacaattaaaaatgtatttgtctcccaaagtaaacataatagattattttaagtttgttaaaacatcatatttatctcttggagtaaattcaaagtaaataaacaatgtgcatcatctgtttaaaaggtgaaatagacagttgcttttatgtatgttacaaatagcaaaggttttaaagtaactgttataatactctcctcaataatatgctgatatcttgaaattatttctttaatttttttacagcattgttgaagtgtaattga

SEQ ID NO: 382624 - DNA, 596 bp, Homo sapiens
tgggcttggaattttctttgtggaaagtttttatctacaaatttaattcatttaaaaggcatagagatatgtaaatgatctatttgtccctaagctttggcatcyagtgtctttcaaatagtttgtccatttcatctaagttgtgagtttataatatttccttattttcctttcaacatttgtggaatcattcatgtctcttattctcaacaatggcaatttaagtctccttactttttctcccaatcaatttggctagagatttagtcattttattaatatctcaaaaaaccagattctgtttttatttcccgttctctaattcgttgacttccactctgatttttattacttccattcttcttctactttgggcttcatttttaatttatttccccactttctgaaggtggaagttgaagtcattgatttgagatatttctacatttataatatatatttttagtgctaagtgtatttattttagttgcaacttacacattttgatatgatgatatgtgttttcttatctactgttttaaaaataaagttttttagacagggtctcactctgttgctcagactggagtgcaatg

SEQ ID NO: 382625 - DNA, 596 bp, Homo sapiens
tgggcttggaattttctttgtggaaagtttttatctacaaatttaattcatttaaaaggcatagagatatgtaaatgatctatttgtccctaagctttggcatccagtgtctttcaaatagtttgtccatttcatctaagttgtgagtttataatatttccttattttcctttcaacatttgtggaatcattcatgyctcttattctcaacaatggcaatttaagtctccttactttttctcccaatcaatttggctagagatttagtcattttattaatatctcaaaaaaccagattctgtttttatttcccgttctctaattcgttgacttccactctgatttttattacttccattcttcttctactttgggcttcatttttaatttatttccccactttctgaaggtggaagttgaagtcattgatttgagatatttctacatttataatatatatttttagtgctaagtgtatttattttagttgcaacttacacattttgatatgatgatatgtgttttcttatctactgttttaaaaataaagttttttagacagggtctcactctgttgctcagactggagtgcaatg

SEQ ID NO: 382626 - DNA, 627 bp, Homo sapiens
gaataggaaattgtacctaaaattatctttttttgtttgtttacatgttttcctgcttatactactgtaatgtatgctacataaaacccaaataccttatccttctttttttttttttttaaatcggagcaatctctagcacatattaggtaaacaaccaacatttgttcactgatagaaactaaagttagattcttggwataaaagcagagagatcacctgagtctcgtactgggaaaatgagggcagagctaacagttgaatctttttcaggtatctaatgtcagaaaggaattttaaataaaagaataagatcacagtaaggagtaagggctgataaaaaaattgtgattcaatttgataggaactggctaagaaagaagacaggagataagagaaatcacacatgagtgtgtctccaagtctgctttaatactcatatgtgttgaggaaactctcttttgatggcctatgactcattatcaaggctatgcctctactgctcttaaataagttaatttatcagttcattaggtgaacattttttgagtgctttttgttgttgcaagattagtgtagagttatcacaacttagtaaggagatctatttacatttataaatactat

SEQ ID NO: 382627 - DNA, 468 bp, Homo sapiens
ggcctatgactcattatcaaggctatgcctctactgctcttaaataagttaatttatcagttcattaggtgaacattttttgagtgctttttgttgttgcaagattagtgtagagttatcacaacttagtaaggagatctatttacatttataaatactattataaggcactatgatgagtagaattatgggtgtgtgtgtgtctgtgtgtgtgtgtgtgtgtgtgtgtgtgtgtgtgtgtgtgtaatccgggatagagccacagargactggaagaagtctgatcacctttcccagggaggcaggtcagagaagacatagagaaagtcctaaaaaatcagtagagtttctaaagtgaacaaagtgaacaaggtagtaaaaggtgttatagttaagatgcaagaaaatgtgacaaggcctagagcaatggaatagtgtggcatatttcatgtataacaaagaggtaag

SEQ ID NO: 382628 - DNA, 639 bp, Homo sapiens
taaattaactatgtattttcttagtaatttcaaaattaaccttcccttaaacctgtgatctctattttaaaataaagtcttacttggatatactgacagggctatttaaatagctcttataaaaacattatttaagcagagaaatcccttatcctcaataagtcagacaagagtaattgttttgcttgaatattctggccatgattctatcaaatttcctcttcactctgcctgtgtagaacaractttagctgacaaaactgctttgtattatatagagtgtaacctctgattctttgcatgataaatccaagagtaaatcatatggagtggtttccactcttgcagctggaacttctctgattgaaattcacacatgtatattttgggaaatgagaggttttaccatcgagtaccacataacacagtcccatcactttccacaagccagtaaaagcgagcacagtaaaacacaagtgcttttcagataatgtcttacatcatcacataatcattcttcttcagtctcagatcttctaaatatgatgaacatgaaggctgagaaacagcaggacagccatgctatgggtgcactcatgccattagtggaagtagactgggaagtggcattttgtaatg

SEQ ID NO: 382629 - DNA, 612 bp, Homo sapiens
tcagtctcagatcttctaaatatgatgaacatgaaggctgagaaacagcaggacagccatgctatgggtgcactcatgccattagtggaagtagactgggaagtggcattttgtaatgcaattgtcatcccctctcctgtgcctgatgtcacagtatgtcttataatgtgaagggctctggaagaacctttgtctctgggtaaagcctgcagctgtggaaccagtcacccatggagaataattttactatcatcagattgtttgcttaccaagttgcttccactctgtatattcttttatttctttgttctttcacttactcattcattcaataaatattttagtgcytccacagcttggagggtttggtttgtgttagtggtaaccaagaccattggaggaggcttgatttcttctttctgagcttatcaaaaggataattgagttgggaacaattgagtttgcatcatggatataactttggaaactttactgaacatttagtttaaatatacatatatcaaactacagtgtctataaagatttgataatatgcttagtttgtaaattgcaatcctttctcactgaaactcaagtaattgacagtagaag

SEQ ID NO: 382630 - DNA, 438 bp, Homo sapiens
aaatgagttctgctaatattgaagcaaagacaaagatcaaatgtatggtgaagcttgggtggaagaatggtgaaatcataaatacttcatgaaaagtttacagagccagtgccccaaagaataatcactttacaaacgggtaactcattttaaggagggatgagatgatgttgaagataaagcccatagtggcagacctgattgtttcctccacatcaatttttgagaaaatgattcatcttgttcgtgctctaatttaagaggactgatgattaataacagaaacattagcctacaccatagatatctcagttggytcagcttacacagttctgacttaaaaattaaaatgaagcaaattttccacttgatgggtaccaaaactgttgtgctcagatcagctgcagacaacagcagagcttttagtggaaattttaa

SEQ ID NO: 382631 - DNA, 581 bp, Homo sapiens
ttgaagtcctcttatatgaaagaaaaacatttcttagcagtctatgtagttacttttattttagtgtgaatttagatctgtgtattacctttcccagagctgttggtattttatcaaggataagaaataaggccrtcctttgttaaaagaaattttagttaaatgactgtgtttggagacattttggggatatgggtcccttctcaacaacagcaaatgacttatttacagaggcgtaagattagcctttcccatagcattccttgatggattaactggtataatgggcttaatttcctttctgcttgaagaggagccaacccttgggttcacatgactatttgtgtcttctttaaagcagtatttgatgagagctattcaatgaatcacatttctgaattagtacagaatatatgatttgtcatagatctaaaaatagtggcagtgatgtgttaccagaatgacttcaaggaggaaatgattgattgtaattagaaaacaaaccacataccaagcactcaatcatcacaaatcttatagaaaaggaaacctctattaggacataattatacatagcactc

SEQ ID NO: 382632 - DNA, 478 bp, Homo sapiens
aggctgcttctgtgagtaccatgacatttgatgtacgaacggctacattttgctatgtytttatgtaattatatttcttacagagactataagactaggaaaacatgcctctaattaaacaccttgatggttaatattttaacttataatcagttagggtcaaaaaaaaaaaaaaagcaagagcatactaaaagtaagttttcttaaaatgagttctggctagtgtagtatctacaacattaggaaacatccaaaatccttgttgaatacaggaaaatgtcaattatttggatgtttttctggtgaatgttaaaggacatataattattttatcaccaaatattgccctccttcttgattccttaaggagagccccattaagaggtcctgcccagtgtgctttcaccattccaagagaagctgagtggtctcagaaaaattaggagtttaattctaaccattgaaaatgaccgtcctt

SEQ ID NO: 382633 - DNA, 478 bp, Homo sapiens
aggctgcttctgtgagtaccatgacatttgatgtacgaacggctacattttgctatgtctttatgtaattatatttcttacagagactataagactaggaaaacatgcctctaattaaayaccttgatggttaatattttaacttataatcagttagggtcaaaaaaaaaaaaaaagcaagagcatactaaaagtaagttttcttaaaatgagttctggctagtgtagtatctacaacattaggaaacatccaaaatccttgttgaatacaggaaaatgtcaattatttggatgtttttctggtgaatgttaaaggacatataattattttatcaccaaatattgccctccttcttgattccttaaggagagccccattaagaggtcctgcccagtgtgctttcaccattccaagagaagctgagtggtctcagaaaaattaggagtttaattctaaccattgaaaatgaccgtcctt

SEQ ID NO: 382634 - DNA, 478 bp, Homo sapiens
aggctgcttctgtgagtaccatgacatttgatgtacgaacggctacattttgctatgtctttatgtaattatatttcttacagagactataagactaggaaaacatgcctctaattaaacaccttgatggttaatattttaacttataatcagttagggtcaaaaaaaaaaaaaaagcaagagcatactaaaagtaagttttcttaaaatgagttctggctagtgtagtatctacaacattaggaaacatccaaaatccttgttgaatacaggaaaatgtcaattatttggatgtttttctggtgaatgttaaaggayatataattattttatcaccaaatattgccctccttcttgattccttaaggagagccccattaagaggtcctgcccagtgtgctttcaccattccaagagaagctgagtggtctcagaaaaattaggagtttaattctaaccattgaaaatgaccgtcctt

SEQ ID NO: 382635 - DNA, 597 bp, Homo sapiens
tggtccaacttaccgcattgtttgttgaaataaaaatactttgctttgaagatgattttcttagcagcatccaattgagggcaagaaaatcctgggccacctccatttttttttgaaggccctgatatttttttaaaaatgtggcagaaacatgacattatgtatctgtcaaaacccatagaactgtatgrcacaaacagtgaaccctaatgtagactatagactttagtaacaatagtgtataaatattgcttcaccaattatagcaagcgtaccacaataagcaaggtgtgaataataggggaaactgggtaagtgtgagtgtgggaaggggtatattggaactctgtgctttctgctcaatttttctgttaacctaaaattgccctaaccattaaagtctattataaaaaaggaagaaataccagaactgggttacttacataatattttccctactagcattacaattttattggaatggcactatacccagttaaaaaactacatttcctagctcccattgcaaaagggattgacttgaggtaaagacctgctcggtgagacttaagtgaatgtcatctggaggtaactgag

SEQ ID NO: 382636 - DNA, 589 bp, Homo sapiens
cttttaaaacactgcgtggtttgaaatttgagcacattaaagccagaactagaatagccagcttttctaattatcccagttcttttgcactgatcttctgggctgttgtttttctgggtattttctggttcaacatttcatagtcttctcaggcagataaataatggcaamcaggtggaacaagagacttatgtctataccaattgagctgtttgcctgcaggaactgttttcttttatttgaaacaagcatctgtctatccaatcaacatctgtgtgaaacactatttgtaataataataatatcatttttttaagcacagactgtgtgccagccatgatgcaaagaactttatgtgccctctctccattctcatagccaggatttaaacctagactgtcttactccagagctgtctgtgttaaatatcacattactctatgcccactgatttcacaatccttaaatcacatgcctccagagatattgcaggaagaaaaacaacaatgaatgaaaagcaaaatcattcttctttaatttaaaaacatcccccttgatgctatttttcaagagattaacaaagtcagtt

SEQ ID NO: 382637 - DNA, 498 bp, Homo sapiens
attttgctgtgaaagtttggaacatcactacctgcaagggttacacttasttaaggtgtgtgaatatattaaagtttttttttaaatttgtcttatcgtgatctggagttttcttatgaaaaggaaaaccagaaaacataattagggtccagggcattaaaaaaaaactacagttatttccccatgatcaccacaatttctaatgttattagtttcacataaagtgattattttgtttttgttactatgaattctgtatcacaaaaaattagattaaaaattaaaatctactatgtgaattgtttctaaatgcatgtggcttgggccagggtttcatcttgtccaagatgaatggagttgatgaaggctttcatattttaacgtgaacaaaccagggtagaacattcagagttagagataaacgtcacataatgcttagtactctaaaaccagtgattcgtaatagcgaattaaggctttcatttttaagagtggcct

SEQ ID NO: 382638 - DNA, 564 bp, Homo sapiens
ttatataatatcaacactttttctgtgcttacatggaattttcaaaattacttagttatgtcatagtttttttgtaggatcaacaagcagaatctaaatttccagccataaataaatttatacaagaagatatcaaccaaacagcatatcattagagctaacagattgatttaaaaagattctgacatgcagtttagtaaatttgtaaaatgaatgatacagttttatttgccatgttcttctctttctcccacacttattgtgataaactttgtttcagtttactccaagcacagggctgaaaccaatataagaaataattggatatttttgctggatatcatcagcaaactttcacatctttttgagagttttaggtaaatgktaaaaaggattaaaaattatgtgagggtaaatgtcagtagaaaactgtcctaagggtaagtttcaaccaattagccatgtttattgagtttctagtgtggagagtgattagaagcccagattctggggccaagctgcctgggttgaatttcagtctctccatgtagtaagtggattcct

SEQ ID NO: 382639 - DNA, 484 bp, Homo sapiens
aggtggattgccttagaatagtgcctggaacattgtaagaactatgtattaatcattatcattttttcctatattttgtatgcacgattatgtgccatatgtaagatgtacattccagcatgtacaactttgtcttgaagatcataatctagttgaggagaaaaaaactaaaatacatgaaataactaaacaaccataagtgttaaatgctgtgatataaattttaagggcaattgaagttgaggtaaggggaaagatctgtgtgggttaatagtaatgtagaaagtaaagaatttatacagtaaaacaatagtgagcatcaatggcaacctaaattacaakatattctcagcattattaaaatatcgatatgggggtcgggtgtggtggctcatgcctgtaattccagcactttgggaggctgaggtgggaggatcacttgaggccaggagtttaagactaccctgggtaatgtagggagatc

SEQ ID NO: 382640 - DNA, 649 bp, Homo sapiens
tttaattaatctttaaaaatgttaagtatgtgaggtgctagatatattaattagcttaatttgatcattcacaatgtatacatatatcaaaacatcatattttacaccctaactatatataatttttgtctaagaagtttactttaataaagctgaaagtgggccgggtgtggtggctcatacctataatcccagcactttgggaggccgaggagggtggatcaccagaggtcagtarttcaagacaagcctggctaagatggcaaaaccccgtctctactaaaaataccaaaattatctgggcgtggtggcacatgcctgtaatccctgctactctggaggatgtggcgggagaatagcttgaacccggaggcagaggttgcagtgagccgagatctcaccactgcactccagcctgagtgacagagagagactctgtctcaaaataaataaattaaaaaaaaaagctgaaagtgggggaggactgtatcatgtttaaaccttgatttaatgcagttaattcatttactacataaaaatgtcttgttgacagaacttttccatgtagtttcctaaaacaagccaaagcctatctttttcaactactgatgagaatttcctttgcatcatggactagcctctagctcag

SEQ ID NO: 382641 - DNA, 524 bp, Homo sapiens
tctgcttccaagatggttcactcacatggctgttggcagaaggcttcakttcaacagtgtgttggagctggctgatgcctgcttctgagagccgggtgttaaatttcaggaattttgtaagccaattgttaaacacatccattatcaaaaattaaatcattatccattaaaaattaaatcattaaatccattatcaaaaagttaatttaagtaaattatattaaaagcaaaactagtaaatacttgttaaaaccttcagcagaattaaatttaaagaagtttaattgagcaatgaaatgattcacaaatcaggcagtccccagaatcacagcagattcagagagactccaggggtgcctcatggtcagaacaaatttatagacccaaaaagtaaagtgaggtacagaaatgggaagtgatatacagaaacagctggattggtttcagctcagtgtttgccttgtttgaacagagtttgaacagccagcggtgtaagagccattgaagtactgctgctgggattg

SEQ ID NO: 382642 - DNA, 493 bp, Homo sapiens
gaagctaccaagtggtaaagtagtaagaagtaaccagtgagaagtgaaactaggatgagaatggctctcctagactccaagcctgtggtctttactactgcactcttctgacacagctaagtggactggctgatatttgcaactctaaaatgatgactccatttctattttccttcargcaaatgtctactcaaactattaagcaaaatggattttcattttattttttaatatttctagggataacatgtaaaaaatgtattaagaaagtcttgtatactcacaattataaaagatatttctttgtgttttttaagtatactctttggatacaattccagcacatctctttaagtgtgcctatttatcataatgtgtcacatatgtgaaaataagccatcttatctcctttctttcttaggataaatattctcaacattttcctcccatgttctcactaatccatgtttttgctcatagttttgttgcttcc

SEQ ID NO: 382643 - DNA, 578 bp, Homo sapiens
aatctgtcatttaggctggatgcggtggctcacacctgtaatcccaacactttaggaggccaaggtgggcagattacttgatgccaggagttcgagaccagcctggccaacatggtgaaaccctgtctccactaaaagcacaaaaattagccaggcatggtggtgggcacctgtaatcccagcgacttgggttggggggtggtgaggctggagaattgcttgcacctgagaggcggaggttgcagtgagccgagattgcaccattgcactccagcctgggtggcagagtaagactttgtctcaaagaatacaataaaataaaaaaacctgttrcttagcacagccaccttcatcaattattttagctatatcatctcataactagctgcagcttctccattagcacttgtgcttcaccttgtatctttttgctacaaagacgtcttctttccttaaacttatgagcctatctctgctagcttccaaccttcttctgcagcttcctcacccctctcagccttcacaaaattgcagagagttaggaccttgctctggaatgggctttggcttaagggaat

SEQ ID NO: 382644 - DNA, 578 bp, Homo sapiens
aatctgtcatttaggctggatgcggtggctcacacctgtaatcccaacactttaggaggccaaggtgggcagattacttgatgccaggagttcgagaccagcctggccaacatggtgaaaccctgtctccactaaaagcacaaaaattagccaggcatggtggtgggcacctgtaatcccagcgacttgggttggggggtggtgaggctggagaattgcttgcacctgagaggcggaggttgcagtgagccgagattgcaccattgcactccagcctgggtggcagagtaagactttgtctcaaagaatacaataaaataaaaaaacctgttacttagcacagccaccttcatcaattattttagctatatcatctcataactagctgcagcttctccattagcacttgtgcttcaccttgtatctttttgctacaaagacrtcttctttccttaaacttatgagcctatctctgctagcttccaaccttcttctgcagcttcctcacccctctcagccttcacaaaattgcagagagttaggaccttgctctggaatgggctttggcttaagggaat

SEQ ID NO: 382645 - DNA, 588 bp, Homo sapiens
aatttgaacccaagcaactgcaccagtttccttgttttagataaagcttgttttgtttctttttgtttttagttactgtgttgagcatcaggcaagtcagtgtatcaaaagcaaaatattggtctgtctttatataagaaaatgtgcttatctttaacctgaaagaatcgagcaattaattgagagtcgttgctgtgcatttaattacattttatgttaatgattaaaataaactgtgacagtttctagaaaaaaaatctcacattaattatttgctaaagtcagaggaaagcttgacccatctgagaatttgagtcaaaggtctgcccagagcgattatattaaaaagaaggakaaaaaaatctctgtattttggcacataaagcttggaggactttgcagttgcttaattttgctctttttctcagatggaaatgtactttaggcaaagacaatttgtttgtgataatctttctgcattggttttccatgattaagtgttattctccagctatttcaactaattatcattgtctccccaaaggctgatgaaacaaagaatctgagcaggattaggctaattttact

SEQ ID NO: 382646 - DNA, 476 bp, Homo sapiens
gtgtgtgtgtgtgtgtgtgtgtgtgtgtgtgtgtgtgtgcatgttgagggggagctagagaaaaaaggaaagagggaggagcgatacattagaaggaaggagagatacattagaactgacagatcataatttctaaaatatgtacttatatgtgcatatatctgtgccatgcatatgcatatayatatattcatgtgtatctttatacatatgtctgtgcatattattttcattccctgcctattgaatcaagagccaagagccacacacacacatattaccttttgtgtaagaaaacagggaagatgggggggaaatgcaatctctgcttatctttacaagaagaaacaaggaagggtaaaccagaaaacagtgaagttggttacctacaagggtagggatgggggtgaaatggggtgaaacgacacaggaaggagtgacatttccctgagcatactttttgcatagtttgactg

SEQ ID NO: 382647 - DNA, 476 bp, Homo sapiens
gtgtgtgtgtgtgtgtgtgtgtgtgtgtgtgtgtgtgtgcatgttgagggggagctagagaaaaaaggaaagagggaggagcgatacattagaaggaaggagagatacattagaactgacagatcataatttctaaaatatgtacttatatgtgcatatatctgtgccatgcatatgcatatacatatattcatgtgtatctttatacatatgtctgtgcatattattttcattccctgcctattgaatcaagagccaagagccacacacacacatattaccttttgtgtaagaaaacagggaagatgggggggaaatgcaatctctgcttatctttacaagaagaaacaaggaagggtaaaccagaaaacagtgaagttggttacctacaagggtagggatgggggtgaaatggggtgaaacsacacaggaaggagtgacatttccctgagcatactttttgcatagtttgactg

SEQ ID NO: 382648 - DNA, 511 bp, Homo sapiens
gtacaggaagcatgatgctgttgtctgcttggcttctggggaggcctcaggaaacttaacaatcatggcggaaggcgaagggggcacaggcatgtcacgtggccagagcaggagcaaaagaggaggaggaggtgctacacgttaaacatccacatctcccaagactcactcactatcgtgaggatagtaccaaggggatggtgctaagccatttgtgagaaatctgccccgtgatcaaatcaccttctaccaggccccacctccaacactggagattacaattccacatgagatttgggtggggacacagattcaaaccatatcggtcctgtgggcaaggcagtgccctgaagactttaaagtaagagaagaacatgactccgttggtgcacagtgcatcttgctggatgctgggtgcttggagaactgctggttcygggtgggcgcaggcaaagtccattatttataattttatattatttgtagcacctagcatggtgttagacccata

SEQ ID NO: 382649 - DNA, 590 bp, Homo sapiens
tatagattccttgaaagggcaggtgggtgagactttaattggaatgtgaaaaaaaggagaaaacatttctgagaatgaaaatagtagataaccttgaatgaattattcctaattgggagttaataagcaacaatctgagattcacaggatatcacaattttatttatccccttttaaacttcactcctcctgcccaaaccctcacttaaattaattagatcagcccggtgattcataaagagcaaataaagtaaataacctgtcactgagaatcactttcaaagctcatgttgactaaatttttagtggcaaatgctcctgacctccatgtttccctgtcttataatctatccttattttcattgtgtgtgttatctcacygcagtcgttttacaacattttacaccatttgagcctagcgctaaccaatggcattttcaaatgctttgcagacacagctcattcactctcacagctccacagaggtagggaggggcaggtagcattgtctctgtggaatgaatgaggaagcagaagggcagagaggttaagtgacttgtataagatcacacaaggggtcagtagctgtg

SEQ ID NO: 382650 - DNA, 646 bp, Homo sapiens
gaaagtatggaaagggaaataatatttactgatcactgacagttctttaagaactgctggtccttaattgaatgtcatggtagcatgacatgaccactttctttagccacactgttgtgctagatttcaaaactctacttttacttgtttggagggatgatgtgttaagaagatttactgatgtttgaattttttgtgttatctgctttataaaaatgtgcccatatgatcaaggatcaaaagactatcaaaatctaaaatttcctctgattctctggttaagtagttatgcagagtttaaggccaataccaaaggaaatgatgctggtatctaattttattwttttattttacttaatgctagaataaaatctctaaagtccttcttttgtacctctgagcatctcatagatattaattggtttatcttatctctgaaaatcatgctccattcacaactgacagtggacagttcaacggaaagttatggctcaaatgattcaaaacagggccaacccaaaaccaggattctggattttattttaatatcctgaacttttaaaatattaataacacaaacagcactacaacctagaggaagaacacagtaggaactggtactcacgtctgtctgaatacttgcctg

SEQ ID NO: 382651 - DNA, 594 bp, Homo sapiens
taacctataaaggaaaacttatcagattaacagcagatttctcagcagaaaccttacaagctggaagggattggggccctatcctctgcctcctcaaacaaaacaattatcagccaagaattttgtatccagtgaaaccaaacatcatatatgaaggaaagatacagtcttttccagacaaacaaatgctgagagaatttgccaccaccaaaccaccactacaagaactgctaaaaggagctctaaatcttgaaacaaatcctggaaacaatcaaagcagaatctctttaaagcataaatcacacaggacctgtaaaacaaaaatacaagttaaaaagcaaaaactaaaactaaaaaagcaagctacatgggcaacaaatagcacaatgtagcaaacagtacctcacatctcaatactaacattgaatgtaaatggcctaagtgctccacataaaacattcagaactgcagaatggataagaactcaccartcaactgtctactgtcttcaggagactcacctaacacgtaaggactcacataaacttaaagtaaggggtggaaaaaggcatttcatgcaaatggacaccaaaa

SEQ ID NO: 382652 - DNA, 494 bp, Homo sapiens
ctccttaactgatgtatggttcatgaatattttctcccagcccaatgactgtcttttcattttgttatttcatttgctgtacagaagctttatagtttgatgtagtaccacctgtgtatttttgcttttgtagcctgtgcttttggtgagatatccaraaagtccttgtcaacaccaatattaagaaacctttcccctgcgttttcatctaggagttttaggctttcaggtcttatgtttaggtctttaatccattttgacttgatttttggatgtggcattaaaataaggacactgaatggacatttttccaaagagaacataaaaaatggccaatacctgtatgaacattaacatatccatcatctcacatagttcccttttatggtaaaaatacctaaaatctactctctcagcacagctccatcatgcaatacaatattattaactagagttaatgttctggactatagtaatcatttttctatgtatat

SEQ ID NO: 382653 - DNA, 574 bp, Homo sapiens
agaaagcagtgctgttattaaaaacttggaatttcttcaaatcaatcaaaatagggtgacttatgctaatatcataaggacttgactgagcagtcaagtgaatgatcacacaattgcaattgaccaaacaactcaagtatttttcatgattctaattatttccattatctaagtatatcaagtaaacaactacggagtaatctgatcaatgaattattgatctaagaactactggtctggttaaacagatcttttaaaaagaggttgtatgactgtttctagcttaaatsagtactttattagtatttttgcttcaccattttaaacaatttgcctgtaaataaaatttttattcaaaaattagaacttaggctattcattatttcagaattaatctcaaaaatccctttgaggtaataacgtgttacaacaattagtcttctaattcttccccaaagacagagctatgaataaatagtttggatttcatctagtatattgagatagatttaaatctccatttggaaaagtgttttggtcgtaatgttaaatagctaatttacaaatcaacccc

SEQ ID NO: 382654 - DNA, 613 bp, Homo sapiens
tcaatttcagtgactcaaaactacatactgtagaataaaacattttctacctctcttctcccctagtatttcagtattcccttttacttcgtgtgttattgaatgtaaagttgcattttgaattcttctctaattgttctgcaccagtgcaagggaatacaaaatcagctttgacaaaatgcaccacacataggtgcacaataaatatttgttcaataaatgaataaaagaatgagtctctgttccccatcccctcttttctttccttccaactttttctctttggccctgagaaatcaacagctyaaagatcttagaagcagaaaagtgattcagaaaagtcattttcaagcaggtcctcttagcggtcagtccccatggaagcaacctaatttatgtcagctttgggttacactacgggaggattaccctcctgttcctgaggtacttctcagtaaaactgagaaagtttgtagttcatcactttttcttttgttacttcctgtggctagtggagtgatagttaagggtgctacagtgacagctagctagccaaggggcaaaacaaagtcaattgtcttgggagagctctaatccactcatttaagaaaaa

SEQ ID NO: 382655 - DNA, 464 bp, Homo sapiens
agaatccttgatgatcgcctgtgatatttacaggagactccattggagtcacactttagtagtgagggtgaattatccctgaagtgaggaatatctcatatctgtcatagcaaagcttaaaaaaatttttaaacctaaaagaaattaaatacatctgcaagtaacttaattaataggtcagcaagtaacttcacttgctaaaacaaagctcaaaactttgaaagacaacaacaaaatgaracactcaacaatgcaatatttacaatgtctagtatttaaacaaaaattaatagaacacaccaaaaagcaggaaaatgtgaccaacattcagaagaaaaacatcaatagtggaaacagaagtagaactgacaggcattatggaatttatagactatgctcaaagatttaaaggaaagcattaacacagctagaacagaaaaggtagattttaaaagagccaaaaa

SEQ ID NO: 382656 - DNA, 615 bp, Homo sapiens
ctcattctatttttctgatcccaggcttgtgatcacaatgattttgaaaagctaattagaagaatcttctttcttcccctagacctgatttaaatagcacactggctcttattccacatccttctgcttctacggtatgtatactatacaccttggtacatgacataaacacttaagaagaaaaacaattctcaacatcagagttgacttatacaatgtcctgactttactgctttgctcccatccctgaagctggcaatagcccccacacccttcccacgcctgaggcctcctggttataagaagcactgagaaggcagcatggggaaggtgattgttagccattctccaccagtggctgcaggaattcaacaaggaagacctcaagttgacctaattacttatattttcttcatgtcttggaatattactccatagatcttaaatgtaaaagtacacatagcaattatcccaaacataactccaattgcacaaatattcctaaaactcctggaatacataaccrtcgggtccctcttaagcagaattcatacaggaccactgcagggctcaacaatggccaagaaaacagaatgggacagaatcataatataa

SEQ ID NO: 382657 - DNA, 606 bp, Homo sapiens
tttgatttttttctttaaatttattttaagatatctaaaataaacataaatttcttttatttatttcaagatctctaacatgaacatgtatttcttttataatgggtgaaaaaagatactgtaacttggtacatccctcactgaccatttcccattctgtctctttccctcacacacacacacacacacacacacayatatgttctatgtaatttattcttcaaacacaatttttttccaacattcaaaatttttgtcttcatcatcctctctagggtgtgtgcccctctaaagaggctctgaaagattccactaaatgtagacgagccccagttcttgcctctgagggccatattaatttttcttttctaacccagatgccaattaacatagctccattagggaccactactaccaaagcaatcatatagccctcagtctaaaaacaaatcattcatgtaaactcagtcttgtttttaagccttgtttataactgctaaggatgtgagtgcaaccttctgtctgaaggtgagatacattttttcctgttctatacatttattcatcatcagcagtaagtgcacaactggacgtttgctgcaattg

SEQ ID NO: 382658 - DNA, 580 bp, Homo sapiens
tgaaacccttagaaagctaaatagtcagatagtcaattaaatatattgctaaggtgtaatggaaaaagtgatgtgtttcctcccaatgttgaactaatctcacattcctatgctttgctcactactggcaacaccttttctaaaaatcagtgtatgtctcttccccttctgttgatcaaataccatgtatagaatcattttctctcaaayagaacacaaaaaaacaaattgtgaaagtattattttccatatttctcccttcattatcttaccttttctcctccaacattgcatagatggcaccttccctttttaattgaaactgatcgattgcagcatttgcagaaatcgacatatccttttggattaactttttcccccatcaccctcacctaagatctcttaatttctgagctctttaagaagcagaccattacaaaataaaaaggccaatgtctttggtctggatcaaaatttttgtcctaagaaaataggttattttgcccaaaatcaatcactcaagtactttcagagtgcccagcacaagctagacgctgctgagatgcagaggaaggtatga

SEQ ID NO: 382659 - DNA, 578 bp, Homo sapiens
gctcaaatgctattagcatattttagcaatataatatttgtcattgaggtatataaacatacagtataatatgtttacactatactgtagtccattaagtgggcaatagcattactcactattgtccacttaatggactacagtatagtggaaacataactattatgtgcactgggaaaccaaaaaaatgtgcatgactcacttcattgtgatatttgctttattgcaatggcctggacccacaatatctctgaggttgagatatgcctgttttgtttatgaggagaaaattcattatgctctgagacctgtgaaacttagacttttgaaattaaactaaaagaacaggctatctcaactcaaaggccttttcttttgatactatyatatatgccatttgctatataacgtattttaaaacacaaatcctgtttcaacttcctcttccctctttctactatggcatcccttcttggaataagtaagcatctaaataatccagttgctaacagaattggggaaaaaccaatgggtaacagaaatgaaggaaaaaacaacgagtggttctcagtttatca

SEQ ID NO: 382660 - DNA, 578 bp, Homo sapiens
gctcaaatgctattagcatattttagcaatataatatttgtcattgaggtatataaacatacagtataatatgtttacactatactgtagtccattaagtgggcaatagcattactcactattgtccacttaatggactacagtatagtggaaacataactattatgtgcactgggaaaccaaaaaaatgtgcatgactcacttcattgtgatatttgctttattgcaatggcctggacccacaatatctctgaggttgagatatgcctgttttgtttatgaggagaaaattcattatgctctgagacctgtgaaacttagacttttgaaattaaactaaaagaacaggctatctcaactcaaaggccttttcttttgatactatcatatatgccatttgctatataacgtattttaaaacacaaatcctgtttcaacttcctcttccctctttctactatggcatcccttcttggaataagtaagcatctaaataatccagttgctaacagaattggggaaaaaccaatgggtaacagaaatgaaggaawaaacaacgagtggttctcagtttatca

SEQ ID NO: 382661 - DNA, 642 bp, Homo sapiens
  misc_feature (1)...(642): n = A,T,C or G
aacctaaagaaagatatcaatattcaagtacaagaaggctatagaacacagagcgatttaacccaaaaaaggctacctcaaggcatttaataatcaaacttccaaaggtcaaggataaagaaaggatcctaaaagcagcaagagaaaagaaatacataacatacaatggagttccaatacatctggcagaagacctctcaaaggaaaccttacaggccaggagagagtggcataatatattttaagtcctaagggaaaaatctattactctagaataatatatccagtgaaaatrttcttcaaacgtgaaggagaaataaagtctttctcagacaaacaaaagctgagggatttcatcaacaccagacaagtcctgcaagaaatgttaaagggagtacttcaatcagaaagaaaaggatgttaatgaacaggaagaaatcatgtgatggtacaaaatacactggtaatagtaggtacacaggaaaaccgacagaatattacaacactgtaactgtggtgtgtaaactactcttaccttaaattgaacgacaaaatgataaaccaatcaaanataataactacaacaacttttcaagatatagacagtatgataagatataaatataaaccacaagttaaaag

SEQ ID NO: 382662 - DNA, 559 bp, Homo sapiens
ctttaaaaagttaaaaaatagacaaacctttagccagactaagagaaagagaaaaaattcaaataaataaagtcagagatgaaaaaggatactgatactgcasaaattcaaaggatcattagtggctaccataaggaactagatgccaacaaattggaaaatctaggagaaacagaccaattcctagacacatacaacctacctagattgaaatccaaaacctgaaggaccaattacaagtaatgagataaaaactataataaaagtatcccagtaaagaaaagcctggaacccaaaagacttcactgctaaattctaacagacatttaaagaagaaataatactaattctattcaaactactccaaaaaatagaggatggggaaattcttccaaactcattctatgaagccagtaatatcctgacaccaaaactaaagacatattaaacacacatacacacacacacacgaaaaccacaggccaataaccctgatgaatataagtgcaaaaatccttcacaaaatattagcaaactgaattcaacaaaacattaaaaa

SEQ ID NO: 382663 - DNA, 555 bp, Homo sapiens
tattcaaactactccaaaaaatagaggatggggaaattcttccaaactcattctatgaagccagtaatatcctgacaccaaaactaaagacatattaaacacacatacacacacacacacgaaaaccacaggccaataaccctgatgaatataagtgcaaaaatccttcacaaaatattagcaaactgaattcaacaaaacattaaaaagattgttcattatgaccaagtgggatttattcctgggatgcaaggatggttcaacacatgcaaatcaatcagtgtgatacatcacaccagcagaatgaatgacaaaaacatatgattatttcaattaatgctaaaaagcatttgataacattcaacatcccattatgataaaaaccttcaaaagaactaggtatagaaggaacatacctcaaaataatacaagacacrtaagacagtcccaggactagtatcatactgaatggggaaaaactgaaaacctttcctccaagatctggaacacaacaaggttgcccactttcaccactgttattcaacatagtactgg

SEQ ID NO: 382664 - DNA, 564 bp, Homo sapiens
ctagaagaaactctgatgggagcaagaatgcactgtcatrgtaagagtagatttttagaaaagagccttcagtgtgtcaaagacctttgtgagtatgcatatgtgtaagtacatataacaatacaaagaaatcattggcaaaactagaaattatgctaggagggtttactgaagcaaacgtttacaaaacagagcaaactacccctatgcacttaaagactgtactacatctatctgcttatctatctatccatttatctataacttatctttctaatttgtctatcatatatatacttatatattgtataaaaatgaataagaaatggcattgaaaaagagatacctgtgtctctgtcaaatttgttgcttcaacccaatcattctgtagaaaatcaaagagcacatttaatctctttcgcctatctctttaaaaaaatggagactgtatatcagaatttgtcttttctgtgtacttaagaacatggcaattttagatacagcaatatccaaagtttattcttcaattttatactttccctttgcatatttattctatcattt

SEQ ID NO: 382665 - DNA, 564 bp, Homo sapiens
ctagaagaaactctgatgggagcaagaatgcactgtcatagtaagagtagatttttagaaaagagccttcagtgtgtcaaagacctttgtgagtatgcatatgtgtaagtacatataacaatacaaagaaatcattggcaaaactagaaattatgctaggagggtttactgaagcaaaygtttacaaaacagagcaaactacccctatgcacttaaagactgtactacatctatctgcttatctatctatccatttatctataacttatctttctaatttgtctatcatatatatacttatatattgtataaaaatgaataagaaatggcattgaaaaagagatacctgtgtctctgtcaaatttgttgcttcaacccaatcattctgtagaaaatcaaagagcacatttaatctctttcgcctatctctttaaaaaaatggagactgtatatcagaatttgtcttttctgtgtacttaagaacatggcaattttagatacagcaatatccaaagtttattcttcaattttatactttccctttgcatatttattctatcattt

SEQ ID NO: 382666 - DNA, 564 bp, Homo sapiens
ctagaagaaactctgatgggagcaagaatgcactgtcatagtaagagtagatttttagaaaagagccttcagtgtgtcaaagacctttgtgagtatgcatatgtgtaagtacatataacaatacaaagaaatcattggcaaaactagaaattatgctaggagggtttactgaagcaaacgtttacaaaacagagcaaactacccctatgcacttaaagactgtactacatctatctgcttatctatctatccatttatctataacttatctttctaatttgtctatcatatatatacttatatattgtataaaaatgaataagaaatggcattgaaaaagagatacctgtgtctctgtcaaatttgytgcttcaacccaatcattctgtagaaaatcaaagagcacatttaatctctttcgcctatctctttaaaaaaatggagactgtatatcagaatttgtcttttctgtgtacttaagaacatggcaattttagatacagcaatatccaaagtttattcttcaattttatactttccctttgcatatttattctatcattt

SEQ ID NO: 382667 - DNA, 549 bp, Homo sapiens
actgaagtcacttatcaagtctaggagtattctgtaggagtctttaaggttttgtaggtgtaggatgatgtcaacagtgaaaaaaaatttgactatcgcttctttaatttggatgccttttatttttttttctcttgcctgattacactggctagraattccactactatgtttaataggaatgataagagtagacatctttgccttgtttcagttcttaggaaaaatgctttcaatgtttccccactcagtatgatgatgattattggtttgtcatatatggctcttattattttgaggtaagttcctttgatttctaatttgttgaggacttttatcataaaaggatgttggatttttatacaattatttttgtatctatagcgatgaccatatggtttttgttttaaattctgtttatatggtgaatcacatttattgatttgcatatgttgaaccatctttgcatatctgaaatagagcccatttgattgtaatgaattatcttcttggtgtcctgttgggtttggtttcctagtacttagttga

SEQ ID NO: 382668 - DNA, 535 bp, Homo sapiens
ctcagtaaactatatacttattttagctgcctggccctctttttgcatggctgctcaattcttgtttgtttgttcatggtggtgagattctttttaatctcctgtaaacatttagaaaaaaagcttattggagaayttgatgcagtaactatattgatttcctcttctcattggtaccaattaggattgcattgactttaggattgaacatattttgagatcttcctagctctactaaattgttatatttatttgtttatttagtaatctctgatcatgtaaattttctgaatgttagtacatgtccagaacataatcattgctgcgtatcttttcttatctctagagcaaaaggccctttaccatgtttctcttctcaaggacatgcattttaaataatgtattttcagctgatatacagtgttatcttcctatcctcctattctactgatcacaatgtatactttctttgtgtatttctaatgacctttctactaaaacactgatgagagatctatcatgttcagttgtcacc

SEQ ID NO: 382669 - DNA, 540 bp, Homo sapiens
acatgctccttgttggacttcagaattgctatggaccagaaaccgatgtgtgccttccaatcctttccctttgaatagctaatgtatttgctcgtatcttttcatacatgactaaaagaagttgattgagccttttaatattatccctaaaaggcaaggtccacrtgttcattaggtatgttttacagcttcccagttactgcaaatgatgttttgataattgcttttaaactatatgagacaccatttttccagtgtctaacagcagtttactcataggtttcgcaagaaccattatccattgtttatttttcttatcttcaccaactatttcttgttttttctcagtgtccatcgtcttcccaattccacagactatgccgtatgtcttagatttttgttatagttcccaattctcgccattaatttcttttttttatctgttctgatgatctttgtcttttaattggtgtgtttagaccattgatatttaaagtggttacagatacagttggattaatatcaaccatatttgttact

SEQ ID NO: 382670 - DNA, 496 bp, Homo sapiens
tagctatatttcttccctgttctataaaccaacaattttattcaattgggagagatggatttgaggtttggtttccatctatttagctgacatcacctgaataaaaagccttcttctctgtcaatactcattgtctcactgattggctttctgtgcagtgagcaatggaacctagtccaaatccttggagttacagtaacaacttattatggattaaaaaaagagtataaatgaccattatatgaaataaaagaggcataactaaaatttaaaaagatgttatggatattatgaagataggagattatatcacctgcaaatgtctgccagtaattttaagtactacataacagtaacaagtttcttgaaacaagcaagttatcaaaattgtcaaaagaagaaatagaaagtyggagtatttatttaaaaattgtaagtagttcaaagcaacaagagaaatgtcaaaaacatactctcacatttacgaatgtttcat

SEQ ID NO: 382671 - DNA, 526 bp, Homo sapiens
ataactgaagtagtctgttcttgcattgctatgaagaaatacatgaagttgtgtaatttataaagaaaagaggtttaattggttcacagttccacaagctgtataggaagcatagtggcttttgcttcttgggaggcctcaggcaacttagcattatgctggaaggtgaaggggaggcagacatatcttacatggccagagaaggagcaagggagagagagagaaggtgccacacacttttaaacaaccagatcttgtgagaaatttatcacaagaacagcaccaaagggatactgctaaaccatttatgaaggatcsacctccatgatccaatgacctcccaccaggccccatcttcaacattggggatgacaatttaacatgagattcgggtgaggaaatagattcaaaccatatcaacgatgatttatttttgcttttgtaacctgtgtagaagtacaatatctgtcaaatacagcaaaatattgggtcgtggggaaatggtatattattataaaattcttat

SEQ ID NO: 382672 - DNA, 685 bp, Homo sapiens
ctcttggttttatatttccttctgtcaatgactawgtctggctggataacatagaagatgctatttcatttaagtgttgcgtattacaatatatgaggtaatcatgacataaatataacagactactaacatgatattgatccaggaaatatataggacaattgaattggatgcccatttgtttaagtaaaaattagaagtaaaggaaaaacaaaatgccagaactgcctgcctttcattttcatgtatccacttatgtgtaatttaaaatttttaacacatttctttttcaagattaaaaaatgtgtttgcagacagcttggtaaatgtatccggcttggaggtttaaaaccacatatgttataaaatatgtataaaattatccttctgttttttaaacagatatcatacaagtgccaggaacagacgttatgttttctttatgattttaatttgcattttttcacataaatgatataatattcttaatacgcctttcttaaactggtcatctagcaaagcattgaacaactcaattctgtggtatataagcaaaataatgtttattttaatattgaaaattaaagcatctgatatttacattgtgatatttctcaatcaccgtcaggatctgatgctggaaaatctataattttacttggaatttgaaccacgtagaatacat

SEQ ID NO: 382673 - DNA, 685 bp, Homo sapiens
ctcttggttttatatttccttctgtcaatgactaagtctggctggataacatagaagatgctatttcatttaagtgttgcgtattacaatatatgaggtaatcatgacataaatataacagactactaacatgatattgatccaggaaatatataggacaattgaattggatgcccatttgtttaagtaaaaattagaagtaaaggaaaaacaaaatgccagaactgcctgcctttcattttcatgtatccacttatgtgtaatttaaaatttttaacacatttctttttcaagattaaaaaatgtgtttgcagacagcttggtaaatgtatccggcttggaggtttaaaaccacatatgttataaaatatgtataaaattatccttctgttttttaaacagatatcatacaagtgccagraacagacgttatgttttctttatgattttaatttgcattttttcacataaatgatataatattcttaatacgcctttcttaaactggtcatctagcaaagcattgaacaactcaattctgtggtatataagcaaaataatgtttattttaatattgaaaattaaagcatctgatatttacattgtgatatttctcaatcaccgtcaggatctgatgctggaaaatctataattttacttggaatttgaaccacgtagaatacat

SEQ ID NO: 382674 - DNA, 590 bp, Homo sapiens
gtctacataacaaccatataacagcatgatgacaaggtaaaaatatcacatatcaacactaacccttaatgtaaatgagctaaacgccccacttaaaacacatatgaaatggcaatctggataaaaagatgagaatcaatagtgtactgtctttaagagacccatctcacacataatgacatccgcaggctcaaaataaaaagttgaataaatatctgccctgcaaacgagaaaattttaaaaagcaggaattgctatgttttatattagataaaacaggctttcaactttttacaattaagaagcataaagaaggacattacataatggataaagggtataatccaacaagaactawctatcctaaatgtctgcacacccagcattggagcacccagattcataaaacaagttcttcctgacctacatgaagactcagacaaccacacaaaaatggtgggaaacttcaaaaatccactgacagcgttagacagatcattgtggcagaaaacttacaaagaaactctggatttaactcaacacttgaccaatggacccaacagacatctacaaaatatttcaccccataa

SEQ ID NO: 382675 - DNA, 583 bp, Homo sapiens
cccattccgtagatgttggctgtgggtttgtcatagatggttcttattatttgaggtatgttccttcagtgcctagtctgatgagagcctttatcatgaaggaaatttatttttattgaaatcgttttctgcatctattgagataatcrtatggtttttacttgtaattctgtttatgtgatgtaccacatttactgatttgtctatgatgaaataggcttgcataccaggaataaagcctacttgattgtagcgaattcactttttgatgtgctgctgaacttggtttgctaatattttattgaagattttcgtgtctattgtgtatatatttatcaaagatacgggcctgaagttttctttgttcattgtgtctctgccagattttggtacaggctgatgctggctcatagaatgatttagggaggagcccatcctccccgatattttggaagagtttcagtaggattggtatcaattatttgtatgtctggtagaattcagctgtgaatccatctggtccagagctcttgtggttgttaagatctttattactgattcaattttagaacttaatattgtt

SEQ ID NO: 382676 - DNA, 583 bp, Homo sapiens
cccattccgtagatgttggctgtgggtttgtcatagatggttcttattatttgaggtatgttccttcagtgcctagtctgatgagagcctttatcatgaaggaaatttatttttattgaaatcgttttctgcatctattgagataatcatatggtttttacttgtaattctgtttatgtgatgtaccacatttactgatttgtctatgatgaaataggcttgcataccaggaataaagcctacttgattgtagcgaattcactttttgatgtgctgctgaacttggtttgctaatattttattgaagattttcgtgtctattgtgtatatatttatcaaagatacgggcctgaarttttctttgttcattgtgtctctgccagattttggtacaggctgatgctggctcatagaatgatttagggaggagcccatcctccccgatattttggaagagtttcagtaggattggtatcaattatttgtatgtctggtagaattcagctgtgaatccatctggtccagagctcttgtggttgttaagatctttattactgattcaattttagaacttaatattgtt

SEQ ID NO: 382677 - DNA, 572 bp, Homo sapiens
atgttaatttctcattctgcaagtaagtggttgctccacatcctacttggatttttttttttctctgctacatggctaggctgcaaattttccaaactcttatgttctgctttccttttgaatgtaagttccaagtttaagtcattccttttctcccctatctgattataggctgttagaagcagccaggccttgaatgcttactgcttagaaatttcttccaccagataccctaagtcatcactctcatcttcaaacttacacagatccctagcacatgaacataaagtagccaagtttcttgttagggcataacacagatggcctttactccagttcccaatcacctctttatttccataagaccttgtcagcctggacttcactgttcatatttctatcagtattttggtcacaaccattttactagtctctaagaagtttcaaactttcctttaccttcttgtcttcttctgagaccctcaagctcttccaacttstgactgttaaccagttccaaagttgcttccacattttcaggtatctttatagcaacacccactcctccatac

SEQ ID NO: 382678 - DNA, 574 bp, Homo sapiens
  misc_feature (1)...(574): n = A,T,C or G
gcagtttcacagtcacaagactaatcaaagtgttttactggaaccctatattaaagaagaatcatagataagaaacttagaagtctggtgaagagtagatagagggcttcaccctacaaaatccatatggtacaggagtcccaaactgaggaattaatgcaaaaactnggtttcaaccatgaaactcctcagcagctgcagaggcaaaggcaaaactcttyaggggcattttcaccactttaggtgcataggaatctctcaaacacgtaaaaatagccactgctgaagatgagcgcagaaaaaattacaactatggaaaaaaaaaaagaatcactcaaagggaggcagaaggtttcacaaagaggagatgtggcatccaagaccactggctaataaaataattcaaaagacactgcaaaaacaaatttgtgaaaagtgcttaaagagatgatagaaagccacagtgaaaaaaaggaaaagcataaaatagctggagcacaaaaaagtataaaatgaggtatgaatttgaaaaacaaccataaaaatatctatccatggaaaatatgtgcactgg

SEQ ID NO: 382679 - DNA, 574 bp, Homo sapiens
  misc_feature (1)...(574): n = A,T,C or G
gcagtttcacagtcacaagactaatcaaagtgttttactggaaccctatattaaagaagaatcatagataagaaacttagaagtctggtgaagagtagatagagggcttcaccctacaaaatccatatggtacaggagtcccaaactgaggaattaatgcaaaaactnggtttcaaccatgaaactcctcagcagctgcagaggcaaaggcaaaactctttaggggcattttcaccactttaggtgcataggaatctctcaaacacgtaaaaatagccactgctgaagatgagcgcagaaaaaattacaactatggaaaaaaaaaaagaatcactcaaagggaggcagaaggtttcacaaagaggagatgtggcatccaagaccactggctaataaaataattcaaaagacactgcaaaaacaaatttgtgaaaagtgcttaaagagatgatagaaagccacagtgaaaaaaaggaaaagcataaaatagctggagcacaaaaaastataaaatgaggtatgaatttgaaaaacaaccataaaaatatctatccatggaaaatatgtgcactgg

SEQ ID NO: 382680 - DNA, 588 bp, Homo sapiens
gtcctcaaactggctaaatatgataatctcctgggggaattctaaaacattccaccacctagaaccttccccaggacacttaaatcagaatctctggcaatgaggccagggtagcagtaatttaacttctccctaggagatcttaatatagacctagggttgggaatgactgctctgcattagcactcctccagattcacagtgcagaagaatcccctagaggggattgttaactagagaacttgttaaagtgcrgattctgagtcagcaggtcaagggcaaggcctgagattctgcacttctagggcattcccagatgatgctgatgctgctgatccagaccacatttttaatagaacggccctacatgatctggccctcacctacctgctatcatagtacgtattatttgtttagctgtttgcctgtctctcctcctagattgcaagctccataaaagataggactttgtcttattacactctatccctagagtccagaatatcagtacctggcacatagtagagctcaacacatatttgaataatgaatcaaacagtaaatgagtgaatgagacacagttggaaa

SEQ ID NO: 382681 - DNA, 504 bp, Homo sapiens
gtgcatggcctatagaaaatgctttatatctcttagctattacagccaccaatgattccagtggcttccactgtctttgtaattattagaacactcaaatggaagattagagtccagttttctagttagacctatacattacgtataaaacactacaaataaatcaacactgcaaatctttctgatgcttaatatttgggagtctatgragccttttttcaatgagaaatgtatgaatttctgctattttccactttgactgtactaaaaaatattcctaagcaggtaggagggtgctgaattgctttcaggcatttctttgtggctgtgaacatttgagatttagaaaacacataaatatactttatagcataaaaacttggcaatgaaataggctgtttttctaagaatcattactgtttcctgtaagctgcactatgtagaaaggcctggaatgcaactcttttgctgggatatataggaagagaccatgtttgctgagct

SEQ ID NO: 382682 - DNA, 557 bp, Homo sapiens
ctactgggttgcgttatccagccccttatggaaactgctggggaaatcagaaacaggtcccacagtgcactacacctagggcaggaaatgctgaagggaccagggcctccctaagttcacgtgggttgcacaygggcaccagagccaaggtggccgttctgcagtgagcatggtggaggctgtgtcaaagccaggctgtcacttccacggttagcagactaaggatgatggcagctagggctcttccgtggacaaatgtctacgccttgggaaagggaggaagcaaatctgggaggtatataaactgagtctctaacagtccctagctatactttatagatgatcctttcttttttaatctaaaataccccatctttcaaagtcccaaacagatttctctcctatcccagctaataactgccactttcccctttaaagtattttctcaagaatctgtcttctaatcttacaaatgtaccctagcctcttgacagtatttcttaataccaagaatctgccatcatcagctccaattaagtactgtctttataaattaa

SEQ ID NO: 382683 - DNA, 522 bp, Homo sapiens
ttgcaggagcttttaagcagatataaaatataatgttgggacttagctatcrtgaccaggaacttaggtatcgttgcttaagtcttatttcaaatggccactgcagcatattaataagttaagaatcaggttgaaatctatgttagattttttttcatttgtttcctcaaaatggcttcagaagataaaaaaataaatatatctagaagggagatgctgggccataatgcaggtatatgctaaactaagcaactgagccaattttcattccctccaagtatgagagtttttgttctcccacattttcaccaacatacggaatttccagtctctttaattttagtcattctggtgggtgtttaatgggatctcattgtggttttaattgcaattctccaatgagtaatcatttcacataatgtgcctattagagtgttttgcccataactcatcaatttcattccaaagtatatgtccaaaataagtaagtgcaaatgtccacccaaagacatatataagcag

SEQ ID NO: 382684 - DNA, 541 bp, Homo sapiens
taaaatccagaattaataactgctaactcattgttgttaccactatgccttggctgtctttttattcttcagtatcaggagtattcttgattatatttacttactccagaaagattctgttcaatttcagtataatctccattcaatatcaactagctatgtgtcacacacagcagtgatatataactcaagatgtgtaccacatttactaaagatgcccccagttcctactatgtacttggcactgtatatatgtgtatacataaatacatgcayattttctatacatatataattgtaaatgtatacatatacacaaatagaaagatgtacacttatttaattaagaaataaagtatatatatctttctatgttcatatcatgtgatgtgatccctttatttaaaattgctgcacaaatttaatgttaaaaattgaaatagctgacataaaatatttataatgcaaaatcttaagcaaatttgtccaagtaaataatatttcatatatcccctaaagttttactttgactacagttact

SEQ ID NO: 382685 - DNA, 541 bp, Homo sapiens
taaaatccagaattaataactgctaactcattgttgttaccactatgccttggctgtctttttattcttcagtatcaggagtattcttgattatatttacttactccagaaagattctgttcaatttcagtataatctccattcaatatcaactagctatgtgtcacacacagcagtgatatataactcaagatgtgtaccacatttactaaagatgcccccagttcctactatgtacttggcactgtatatatgtgtatacataaatacatgcatattttctatacatatataattgtaaatgtatacatatacacaaatagaaagatgtacacttatttaattaagaaataaagtatatatatctttctatgttcatatcatgtgatgtgatccctttatttaaaattgctgcacaaatttaatgttaaaaattgaaatagctgacataaaatatttataatgcaaaatctkaagcaaatttgtccaagtaaataatatttcatatatcccctaaagttttactttgactacagttact

SEQ ID NO: 382686 - DNA, 524 bp, Homo sapiens
ggccaattgctcaagtttgtggaatttttaaagtcaaaattgttgtcaaaaagagctcttattaaaaattaagttatatgtaaatttacaattaaataaatgaaggcaacaaataatatcatcactttctaattattttgctacattttactattatctatgttcttaagtctattgcattaatatggtgaaaatactagacaagagtgtgctatgagtatttcttcctaacttcatgctcattaatrtcatgttggtggcctgaaataggacgtggcaggagactgacaaatactgcaagtcagggcttgattattgttttgctgattgtctagacttcagaaagtggtggaaatgttatcaaaaattaaacttaaattgagtcctgtctataaaatagtgcaaacatttgagaaagtactgttccatcaatattactgcagtaattaccatctaactctgaaaacctttctttttcctttccatttaaaaaaagcaaggcttcttgattcttaaataactaa

SEQ ID NO: 382687 - DNA, 524 bp, Homo sapiens
ggccaattgctcaagtttgtggaatttttaaagtcaaaattgttgtcaaaaagagctcttattaaaaattaagttatatgtaaatttacaattaaataaatgaaggcaacaaataatatcatcactttctaattattttgctacattttactattatctatgttcttaagtctattgcattaatatggtgaaaatactagacaagagtgtgctatgagtatttcttcctaacttcatgctcattaatatcatgttggtggcctgaaataggacgtggcaggagactgacaaatactgcaagtcagggcttgattattgttttgctgattgtctagacttcagaaagtggtggaaatgttaycaaaaattaaacttaaattgagtcctgtctataaaatagtgcaaacatttgagaaagtactgttccatcaatattactgcagtaattaccatctaactctgaaaacctttctttttcctttccatttaaaaaaagcaaggcttcttgattcttaaataactaa

SEQ ID NO: 382688 - DNA, 551 bp, Homo sapiens
tttttattcataacagcccaaatttggaaacaatccaagcatccctctatggctgaatggttaaaacaactgtgatacatccatatcatcgaatgttattctacaataaaaatgaagaaactattgatatgcaacaacctaggtgaatctctggagagttacgctgagtgaaaaatgccaacccraaaagttacacacagtataattctatttatacagcattctagaaataagaaaattatagaaatacaaacagattaatggttgccaggggttaaggagtgggtgggagaaagtgggtggtgtgggcgtggctgtagaaggaaaacatgagggatcctcgtggtgatagacgtgttctgtgttttgactatttcaatatcagcgctctgggtgtgctgttgtgctataggtttgcagtatgtcttcactgacaaaactggataaaatgtacctggaatctttcaatattatttcttataacagcatgagaatttacaactttatcaaaataaaaaggttaactcaaaaacagaaagacatccattagt

SEQ ID NO: 382689 - DNA, 516 bp, Homo sapiens
atctttcaatattatttcttataacagcatgagaatttacaactttatcaaaataaaaaggttaactcaaaaacagaaagacatccattagtttatctattgcagaaaaataaaaaaatttgcaagttgaaaaaaatggtttcttaattcttttttccctttctggttgttctactcactcttgtattccctcttcttttctcattgcacatatttctctttaattatatcatttgttctcatatatccaattaccatgtgtataataaattttcaaaacatgtattctctcttctcttgaaactctaaacctaactactggctggtaataaacctttggttatcatatagtcattaaaaacagcatgcccaaaaattaacrcaaaagctgtttagtaaagacaggcttgtcttttcaataaattgtgtctaaacaattgggtaaccatatataaaagaaaagaagtgaggcaaggaagaaaggaaaagagaaaaaaaagaaatttgatttatact

SEQ ID NO: 382690 - DNA, 625 bp, Homo sapiens
ccagtgacattataaaggaccacacaaagaggtctgaataataaccagttaatcaaatgatgacaggaacaaatccactcatatcaatactaacgttgaatgtaaatagaccaaatgcccaaattaacaggcacagagtgacaagttcaataaagaagtaagacccaaatatatgcagtcttcaagagacacrtctcacatgaaataatatggatagatccaaagtatagggatggagaaaagttcttccaagcaaacagaaaacagagaaaaagcggggattgctattctaatttcagacgaaagagactttaaaccaacaaagatcaacaaaaggcaaagaagggcattacataatggtaaaatgctcaattcaacaagacaaactatcctaaacttatatgtactcaatacaggagcatacaaattcataaagcaagttcttagggacctagaaagagacttagatttgcacacaataatactgagagacttcaacaccccactgacaatattagacagatcatcaaagcagaaaactaacagatattcaagacctgaaattgacacttgatcaaatggacttaatagacttctgtacaacactccacccaaaggcaacaga

SEQ ID NO: 382691 - DNA, 625 bp, Homo sapiens
ccagtgacattataaaggaccacacaaagaggtctgaataataaccagttaatcaaatgatgacaggaacaaatccactcatatcaatactaacgttgaatgtaaatagaccaaatgcccaaattaacaggcacagagtgacaagttcaataaagaagtaagacccaaatatatgcagtcttcaagagacacatctcacatgaaataatatggatagatccaaagtatagggatggagaaaagttcttccaagcaaacagaaaacagagaaaaagyggggattgctattctaatttcagacgaaagagactttaaaccaacaaagatcaacaaaaggcaaagaagggcattacataatggtaaaatgctcaattcaacaagacaaactatcctaaacttatatgtactcaatacaggagcatacaaattcataaagcaagttcttagggacctagaaagagacttagatttgcacacaataatactgagagacttcaacaccccactgacaatattagacagatcatcaaagcagaaaactaacagatattcaagacctgaaattgacacttgatcaaatggacttaatagacttctgtacaacactccacccaaaggcaacaga

SEQ ID NO: 382692 - DNA, 544 bp, Homo sapiens
ttcaataaagaagtaagacccaaatatatgcagtcttcaagagacacatctcacatgaaataatatggatagatccaaagtatagggatggagaaaagttcttccaagcaaacagaaaacagagaaaaagcggggattgctattctaatttcagacgaaagagactttaaaccaacaaagatcaacaaaaggcaaagaagggcattacataatggtaaaatgctcaattcaacaagacaaactatcctaaacttatatgtactcaatacaggagcatacaaattcataaagcaagttcttagggacctagaaagagacttagatttgcacacaataatactgagagacttcaacaccccactgacaatattagacagatcatcaaagcagaaaactaacagatattcaagacctgaaattgacacttgatcaaatggacttaatagacttctrtacaacactccacccaaaggcaacagaatatacattcttctcatcttcacatggcacataatctaaaatagactaaacaatcagacattaa

SEQ ID NO: 382693 - DNA, 610 bp, Homo sapiens
gatgatagtcgtaggaaaaaaagaaagagacaattgaccatagtgtcccttaatgcctctgtggagaccagtttgcttccttcccttccttctcaactaccctgaagtctcttatttttcttcaaccacctcaaaactccatttgcatgccccatgtgtaccattcaaatcacattactcctttgctgaagcacctgcaagcccttttccttcctggcaatatgagctacatctaaagtgtctacgttcttcactgttgcaatgattatatcccttgcctccctaaggctccagtctctctccttgyggtctttaaaatccaatttaactgggttaaattgcctttatactcctccgcttctccatacctacagttccctctaattctctctctctcgctctgtcctttctctcatttctagtactcactaactgaagtcaatagattagccttaatttattttgggaatagcacagtcatagaagttaacatttatagaatatattcattttagctatcctgttacaacagggaggttaacaaaattgatatctaattaaaactaacaagcatagtcttattaaaaccaaaacaataaagaatgcagtg

SEQ ID NO: 382694 - DNA, 610 bp, Homo sapiens
gatgatagtcgtaggaaaaaaagaaagagacaattgaccatagtgtcccttaatgcctctgtggagaccagtttgcttccttcccttccttctcaactaccctgaagtctcttatttttcttcaaccacctcaaaactccatttgcatgccccatgtgtaccattcaaatcacattactcctttgctgaagcacctgcaagcccttttccttcctggcaatatgagctacatctaaagtgtctacgttcttcactgttgcaatgattatatcccttgcctccctaaggctccagtctctctccttgcggtctttaaaatccaatttaactgggttaaattgcctttatactcctccgcttctccrtacctacagttccctctaattctctctctctcgctctgtcctttctctcatttctagtactcactaactgaagtcaatagattagccttaatttattttgggaatagcacagtcatagaagttaacatttatagaatatattcattttagctatcctgttacaacagggaggttaacaaaattgatatctaattaaaactaacaagcatagtcttattaaaaccaaaacaataaagaatgcagtg

SEQ ID NO: 382695 - DNA, 619 bp, Homo sapiens
tgttccagattgaaagctgaatttcaaagatccaaattttgtttccaggtatagcaaacgcccagttacccaaatggtgatgaaaggaacacccacattaattatacaaacttcagagaagtttcactggcttgcttcatttgattcctatcaaaatccagtaagatcagaggttcaaattatcatattcgcawttcagagaatgtagaaactaggccctgagatgcacagtgacagcaggcaacatgctaaggccatgggtagaactttaacccaatctactattctaacaaatcattttcatcctcttagacctcccagatgttgaaagtgcagattctggggccacattgcctgggctcaaatctaagcacacccactttccaggtataagatctcaagaaaatcacttatttattaatgtgtgtcttagtttattcatttgtaaagaaggcttaataatagtactcacctcacagaattgtggtgaggattaaaatcgttaatagagtcacccatttctatgcacaaatgcagaacccagagatacagaggaccagctgtagtattatttcatacaagggacttgagcatctgcaaacttcagtaacctcagtgg

SEQ ID NO: 382696 - DNA, 619 bp, Homo sapiens
tgttccagattgaaagctgaatttcaaagatccaaattttgtttccaggtatagcaaacgcccagttacccaaatggtgatgaaaggaacacccacattaattatacaaacttcagagaagtttcactggcttgcttcatttgattcctatcaaaatccagtaagatcagaggttcaaattatcatattcgcatttcagagaatgtagaaactaggccctgagatgcacagtgacagcaggcaacatgctaaggccatgggtagaactttaacccaatctactattctaacaaatcattttcatcctcttagacctcccagatgttgaaagtgcagaytctggggccacattgcctgggctcaaatctaagcacacccactttccaggtataagatctcaagaaaatcacttatttattaatgtgtgtcttagtttattcatttgtaaagaaggcttaataatagtactcacctcacagaattgtggtgaggattaaaatcgttaatagagtcacccatttctatgcacaaatgcagaacccagagatacagaggaccagctgtagtattatttcatacaagggacttgagcatctgcaaacttcagtaacctcagtgg

SEQ ID NO: 382697 - DNA, 542 bp, Homo sapiens
gtgatctcatctaatttaactaattacatctgcaatgacttacttgcaaataagatcaagttctgagatagtagaagttaggatgtcaacatatcttttgtcgggaayacaatttaacccataacatccttccttctgagcactctcaaatttgacaagtgatttctttggctttgagagggagaactagtcacatgatcccaaccttcttcagctggaatgtgaggagaagaggtaaaatttcttcatgggtattgcattattcaaaatcagtaacttcctcctctcacacaagagctctctctctatagtttatttatcttaaaatttcatttcatttttttagcaatactggggggagggaagttagatgacagctaggtttaattagaatgctgcttctagtaaagacaggtgaagtagtcagcccaagagctagcagatttgaacttacaatagtctatcctgatcacttttgttctcagctatggctttaattgtcaattcgggtaaacagaaaaattctatctagtacctcatag

SEQ ID NO: 382698 - DNA, 335 bp, Homo sapiens
taactcctatgtatttaacactcactgcagcccagatacaaggccaaacaccttatattcattatttaaattgatatctctgtgtgtttatctagttaatcatttagaatcatttgtctactgttttgaaatctcatgtcatgagcaaggactagaaagcttgctggtatgagcaagaaaattatataactaggagtacagtgaaaagtgtcttagtctgttttgtgctgctgtaatagaatatcrcagtctgggtaatttataaagaaataaatttattctctcacaattcttgaggcttagaagtcaaatatcaaggcactagaatatgatga

SEQ ID NO: 382699 - DNA, 651 bp, Homo sapiens
aatttataaagaaataaatttattctctcacaattcttgaggcttagaagtcaaatatcaaggcactagaatatgatgaggaccttctcactgcattctcatgtggcagaaggcagacacacaagagagagtgaactcactcctgcgagctctttttatagcttattaatccctycatgaagacggagctctcatgacctaaacacctttcatgaagtcacaactctcaacattgttgcattggagctagtttccaatatgttacctggcgcagtggctcacacctgtaatcccagcacttggggaggccgaggcaggcagatcacctgaggtcaggagttcgagaccagcctggtcaacatggagaaaccctatctctactaaaaatacaaaaattagctaggcgtggtggcacatgtctgtaatcccagcgacttgggaggttgcggttgaggcaggagaatcacttgcaccccagaggcggaggttgcagtgagctgagattgtgccactgcaccacagcctgggtgacagagagactgtgtctcaaaaatagaaaaaaaagtttcagaacgtgaatttgggggggatacattctgatgatagcaaaaagaacatatttgaaacctgaagatttgagttctaagcagt

SEQ ID NO: 382700 - DNA, 534 bp, Homo sapiens
catagcattggaactatactttaaaccaaaagaatgtaactgacatatcgcacccaacagaacagaacacacattgttctcaagcacatatgaaacatactctaatctagatcacatcttaggccccaaaacrcatctgaacaaatttaagactgaaattatatgaagtatcctttctgaccataaggtataaaactataaatcaataatagcagcaatttataaaaattctcaagtatgtggaaattaaacaatatctcttaaacaacaagtgaatgaaagatgaaattaaaagggaaattagaacatattttgggacaaatgaaaatagaaatgcagcattctaaaacttatgtgttgtaggaaaagcagttctaagagggaagtttataccaacaaatgcctacattaaaaaaggagaaaaatcccaaacaaaaagtccaaagttagtacaagaaaggaaataatgaaaatcagagcataaataaatgaagtggaacctataaaaatagaaaagatcaacaaaaggaagag

SEQ ID NO: 382701 - DNA, 272 bp, Homo sapiens
ctcccatgacacatggaaattgtgagagttacaattcaagatgagatttgggtagagacgcagccaaaccatatcaccttgtacagcaaaagcaatcttgagcaaaatgaacaaagctggagacatcacactgcctgatatgcaaacctacttcaaagtgaaattaatgaaaatagtatcattctagcataaaargcacatcgctcaactaaagagaatagagagcccaaaaataaatctacacatttacaatcaattgatttttgacaaag

SEQ ID NO: 382702 - DNA, 634 bp, Homo sapiens
tgtaacaaaccttcaccttcagcacacgtatcccagaaattaaaataaaattttaaagaagatattatggcttgacacacaaaagtaacctatatgtccagaaagaaattatttggttatcctttattgaataggacctattaattgtaaacacgttataattacatatgtaactataaaatcacgcctctgccatgcctaaagtaaaaaaatggcttcccatcaatcttaggataaaggccaaatacttactgtggcctccaaggccccactcacttctctggatgctctggtggcattcttacccctttccttgctccagttatatcaacccttcagttgctcaatatgccactctccttcccacctcaaggacttggtgtgtattgttcctttcaactaatcagttccaatatagtctctttcaggatttgagcacagagatcacttccttatggaatcatcttctgacacatcagattaattcaggtcaccttcctataaattctcaatgtaccatggacttaagaagtattcaycacagtaattacatatttttactcccccttttttggccacactagaatgttaatctttatcatggggatgatataaaaatatgttacattttact

SEQ ID NO: 382703 - DNA, 493 bp, Homo sapiens
tttcgtcattttttctatgtcttctgcacacctcctttcttcatacattcccttaacccttctctaccccattctccaggtttgcagcaataggcagaagctctattaagattttttaatctacttacagttaacttaaaggtggtgctgtttttaaaaaaatattttggtaatggtaaaagtatattcttttcattcatgttatgaattttgtggggaagatatggggaaaatctgaaatcaggcagttaccattgtctttaaacccttaactttgacttacaagcagggctttcaactcctctgaagttactgggcctggatgcagttggataagaagataatactgtaagctttcaaagcctgaggccgcaartcctatattccaatattatacctagaaaagtgaaacatttgacaagaagatagatgattagatgaacggatggatagactaaggtatatggatagacagatatattgttatgatatt

SEQ ID NO: 382704 - DNA, 490 bp, Homo sapiens
ccatatacatataattgatgtaatctcctttacttaaagtcaactgatcgcagatgttaactgtatctacmaatactttcacagaacgcttagattagtgtttgattaaataacttggcgtatagtctgaccacaatgacatgttaaactaatcatcatgctctggttaagaaagccttcttcacttaagtctagatatttatactcttgataactgtattagaggtttttattaatgtaatagaaatgcctaagaagaaagcttttcaggaaacacaccatttttctattagagaaatcctgtacatatatattccaagagtcactagagtccaaccagacacaataaatgtgagaataaagaagagctgaagaataggaatgttggggcctatgtaaaactggaataggtagtcaaattcaaaagttccacaaaattttgcagggaaaaaacaaaactatctgtgggttgggtatggctgctttgtaa

SEQ ID NO: 382705 - DNA, 490 bp, Homo sapiens
ccatatacatataattgatgtaatctcctttacttaaagtcaactgatcgcagatgttaactgtatctacaaatactttcacagaacgcttagattagtgwttgattaaataacttggcgtatagtctgaccacaatgacatgttaaactaatcatcatgctctggttaagaaagccttcttcacttaagtctagatatttatactcttgataactgtattagaggtttttattaatgtaatagaaatgcctaagaagaaagcttttcaggaaacacaccatttttctattagagaaatcctgtacatatatattccaagagtcactagagtccaaccagacacaataaatgtgagaataaagaagagctgaagaataggaatgttggggcctatgtaaaactggaataggtagtcaaattcaaaagttccacaaaattttgcagggaaaaaacaaaactatctgtgggttgggtatggctgctttgtaa

SEQ ID NO: 382706 - DNA, 555 bp, Homo sapiens
aaatactttcacagaacgcttagattagtgtttgattaaataacttggcgtatagtctgaccacaatgacatgttaaactaatcatcatgctctggttaagaaagccttcttcacttaagtctagatatttatactcttgataactgtattagaggtttttattaatgtaatagaaatgcctaagaagaaagcttttcaggaaacacaccatttttctattagagaaatcctgtacatatatattccaagagtcactagagtccaaccagacacaataaatgtgagaataaagaagagctgaagaataggaatgttggggcctatgtaaaactggaataggtagtcaaattcaaaagttccacaaaattttgcagggaaaaaacaaaactatctgtgggttgggtatggctgctttgtaacctctaaatttttatggctctttccctacccataaatattgacactgttggaatgtgatgagtccattggggttggtgattcagktgacctgtagcagcctttgacccagagacatagaaaatatggagaaagag

SEQ ID NO: 382707 - DNA, 563 bp, Homo sapiens
attgttttcccattgaatggtcttactaccctggacaaatattaattaaccatgtatgcaagagtttatttctgggttctctattctactctatttttctaaatttctgtacttgtgcccatgacaccttgttttgattgctgtagcattgtagtaagttttcaagtcaggaagtgtgaggcctccaactttgttcctttgtaaaattgttttgctagtcagggtcccctgagattccatatacattttagaatttgttttaatttctgtaaaatgtatgscattaggatttaatacggattgcatggaatctgcgattactttggatagcatgggtatcttaacaatattcatctgatccatgaacctagaacgtcttctcatttacttttgtcttattaaattttcttttaacattgttttgtcattttcagtgtgcaagtctttcacctccttggttaaatgtattcctaagtatattgtattttgatgcttttgtatttatggaaatttttttaattttccttgtgaaatggtcattgataatgtgtaggattgcaact

SEQ ID NO: 382708 - DNA, 526 bp, Homo sapiens
attagtcctttcatgaacgtataatgttcttctttgtctctggtaacaaactttgaattaaagtccattttgcttcacctattagtatagttaccctagatttcctttactttaattttttttatagatgtggtctcactatgcttcccaggctggtctcaaaactcctggcctcaagcgatgctcccaccttggcctcacaaagtgttgggattacgggcatgagttaccttgcctggttcctaaatgtcttctagttgctttttgcatggaatattattttacatcctattactttcaacatatttgtggctttgatctaaaytgaatctcttgtagctagcatacagttagacaatgttttctttttattcattctgccagttctgcctttaatttgagtttattccatttacattttaagtaattactaataaggccttgcttctgccatttttctgtttgtgttctacatgtcttatggattttggttgctcatttcctccatcttcccttctttggtgca

SEQ ID NO: 382709 - DNA, 617 bp, Homo sapiens
agtctaatcacaaggaagacatcagacaaatcccgactggggaaaattctacatcacacctgacctcaaaagcgcctgggccatgagaagcagggaaagactgagagactgtcacagccaagaggaggctgggcagacgggctaatgtcatgtgggatcctggataggaccctgggaaacaaagaggacagggaaaactaagaaaatgagggagtggatttggggaacagtgacgtgtccttgttgataatagcatgttgatgtgttcattaactgtgacaaatgaggcatgctcacataaaatgctaacagcaggaaaactgtgcaaggagtgtgtggggaccctcgcaccatattggcaacatatattctccagctactctaaaatgaaacaattatttaaaaatacagagtacacagttaaatttaaattttacataaacaggtaatattttctcgtaagtgtgtcccatgaaatatttgagaccttcttattctgaaaaagtatttgttgtttacttgaaarttaaacgaattactgagcatcctgtgttttatctggcaaccacagaggttgggagagttcagaggggaggagaaaaaacattgccccaggg

SEQ ID NO: 382710 - DNA, 569 bp, Homo sapiens
gctctgtggtattccagtcactgaaaagaaagtgggtatgtttgttttcctctgaaaacaagaattaccattttgggcactggtcaacaacatattttcaatgctcttcgagtttttctaattgcatttctcttgttatggttggcactgtgatggtggccacttggccaccttgccctagtcagtgtagaaaagtagaaaggctcttctgtcagactgcaccacgygtgcatgtcgttggatgcctccaaggagctgatgaggcctgtggggtgggtcagggaggaagcatggtccacaaaagcgcccatgattgcctggcaggaaagcacagaaatgatgctcagcagtgagcgactgctgtgacattggtggtaatgatgatgtcattgcctaacatcgcctttgccatccaggagtgggaaccagacaaccgtattgcagtcttgtttctgccttcatgaccctctgtttctttatctaaaaactggcttcagaaataattatttctactgattaacatatgtcataatgaaatgacttaggttaaaatgactaacagggtccct

SEQ ID NO: 382711 - DNA, 588 bp, Homo sapiens
aggtgtcataacatggaacacgggaaattggtgaaaaatgaataaaatgtagttatgtgtgtctgcatgaacaaataccccaaacacaacattatatacaaaagcaagttttagtataatataatcgcattcacaaaaagttttaaaataaaaataatacctatatgtggtagaagatgttagaaaacgactagtgatagttataccttgggaaaatgaatcattcaggagttggtgatcggggatttaggcatcgtgccaatgttttatttttcaagctgtgtgataagcctataggttatcatgttattattcttgtgcatgttatactcttcaatattacatamtgaattttgaaatataagaatgtaagtttttgagataagttttatgcctatgaagtgttatccaaatgttaatcatacatgttatttttgagtcttggtcatgtaggcatgtgttggtaggaagtgtgatgtttttcattctgcctagattgtattttggtccacacccatgctagttctgttggactaaagaactcactcaggaggttgagtctttaccactagaagtcctcacgaggac

SEQ ID NO: 382712 - DNA, 611 bp, Homo sapiens
ttattttgtgacttagtcaagttgtattccattcttcctgaacttttcagatgcattaataactatggtgtggctgttgtttctactgtgccttatttctacattgtattttcccattgctatcttttgactttattttctgagttctagaactcgatatttaaatctaatctgtctcatagtctctcttttgtcacttttgtctttttttgagatctcttttattaaacagagattatgccaacagtatctttgtgatcactatggtcaactattagtataaactctttcttgtttcctggttgtatgtttttcctgtgacatttccgcttcctgtttctgtaggtagatgccatgatctgattgttctttgggakgagcactttcaaattagagatggaaatagagaaaaataaaagaacagttggagtcttcaacttcagttgtggtttgttgctgaataggctgtcattactatagcattatcattttatttctgaagcaggctttagaataatcctaacctgggcactgctttaagcattcttttttgttgtttttgccaatgccgttctcctttaggttattgacatttgttgtctcggttgatt

SEQ ID NO: 382713 - DNA, 553 bp, Homo sapiens
ttagtgcaaaagttttgtggaattatgttgatccaaaaatatcatctcacctaaatcctgttttagatcaaatatgtacatatttctaaaatcaggaggtgagcactttagaggtgattgtgtgcttcattcactggacaaacaagttaaaaaatgacgcaatcaagggttttattgatttgtcaccattacttaacamtattaattactatttaaaagaataaattattttttaaaaaggcatggaacttatgtgtatttcactattttcattttacaaatgattttgtatgtctcatttttcagtgtttctacactcgtatctcctaacatagtggaggtctagtaaattataattaaaggaaagaagactgctttagaaaacattttggtggaacaggtggaaagactgggatagaaaacagagtgaaatattcaggagataatcaatctagagcaatagaaggtacatgtagcagccttctactttcatcagtatcaggataatcattataatatgaaatgagccacattcttctcatttctcatattg

SEQ ID NO: 382714 - DNA, 494 bp, Homo sapiens
taatttgtaaaaatatttaaaaactaaaaatataatgtatgcttttagtttaaattaaaattgcatatgtatttaaacttataattgttccatgaaaataaatgtcactttgaagtgcttatacaatttttgaaaggatctacttactttccattaaatggacttaaaatgttaaggatacccccatcatttaatgttttgtattcctcaaattatttttagtgggaaggtaattatgagaagagctaaaatttgagttttcaatatgtacaaggtattaagctgtatctttttcatgttctcatttatttacatgaaccttaggaggttagaatggttgaatgattttagagatatggaaaattgcatcataaagaataaaataatttgcccaaatccaagtggccactgaactgcgtattcagaacttgacctcaaactccaggctgttcatcactaagtgaattgcrgcctctatctatgtacttacttac

SEQ ID NO: 382715 - DNA, 572 bp, Homo sapiens
acgctggtacagcaactcttttaacccttcataatcgggatcatccagccaaataacaagccccttctttatctgttagtttcagttgcaaaaggaagcccacatgaccccatggagcctattccatcacttcttttgcttaatactcttctatatttgtttacaatatacccaacttcaaaatagcctggtttaaatattatgctcatatacatcatatatgtgctatgaaattgctacttcatttgttatgttaactatgacatgtttttcctacaagatatcccatttttgttgccaaaatrtaccctcaggttactcgctgaaagcataaagatgcacttatagaggaagcaaaacactttttttcacccatgagcctgaaaatcttactaaattcagtattacttacctcagattgtttctgaagatagattttgatggaagaattgagacattatatgaaaaaattaaaaggctaaattaatttgaaatagaggaaatttattagatgaactttatcttttctgcacagccatatacacatatgagcacttatatttataatgcac

SEQ ID NO: 382716 - DNA, 459 bp, Homo sapiens
gggcattttcaacttaacttttgttatgagtctcatctcatctaatgagtgcatccttttctttatggaagaagtgagtattccaagataatacaaaaaacacatagtacaatttgtttaatgtgctgaagaatgttaatgaaatcaatcccatgataatgccattatttttggaaacagatttatattttgattatacttatttttgcatattttaagttcacttttttgtctcaacctctgtgaaatatatctccccaatgatttcaaatgattttttgacagcccacatagcaaatgttagcactttatgcttattatctgtgtctttaaaagcactgcaaactgaatatcattgatggtataaagtrtataaatttctttacatggttttcttaaagaactatatgcagaaatatatgggaagacgagtagctcttctaatcatttatggttttc

SEQ ID NO: 382717 - DNA, 612 bp, Homo sapiens
tccctctcaactgattctaccttcaccactccaagaattttcttccaatacttttcctaggtgaaacaaccwcaatcacctcaaattttcctatatttgaagtctacatggtatgcttactgtaacatgcaaacttagattttttctttggtgttttttccaaacaaattgtaaactacttagctcccacttttaggaaattagaatatttgaattctggtatatgtaataccttcctaaaacccgtaaaaaccttataagaaccttataggcagagactatgctttaaattattttatagccttggtatgtgtacaaagtaaatacatgaaagggaaccatcatttatttaaaatatatcagatttaaattaattgtctactttgtattttaaaatacttgctaataataatcattggtcaaggaaattaagtaatattttaattgaaaataatatttgtttaacctggaatattaatatcctatctaaaatgtttattattcacatttattcatttgtcataacatctgtctttaggaataagattaattggaatatcctgtttattcatttactttatcatgtttatatgtatctcattatgtcctgtc

SEQ ID NO: 382718 - DNA, 612 bp, Homo sapiens
tccctctcaactgattctaccttcaccactccaagaattttcttccaatacttttcctaggtgaaacaaccacaatcacctcaaattttcctatatttgaagtctacatggtatgcttactgtaacatgcaaacttagattttttctttggtgttttttccaaacaaattgtaaactacttagctcccacttttaggaaattagaatatttgaattctggtatatgtaataccttcctaaaacccgtaaaaaccttataagaaccttayaggcagagactatgctttaaattattttatagccttggtatgtgtacaaagtaaatacatgaaagggaaccatcatttatttaaaatatatcagatttaaattaattgtctactttgtattttaaaatacttgctaataataatcattggtcaaggaaattaagtaatattttaattgaaaataatatttgtttaacctggaatattaatatcctatctaaaatgtttattattcacatttattcatttgtcataacatctgtctttaggaataagattaattggaatatcctgtttattcatttactttatcatgtttatatgtatctcattatgtcctgtc

SEQ ID NO: 382719 - DNA, 612 bp, Homo sapiens
tccctctcaactgattctaccttcaccactccaagaattttcttccaatacttttcctaggtgaaacaaccacaatcacctcaaattttcctatatttgaagtctacatggtatgcttactgtaacatgcaaacttagattttttctttggtgttttttccaaacaaattgtaaactacttagctcccacttttaggaaattagaatatttgaattctggtatatgtaataccttcctaaaacccgtaaaaaccttataagaaccttataggcagagactatgctttaaattattttatagccttggtatgtrtacaaagtaaatacatgaaagggaaccatcatttatttaaaatatatcagatttaaattaattgtctactttgtattttaaaatacttgctaataataatcattggtcaaggaaattaagtaatattttaattgaaaataatatttgtttaacctggaatattaatatcctatctaaaatgtttattattcacatttattcatttgtcataacatctgtctttaggaataagattaattggaatatcctgtttattcatttactttatcatgtttatatgtatctcattatgtcctgtc

SEQ ID NO: 382720 - DNA, 572 bp, Homo sapiens
gtatcaaactatcattttttatcccatatatatgtacaaatattatatatcaaaatattttaaagtcatagttgttataaatgcataycatatgcctgttgctgttaaagaattttgtttgcattaataatcactagaataatcttatgcagtccacaaaatcataataacccatattgcacagataagaaatctgagatagaagaagggcaaatgacttgtccaactaaaagtgtgtagaaaagatttgaactaagtaagctggctccatgtcaattgttcttaggactataattacattgcttctccctcaaactctatttagaaattaaagattgttctactttgtatttctaaaaggacatcttattgtaaactcacatactctggagcaaaactgcaaagacaggtgcagtttttaaaacatagttgagaaaatatcactttgttcgaacatggctaaatattttctgcagcactgccttttgccagaaaattcactcataattgaattccattctgattcgatcttgtgctttttgtaaacacaatagacaaggaaatgggtactg

SEQ ID NO: 382721 - DNA, 394 bp, Homo sapiens
ttctctcctctccctttgcttccttgaatgtgcttcctgggtgtgtgactgcttaaagtaatagcatgtcactgaactgatggaatgccatggcagatctagcactgaaaagataggcatcttctgattactccattttataaacttttagtcatgctgcmaggaaatacaagtggctttgtgatgtgtcccacattaggaaagactgagccatcctacaacagctctagctgagctcccagccatcagccagcagtatctttgtcagccatgtgagagagatatcttggaagttgattctccaatccagttttgagccagcccagtgacaacacatacagcacaaataacctatccctagaaaccacaaccaaattgcaaaatcatgaataag

SEQ ID NO: 382722 - DNA, 557 bp, Homo sapiens
ccattgcagggacttctctttttctcacataatcttatcataaaccattagagggctgataacttgtaaatagagttttgctcactggtgtctaattttttcatgcacatatttcctgtttatcttctatcctagaaaacttgggaataaggtaatgagaagcgaaatagtatatgtttccaaaaatawatgcatttatattgagttgcaacaaaatgtttgtgattacaataaaataatgatcatcacacagaggtacatcttgtaaataattattaattattataacaatgctaacatgtctttaaaaaactgattttttattgtggaaagtaatgagatctattacttaatgtttacacatatattaaaaatacattgtactatctaaactgattgtactttgacagctttaaaaatatatgacaaaacatggtcctattaattaatttttttaaaagcctagaaataaaaggtgagggcaatagaagactcacagctgcaactttaagcgctaagctcttagggttgaaaataccttatatctgtaagtcata

SEQ ID NO: 382723 - DNA, 638 bp, Homo sapiens
atacattaaacattattgaaatactatacattatatgcagtcaaacataaattcggaaagatgtaagttgaaatgttaacagtttgagttactgagcacgagtaacttttattttatttttggcattttttaattttttgtttttgttttttaacaaatatcttcattaagttgtattaagtagaacaaaacattaacagcaggaacagcttttgacactagatagtgctatgtttkaatctcatctttaaaactcatcatttatagaaccttaagaaaactacttagtacattcatgtttatattccttactgtaaaactgtaatattaatgtctactcataaccattgtatggattattgtataggttaaataaagtaatgtactgcttatgatgcttaaaatatatcaactattcaaccaatgccattactacttttaaaatagtatgtacctcagttaaaataaaaatacatctaaaggatggtacaaatagtaaaaactgaaaagcaacacacaaaacttgtttatgagggatgcatgtatttatcaaagatctggcattgtgatgattcctgttttgtagaataaaatggtacagagtaatatagtacattaatatatggtaataacaagta

SEQ ID NO: 382724 - DNA, 560 bp, Homo sapiens
atcaaagtaatcagagagtaaagtttgtggaaggtattttattttaaatacatctttgcacatatttagtagtgacaaagagaaagycatatgaaataggaattgtggtgagggtaaaatattaatcctacatctccaggcagctttatacaacttctattctatttaaaagcaatataaaatctttctattctggccaatctcagaaatataccatgctaaaggcataaaaatattccaaatcagcagctttaaatccatgacagcagagaaggagtggcaaaataaagaaaacactaaagtatgtatgctaaaataacttacagcttagcacaaaatgtgttttcatcaatataaatattgtcatataactaatatgaaacaaaaacaatgacatagaattgagaaactgctgttataattatgagaaaaaatagaaaaatatataaaatttgaacttctaacaataagatgaaatataagtttttaatcatttaactattttacctgttactctgaaatataattattaaatagcagtgtaacttggttttgatgca

SEQ ID NO: 382725 - DNA, 560 bp, Homo sapiens
atcaaagtaatcagagagtaaagtttgtggaaggtattttattttaaatacatctttgcacatatttagtagtgacaaagagaaagtcatatgaaataggaattgtggtgagggtaaaatattaatcctacatctccaggcagctttatacaacttctattctatttaaaagcaatataaaatctttctattctggccaatctcagaaatataccatgctaaaggcataaaaatattccaaatcagcagctttaaatccatgacagcagagaaggagtggcaaaataaasaaaacactaaagtatgtatgctaaaataacttacagcttagcacaaaatgtgttttcatcaatataaatattgtcatataactaatatgaaacaaaaacaatgacatagaattgagaaactgctgttataattatgagaaaaaatagaaaaatatataaaatttgaacttctaacaataagatgaaatataagtttttaatcatttaactattttacctgttactctgaaatataattattaaatagcagtgtaacttggttttgatgca

SEQ ID NO: 382726 - DNA, 560 bp, Homo sapiens
atcaaagtaatcagagagtaaagtttgtggaaggtattttattttaaatacatctttgcacatatttagtagtgacaaagagaaagtcatatgaaataggaattgtggtgagggtaaaatattaatcctacatctccaggcagctttatacaacttctattctatttaaaagcaatataaaatctttctattctggccaatctcagaaatataccatgctaaaggcataaaaatattccaaatcagcagctttaaatccatgacagcagagaaggagtggcaaaataaagaaaacactaaagtatgtatgctaaaataacttacagcttagcacaaaatgtgttttcatcaatataaatattgtcatataactaatatgaaacaaaaacaatgacatagaattgagaaactgctgttataattatgagaaaaaatagaaaaatatataaaatttgaacttctaacaataagatgaaatataagtttttaatcatttaactattttacctgttactctgaaatataattwttaaatagcagtgtaacttggttttgatgca

SEQ ID NO: 382727 - DNA, 537 bp, Homo sapiens
catttctgtcttgtaaaactaaatttcttttgaaatttagtactatctggaatttaataagtctgttcgatattactatttttaattaggcaaaactatagggtaagtacaatgaggcttaaatgtctgtattgctagaagacacaagtctctctactttcttggaacagaaacattgaggcatttgtagcctctctaagaagtccaccacataatatagtcaaaacaattgagacaacaaagcttttggtaaatttttacactatgtaggtattagcataaactaattcagacactaaaagttagacataaaacttttaggcagtttattaggtttaataaaaaaatacatatttggacagtttagacattaaaatagttcagtgcttccaaatttgagtttagtaaactaaggcttaaataagttaaataacttctctgaagtcacgtatgagttaaatctccaatacagagattttcaaactcaacttggtcttccttscatagtaaattacttcatggttgtgtttattcttt

SEQ ID NO: 382728 - DNA, 532 bp, Homo sapiens
acacttttcttttatcgattctccatttgttttgtaggatttcaacagtgaaggagacctgagaaaccataaaatcaatctctcaaattgaagttgaaaaaagcaaatcatctctcacacccaccctgattggtaataattaacttggcaatacttcagttactctttcattaagcagtwctcctagatatcgaatttatgttagtttatttattggattcatcctaagcattcaaggtacttttgaaggatatgaggcaaactgttagcatcatttaacatttattgaattgtagcatccacataacttagagcagacacaagacttaatgagaaaagcaagacattattcctgttttatagagagtaaccaaggccaacaggtagaaagaagacttgcccaaagtcagacagaaaatgttgagaggagattaggacccacttaggttatttttggtagattgctcttttcacttatacatagctgagtttgccaggaataaagaaaatatactgaacatgaacagttaat

SEQ ID NO: 382729 - DNA, 605 bp, Homo sapiens
gtgaacagggctgcaatgaacatacatgtgcatgagtctttatggtagaaagatttatattcgtttgggtatatacccaataatgagattgctgggttgaatggtagctctattttactgtgaactcttatactctttaccagttaagtcctttcctctctggagctggcaattcacttcctagctgctcctgttttgtgtctgatgctcaagttcttgattctttattctgaacaatggttgctattagtattttctgaggaagatcactgcatccatcataaacaatttttaaaatttcaaatatgtacagtccatgctgctgccatagtataaataccaactttctagggtactaagtattggatgagcccagccaatgtgcagatagacgtggtggcacaaaggacctatttacatgccatttttgttggggcagcactgccctttagaatgtgactgttagtatgggtgctgctagaaaggattycctctactcaaaatgcatgtgaacaacttctgcagagttaatgctaggacagaattgtgacattgataaagtttgactttgaggtcccttcactttgtatacaatcacttaataa

SEQ ID NO: 382730 - DNA, 489 bp, Homo sapiens
aattaagtatctggtgattttgctttaggctggttcaaagaaacgaaggattataaagttgataagatcacagagtgagcgatcaccaacccatccaccgtctatccatttcccgacagttacttattaaatttgttaarttacatttattaaattactatttgtccagctctgtggtagatgttgtgaaagacacaagggaaacaaaagataatctttactcttgaagattcacataacgttaaaactgaaggtagtttaaaaaatgatgttattgtaattctatgttctcttttcaagacaaagacacagttgttaggtactttgcttaaggtaatatttaaaaatttatgtggtgggccacagggctctaattcctagtccaataagttttctactatatttattgggtaagtcagatatgtttgtctgcctaaaaagttggaaaataagtaatcccaagttattatgtaagcaagtgtgggatca

SEQ ID NO: 382731 - DNA, 587 bp, Homo sapiens
aatactatatgtcaaaacttgcgatataaagcaaaaacaatgcatatattagaaaaaaagatttaaaattaatgttctaaactttcatttttaagacactaagaagtaaaattaaatctaaagtaagtagaaaaaaggaaataataataaaagtaggtatcagtgagctagaaaacagaaaagcaattaaaaaatcaacaaaggcaaaaaaacacatgttttaaaaatattaacaacttgttaaaccccaaacaacactgatgaagaaaaaaaagatagaagacataatatcaagggaaaaaaagcagagccatttttgcaatttctatagaaattgtaaggataatgcaataaatatatcctacaaaatgctcttagccagaayatgtaaatatgtaaagaattactacaaattaataaaaagaaaaacaaataatccaatttttttcaaaagtaaaaacattaaaaggtaattcacataagagaatacacaaatgtaaattaacaaataaatgtattagtcgtcaagaaaatgcaaagtaatggcaaaaactgcaattacttttgcaccaacctaatactaccac

SEQ ID NO: 382732 - DNA, 588 bp, Homo sapiens
gtgcaaaacataaatagaattcaaaacagtaagacaatagtgtagcaaaagtgaggtgactttaagaacttcaaaatgaggttagtctctgaagataaaactgctaaaatctatccctgaaatatgagccatttatcaatgttgaccaatcagttgttagagtttggggaaatgctcaaattttaatcaaaatacttagggaatagcctcgaggaagcacagatgatactagtctacctaaaactgcatacacacagcatcagcttggcacrttaacatgagctaacttatcagagaaaaacaaattgatttttggtaatttggccagagctgacacttcatcaactgcattgactctcgttggaaggaaaggatgtgcaagcatggcggggatgatgggcatgcccggggatgacgggcaggccatcctaaagggaaacagtgtatcagcatttaccagccctgtcttgactttggatcaggaagcagaagtattctggttaatagaaaaagttgactgttgagggataagtggagttttctgtatcattcttgcctagctacaatcactttgggttagaactacct

SEQ ID NO: 382733 - DNA, 655 bp, Homo sapiens
ccaaattaaatttgtgctctttyctgtctacagaaaagaaagcaaacaataagttagcaatactgtaagttggagagtcgcaattaggtgactcctagaaacagaaaaataaattgccttctatgactcagaatgcaaaatagaaactacaggtcagaacacatgtatatagagacccttgatggagacaggatggtttctaggccaaaagaaggttgcaggaacctatctgaatgtataattgtagtttttagattatgtcagtcttgggattgggggtaaagaaagagatacataagttggtacataagtcattcaattatgaaaacaagcaaaaaaaggaagtcaccagggccaacattgtcagtgcccagccaaacaccgtctagggagaagagggcctttgctattagagcattttaatctatagggcaatataattccagtggagatggataaagactggattttctatggctctctgattcaattaatttatgataaaatagaaggctaaagttaacataccttgatgatataaaatatctgtattatcttgttccctctgccaggatcatcagttagacccaactctatctcctttttgactggctcatgatgttttcactctcagatctcagatgtgaagtcattt

SEQ ID NO: 382734 - DNA, 655 bp, Homo sapiens
ccaaattaaatttgtgctctttcctgtctacagaaaagaaagcaaacaataagttagcaatactgtaagttggagagtcgcaattaggtgactcctagaaacagaaaaataaattgccttctatgactcagaatgcaaaatagaaactacaggtcagaacacatgtatatagagamccttgatggagacaggatggtttctaggccaaaagaaggttgcaggaacctatctgaatgtataattgtagtttttagattatgtcagtcttgggattgggggtaaagaaagagatacataagttggtacataagtcattcaattatgaaaacaagcaaaaaaaggaagtcaccagggccaacattgtcagtgcccagccaaacaccgtctagggagaagagggcctttgctattagagcattttaatctatagggcaatataattccagtggagatggataaagactggattttctatggctctctgattcaattaatttatgataaaatagaaggctaaagttaacataccttgatgatataaaatatctgtattatcttgttccctctgccaggatcatcagttagacccaactctatctcctttttgactggctcatgatgttttcactctcagatctcagatgtgaagtcattt

SEQ ID NO: 382735 - DNA, 655 bp, Homo sapiens
ccaaattaaatttgtgctctttcctgtctacagaaaagaaagcaaacaataagttagcaatactgtaagttggagagtcgcaattaggtgactcctagaaacagaaaaataaattgccttctatgactcagaatgcaaaatagaaactacaggtcagaacacatgtatatagagacmcttgatggagacaggatggtttctaggccaaaagaaggttgcaggaacctatctgaatgtataattgtagtttttagattatgtcagtcttgggattgggggtaaagaaagagatacataagttggtacataagtcattcaattatgaaaacaagcaaaaaaaggaagtcaccagggccaacattgtcagtgcccagccaaacaccgtctagggagaagagggcctttgctattagagcattttaatctatagggcaatataattccagtggagatggataaagactggattttctatggctctctgattcaattaatttatgataaaatagaaggctaaagttaacataccttgatgatataaaatatctgtattatcttgttccctctgccaggatcatcagttagacccaactctatctcctttttgactggctcatgatgttttcactctcagatctcagatgtgaagtcattt

SEQ ID NO: 382736 - DNA, 606 bp, Homo sapiens
gaaactacaggtcagaacacatgtatatagagacccytgatggagacaggatggtttctaggccaaaagaaggttgcaggaacctatctgaatgtataattgtagtttttagattatgtcagtcttgggattgggggtaaagaaagagatacataagttggtacataagtcattcaattatgaaaacaagcaaaaaaaggaagtcaccagggccaacattgtcagtgcccagccaaacaccgtctagggagaagagggcctttgctattagagcattttaatctatagggcaatataattccagtggagatggataaagactggattttctatggctctctgattcaattaatttatgataaaatagaaggctaaagttaacataccttgatgatataaaatatctgtattatcttgttccctctgccaggatcatcagttagacccaactctatctcctttttgactggctcatgatgttttcactctcagatctcagatgtgaagtcatttcctccctggaagtcttttccaatatacctaatccagatttgttgattctcctatatatttgcattgcattctgcacttcctttatcctatccc

SEQ ID NO: 382737 - DNA, 655 bp, Homo sapiens
ccaaattaaatttgtgctctttcctgtctacagaaaagaaagcaaacaataagttagcaatactgtaagttggagagtcgcaattaggtgactcctagaaacagaaaaataaattgccttctatgactcagaatgcaaaatagaaactacaggtcagaacacatgtatatagagacccttgatggagacaggatggtttctaggccaaaagaaggttgcaggaacctatctgaatgtataattgtagtttttagattatgtcagtcttgggattgggggtaaagaaagagatacataagttggtacataagtcattcaattatgaaaacaagcaaaaaaaggaagtcaccagggccaacattgtcagtgcccagccaaacaccgtctagggagaagagggcctttgctattagagcattttaatctatagggcaatataattccagtggagatggataaagactggattttckatggctctctgattcaattaatttatgataaaatagaaggctaaagttaacataccttgatgatataaaatatctgtattatcttgttccctctgccaggatcatcagttagacccaactctatctcctttttgactggctcatgatgttttcactctcagatctcagatgtgaagtcattt

SEQ ID NO: 382738 - DNA, 606 bp, Homo sapiens
gaaactacaggtcagaacacatgtatatagagacccttgatggagacaggatggtttctaggccaaaagaaggttgcaggaacctatctgaatgtataattgtagtttttagattatgtcagtcttgggattgggggtaaagaaagagatacataagttggtacataagtcattcaattatgaaaacaagcaaaaaaaggaagtcaccagggccaacattgtcagtgcccagccaaacaccgtctagggagaagagggcctttgctattagagcattttaatctatagggcaatataattccagtggagatggataaagactggattttctatggctctctgattcaattaatttatgataaaatagaaggctaaagttaacataccttgatgatataaaatatctgtattatcttgttccctctgccaggatcatcagttagacccawctctatctcctttttgactggctcatgatgttttcactctcagatctcagatgtgaagtcatttcctccctggaagtcttttccaatatacctaatccagatttgttgattctcctatatatttgcattgcattctgcacttcctttatcctatccc

SEQ ID NO: 382739 - DNA, 561 bp, Homo sapiens
catagaccggcatctagtcacatagcccagactaaactgcaaggaatgttgcaaaacataatccttctctatgcccaagaagaagaatggtrtctgggagcattctagccagtctctgcaaaacttacatcaaacaaaattcatttgctttcttaataagtttattaagcaggttgatggatgctgctattggagggcccaatattatattttggaattaaaaaaaatacaaatggccaacaggtatgtgaaagtatgttcaacatcactaatcaccaggggaacccaaatcaaaccactatgagatattatctcatacttgttaggatggccactatataaaaataaaagataacaagtactgtcaaggatgtggggaaattggaacccttgcacactgttggtgggaatgtaaaatggggcagccattatggaacacagtatggaatttcttcaaaaaattaaaaatagaacaatcatacgatccagcaattctacttctgcatatttgtctaaaggaattgaaatcaggatctcaaagagatatctgcactcccatgt

SEQ ID NO: 382740 - DNA, 561 bp, Homo sapiens
catagaccggcatctagtcacatagcccagactaaactgcaaggaatgttgcaaaacataatccttctctatgcccaagaagaagaatggtgtctgggagcattctagccagtctctgcaaaacttacatcaaacmaaattcatttgctttcttaataagtttattaagcaggttgatggatgctgctattggagggcccaatattatattttggaattaaaaaaaatacaaatggccaacaggtatgtgaaagtatgttcaacatcactaatcaccaggggaacccaaatcaaaccactatgagatattatctcatacttgttaggatggccactatataaaaataaaagataacaagtactgtcaaggatgtggggaaattggaacccttgcacactgttggtgggaatgtaaaatggggcagccattatggaacacagtatggaatttcttcaaaaaattaaaaatagaacaatcatacgatccagcaattctacttctgcatatttgtctaaaggaattgaaatcaggatctcaaagagatatctgcactcccatgt

SEQ ID NO: 382741 - DNA, 561 bp, Homo sapiens
catagaccggcatctagtcacatagcccagactaaactgcaaggaatgttgcaaaacataatccttctctatgcccaagaagaagaatggtgtctgggagcattctagccagtctctgcaaaacttacatcaaacaaaattcatttgctttcttaataagtttattaagcaggttgatggatgctgctattggagggcccaatattatattttggaattaaaaaaaatacaaatggccaacaggtatgtgaaagtatgttcaacatcactaatcaycaggggaacccaaatcaaaccactatgagatattatctcatacttgttaggatggccactatataaaaataaaagataacaagtactgtcaaggatgtggggaaattggaacccttgcacactgttggtgggaatgtaaaatggggcagccattatggaacacagtatggaatttcttcaaaaaattaaaaatagaacaatcatacgatccagcaattctacttctgcatatttgtctaaaggaattgaaatcaggatctcaaagagatatctgcactcccatgt

SEQ ID NO: 382742 - DNA, 575 bp, Homo sapiens
tctttctctctctttgccgaaataccttcaggcctcctctcctcccttcaggcaaaagtccttaaaacctccactttcccccagtaatatttttctccaactaactggaagtggagaaagattttcctctttgtctagcactgatttttgacttgtaattccatttcaacaaaaccacttgcactaaagcttacacacaatgtaaataattcattagaaatatatatttgcttgatgcttatatacttgcagtgcatctgcagagtctattgtatcagtcaaggaaataacaggactcccagtcaccaaggtgaatggaaaattttcctctttaaataggtaaaaatttaagttgcatgcaaattaatcttggaaatacagaatgctaacatagcaggggactttaaaatgtgtatattctaacactctctataaatgtggaaaataagtcccagagcatkgtaacatggccataacaggccttgtagcattctggaatttaaaaggctaggtgcatagaagggaaaatagatacgaatggcaaaggcaggtacataatgcctaaaaccaggatg

SEQ ID NO: 382743 - DNA, 580 bp, Homo sapiens
ttttgtctttacacaaaagttttagaaggttcattatttctttggctgtacaagtctctcaaaagagtaatcagcttcttgtagtagttgatcatggtcaatttcttgtgccaacagccccatacacaacattttttgatacatgcttctctgtgatttctctgaactgtagatatcttaagtcagctaagcttcagtagaagagccgcagcttcagtcttataataatattgagtcattctgtccatatgaaatactaactgggttgttatgttaacccattcaaaggttaaaaacttgtgtggaaaccatatccttgatttattccttgatgcaagactgtgttcttatcagtctgtctctaattagtgataagaaacaattgccttgtccaattctccaagtcttcaaattttcttgaccatctctgttatctttcatacttgcttgcttgttaattcgtttttagctcattgttttatwgtagtattttgtcaaatgaagccaacagtgattgacacttgctagaagttctatttttcaatcattttgcctatagctataagttcacagaggacat

SEQ ID NO: 382744 - DNA, 542 bp, Homo sapiens
ttccccttcaacttctgccatgattgtaagtttcctgaagcctcgccagccatgcttcctgtacaacttgaggaactgttagccaattaaacctctgttctttagaaattagccagtctcaggtagttctttctaacaatgcaagaatggactaatacacatggttacaaacagagtcattttttttctacttaagaattctcattccttcttttcatgcaggcttactagaaattgactttcacagtgtttgtttgaaaatgtctttatttcatcttcacttgtgaaagataatttttcagggtaaagcattctatgttggcatcattttgctttcagaaatgtaaatattctttccattgttttttrtcttctatgtttcctgttttcctgttcagaaatcaactatctaattagagcaaagtttatagtttgatccttttgggcttggttgtttttcaaattttcttttccttggttttcagcaggcttattttgaagcatctcaatgtgcttttcttgcatttgttttgcttggaatt

SEQ ID NO: 382745 - DNA, 545 bp, Homo sapiens
gcttaggaggctgaggcagggagattgtttgagcccaggaatgcgaakctgcaatgagctaagatcattccaatgcactccaccctggacaacagagcaagaccctgtctcttaaattttgttttaaagtgccctcgaattttgttaagacctcagaagctgctccatgagtgggtggtgcaatgttattggagcatgggggtcagtgaggagagctaagatttctgggaggccaacagaagggttagaatgtgcttcaaaatttagttgggcatggtggtgtgcacctgtagcttcagctacttaggaggctgcagtgggaggatcactttaatcgggtatggtggtgcactcctgtagtttcagctacttgggacgctgaggtaggatcaagggaggatcacttgagcctgggagcttgaagctacagtgagctatgaacatgccactgcactccagtctgggtgaaacactgagaccccgactctaaaaaatataagttcataacagtacataatagaggaggctcaaaacacatgccagtg

SEQ ID NO: 382746 - DNA, 545 bp, Homo sapiens
gcttaggaggctgaggcagggagattgtttgagcccaggaatgcgaatctgcaatgagctaagatcattccaatgcactccaccctggacaacagagcaagaccctgtctcttaaattttkttttaaagtgccctcgaattttgttaagacctcagaagctgctccatgagtgggtggtgcaatgttattggagcatgggggtcagtgaggagagctaagatttctgggaggccaacagaagggttagaatgtgcttcaaaatttagttgggcatggtggtgtgcacctgtagcttcagctacttaggaggctgcagtgggaggatcactttaatcgggtatggtggtgcactcctgtagtttcagctacttgggacgctgaggtaggatcaagggaggatcacttgagcctgggagcttgaagctacagtgagctatgaacatgccactgcactccagtctgggtgaaacactgagaccccgactctaaaaaatataagttcataacagtacataatagaggaggctcaaaacacatgccagtg

SEQ ID NO: 382747 - DNA, 525 bp, Homo sapiens
cccacgggttgacaaaagagttgcgtaattgttcagtatttaactctccctggaatggctcaaagagggagctatgtgtgaaggaacttgtgggtaaataactctggcacagagcaccacaccatctgcagacattgcagaaatgagcaagggaagccaacgagctgtgagtgacagagattaatcttcaaagtcacaaaggcatgtagttccgtttggaattcaggcaatgctggagagcgtcacggccccrgaacaattctctgaggcaatgaagacatttatcagccatagctctcaggtgactgctgtgtcctggaatccttgatgctggtgaatcaaaaagaacccaaaagaaagacacttccctttaaaattaggaggggcagcagaataattatgttcaattttttacttaaaacaactgtccaaagaattcaccatggtgccttggatgaagctggccttccatatccagggaactgagatgaaaacaaagagtgtcacttaccataccctgcaggc

SEQ ID NO: 382748 - DNA, 631 bp, Homo sapiens
caaccttttatttgttctttcctcttttggtgttttaatatgtttagtgataagtttcagtaaatcattactttcaagaaaacctgcacaaagtaactactagcttttgaaatggatgctgatgtttctttagtagacttgtgccttttcaaatgataattaatatcattacagtccccaagttagatgtcaaatgccrgcaaacattttgtgtaagttacatatttgtcaattttcttacaaaatagaaattctgtacttaaaattttattaaacatgtgcttcccctccccttagaatttattgctcctgaaaagagttataaagtttttaaaaagctaccaaataataacataaataaaaagttattgatttatagtatataataaatgacaaaaaccactgtactaggaagtattctctatatgctctgtgaaagaactctcagtttttattcccacatgttttatatataccgaatctaccatttccaagctttcctgactttgcagcctggtttgatgtttcatgcatcttgtaggctgtagcacaggccatgctaccacctgcatgccagctccatttgattgataggggtaggcctgttggacacttctgccaccattaccac

SEQ ID NO: 382749 - DNA, 588 bp, Homo sapiens
gaatcagttagaacagaaaagagaaaaaaagtgggtggtgtgtggagtagcttccctataatgttggtaagaggtttgaatttgtgtcattatcccttcaaaacaggaggagaggcaggatttactgagcacttcctcgaggcccagcactggaacaaacacttactccttttttataagagggttatggtgttctcactggtgttttttccataaccatcacatggaaatattatcattttcatttcacagatgagaaaaccaaggcttcaagcagttacagaagtgttcatacaaatgcagtcagaaataaaactgatgttcctaaattcatgatttaacaaatctggctgcattgcttctcaaaagttcaaaatgttcatggtttacttacatccggaacgtttggtatatgactgttcagcaatgctaggcagaattagtgagaaaatatggtagtccttattaacaacctcaaacttaaakaatttattaacaaccttataaagttagaaatctttaagagcctgtcacggatggttcatctctaaatttaactagacactatcgtgggctaatgcaaattcc

SEQ ID NO: 382750 - DNA, 562 bp, Homo sapiens
agcaaaaactgacagaactgcaagaaatagtagataaattagcaattacagtcagagatttcaaataccctgtctcaataattaatacagcaagtaaagagaaagtcaataagaatatagaagatttgaacaatgctatcmaccaacatgatctaatttatttttatagaacacaccacccaaaaacagtagaacacataattttttcaaatgtaaataagatatttaccaatatacagcatgttctgggcttctgggccataaaacaagtcttggtaaattttaaaggattcatgtcataaaaagtatattctctgattacagtggaattaattaaaaatcaataactgaaagatctttggggaactgtcacatggttggaaactaaataatacacatacacaactagtggggcaaaaaaaatgaaaatggcaattagaaagtattttcaacttagtacaaatgaaaacataacatatcaaattgtatgggatgcctttgtggtagactgaaaaggagcccccagatatgtccacattctaatccccagaatctgtggatg

SEQ ID NO: 382751 - DNA, 592 bp, Homo sapiens
ctatgtgtggcagctgccactactttaatacttttagaggccctcaaaatcacaaactatgctcaactcactctctacagttctcataacttcaaaaatctattttcttcctcacacctgacacatatactttctgctccctggctccttcagctatactcactctttgttgagtctcccacagttaccattgttcctggcctggacttcagtccggcctcccacattatcccggatatcacayctgacccccatgactgtatctctctgatccacctggcattcactccatttatccatatttccttctttcctgttcctcatcctgatcacacttggtttattgatggcagttccaccaggcctaattgccactcaccagcaaaggcaggctatgctatagtatcttccacatctatcattgaggctactgctctgcccccctccactacctctcagcaagccaaactcattgccttaacttgggccctcactcttgcaaagggactacgcatcaatatttatactgactctaaatatgccttccatatcctgcaccaccatgctgttacatggactgaaagaaatttcc

SEQ ID NO: 382752 - DNA, 499 bp, Homo sapiens
tcactcatataacacatactacagatatttttttccagcagtgctcatatccctcaatataaacactccactgaatccacccaaggttgaaattttgccatgcaagttaaacagaaagacagtaagataagaaagttgaaactgtaggaaaacaattggtagaagtgattgatgacagtactacgggtagctgaacggggataaaaataaaatccttctactttaaacacgcacttctactcatgctatgccttactaaacgaagttgaaactgttactttcaagtttcatttagctatttttaacagccttagtggttttttttttttttttacaaagacacaaaaatgaaaatatactatggcaattttaagctactttcaatgacttttttttttttttttttttaaraaaatcctgttaggctgggcgcggtggctcacgcttgtaatcccaggacttagggaagctgaggcgggcggatcacgaggtcaggagt

SEQ ID NO: 382753 - DNA, 449 bp, Homo sapiens
ccaaaaaaaagaacatcccgttgcaggattctaactatagagacatattacagtagaatatcacagtattaattaccatgaaaatacctatgactacagtttacctttgaaataagaatataaggtaaagaagaaattcaaagtaatcaaataatcaggctgggtgcagtggctcacacttgtgatcccaccactttgggaagctgaggcaggcggatcacttgattcgcctggtcaacatggcgaaactcygcctctactaaaaacgcaaatattagccacgtgtggtggggcgttcctgtaatcccagctgtttggtaggctgagtaaggagaatcaattgcttgaactcgggaggagagggatgcagtaagccaagataatgccactgcactccagcctggacaacagagcaagactctgtctccaaaaaaaaaaaaaaaaaaatc

SEQ ID NO: 382754 - DNA, 558 bp, Homo sapiens
aaaacctcacacagtcattattgaagttagtctcacaaagtgaagcatagtttttgtttattggtgacaatttacaaaatacttgccagcttagcctcacatatgacagatgtgaccagcaggctccagaccacaccgagctgcatgctggccccgtctacaagcctggggaagtgtggctgggctcctcaaccttcacaacttggggaggttgctcagctcacatgaaaatcagtcctctctttttccctagggcactstgtccctcttatgttgataaagtgggtttcccagccaggtggcacaggggatgctagactggtgtgcgttgggcaattctctgtggcagttctggacatcttcaaggatgcttgtctaggcagaggacagatttgtttcctgactacggtaataaagatcatcatctacctgtagggcaaaggttggatgagttgattggagaagcagcccatcttataactcgaggggtttcctgagcttggggttcctcagctgtgatacagatgatacatcataaattgggttgtcacacatcac

SEQ ID NO: 382755 - DNA, 541 bp, Homo sapiens
tgatatgtatgctcactgaagtttctgaatcactgttctaattaatgtgattttttaaactcaactatactaaaacatctaggttacctgagaatcacgaagctgattatgaaaacgctgaattaagtcattcaattcttcatttagttcagatgtgatactgacgccagataagctacctgcagtttctgcaacaactggaaagaaattagtaactactgattaatgtaaataatcaaacaccttttttaatctctgagaagctaaaaataaatttaaaaaaagaatttaaaaagctcacatacgtaacttgaaactagttaacaatccgatctatctgccaacaatcattttattagaagttaccacctaacttaaaaataaagggatgstcacaaaactctggtaaagtggttcatcttttcctgtcccaacatacaaggagggttactattacattccaattaatagtagtgactcagtggagcaggtctaagatcagtgaggagtgaaagggaaagtgatagtgtaaaaaagcaca

SEQ ID NO: 382756 - DNA, 586 bp, Homo sapiens
gtctcctcggcaacggcgccgcgggggcgagaactcgctggcgggagcccaatgcgagctagactggagtcatgtgacccgccggagtctgtggtgycgcttctggctctttaagccgaaaagagattacaccaacgaatccgcccccacccgcccaggaactatgtatcccagaatgccaactagacctcgcgttctaaacgcctgccggccacaggtggaggactacaaatcccagcatgccgtgcgcttccgggctgatcgcggagcgtagggccctaggcctatgcggaagtgcattgatccctcagcccgtggagaaagagcggaggcgctgtgcggttttccgtgggggtgtcagctccggcccgtgccggaagaaggagccaagaccgggatcgcttttttgccccttcctcaccccacattcggtcacgaagaggtggaaacaaaaggacacttacaatgtagtccaacctcctgattttacatatgaggggattgttccacggaagttaaacaatttgccagacgtcattatgtatctactgagtgagagaatcataaatattgttgatagttaacg

SEQ ID NO: 382757 - DNA, 449 bp, Homo sapiens
gcaaacaactgcttgagttacatcagaaggaaagaagaaatgatgaacccagatttccagtaagaaactgttacacaataygattaatggagctaacaagtgcctattacacattagaaaatcttctagaggattttaaaacaaaaggaacaacttgtccagagtataatcgatgcttccagttaaatttcacaattttgcacctcagggaatacttttgtttttcttagagagcaaataaactgaccatttcaccttggcaattattaacctgccttgttttttataactaggaaaaatttggcttatctccatattttagttgagatgacatattaattcatatttttgtgggtaaaatgttattacccttaatacaaagcaaagtttcagctggacttcgtttttacttaatcttcaatggaacattattgaagttacagtacaaa

SEQ ID NO: 382758 - DNA, 591 bp, Homo sapiens
ggatctaaagaaacctggctttaccatttagctatgtgactctgagcaagacattgaaattctttgagtttcagtcttctgcaatacagagattataacatctacctcataatatgattgtcagaattttatgagtcagtatctataacatgtaatgtgtaatataaggcttagcactatgcctcatagatcccctaagtgctcaataataataaaataactaatgttcattaactcttatcataatggttcaataaacagtacctattatcataattttatatgtgtaggaaatacttgtcaaatatcttgttagtagatacacactaagatactgttttacataagtataaagcaataataaatataatgataaaatcccgtaatgttaatcttagagtaataatttactactatrgagaaactgaggaggaagaaatattttactctgatgtgatgaaagccgcccaacgctggaatgagtcaactttggaattcaaacattctctggaatgcttttaagcataggcagtgaccagttggtgggaatgttgtggaagatatttaaacataaatgactgacaaagccaa

SEQ ID NO: 382759 - DNA, 607 bp, Homo sapiens
ttgcttttgttattataattatcattaccaccactattggagtttctgagaaataggttgttcagaatgatcaaaagtagagtttgagcttgttcttgaaaaatgtggaaaaaagaaggtgatagaagaaaagagagtaaaaacccattgataaatggacatagctgttcttgggaacagcctgattagagaagtcaggatgtcttggtgggaagcaatgtcaagtcattaattttaggcttaattctaaagggctcagtaagtcgggcagaggaattcaaacttaattgttgtagactgatttttttcttgcttttaaatgattttttgtgttactcctgttttttctcaattctatgttgcttgttattcttattttcttaattatatgactaagatgctattaccyttacataattaaacattttttgaagacttataaaggaggtatgaaaatttcaaaggtctttattaaattcatctaaaagcaggaaaaaatgacccatgatcctcagagcccagtgagtttcatgtattctaaatttaattcacattctatgactttatcactttttactcatttaaaagtatcctatttgtagactta

SEQ ID NO: 382760 - DNA, 461 bp, Homo sapiens
aattatgaattctattatgagttcagttatgaggccccttgaacagcacacaaaaacacaggatactttgtgttatattatggattatgaagggattaacactggtagagggctttaataggggtgaaatgttgtgaaacacaccgcagtgaacacwtaagtctcttgttcattccgttgtctaagagatttacactcaccttcaaaagtgaagtatctacatgctattatacattttcagttaacatcagagaatttcatatcatattaacaaaccctgaacactgcagagcctgttagtattagaataaaataattttaatccatgctacacaggccttacctgtaatacaaaaaaaagtccaccaatttcaagggtgatgtggaaaagttcattatcagcaataagtagggtagttatagtacaaatatatacacagtatataaaacctgcttggcta

SEQ ID NO: 382761 - DNA, 592 bp, Homo sapiens
ttattttgtgatatcaacaaagactcagaacacaaaatgtcttgycatttataacgaaattaaaaatatgaagcatttaaggataaatctgataaaatatataaaatatctgtactacaaaaactataaaacagtgatgagactaattaaataacacttaaataaaatgagagcaaaaccttgctcctgtgtcagatgtaacacgtttaagatatcaatttttcacaagttcatctacagatgcaacacaattccaattgaaattcaagtaaacttttcctagaaactggcaaactaaaaataaaattcacatgaaaatttgaagaatatggaatagtcaaatcataataactataacaaaactaaagaaaaataacactatctgatttgaagatttattattaacctacattaaataagagactatggtattggcataaacataaacacaaatagatcaatagaacatcacagacagcctaaataggtgcaattatatatgggaaattgatttttgacaaacatgccaagacaattactggaaaatggtaatcattgtaacaaacaattctaggaaaaaaatcgatctata

SEQ ID NO: 382762 - DNA, 592 bp, Homo sapiens
ttattttgtgatatcaacaaagactcagaacacaaaatgtcttgccatttataacraaattaaaaatatgaagcatttaaggataaatctgataaaatatataaaatatctgtactacaaaaactataaaacagtgatgagactaattaaataacacttaaataaaatgagagcaaaaccttgctcctgtgtcagatgtaacacgtttaagatatcaatttttcacaagttcatctacagatgcaacacaattccaattgaaattcaagtaaacttttcctagaaactggcaaactaaaaataaaattcacatgaaaatttgaagaatatggaatagtcaaatcataataactataacaaaactaaagaaaaataacactatctgatttgaagatttattattaacctacattaaataagagactatggtattggcataaacataaacacaaatagatcaatagaacatcacagacagcctaaataggtgcaattatatatgggaaattgatttttgacaaacatgccaagacaattactggaaaatggtaatcattgtaacaaacaattctaggaaaaaaatcgatctata

SEQ ID NO: 382763 - DNA, 592 bp, Homo sapiens
ttattttgtgatatcaacaaagactcagaacacaaaatgtcttgccatttataacgaaattaaaaatatgaagcatttaaggataaatctgataaaatatataaaatatctgtactacaaaaactataaaacagtgatgagactaattaaataacacttaaayaaaatgagagcaaaaccttgctcctgtgtcagatgtaacacgtttaagatatcaatttttcacaagttcatctacagatgcaacacaattccaattgaaattcaagtaaacttttcctagaaactggcaaactaaaaataaaattcacatgaaaatttgaagaatatggaatagtcaaatcataataactataacaaaactaaagaaaaataacactatctgatttgaagatttattattaacctacattaaataagagactatggtattggcataaacataaacacaaatagatcaatagaacatcacagacagcctaaataggtgcaattatatatgggaaattgatttttgacaaacatgccaagacaattactggaaaatggtaatcattgtaacaaacaattctaggaaaaaaatcgatctata

SEQ ID NO: 382764 - DNA, 567 bp, Homo sapiens
attgtgacatttaaattattatacttttattttctaaattatacttgtctgattaattttttattaagtaaaattacccacacagatttcaaagttcactctgaatagctcacacattaatcatgtaccacatctaacctgaaatcaaagcctttaagtgactatactgagtcaatatttactatcagaatttttgaacaatgaaaatatatatgtawgtatatgtatgtgtgtatatatatatgtaggaaaatagttaatgtagctgaagtaaacacacaagcaaaaacacttcaaattacttattttttaattttgtaaaccatgctacacagaaggatgtggtacagcttacagaaagtatgtactgtagaaaaccttaagacaaggtaagattaggaaccttgggaaatacaaatgggacaaaaagattaagtcaagacaaacagtttgaatattgttatcactttaaatgaaacaatatagtatggtataaattttgtaatctgctttcctcattactgcgatatgtcctcacaaagaaatcaaaatcaatgtttaccatta

SEQ ID NO: 382765 - DNA, 585 bp, Homo sapiens
ctgggcagaattctgctgggtcccatggagggagcatttagaccagccctagccagagggaaattgcccaccccagcagacataatgtgacttccagcaagcctcactaccatgcgataaattgctctgaggttctaaataatcttgaaaggtagtctaggccaaaagaactgcaattcatggggcaaatcctgctgctttgctgggcttggagccagtgaacatgggggacaagtgacctagtgagacaccagctggggtgaccaagtgagtacttgtgccactcctctgctaatcccagggagcgcagctcacagctccaggagagactcctcccttcaactgaggagaggagagggaagagtaaaaataactttgtcttgcaactttgataccagctcagccatagttggatagggaamtgggcagagtcctgaggcccccattccaggctctcactccttgatgttatttctagacccacaatgggccagaagggaacccactgtcttgaaggcaaagaacaaattctggcaggattcatccccagctgaataaagaacccttgagccctgaatagtcaga

SEQ ID NO: 382766 - DNA, 440 bp, Homo sapiens
aagggaccgatcctgaagagagagagttatgtgacctttcagacagagaattcaaaatagccattttgaggaaactcaatgaaattcaagataacacagagaaagaattcagaattgtatgagataaatttaacaaagagatttaaatgattaaaaaagtcaagcagaaattctggagttgaaaatgcagttgacatactgaagaatgtgtcagtctcttagcagcagaactgatcatgcagaagaaagaataagtgagcttgaagacaggttatttgaaactacacagtcggaggagaaaaatgcaaaaagaataacaataatgaagcctacctgccacatctagaaaatagcctaaaaaaggaaaatctaatarttattggccttaaagtagatagataatgagagcctgggtagaaagtttattcaaaggtctaata

SEQ ID NO: 382767 - DNA, 609 bp, Homo sapiens
aatttttgagaagtttgaactgcgagttttttttttcctttttagggcatgacattttgaaactatgtccagttagaattttagctccgtcacgtgttagccatgtagatatgggcaatttagtcttgttctttgaccttggtatgtcacgacataaagaagttttaayttcagtgttacaatttatttaaacacttagtattatgccttaaacatggtcaaaatttaaatataaactattttagtgattttatataatattaaatgtttataagttattttaataactttaatgttttatgattttaataactactgcactttcaaacaaagagaatatgaaagatcagaatagaaatccaagaaacaaggttcagtataacctaaagtataatatgattaacaagggagtattataaatcaataaaaaatatatattgttctagaattgtgactattagatatttcaataaattaaaatttgaatataatccctaatgtatacattacgtgcattataccaaataatatatatgttgtatgtatacacaacataatgctcattggatcgaagtgttaacattggaaagtcaatattaaaagaagaaa

SEQ ID NO: 382768 - DNA, 530 bp, Homo sapiens
acagagtttttatttattttctttttgcctatttgacagtctgattgcttatgcaatcagttaagttgtattattttaaaatagtgggttataagatattgtttgaaagcctcttggtaacctcaaatcagaaacytacaacagagacacaaaaaataacatgtaagaaattaaaatacatgaccagagaaactaaaaaatgaaaagatatttcatgtacctagattggaagccaagaaaggaggaaaaaaagaagaccacaaaacaaccagaaaacaaataacaaaatagcaggagtaagtccttccttatcaataattacattgaatgtaaatgggctaaactatccaatcaaaagatacagagtggcagaatggataagaaatgagactcaaagatctgctacctacaaaaaaaccacacattacaaagacacacatagactgaaaataaagcaattaaaaaagaaattccatgcaaatagaaataaaaaagagcataagtagctatatttatataagacaaaatag

SEQ ID NO: 382769 - DNA, 602 bp, Homo sapiens
ttgatactgttacctttccttctatttaaaatttatgtcataagacaatcatcaccaaagagcctgtggatcctaattgctataattgaacatctctttgaataggtttgccaaagtttgaagattgtctagtagcattgccagtcttttctccctgggcatacagctagcctctaatttcgagctgctttggcatccctgtagagctttgtattagtaagagttctctaaagggacagaactaatatgatatatagatacatataaaactgaggaacttggagtcctatgttcaagggytgggaacatccagcaccagagaaagatgtaggctgggaggctaggccagtctagtcttcacatttttctgcctgctttatattctagcctcactggcagctgattagatggtgcccacccagaataagggtgggtctgcctttcccagcccactgactcaaatgttaatctcctttggcaacaccctcacagatacacctaggatcaacactttgcatccttcagtccaatcaagttcacactcagtattaaccattacaagctatatgattattttccatcaagtgaatgtgagtagaagt

SEQ ID NO: 382770 - DNA, 530 bp, Homo sapiens
acagagtttttatttattttctttttgcctatttgacagtctgattgcttatgcaatcagttaagttgtattattttaaaatagtgggttataagatattgtttgaaagcctcttggtaacctcaaatcagaaacctacaacagagacacaaaaaataacatgtaagaaattaaaatacatgaccagagaaactaaaaaatgaaaagatatttcatgtacytagattggaagccaagaaaggaggaaaaaaagaagaccacaaaacaaccagaaaacaaataacaaaatagcaggagtaagtccttccttatcaataattacattgaatgtaaatgggctaaactatccaatcaaaagatacagagtggcagaatggataagaaatgagactcaaagatctgctacctacaaaaaaaccacacattacaaagacacacatagactgaaaataaagcaattaaaaaagaaattccatgcaaatagaaataaaaaagagcataagtagctatatttatataagacaaaatag

SEQ ID NO: 382771 - DNA, 551 bp, Homo sapiens
attttgtttacatttagttcctttctatatgaatccatttgagaacataccattaacttgaaaatatgagyatataacattcaatgcaaacaactcgcaatatttatagctattcttttttttctcttctcatgagttgtgatggttaattttatgtgtcaaattaactggtccacagggagtctggacatttcgtcaaacattattctaggtgtgtctgtgagggtgtgtctggaggagattcatgtttgagttggtagactgagcatggcagattaccatcctgatatggttcggccatgtccccactcaaatctcatcttgaattcccatgtgttgttggagggacccagtgggagataattgaatcatgggggtggtttcccccatactgatctcagggtagtgaataagtctcatgaaatctgatggtttgacaaagggaaacccattttgcttggctctcattctctctttgctgctgccatccatgtaagtcgtgacttgctcctctttgccttccaccatgattgtgaggtttccccagccac

SEQ ID NO: 382772 - DNA, 484 bp, Homo sapiens
catccatgtaagtcgtgacttgctcctctttgccttccaccatgattktgaggtttccccagccacgtggaactataagtccaattaaacctctttcttttgtaaattgaccagtcttcggtatgtctttatcagcagcacgagaaaagactaacacacctccttaatgtgagtggacttcctctgatcatttgaaggtgtgattagaacaaaaaggatgactctttctcagttaaaagcaagtaaatggaactcctcctgtctgaatgtttgagctcagatactatttgttgcatttgacattggacttgaattaaaacatgggtgcttctcggagctcaagactactggctttcaaactggaactaacaccatcagatctcctgggtctccagcttgtcaactgcagactttgggacttctcagcctcgacaatcacataagtcaatttcttaaaataaatctctctttctttttatctatc

SEQ ID NO: 382773 - DNA, 624 bp, Homo sapiens
aagttatgagggggtccaacctcattaatccattcttgttttataaaatggctagaggtagggctttttgcttctctgccttctgccatctgaggacttagcaagaaggccctcatcagataccaaatcctagtggcttgaccttggactctagattctatagctatagaattgcgagggaaaaaaaaaatctcttctttgtacattaaccagtcttaagtattttgttatagtagcaaaaacagcccaagatctctatactcaaggtctctatatcgaatgggatgtatatataatgggatagtttaacctgaagggtataggttctggaaccctgttgcctaaggctaatccttgatctttcttatattagttctccctctgggycctcagtttggtcatcagtaagatgaagataattacagcatctacttcattataatggaccttaactacaactaacatcatccattgtggatattaaaacagttgctatatgtaaagggaatagtgtctagcatagagctaattctaagtgttagctatcattactattgttgttattgttattattgggataaatttatttttagaaatcaaaataaccttagattcatgtacaca

SEQ ID NO: 382774 - DNA, 598 bp, Homo sapiens
agaatgactagaattacaggcataagttctgatacagtttggctctgtgtccccactcaaatctcactttgaattataataatccccatgtgtcaagggcgggaccaggtggagataattgaattatgggggtggtttcccctatgctgcttttatgatagtcctcatgagatctaatggttttacaaagggcttcccccttaagtgggcactcattccctctcctaccgccctgtgaagaggtrcctgccaccctgattgtaagtttcctgaggcatccccagccatgtggaactgttaatcaattgagtaatttcttcagagcagtgtgagagtgactaatacagtaaattgttactgagtaatggggcactggtggaaatatacccataaatgtggaagtgactttggaactcggtaacagacagacattggaacagtttggagggcaagaaaagacagaaagatgtgggaaagtttggaacttcttagagacttgttgaatggcttagtccaaaatgctgatagtgatatggacagtgaagtccaggctgaagtgatctcagatgaagatgaggaacttgttgggaattggagg

SEQ ID NO: 382775 - DNA, 622 bp, Homo sapiens
cagagcaaataatcagtgagctcaaagacaggctatttgaaaacacaatcagaggagaaaaagaaaaaaagaatgagagagaacaaatagaacctgcaaatagagaaaattatctgaaaagacaaatataagaattattaatgttcaacaggcaactgagcaatagtgagggaaagaaagaaayaaataatcatagaaaacttctcaaaacttgagaaacatatacacatccaggtgcagaaacgtcagagaacaccaaacagatccagcccactaagataatctcaaagcacgtaataaccaaactctgcaaaataaaggacagagtggattctaaaatcagcaagagaaaagaagcaaataatatataaaggagctccaattcatctaaaaatggacttctcaacagaaaccatacaggccagaaagaagcagaatgacattttaaaaatgtattaaggaaaaaaaaagtgccatacaaaagtactgtattcagcaattctgtccttcaaatatgaaggagagagaaattttttcccaaacaatacctgagagaattaatgaaccacaggacctattttacaagaaatgtgaaaggcaattcttgaatctaaaagaaaaa

SEQ ID NO: 382776 - DNA, 611 bp, Homo sapiens
aagaaaaaaaaaaaacatatcttaaattttaaaatactctttgctaaaattgctaactatcttttgagtcttccacaagtcatattctttttgctggtagagggtcttgcctcartgatgaggaccttgctctgtattagattttgccttaagggaatgttgtggctggtctgacctataaagaccagtaaaatattctccatatcagcatttttttactgttttgctttcttatcatttgtgtgtttactataatagcacttttccttcaaaaactttagctttgcattcacaacttggttaactggcataagaaacctagatttcagcctatcccagctttcaacatgtgtgtttcaacatgtgtgtgattaagctcattaagcttaatcacttctagcttttgattaaaagtgtatatacaacacttacttaaacacttggaggccattgtagggttattacgtaacttactttaaatattgttgtatctcagagaatagggaggcctaaagagagagaagagatgggaaaattgtaggttggtggaattgtagtcagataacacatttattgattagtttactgtcttatacgggcacagattgtgg

SEQ ID NO: 382777 - DNA, 422 bp, Homo sapiens
actcttacttataaatggtagctaaatgatgggaacacatgaacacatagaaaggaaaaacacatattaagtcttatcaaaagatgaagggtgggagaagggagaggataaagaaagataactaatgggtaataggcttaatacctgggtgattaaataatctgtataataaacccccatgacactgtttgacaatataacaagcttgcatatgtacccctgaatttaaaataaaagttaaaaaatccaattgcagtagtaacatgaaagataaatgatcaaagatcattatagcagatayaatgatactgaaaaggttaaaagtaagaatttctatagtgtgacagagactcagtgtgagcacatgctattggaaaaatggcaccaaaagacttgcccaatgcaagtcttgatggaaagtt

SEQ ID NO: 382778 - DNA, 523 bp, Homo sapiens
aacgacaaaacaaaagaaaactgtagaacaatgagatttaacacwaatagttctatctcaagatatttaataatcgaactcaatatggtcaaagacaaaggaaggatcttaaaagcagaaagagcaagagcaaggcaaaaaataacatacaaagaaattcccatacagcgggcagcagcagtgttctcattggaaaccttattagccagaaaaaagtggcatgacatatttaaagtgctaaaggaaaatacatatatataaatatattaaaatagtatatccagagaaaacatcctttaatcataaaggagaaatgaagagtttctcagacaaacaaagctgagggatttcatcagcacaaggactgtactacagaaaatgctaaagagagttcttcaatctgaaagaaaaagacattaatgagaaataagaaatcatctgaaggtataaaacttacaataataagtggacagaaaacagaatattataacactgtaattgtggtgtatcttgagtagaaagt

SEQ ID NO: 382779 - DNA, 583 bp, Homo sapiens
gggaacctgtctaaaaattaatctccataaataaaagtaggaacctgaagatagaaagtcactcttttagaactcaggatagatttcaacaaattacttcttcttcattattatataggtatatgcccccatgaatttcttcctttccattaataacatatgtccaagtttagttccttaacatgatttttcataagattttacactagtttcctctgagcttcctgcctcactcaacaaatgccatcaattcttgcctgtagattccttcttgtcctgctgtcagagaaaacagcaacatcagcagcagaagcatcaagagcaacgacaaaacaaaagaaaactgtagaacaatgagatttaacacaaatagttctatctcaagatatttaataatcraactcaatatggtcaaagacaaaggaaggatcttaaaagcagaaagagcaagagcaaggcaaaaaataacatacaaagaaattcccatacagcgggcagcagcagtgttctcattggaaaccttattagccagaaaaaagtggcatgacatatttaaagtgctaaaggaaaatacatatatata

SEQ ID NO: 382780 - DNA, 523 bp, Homo sapiens
aacgacaaaacaaaagaaaactgtagaacaatgagatttaacacaaatagttctatctcaagatatttaataatcgaactcaatatggtcaaagacaaaggaaggatcttaaaagcagaaagagcaagagcaaggcaaaaaataacatacaaagaaattcccatacagcgggcagcagcagtgttctcattggaaaccttattagccagaaaaaagtggcatgacatatttaaagtgctaaaggaaaatacatatatataaatatattaaaatagtatatccagagaaaacatcctttaatcataaaggagaaatgaagagtttctcagacaaacaaagctgagggatttcatcarcacaaggactgtactacagaaaatgctaaagagagttcttcaatctgaaagaaaaagacattaatgagaaataagaaatcatctgaaggtataaaacttacaataataagtggacagaaaacagaatattataacactgtaattgtggtgtatcttgagtagaaagt

SEQ ID NO: 382781 - DNA, 514 bp, Homo sapiens
tcaacctattacagtatgaattaatagcctcaccattcagctaacattgccttttgaagatcatcaaataatttatttatgttaaatccaatgttcatcatctacatgtgtttctttacttttctatcatatgacagtattaacccaatcccyttaatggaaacactctgtccttagtttcaataacaaaattttgtttggtttggttttccttctaccttttttgtcattccttatcaatctcttgaactcatatttttgccaaacagaacttgcaatgtcatagttctcattcccttctccttgaacatttattttgactagaaatttttctcctcaagctagaagtactataagtttaggggtgggtttaatagtttcatttgccttcaaagtcctcttcctttttgaaaaattacaggtaaaattgtatatatttattgtgtacaacatgatgtattaaagtatatatacattgtggaatgactaaatatacctaattaacacatgtatt

SEQ ID NO: 382782 - DNA, 585 bp, Homo sapiens
ctgggcagaattctgctgggtcccatggagggagcatttagaccagccctagccagagggaaattrcccaccccagcagacataatgtgacttccagcaagcctcactaccatgcgataaattgctctgaggttctaaataatcttgaaaggtagtctaggccaaaagaactgcaattcatggggcaaatcctgctgctttgctgggcttggagccagtgaacatgggggacaagtgacctagtgagacaccagctggggtgaccaagtgagtacttgtgccactcctctgctaatcccagggagcgcagctcacagctccaggagagactcctcccttcaactgaggagaggagagggaagagtaaaaataactttgtcttgcaactttgataccagctcagccatagttggatagggaaatgggcagagtcctgaggcccccattccaggctctcactccttgatgttatttctagacccacaatgggccagaagggaacccactgtcttgaaggcaaagaacaaattctggcaggattcatccccagctgaataaagaacccttgagccctgaatagtcaga

SEQ ID NO: 382783 - DNA, 586 bp, Homo sapiens
tgatggattgttttttttgtttttcaagggaagcctagaatacagatttttatgtgaattttcccaatgattaaaataccatgtggccaagcaaaatacatctgtctgcaacatatgggacaaatcatgatgacccatgtatgttaagatgaagagattgaacttcctcctaaacgcattcagcaggacatcactggatgttttaaagtggggatttacataatcagacttgagttttgcaaagactacagttcactgatagaactgtgaaggatggatcagagagaggcaagactggagagtgagtgagctgttagacatctatagtaggaaaccaartgtggccataagagctgaagcagcagtggtggagaaaagagggcagacacaacgatggcttgggatctgcagggcttggtgactgattaaataggaagaataaaaagatagagaagaggcagagtaatttccttgccatatgggccaatagttttctagaagctgaaaaatatttccccttctgcaaaaagttatgcagttcagaaagataacagcaaaatgttccagaaagttgagtcaaggcttg

SEQ ID NO: 382784 - DNA, 586 bp, Homo sapiens
tgatggattgttttttttgtttttcaagggaagcctagaatacagatttttatgtgaattttcccaatgattaaaataccatgtggccaagcaaaatacatctgtctgcaacatatgggacaaatcatgatgacccatgtatgttaagatgaagagattgaacttcctcctaaacgcattcagcaggacatcactggatgttttaaagtggggatttacataatcagacttgagttttgcaaagactacagttcactgatagaactgtgaaggatggatcagagagaggcaagactggagagtgagtgagctgttagacatctatagtaggaaaccaagtgtrgccataagagctgaagcagcagtggtggagaaaagagggcagacacaacgatggcttgggatctgcagggcttggtgactgattaaataggaagaataaaaagatagagaagaggcagagtaatttccttgccatatgggccaatagttttctagaagctgaaaaatatttccccttctgcaaaaagttatgcagttcagaaagataacagcaaaatgttccagaaagttgagtcaaggcttg

SEQ ID NO: 382785 - DNA, 586 bp, Homo sapiens
tgatggattgttttttttgtttttcaagggaagcctagaatacagatttttatgtgaattttcccaatgattaaaataccatgtggccaagcaaaatacatctgtctgcaacatatgggacaaatcatgatgacccatgtatgttaagatgaagagattgaacttcctcctaaacgcattcagcaggacatcactggatgttttaaagtggggatttacataatcagacttgagttttgcaaagactacagttcactgatagaactgtgaaggatggatcagagagaggcaagactggagagtgagtgagctgttagacatctatagtaggaaaccaagtgtggccataagagctgaagcagcagtggtggagaaaagagggcagacacaacgatggcttgggatctgcagggcttggtgactgattaaataggaagaataaaaagakagagaagaggcagagtaatttccttgccatatgggccaatagttttctagaagctgaaaaatatttccccttctgcaaaaagttatgcagttcagaaagataacagcaaaatgttccagaaagttgagtcaaggcttg

SEQ ID NO: 382786 - DNA, 554 bp, Homo sapiens
atgtggtcaaaggtattatatatagagtcaccaaactccttgcctctcataagcagtgaatcaggagtgtaaaatgcacttattttgcatagctctctaaacagttcacaccaagactgtgggagttcagtcagggtggtgggaaaaattataaagatagttgtagaaaatagtcacaaaccttcttggaagcccgggggtggggttgcatagcttcagtaacagatttggctgaaggcagcctaatcctctttacctttagttcatagcaaaaaagcaaacaacaaggaaatgtggggaatttatctaaatagcttgtttactcatgtggtcctaagaccaacctttgatcaaccatgggtgcataattgctctctactcgggggtcagcaatgtcaattaccctctagtggtatttactcaagacctttgtcatttaatctgtactaaataaatgtgaacttcactggcttattgaggcgatgccccagactcagagcagagctccttagctgkactgacaggcaaaaatatcggtgtcagtgtacgtctgt

SEQ ID NO: 382787 - DNA, 579 bp, Homo sapiens
ctcttcctaagacatcccatggttccccatggtgtgcattctcacgtactgaaacaagcaatacatccaagttgctcagctatagttgtgttcctggtggtcattatcgggaggtcgttaacaataatcaagtccaagatatgcaagtgatgatgtcaaagaaacagatgaatatattggtctggggtatagttcagggtgaagaaataaacttggcagttatgaatttatagatgaaacctagtcttggactatacgatattatctaagcaaagattgtagatggagagttgggctatgataacttccaacatttcatagttgagcagaggaggaggaagaaccagcaagagactgagaagtagtagtctgtgaggtaagaaggtgatgtcatagaagtcaagagcagaaagttttacaattagaagaaagtgrtcagctatagcaaatgcttcacagaagtagtgaggatacagaattgatcagagatagtcattagagccttcagaaagagcagctttggagtgagacagaaagactatattgaatttattgacgaacaaaagatctacaaatgga

SEQ ID NO: 382788 - DNA, 537 bp, Homo sapiens
caatcctgtcttaaaaaaaaaaagattaagtaaataccgatgacaacaagccagtaartggcagagctgaaattggaatctaggattctttgaacacaaaggtcttcatttggattagacctcaactatatattttttcctttttattgtggtaaaatacacataacatacagtttaccatcttaaccatcattaagcatactacagttcagtggtattaatacatttacgtagttgtgcaaccatcaccaccatccatctccagatcccttttcacctggtaaaactgaaactctacacccattgaacaataacttcattccctagtcccccagaccctggcaactaccattctactttctgtttctatgaatttgactactctaagtaactctggcagaatcatacagatttgtcattttgtggcaagcgcatttcacttagcataatgtcctcaaggttcatctgtgttgtagcatatgtcagaatttccttcctgtttaagactacataatattccattgtatgtagatgcat

SEQ ID NO: 382789 - DNA, 589 bp, Homo sapiens
gatgtttaactggtttaagtaatagagacgtttcatcttttgacactggtcaccttgcttaattagatagtctttgcagagcctcttgtttccaggtgtggagaattcacaccataatctgagctatcctaaactgtgaaaagatgtagaagttctatgggactgtcttgactctcatccattctccatactgttgtcatgattaactacatgtacttatgtcatactgccaacttgtctcaagcatattgtataaaattgagtttatagagatttatgtttgacacaaaggtggggaatttttagtttttgagtggcagtaaagaaaagaagatatgtaagttttagcaactttgtctcactgataaaagtattcaaattacctattctatactatctataggctgtaaataattttacttttggagtaacttgaagaaaggaataatatcttgttcatttttcactgttgtctagcacaatacctggcatatgatagatacttaaaaagatatttgttgaatagattattaaaggaaaacacaaaagactaaagtcatctamaagaaaagataaagagaaaaaagaa

SEQ ID NO: 382790 - DNA, 531 bp, Homo sapiens
taatatgaaaaagaagcaagaaaacacctatgcctagttatgaaccagacactgtgctttgttttgtgtgtgtgtgtgcgtttgttttgttttgttttgtttttgttttgttttgagtctcactctgtcgcccaggctgtagtgcagtggcacaatcttggctcactgcaacctctgcctcctgggttcaagcgattctcctgcctaagcctcccaagtagctgggattacagatgtgcaccatcacggctggctagtttttttgtatttttagtagagacggggtctcaccaggktggccagcctggtctcgaactcctgacttcaggtgatccgcccacttcagcctcccaaagtgctgggattacaggcatgagccaccacacccggcttgtgctttgttttttaaacacaccttttaaagaaaaatattccagtaatcctattaggcagagtaaaacagatttacaaaatatgtatttacaaaaatacagttcagaagggttacgtgtcttgcctaatatcatatag

SEQ ID NO: 382791 - DNA, 320 bp, Homo sapiens
tgtaccttccagaggggccatctgaggcacatctgggcctgtttgaaccacagctaggacagccaaggagcactgtgcctgatgtggggagcagagatgaggwggtgcagggcagtgaatactaagatcccgagggcccctgacgttttctacttcccttttaattgtgaattccatctttaaatcatttctctctttactagaagaataaagagatgctatgcagcccgttcaatattttgcttagatatttctcccatgagatatcttagttcaccgttcttaaattctgtcttccacaaagccccagagtatggaca

SEQ ID NO: 382792 - DNA, 558 bp, Homo sapiens
ttgtctgctggtttgcaccctcactgcattcagggctctgctcaaatcaaatgccttttcagaaaggccttccccattgccttagctaaaaataacacctctactctacatcaccttgcccttgttgtcttccccgatactactaggtggtattaaaataggctcatttatgtatttatttgtttgtcttcccctctagaaggtaagcttcctctggcagtgtctactttatttcctgctgtattcccagagcttagagccatgcctgacatatcataggtgctcaatacatattcatgaacrgaaggagtaaatgccagacaaggtgacttctcattgatcagcacaagctctgatgtgtatcggaatcacgtgggatgctcatttcttggcccattcccagaaactttgctttattaggccagagatggggtccaggattctgcattttcacaagcatctcaggtgattctaaagcagtcttcctgacttccagacttcctgaaacattactgaagacaaaaattctattaactcataccaacaaaaagagaccat

SEQ ID NO: 382793 - DNA, 463 bp, Homo sapiens
gggaggtagttattgaatgtgctaccagctctaagaaggagagctggaggctttactccatgagggcctctggcacttagattacagattggaggaatggtgggtaattctcaatcaaaactgaatctgaaaattatttttaagaccacttaacatgctatctatcttcttaacaaattttaagtgtacattactgttgactgtaggttgattagagcttactcatgttgctaagtgaaactttatatctattgattagtagctctccatttccccctcctccactagtccctggtraccactattctagtcattgattttatgaatttgactattttagatacttcatacaaaaggaaccatgcagtatttatctttctgtgtctggcttattacatttagcataatttcctcaaggtctatccatatggtcacacagtacagaatttccttcattttaaag

SEQ ID NO: 382794 - DNA, 573 bp, Homo sapiens
atgatttgatgggtgttttagaaactttgttctctgctgggcgggcctggtggctcatgcctgtaatcccagcactttgggaggccgaggcaggtggatcacaaggtcaggagatcgagaccatcctgcctgacacggtgaaaccccgtctctactaaaaatacaaaaaattagcccggcatggaggcgggcgcctgtggtcccagctacgcaggagactgagccaggagaatggcgtgaacccgggaggcggagcttgcagtgagccaagactgaaccactgcactccaacctgggtgacagagygagactccctctcaaaaaaaaagaaactttgttctccgctgtgtggaagataagcatcttgagaagataaaggaaacactgtctaattttttttaatgtactatattttccaagtgaagcctacatcactgatatcactttcctctagttacgtattttttattgatgcaatctctttaaaaggtcaaggaaaatttttattatcttaagcctttgatgatgccctagtttgtcctttccccaccatgtaaagtagggcacagagaa

SEQ ID NO: 382795 - DNA, 600 bp, Homo sapiens
aactttcctcctacattatatcaataattacatgtactgctttttttcccacttataagcattttttcatgttatagtcttcataattatcttttcatttgtaccttaatattcaaaccactaaatgcaccataaatacatttatcattccycttttgtttttttaggttgcttccaatttttcactattgtaaataatactgcaatcagcattttgagtactttagttatatttcagcatttgaattacttccttaggatagatttccagacgtagaaataatgaattaaatagtatgtacatttttatgcccctggatagtttgctaaattgtttttccaaggaattatatacctagttactcagtcgttagcaatgaatgagaagcttgttctcaccagcattgggtattaatatgtaaaatgtgttcattaatttaacaggaaaataatctatttacctggaagctttaaaatttttaagtaggcaaatacgtccaccttttcctctgagctttcttaacttgcttgagacttattaagttgtcccttctcctaccaagaacattggatttgcaagtatgtaggagggcaggatcc

SEQ ID NO: 382796 - DNA, 600 bp, Homo sapiens
aactttcctcctacattatatcaataattacatgtactgctttttttcccacttataagcattttttcatgttatagtcttcataattatcttttcatttgtaccttaatattcaaaccactaaatgcaccataaatacatttatcattccccttttgtttttttaggttgcttccaatttttcactattgtaaataatactgcaatcagcattttgagtactttagttatatttcagcatttgaattacttccttaggatagatttccagacgtagaaataatgaattaaatagtatgtacatttttatgcccctggatagtttgctaaattgtttttccaaggaattatatacctagttactcagtcgttagcaatgaatgagaagcttgttctcaccagcattgggtattaatatgtaaaatgtgttcattaatttaacaggaaaataatctatttacctggaagctttaaaatttttaagtaggcaaatacgtccaccttttcctctgagctttcttaacttgcttgagacttattaagttgtcccttctcctaccaagarcattggatttgcaagtatgtaggagggcaggatcc

SEQ ID NO: 382797 - DNA, 579 bp, Homo sapiens
cccggcctaaaattttattcagcttttaacatctgcttcctgcttcacctcctccaactttactgcagttgggaattttctctccttttctgaactcctcagtcatggtctgatcacaccttgccttaaattgaagttatttgtgaatatgtctttctccccgacctacctgagagcttttccatgcaaagactttgtctttttcttctttgtatcttccagagcttctaatgttgaggctcagcatgtgcttgagtaaatgagtgaatgaatgggcccccacagaaatactccctcattgcaagccaaattcaagtcaygtgcaagccagggagacctgtgcccaggcgcaggccctggttaggcatttctatagtaccacacatctctgatgaagccattttctcttggattccctgggaaaacatcccaggcatgtacaataaaggtcacccctctgggcagtggagtgtctagctgaatttatgtttctactctcaaatgccacaaagctaaagtataaatagggtggggcctagaaataagaggagattgtggtgtgaatgccagcaatttaga

SEQ ID NO: 382798 - DNA, 570 bp, Homo sapiens
catagcaaaatagagtctaaatctaaagtccaagtgattccaagtaaaggagtcrgctttttcacatgtgttctgcacatgtaccctagaacttaaagtataataaaaatatatatatatatataaatagtaatcttataaggttttggaaaggacaaataaattaatacatgtaaaggggctggcatagcacctggcttatagtaagcactctatgagagtgtgttatcattaccttccatgaagtccagtttggtaatacaaatatttacttcacccagtgagataacatatacaacgtattcttgatagacattcaatacatagcttagggaatataaaaagaatacatttttatttgtattttggaataaaatctaagaaacagctcatagttttttaattgattgttcttggttgatatcaaaaaagccttcttgactgcttttgttaactacatttataatagatagcaatagtatctgaagtcttttcatgttgtaatctgggctgtggttgggtctccctaaaaatttgtttggttgctcttgtacttgagatcaatgtgat

SEQ ID NO: 382799 - DNA, 579 bp, Homo sapiens
tttctcatcctgactaatatgactaaaacgtactactggttttcattctttggaggtgatccaaaatgtttattcaagcaaaggaaaaagccatctcttgtgtaaatggtgatccaattcaccctacttaagactgaatttcacttttactaatggacactatttacattagaaacaagaacagcaatgactttttatggtcaagatacttattcacagaatccagagttggatattttgtatgggttagtttcaatgctattttgtcttctttgtcggtcatattgcaataggactcacccctaaggagtgatctctgagtttaccatatagataaataaaaaaytgagacccaaagaagagaggtgatttaccatatcagttaatgacagactggaggctccggatatcttttgcaacatccatcccaccatgccaaaatgcatttttgaagaatatattttttaaatatacataatgcctaaaagctccaaactgaaattacattttgaaatgaaaacttggctgcagtaaaatatttttaaaatccatgatttctgaatgagtttttctctttat

SEQ ID NO: 382800 - DNA, 606 bp, Homo sapiens
ctcactcaaatagcaaacacacaataccacactgcatattttaaggtaaatgaaagctatcatggcattaatcaatccaatttaagaatgcatttttgcttttttttttttttttttttttgagatggagtcttgctctgtcacccaggctggagtgcagtggcacagtctcggctctctgcaacctccacctcccaggttcaagtgattttcctgcctcagcctcccgagtagctgggactacaggggcatgccaccactcccggctaatttttttttttttttttgtatttttagtagagacggggtttcaccatgttagccaggatggtctcgatctcctgacctcatgatccacctgccttggcctcccaaagtgctgagattacaggcatgagacaccgtgcctggccaagaatgcattttttaataaacaataaaggaaacatatttaaaaattcagaggttatgaaaatgagcatcttctttaatctgtgtctcaccttgggtatagttttcagaataagaaaattagtgtctggcatttgccaacaaaaataaagaaaaaaacaaataggtgagggygggtagtgtatgcggccaatg

SEQ ID NO: 382801 - DNA, 614 bp, Homo sapiens
gttttctgaactaaactatgaatttaatgccaaatgtctctttgagggacaacatccacctgtcagcattctaagaatggatccagacatttgacaattttgtgcctgctgacctcagcagacacatgaaactgcatgtaacactgtcctgtataaacatacatacattgttcaaacagaattttcctcagagagagaaatgataaatgagccactttgggtggtagaagagaatggagacagtaaattaaaaataaataaataartaaaggagaaggtgaggccattgcttgccattcttaaggaaatgacacaataggctgaatgacaagggccagttaaaactcgctaatgccagatatatgaagacttaagaaccagaaaggattttagggcagaatattgttgatgatgatgaagaggaaaaatgttgatttccgatgcttattctctgtgccaggtcctgagctaaatgtgttacatactttatgtctcctgattctccccacctgtgagggtggtggtagtgtgattattccatttgatacaagaggaggaatctgagctcacagaggttgagcaaatttctcagcatcttacaactctcagtcatc

SEQ ID NO: 382802 - DNA, 531 bp, Homo sapiens
gcagcctctgccagccctccagaagtccttagccatgcttgtaacataatctcttcatttatctttcaaagctactcctatcttggcaatgtctctcccagcagctgtgtgctttgctctccgtgcttgtagtctcttccatcttcattatggacagtaaatctttgacaaagtgcctggaaactttagcaaaaagctctgtawacatacttaggagaaggggtcaacacatttctagaagcgtaagagctgactatcttggtacacgtgcatgtggcaactaattggtggtatagataaaccagaatgcactgaaataggcagtagcctgtggtttgatccagttcactccagtagaaaggaaagaaaatacaagaaactactttatgtgattagggggagaaaaatccatactttccatatgggaatttctcgtgtgttttcttaatgaactcagagggaagttgagagagtcttttaagctgctaaaactactaatacggtctctttggggatgtgagagtatgaatt

SEQ ID NO: 382803 - DNA, 508 bp, Homo sapiens
acacagttctagatactggaatgaatgacatattagaattgagcacacccaaatacagttacctatttttgaaaggagagagaaatcactaacaataggagaaaagcttcactttgtaagtggtggaggtagcatctgtactgagcacatggcgtaaactaagtcagtatagtcccaaagtagaaactgtgttcaagggtcagtttggacagttggattccagtggaagtcacatataaagagttaaatgctgagaagaaagggtgagcatcggtttgagaaagggtttgaattccaggaatggggcttaaatgycttgtgtcacataaggaggtattgggagaaaatggtgtaggaaagatgtgggtgacaatcaaagctgaggtgtgagaaaactaatcgggtgttggtatggcaagatgtacgggagtggttaactagagaaattgagtccacttaccaggccagtctttaaataagatgtgagagagaatgacaactgaattag

SEQ ID NO: 382804 - DNA, 593 bp, Homo sapiens
gtgctgacagaattatattttcaatggtatgaatactccagacatttcaatgacaactttgggaacaaaataatacatataatasagttggttggtcttaaacagcctcatgcctcagtataagtgaccagaagcaaaaatcctccaaaattaggggctaagacatgagcgtttgggatataatcatttacatttgacaaaggctgcacatagtgcctttctgtttctgtgatttttaccttaattggttcattttcactattatacatttaatctgtttgtcactagtaataaataagcagggctgttgtgattggttgccaataattatttttccatcagctcaagaaagcatgttgcaatgccaggagtaaagaaaattctccttgtatttgtcattggccaggtgcccaagtctcatatatgtcttggtgagggtgctgtggggagaccctttaattcatatttttcggtcctgcctccttctcacggacttgtgtagagggaaaaaagagctataattacttgtaagagcacttggatcaggtgacaaaattattgaaaaccttttaagccatgattagccatttgaa

SEQ ID NO: 382805 - DNA, 535 bp, Homo sapiens
caaaaacaaaatgtattacatggctataaagtggtaagtagtgaggtatacacacacacacacacagacatatatatttaaaaacaaatttggtcataacatatataatatgaatatacatgtacatatagatctaaatgtatgatgattcctcagttgataaattattgtctaaatgattacattttaaggaaaaaactataaacattttaatatctgatatgtaatgattacaaaacagaaatagaaggaatgaataatttgcttgatatggattcttcaggacacatataaacaaaatggaacaaatcctacacatgtgctgccaaatctgtgcctaacagatgtgtatgtcttgtraaaagagaaccctctattttaatttacctgtttgggaaattagaatgtcttaaaactgatggcaacttcaattcaaatatttgtgaggattagtcaaaatattacagccactattgtgcaaactcacagtaatataatttataatttattaggatgattaaatgtagcattaaaa

SEQ ID NO: 382806 - DNA, 403 bp, Homo sapiens
tcatattcccctgacaaggttgacagtatcttttcataggctttctcatattgtttcttttgtttttttcactgtgaactcccattaatattattttctgctgttttattgaggtatttatatcttaaaaattcagtttatgaggctttaatataatttaatatatattaattgaatatagttgaaagaaaagaaaaattatagttgcctcacatgttgtacagatgcaaatttacttaattctttgggttcattagggtatagctatagaactgcatraataacattcttcagaaaaatatataaatattgttacaactaaaatgaagtatttattcataagcatcagagaatgaagagaaaaggcagggcatttatattttgaggtaactgtatatgttgc

SEQ ID NO: 382807 - DNA, 600 bp, Homo sapiens
ttttcctagaacataagcctaaatgaaggtaggaactatgtctttttcatcattctatactgaatatataaaactcattaagttttggaataaagaagctgaaataataattaaaacattggaatcagacatttggggcatttttatggctccagtaaattatttaaattttccaaatatcagtttttgtcaggtataaaataggaatagcatgctttgttgttgtgttgagaaaatcatatagtattatatacaaattattatagtctgtggcatgcacagtgggggcgctcaaaaaatattattatttcagaacaaaaaattgggctttctcttcagttctttaaatcatattaactttgattagctaaaaacagcaccagtggtttcattgctcaagcctcactgttcaaggaatcctaacttttctcgtttttttctctagttcaatgcctttctacaytggaaattctggtcaatggtcactctaatagtactggagccttgaccaatggtaaatacctagtctacatttacactgtaatattcttttctcattctcatatgtctttctagtcttgaccaggattttcattttca

SEQ ID NO: 382808 - DNA, 558 bp, Homo sapiens
gaggcccttaaaaattattttaaaaaataggagaactgaaacttacayacaaatgcgcagaaaccaaaagaaaacttaatgtcatttaaaaaattatgattttattaaaaataattgccaggctagagcatattgacaaaagaaattcacttttaatggtttttcttaaacatctttttgttttgctctcactctctcattctctctctcactctctctctctatctctccctgtgtgtttttcatagaatgttttaaatattatttatatggaaagagattctttagtggtgataagataaacataactgctaattacagaatcatgaatctgaacaatttatatagcttaaacattgatttcacttaattaaatttattgctattcttgttagtgtttatttcagtttactagatttccaaagttgattatattattagaatttttattcactgcacttattttccccctctattctcctccaagataatctagagattaattcgtcaattaattacaatggattcagtgttgcccttggcttatagtaagcactt

SEQ ID NO: 382809 - DNA, 451 bp, Homo sapiens
ggcagcctgacagaacagcacagtggagccagaagcaccaaaatggcacagattgggaggaacctgggggttctcactgccatgctgtcctgcagggtcaggcagacagttttgtctacctccacacttgcctgcctctcagctgatgctgtgagttcctcgaaggagctcaactccgcagaaagagggggtaccccagagctctgctgaggagctgcgagcagcagcagttgcctactaggcctctgctgtggtcttggggaggaygctgggaggggaggtctagccgctgcccctcccacacaggttttcctggggagccactgagattctccatagtgtggcagaatctggaagaagaggttgccttccttttccaggagctccagaaaggaagggggcaaccaccccacgctgcatggctttggtcccggccatgccacttgttagc

SEQ ID NO: 382810 - DNA, 576 bp, Homo sapiens
ggagcgaggacaccccctcctttttccctctgcaccctgcacccccacccagccctgctactggctccctgggcccttatgccatctgtggctatccaaggtgcctgcctgtaagagctgggccttcggtgggaggatagctgggcagctggacccagcaagctgggggggccagccgtgttcagtctccgggaaatgagtgtggacacagcgcaggccagtggggctgcccaccctggaatgcctggatcaggttcccggtggcgtctgagctctgtaaacacagtggctggacaggccacctctctgacgtccattgaaggcagctctgcccaggaggaaagcaggattgggtctgacaatttgacataagccacagggcagtgtccagaggctggggaagcccagcgacccccctccccaatgtctccatgcttgcttgagtggcagctgctcccaattaccatcctctgtagagccaggggtcttcggagtgggaagccyctcagagatctaggctgcctcttctgacaaaggtgaagaaactgaggcccagaaaggagcagacacttgtta

SEQ ID NO: 382811 - DNA, 481 bp, Homo sapiens
gaccttgaatatggcaatgagccctcagacatgaccccaaaagcacaaacaacaaaagaaaacaatacataaattggactttatcaaaattttaaacttttgtgcttccgaggatactatcaagaaagaggaaggagaatgcacagaatgagaggaaatatttgtaaatcatatgtctgacaagggacttgtacctaggacatataaacaacccttgaaactcaataattttaaaaagctaattttaaaatggatgaaggatctgaaaagacatttctctaaataagatagaaaaatggctaataggcacataaaaagatgctcaatgttattaattatcagggaaatacaaatcaaagccataataagataycacttcacagtcaggaggatggttatgatcaaaaagtcggagaaaacaaagacgtggagaaatcagaaccctcatacactgctggtgggaatataaaatggtgtaacc

SEQ ID NO: 382812 - DNA, 423 bp, Homo sapiens
gatctttactaattctacttaatgtgcrtattcatccaattcactgcagaagtcagcaagcgcttgtttacaggctgctccccttacccggctgtggctgttttataaagtatggtatatacaacattacaccctaaaaatctgaaaagttctgacttccaaatacatctggcttcaagcatgtcagataagggactgtggacccacatttgttcccattttacagatagaggaagctgcatctggaagaggagaagcaacctgcctgaagtcttccagagcctggattcaaaccttggcccttctctgcagacaggaagacactctctgccttgcttgcgtacttccctgctctttgctaacccagggtaactcaggggctcctatatgtcctggtgggtggacgcctgctgctccagaccc

SEQ ID NO: 382813 - DNA, 597 bp, Homo sapiens
tgacacacctgctcccccttcaccttctgccatgattggaagcttcctcagccctcaccagaagcaggtgccggtgccatacttcttgaatagcctgcagaactgtaagccaagcaaacctctttactttataaattatcaagcttcaagtattcctttataggaatgtaaaatggactaagaccaccttagacaggaagcccctccacaagcaggggtttccagcttccagtagctctcctttaggccaaggaactcaacacccccagawgggcgagggaagagtcagctacacccatgtttgaattttgctttcattgcttccttgctttaaaaccttgggcaagttccttaacctgctatagcctcagctgctgcgtctggaaaatgacgataaatagagataatataataggaggtaatatagaacagtgcttcttaaactttagtgtgcatcacctggagggcttgtgaaaacagattgctgtactccacctaggaaattttgattcagtaggtctgggatgggggttcaagaatttgcatttctgtcctgctcccacatgacagctgagggctgccagactacagaccaag

SEQ ID NO: 382814 - DNA, 597 bp, Homo sapiens
tgacacacctgctcccccttcaccttctgccatgattggaagcttcctcagccctcaccagaagcaggtgccggtgccatacttcttgaatagcctgcagaactgtaagccaagcaaacctctttactttataaattatcaagcttcaagtattcctttataggaatgtaaaatggactaagaccaccttagacaggaagcccctccacaagcaggggtttccagcttccagtagctctcctttaggccaaggaactcaacacccccagatgggcgagggaagagtcagctacacccatgtttgaattttgctttcattgcttccttgctttaaaaccttgggcaagttccttaacctgctatagcctcagctgctgcgtctggaaaatgacsataaatagagataatataataggaggtaatatagaacagtgcttcttaaactttagtgtgcatcacctggagggcttgtgaaaacagattgctgtactccacctaggaaattttgattcagtaggtctgggatgggggttcaagaatttgcatttctgtcctgctcccacatgacagctgagggctgccagactacagaccaag

SEQ ID NO: 382815 - DNA, 585 bp, Homo sapiens
aagttctagtgtccctgtgtttctcagacttctgaccacttgttagtggaatataacaagttgtatctggtgaagaaactgtcatcaggtagaacaaataagaacacacaactacttcctctacaaaggaaaatatgattactttgacccacaatctagatctgtgctgwtcaatgcagcagccactagacatacagagccaccaagcacttgaaatgtgacttgtccaaagtgagatgtactctgagtataaaatacacaccggaattcaatagcattaaaaaagaatgtaaaatattccattcatgattttttattttgattacatatggaaataatctttttgtatatttgattgataaaaatatatcattacatttaatttctcctgtttcttttcactttttaagtatggctactagaaaaatttcaattacctttgtggcttgcatttgtgactcacattatatttttagtggatagcacttgattgagaaatttcatcctgctctgttttaaatagagtgggaaagataaagtctacagttttgcttaacatcaactcttggttagtagtgtggtcaa

SEQ ID NO: 382816 - DNA, 558 bp, Homo sapiens
ttttattttgattacatatggaaataatctttttgtatatttgattgataaaaatatatcattacatttaatttctcctgtttcttttcactttttaagtatggctactagaaaaatttcaattacctttgtggcttgcatttgtgactcacattatatttttagtggatagcacttgattgagaaatttcatcctgctctgttttaaatagagtgggaaagataaagtctacagttktgcttaacatcaactcttggttagtagtgtggtcaaacagaggagatgcttagatttgtctttcctgaaagtcagtgtataccacctgcccatactacattctgggagcaccaaacttgatctgcatctgcagaaatcttggacagtgtaaattgatgctacagagaaaacccaagactgctactgaacaagatgcagccatacaaccaaatggctgtcaggtcagtggagggatgtgtccagtgtgttattgttgacctggattgctttgtcatgcaagctggcacaggcaagtactagcccagggagggacacatcca

SEQ ID NO: 382817 - DNA, 683 bp, Homo sapiens
tatcctggcttctccacttaccagcatatctccatactttcttcagtctcagtttcctcttctgtaaattgggatcataatgctgcttccctcatatagtaagtaagacttcaacaagatactatgtataaagggccccacccatctaaagggcacccatagagccctataattatttgtttttattgtttattatctgtagcagatccactctattaaaggaaagcaatgagataccatgtaatagataactgtccttatgaattatctaggagataatctgccattctattgctctatgaagccaaatttgaggtaataatgggagttttgtttttaaaaatgtttccttaagtccaaaagaagagggaagacactgaaactcyttataaactttaaagaaattttattcttaattacttttggttttgctcattttcacagaagtcaagtgtccttaagtcttgctgagcttcttaaagtcctgtagataatgatgcttgggtggcaactctcagcaaccattggcagagtagctattggacatatttggaataattcttagattattttattctgtgcattggacctccattaatggagaccaatagagaggaaagggaacaggatgaaattaacaagaaagatacaaaagagaaggatgagacagcattttaaaactt

SEQ ID NO: 382818 - DNA, 638 bp, Homo sapiens
gtatattaagaaagaaatcttaaatgtaatcccatgattattctagtccaaacttctcactttacagaatgccatgactgtaaaaagacaagcaactcttctcttgtattcctcagttgtgactattattttaattgtcccacaactgcagagtccacacagaaacagactataggctgcatagggcatatctccacagtgcaaaggcattaaccaatgcaaattctctaaagggaaatatgtgtcttgactggctttcctgttttttccagatttttgttgtttcttaggatacttgtactagggtttcctctaatgaaaggtggtgtctagctagacttccttgaatagaaactatgatctaatggtcccttttaaatcaagagtctcaactagttccattctaattggaaagtcacagcaattaggawtaaggtcagatgtagaaaggggctgtgggaaaagggaaggattaattggagctactgcagggacagtgtcaccctccaagattgagttgtgaataccaaaagcattctgtcttattctcgcccactatttctacaccacattcttatgtgcctggtaatacaaacctttcaatgtgaatgtgtgcacactcccactttggaaacttc

SEQ ID NO: 382819 - DNA, 638 bp, Homo sapiens
gtatattaagaaagaaatcttaaatgtaatcccatgattattctagtccaaacttctcactttacagaatgccatgactgtaaaaagacaagcaactcttctcttgtattcctcagttgtgactattattttaattgtcccacaactgcagagtccacacagaaacagactataggctgcatagggcatatctccacagtgcaaaggcattaaccaatgcaaattctctaaagggaaatatgtgtcttgactggctttcctgttttttccagatttttgttgtttcttaggatacttgtactagggtttcctctaatgaaaggtggtgtctagctagacttccttgaatagaaactatgatctaatggtcccttttaaatcaagagtctcaactagttccattctaattggaaagtcacagcaattaggaataaggtcagatgtagaaaggggctgtgggaaaagggaaggattaattggagctactgcagggacagtgtcaccctccaagattgagttgtgaataccaaaagcattctgtcttattctcgcccactatttctacaccacattcttatgtgcctggtaatacaaacctttcratgtgaatgtgtgcacactcccactttggaaacttc

SEQ ID NO: 382820 - DNA, 580 bp, Homo sapiens
gtgcctgtctcatcacacgttattaacatggtttatcactggtgaagttaattttcatcatttggttaaggtagtgtttgccaggtttctctattgtacagttacttttattccctctcatcatactctgtttattgaaagccaagtccctaaatccagctccttctctggggagtaggagggggattagttctatcgcctggagggaggagggtttctaggattctcatgtatgtatgtatgtatgtatgtatgtatattagcatgaccytatgtatttttttttaaatattgaattacaatccaaaattctgttatttgttttgttactcatattattccacttttgcccattgtaaattccatcaggttggcttctgtggtcctttgacttgcctccattcttttgtttcttgaacatattcttaccttctgacactacaagatgctttagcctcatcttgcatttccttgcttcagccctaaaatcagccatttctccaaagaactttgattctcttgtagaatggtaattagaaatgaagatctggtatttggaaatcaagatctgggtgtgtgc

SEQ ID NO: 382821 - DNA, 498 bp, Homo sapiens
catgctcaccagaagggtatcctgggacttcattgtaggaccttgcccaaacagggggacctatgcctccatcttccttatctatggtccaatcttacttttattaaagaaaaagttagatttgtccaccatgagtttttacttaaagaaaccatgctaaaaactgcggtcagatttgtatctcttgccttcttttctcaccttccccttcccttcctgctgtccttatgttgttttactaagsatttgagaagtcttataggaaaaaaatcatacaaaataatggtaagccacaaataaacactactaagcaggaccaatgagtttaaatcagaacaggacaactaaccaggggcagaaaataggatccaattatccagactgtaaaggttttcatagttgatatagtcaagcctgaagctgtttctagcagcttatagcaaaatttgaaacagtacgttacataattcttatcaaaattgaagaaaagaaagtttg

SEQ ID NO: 382822 - DNA, 612 bp, Homo sapiens
aaccatggtatgcaacaaatgctgcttggaaggctgaggaaaatattccatatatctactcatgcctgccagttcccaaggtaattgtggcaacacaaacaaatttatcaaaagcaccattaaatgtattgcagttttttgctatttgtattggttcctgyggatacaaattaaaattatggcatttatggtggaaaggtctctgaaatttttcaatgttttaaatgggaatgtcttgctcaaaaaagtttgaattatcttttcaaattctccaagccctactctttttctcctctccttctggctctctgattatacaagtgttagatctattgagatagttctacaggtccctgaggttcatttctttttcgtctaatttatcctgtttttcaaattgggtcatttctgttggcccacattcaagttaactggttctttcctctgttgtatttattattctattgagtccatccagtgaatcttttatatctgttattacattttttcagttctaaaatttttattttgttctcctcatatcttctatttctttgctgagactttttgttttacctcttgtttgaaatgcagtcataattgcttgtttcg

SEQ ID NO: 382823 - DNA, 612 bp, Homo sapiens
aaccatggtatgcaacaaatgctgcttggaaggctgaggaaaatattccatatatctactcatgcctgccagttcccaaggtaattgtggcaacacaaacaaatttatcaaaagcaccattaaatgtattgcagttttttgctatttgtattggttcctgtggatacaaattaaaattatggcatttatggtggaaaggtctctgaaatttttcaatgttttaaatgggaatgtcttgctcaaaaaagtttgaattatcttttcaaatwctccaagccctactctttttctcctctccttctggctctctgattatacaagtgttagatctattgagatagttctacaggtccctgaggttcatttctttttcgtctaatttatcctgtttttcaaattgggtcatttctgttggcccacattcaagttaactggttctttcctctgttgtatttattattctattgagtccatccagtgaatcttttatatctgttattacattttttcagttctaaaatttttattttgttctcctcatatcttctatttctttgctgagactttttgttttacctcttgtttgaaatgcagtcataattgcttgtttcg

SEQ ID NO: 382824 - DNA, 590 bp, Homo sapiens
tgataataggtttaaattttggaaacaggccaaaattattcaaagaggaccaggctcagtggctcacacttgtaatcccagtaatttaggaggccaaggcaggaggatcacctgagatcaggagtttgagactagcttgagcaacatagcaagaccttgtctctacaaaaaatttttaaaagttagtcagatgtggtggagtgcacctgtagtcccagctactcaagatgctgaaatgggaggatatcttgagcccaggagttggagactgcagtgagctatgattgcacaactatactccagccttggtgaagagcaagactttgtctcaaaaaaaaaaaatattcartgagaaattgggtgtatctattggttaaagaaagaggtgtggttctcaatctttgccacacattagtatgacctgaaaaacctgaaaaattagaatgcccaggtattgtgacttaactggtttagggtgggccagttgttggtattttgttaaagctccccaaatgattccaataaaaccaagtcctaatctttttagttgctcacttcttgttaattttttttaacccacacagctgaaa

SEQ ID NO: 382825 - DNA, 611 bp, Homo sapiens
ctttttttctgaaagaaagaccctgagccttgtgaactatcccyacctgcaccagcagtgtcctaccttagcaacactttgtaagagctccggcaagacatgagtgagtctccaagtgatgagaatccacccgatgctgattactacaatgaatcatctgagtaggaagaacagattttaccttttcatgtacactcccaattttatcctttaccgctatcaacctatgatcagtatactttgaaatactctgcaaccagggattccacagcacagaaatgggtgaggacgatgggctatttacaccttttcttgataatgggagctggaatgaaaacctctgggtcttgcactgaccataagtctctgcaaactcctgatgatcacctcacatgtcaggggtctgtataagatagtgtctggtttggatttccaaaagaaaatgtggggtcatattcagcacaataacaatttcacataggaattctcggtttctgaaaataaataaataaataaataaataaataaataaataaataaaacctccccatcattactcttggctacttcagcctccttccccatagctcctgtgtggtccccagagcccc

SEQ ID NO: 382826 - DNA, 611 bp, Homo sapiens
ctttttttctgaaagaaagaccctgagccttgtgaactatccctacctgcaccagcagtgtcctaccttagcaacactttgtaagagctccggcaagacatgagtgagtctccaagtgatgagaatccacccgatgctgattactacaatgaatcatctgagtaggaagaacagattttaccttttcatgtacactcccaattttatcctttaccgctatcaacctatgatcagtatactttgaaatactctgcaaccagggattccacagcacagaaatgggtgaggacgatgggctatttacaccttytcttgataatgggagctggaatgaaaacctctgggtcttgcactgaccataagtctctgcaaactcctgatgatcacctcacatgtcaggggtctgtataagatagtgtctggtttggatttccaaaagaaaatgtggggtcatattcagcacaataacaatttcacataggaattctcggtttctgaaaataaataaataaataaataaataaataaataaataaataaaacctccccatcattactcttggctacttcagcctccttccccatagctcctgtgtggtccccagagcccc

SEQ ID NO: 382827 - DNA, 435 bp, Homo sapiens
taacacatgtattttggggttcatttatgtcactggacataaagctctccatagcaacctctatggcaacttaaatggagggatgtaaatgaatttaagatagaggaatatgcacagtagtaattcctaacaccactcatccttctcgcaaattcacatgtcaaaacaaacaaaaagcccaaattacattaatcagaaaattttgtttaactgacagtgtcattcatcctaatgacagaattcctccagggagaagaacgttttcagaaatttggccaaatccttaaccagattccctctgtyggtcctgcagcatagctagttgcttgctgattgcatcttctgttgtttgaagggcagttgttctcattagtattcactcactaggaaacggagtcagaggccaccctttcaccagtttgcttcagggactgg

SEQ ID NO: 382828 - DNA, 643 bp, Homo sapiens
atccatattgctgaaatatgaatgattaattaagtagaattttgcctcttattcatggcagggatgtctctgtgtcctttttgtcattcaaccaactgggctgagagatgccattttttgcatgtgggtgccacggtcattctgggcatggatacccaggcagctgacaaaggcagagagagtaaatttggcctgcagcctatagtttrccagcctcttctttagaatgtcaagtccatgatatcaggggccctttctgtcttcttcattctgtatctcctatgtgttcaatagtacttgaccttcaaagaaaagaaagtatcttcatattgtgtttaaatctgaatctgcgagaggagctttttatttcaagcagactgcagagagaaaaatcttcactagaatctggtgctttcttgctaatgaaagaaagcactcagtatgtataaagtagggagttaattactattaggcttgtgagtaaaagagacttatggattaattaactcaaggcttggtgaatgcatttaaggcttgtaagcaaaatcaatttctttaacaaatatatttaacagcctaagtgaacaaataaagtttcctaaaataactttaaaaatctttgttgtataacaaatatatggtg

SEQ ID NO: 382829 - DNA, 590 bp, Homo sapiens
acaataagttttcaagaagtagcaaatgcagaaagcagcccctacctgggcggggagcagggaggctgggggggaagggaggaggttgaaatcactaaaacctaaaagcttgaagaagaactctgacaagatataacttagagacttcaccagatagttggtggcccctcgtcagaggactgggtctcaggtccttagagtctctctgccaagtacagaaatgccccaatcagctgagtagcacaccccataccccttagagatctaagtgtagtacaataagcctgcctcggtgaatgttggaaaagctgctgcttctggggagaactgccactggtagggaaaggaagacaagttgctgggtgacactggcagaaatctgtgaagggaggtgagactatgcagaatagtggttagaagaaccagctcaagttaggagaactgcttcatatcccagctctgccattttctagctctgtgaccttgggcacattacttaatcattgctagcctcgtgttttcccatacatraaatagggctagtgtcccttatctgtgacagtctgtgtaaagtgcctagaaaattacct

SEQ ID NO: 382830 - DNA, 569 bp, Homo sapiens
ctgcaaaacattctacaatgcacacgacaacaaataattatctggaccaaaatgtcaacagtgcagaagttaagaaaccctggcttaaataraaacaaaaactgtgttctaagaactacaaagaaacattaagtcagagggaggagagttcagtgaagactagagtagtctgagcacgccatggaggaggagtgcgtggaaggatgagtggatttggacagtggagtaaagagaacgtaccgggcagaggatgacatgagcaaaggcttgaaggtgggaccttgtctttttctaaacttttatgattcagttgcacatcccaaaccatacagggacgctgtgaatcactgactcagaaagggaatgccaaatatgagtctcctttcaggtggcttgtaattgaaatctcacaaccatctgtcatcatgaaaagaagaagctgcctctgccggacatatccttgtcttctccatcctgccaatcaaccctttacacagtcaaaataacctcagatcgtgatggggcacacagcaaatgctactacctttgcagagtcttcctccaggaac

SEQ ID NO: 382831 - DNA, 569 bp, Homo sapiens
ctgcaaaacattctacaatgcacacgacaacaaataattatctggaccaaaatgtcaacagtgcagaagttaagaaaccctggcttaaataaaaacaaaaactgtgttctaagaactacaaagaaacattaagtcagagggaggagagttcagtgaagactagagtagtctgagcaygccatggaggaggagtgcgtggaaggatgagtggatttggacagtggagtaaagagaacgtaccgggcagaggatgacatgagcaaaggcttgaaggtgggaccttgtctttttctaaacttttatgattcagttgcacatcccaaaccatacagggacgctgtgaatcactgactcagaaagggaatgccaaatatgagtctcctttcaggtggcttgtaattgaaatctcacaaccatctgtcatcatgaaaagaagaagctgcctctgccggacatatccttgtcttctccatcctgccaatcaaccctttacacagtcaaaataacctcagatcgtgatggggcacacagcaaatgctactacctttgcagagtcttcctccaggaac

SEQ ID NO: 382832 - DNA, 579 bp, Homo sapiens
ttgtggacctgacaccatatatacctgtcttcatatcaagaaggacagaagatcattagggtccagataccactcacattgttggacttactgttcactctttgggagaggtggcaagtatctctaagagtctctaagactctatttctacattcataattgtgatgcttttacaaacagcaagacccatgtgtatttagcagagcacacactcttcccctgacacacataagacacaaagaggaccactgaatggataacaaggagtatggtatcattagtgcagagctacctcattactgtgttttaattaacccyctaattactttcagctgctactaatgagcttcgtggccagaaacacaccctttggtaaatttactgaaaactacattcactcacattttcaggtcagtggagagggtatgttaacaggttttttggtagtaaaagtcgtggtcacttttcctagggattcagtcaatcatgttgatcttccatcagactgatcatccttactccatgctttggctctagcttttccatgagttttctctattcagggagggatttcaaatc

SEQ ID NO: 382833 - DNA, 623 bp, Homo sapiens
gtgaaatcccacaacaagctctctctaagctgaggcgcaaggaagccagtccaagtcccaaaacctcaaaagtaggaaagccaacagtgcagccttcagtctgtggccaaaggcctgaaagcccctgggaaatcattggtataaatccaagagtccaaaagctgaagaacttggaatctgatgttctagggcagaaagcatccagcacaggagaaagatgaaggctggaagactcagcaagctagttcattctactctttcttctgcctgctttattctggccctgaaggcagctgattagatggtgtccacccagactgagggtgagtctgtctctcccagtccactgactcaaatgttaatctcctttggcaacaccctcacagacacacccaggaacaatactttgcatccatcaatgcaaccaagttgacactcaatgctaaccatcacatgaacatagtactcaataggtagttttttaatccttgcccccatccctcccctcttttggaatccctagtgtctattgttcccatctttatgtccatatacatacaaaactttagcaacgcaagtaamaattgtaacctgctggatatgaatacagtgctctaactgac

SEQ ID NO: 382834 - DNA, 608 bp, Homo sapiens
atatcttgaataaatctaataaaatatgtttaagaccttacagagaaatgaataaaatactactaaaagaaattaaagcagacctaaataaattgagaagtatgctatgatcataggttcaaagactcaatgttgttaaaatgtaaatttccccccaagaaatggggtggggagagttttgtctaccagaaatcaaggctaattttaaagctatggtaattaagacagacaatgtggtttagtgaagggataaatccatcagaagcagagtagagagctctgaaataaatctattaacacatgggcactgaaacacgatggaagtggcactgtagattaatgtagtaagatcagtrtttgcaataaaaggtgctgagaatactggattattgatataaataaaaataaaactgttgtcctttacatcatacacaaagccaattccatgtggacgataagattattaagactagaggataattcttttaaaaaggttaaaaatattaataataaaaagtttgataaattggaccacattaaattaagaaattctatccttcaaaaaacactgtcaagaaaataaaaagacaagctgtagagagggaaaa

SEQ ID NO: 382835 - DNA, 587 bp, Homo sapiens
taacattaaatatcctcctgactggtgaaactgaaacatcttacactaccrtatggtggccaagatagggattgtaagttggtaccaccactttgaaaaacaactgggcattattcagcaaatttgaaaatacatatatcctaagactcaatgttccattcctaggaatattctgtagcaaaacaggtgcacatgtataccaggatatatgcatgtgcagagtatacaagaatacacactgtgtgatttctttatatcaaattgaaaaccaggcaaaacaaaatgatatgatttaggttgtatacagtggtcagaaatagaaatgaaaagcaagaaaatgatgatcacaaaattcaggatagcggttaactatttggggtaaagaggtttgtgatggggaaggggcacaaggaggcttctgaggtgctggcaatattctttcttgactagagtaggagttacatgggtatttgctttataattattctctaaatcatccatgtagactttatgaaccatgttgtatgtcatatttcatagatgaaaaagcagtagagtatgcaatgttttaaatttaaggaagactc

SEQ ID NO: 382836 - DNA, 622 bp, Homo sapiens
gattgtattccattttcttgcagattgtctacatgggctggtgtgaagcccgggagcaagaccccctccaggacagagtgtactccccgaccttcctggccctgaggggctcatgtctctacaagtttctggcacctccagtacgtgttttattgaaatgtattggtcgtttccatattatcacaagagattgacaccaacttaacagcaccaaatagtataccatcaatatttttaaaaaataatatagagaaaaagtagaaatcagtttatctgatttaacttactaaaatatatattctgacattaaacatttgctttaacacccttgaaaagtctggaacttacttctttataaatagtraacctataaaataatggatcaaattataatgccattacaaatctcatgacgacatgggaaaggagattttaagaaacattttcaagcatatgtcagtgtattttgtttatggaataaaaattaaagaaatgaatatatcaaaagtgaaataaaaaagaataaactgttttagggctatacatgaatgaacatgtttactaaactcttattttccaaggatcttttgaaagttcttttaaatttattcagcacttttaa

SEQ ID NO: 382837 - DNA, 524 bp, Homo sapiens
ttgctcatcactgtgcatgctttgagttcttctgtaggcgtaatggtggaaggacaacctgaaatacttgagtgtattgttagtaaagaagggtctgacaatttcttaaacagaggctagtatctgaggaaaaggagatcatacacgactccagttttctgaaataattgccaaaatggctaatgagatagctttcttttttttggagatgkagtcttgctctgttgcttaggctggagtgcagtggtgtgatctcggctcactgcaacctccacctcccaggttcaagcaactctcctgcctcagcctcctgagtagctgggactacaggcacatgccaccatgcccagctaactttttgcattttagtagagacagggtttccccatgttgcccaagctggtcttgaactcctgagctcaggcaatctgcctacctccgcctcccaaagtgttaggattacaggcatgagccaccgcgcccagggcgaactgtgtatttttaggaaagctactcatgtaatt

SEQ ID NO: 382838 - DNA, 524 bp, Homo sapiens
ttgctcatcactgtgcatgctttgagttcttctgtaggcgtaatggtggaaggacaacctgaaatacttgagtgtattgttagtaaagaagggtctgacaatttcttaaacagaggctagtatctgaggaaaaggagatcatacacgactccagttttctgaaataattgccaaaatggctaatgagatagctttcttttttttggagatggagtcttgctctgttgcttaggctggagtgcagtggtgtgatctcggctcactgcaacctccacctcccaggttcaagcaamtctcctgcctcagcctcctgagtagctgggactacaggcacatgccaccatgcccagctaactttttgcattttagtagagacagggtttccccatgttgcccaagctggtcttgaactcctgagctcaggcaatctgcctacctccgcctcccaaagtgttaggattacaggcatgagccaccgcgcccagggcgaactgtgtatttttaggaaagctactcatgtaatt

SEQ ID NO: 382839 - DNA, 457 bp, Homo sapiens
ttactatagtagttaaaaaggataattttaaaggaaataataaacattatgtttagctctatcaagatatacaaacaatatgttctatctctttgttacaatttttgacaaagattatgcaattcatgatctgctattttgtgtaaaaatatgtcttgagatttttttctatgacagttaatgttccttaaaaacactgataactttttgatagatttcatctatcccatcatttgcttrtattcattgagtccactttaaaattttacatttagttttttcccccacttgttattgctatcaggcatatcacaacaatcattatttgaatggtttaatagaaaattaaatgtttgctatataccaggtaacctcagcacttgttatgtggctgagaaaaatgcagaaaaagccactgctttcattgagcttgcattttattaggtgatatgatgtt

SEQ ID NO: 382840 - DNA, 457 bp, Homo sapiens
ttactatagtagttaaaaaggataattttaaaggaaataataaacattatgtttagctctatcaagatatacaaacaatatgttctatctctttgttacaatttttgacaaagattatgcaattcatgatctgctattttgtgtaaaaatatgtcttgagatttttttctatgacagttaatgttccttaaaaacactgataactttttgatagatttcatctatcccatcatttgcttgtattcattgagtccactttaaaattttacatttagttttttcccccacttgttmttgctatcaggcatatcacaacaatcattatttgaatggtttaatagaaaattaaatgtttgctatataccaggtaacctcagcacttgttatgtggctgagaaaaatgcagaaaaagccactgctttcattgagcttgcattttattaggtgatatgatgtt

SEQ ID NO: 382841 - DNA, 606 bp, Homo sapiens
agtatgcaattgcacaaaatgttgtttaatgttcacccattcaccatgggaayaactgattgcataaaagccaaatggaacaaattagcatatgcttgaaatacaggattagtagttattttaaaaacaaaacgtcgcccaaataagttgatctaatatatttagatggagaaggtatatttacaaatcattctttatgcataactttttattttgatccaacgattctccatataaatgaaatatactcattttgaatatgaagttttcttatcaaagtgagccgaatgatatttatttgtctccattagtagaataaatccacagataattaaatgatgtcttctttctattaatgcttcaaatttaaaaaaatctgttaactctaataactgttttttccatcccatttgtagaataaaagttttagaaatttatttctatcaaattaaactatctctattattttgaatgctaccataaattcatctaaacctttaacattggttatgttatttactatacactgataatatgaatatatgcaattaatagagcacagagttgtagcaagatcaaattcttctaaattaaaaaacatatgta

SEQ ID NO: 382842 - DNA, 461 bp, Homo sapiens
gcattacagagcaatgtaaactacatgctatcaaaaatggtgatgtctgctcatccttttcatcattaatattcttaacacaattgccatagtgtttatcagaatcttaggaacaaaatattggtaaaagaaataagactgccaataagtccttgagtttagccatttttcagaactttataactttcattgacaataattttgacttaggttattccaaattggccttagtaaatttctttgagttttacaagtttacacaatttgcctacgttcttgtctcttttcctagtttactgcattatcttttagctgacaagtccttcagttaagtatattcattaacttctttatatccatctttggggtatcctactgatagccaaggattcatgcttcayattcaaaaatgtatcaaacctctttcatatgactctaatacacattcttatagccagagg

SEQ ID NO: 382843 - DNA, 611 bp, Homo sapiens
agatgatcctacttcctacatgcaaactctctcagcattgcaaatgcctcctggcagccctatcctgacagataactatccttgctcttatctaatactaagcctcccattgggtaacagatctcaaccacacttacataaacagcaattctatcctgatgactccaaatgcatatgttctgcccagatcttgtscccgaactctaagtattcaacagtttatatttctgcctactgacatacctagtagaaatgtccatgttacacgtctcaaaatttaggatcaacaattggagagaatgtaaagcaacatggaagttagagaaaagagaaaaacaaaagcaaaaactagagtttggctatttttttagaaactcatggcaattagctgagatgatactaagttatagcacggagtacattttagcattacagacctctggtgcctgccaacaggggtgtgttgagctgttagggaaactgtcatttattcaactttgggactttaataattaagaaaatgcaaaactaggaatataaaattaggcatgaaagtgaatatatatcaagaatgagaaaaagctcatgatgcagaataaagttggcaaatg

SEQ ID NO: 382844 - DNA, 530 bp, Homo sapiens
ctaatcagtagttcacatctgttcccctggtcacctgctttgacctgagtcacctctggtcacctgctctgacctgaatcatcctgagtcacctgttctgtaactgcccttcccaccaaactacccaccccgccactccagcttgtatccctgctctctttaaaatagccaataagaattagcttacactgtggggtccaaccctagccaataggggaatgacacagcagtagggactacctacatcaggaataagaaccccttaccctccctgtccatgtgtgccctcacctttactccatmtgcaagtcacacccttctatagaagtaaagattgtcttgccgagaaaattaaatttatgttcaagtgctatttcttctttttggtaccaaggaacaagcatttgtttctaacaccagtgtcacaacagtggttccagatatgttttgctgatgtgtcagatatgggtcatgataaaacatttcaggagtgactccaaggtcttgggcaagagcaactgaaaagtcag

SEQ ID NO: 382845 - DNA, 502 bp, Homo sapiens
aaataacaacattggatttaaaatccaataaaaaaatctcccaactacgaaaagtctcccaacaaagaaaatcccaggaacagatggatccacaaccaaattctagcaaatgtacaaggaagaactggtgccaatactcctgaaacttttcaaaaaactgaaaaggaatttctccctaacttattatacaaakcctgtatcaccctgacaccaaagtcagccagaaacacaataacaaaaaataaaactacagacctatatccctaattaacacagatataaaaattatcaataaattctcaacaaactaaatccaacacatcaaaaagatattacatcatgaccaacttgattttacaccagagatgcaagaatgattcaacatatgcacacaaataaatgtcatacattacctaaacagaattaaggccaaaaatcatatgatcatctcaatagacacagaaaaagaattttttaaaattcaacatcgcttcataagagc

SEQ ID NO: 382846 - DNA, 543 bp, Homo sapiens
ccacatttctcaggttttttctgacacatattagattgataacttttttctttaagaaatgaaatatttttatacataatctccaaaaaattacatgtctgcattagaaaatagctgacctgcagtaacattcataaaaatatcattttgctaaaataatatacatcataataatttatatatatgtgytttcatactttatttcagaatcatacatctttattaaaggaaatatgttactattattaaggtactgtctatatacatttaaaaagtcagtacagtgtggtcattaagaattcagtatctggagttggagacttttgagatcaatttctgatgctttgaagctttttgaatttggcaggttgcgtaacctcatcttttaagtgagggcaagagtcaaaactacctcatagagtattgtgagaatgaaatgagttaatatattctcacccaaacatgtaagaagctcatgccgcctgctgtgtcctgagtaatgatgtccttactctctgaatgtcatctcctgtcttgtgccac

SEQ ID NO: 382847 - DNA, 543 bp, Homo sapiens
ccacatttctcaggttttttctgacacatattagattgataacttttttctttaagaaatgaaatatttttatacataatctccaaaaaattacatgtctgcattagaaaatagctgacctgcagtaacattcataaaaatatcattttgctaaaataatatacatcataataatttatatatatgtgctttcatactttatttcagaatcatacatctttattaaaggaaatatgttactattattaaggtactgtctatatacatttaaaaagtcagtacagtgtggtcattaagaattcagtatctggagttggagacttttgagatcaatttctgatgctttgaagctttttgaatttggcaggttrcgtaacctcatcttttaagtgagggcaagagtcaaaactacctcatagagtattgtgagaatgaaatgagttaatatattctcacccaaacatgtaagaagctcatgccgcctgctgtgtcctgagtaatgatgtccttactctctgaatgtcatctcctgtcttgtgccac

SEQ ID NO: 382848 - DNA, 543 bp, Homo sapiens
ccacatttctcaggttttttctgacacatattagattgataacttttttctttaagaaatgaaatatttttatacataatctccaaaaaattacatgtctgcattagaaaatagctgacctgcagtaacattcataaaaatatcattttgctaaaataatatacatcataataatttatatatatgtgctttcatactttatttcagaatcatacatctttattaaaggaaatatgttactattattaaggtactgtctatatacatttaaaaagtcagtacagtgtggtcattaagaattcagtatctggagttggagacttttgagatcaatttctgatgctttgaagctttttgaatttggcaggttgcgtaacctcatcttttaagtgagggcaagagtcaaaactacstcatagagtattgtgagaatgaaatgagttaatatattctcacccaaacatgtaagaagctcatgccgcctgctgtgtcctgagtaatgatgtccttactctctgaatgtcatctcctgtcttgtgccac

SEQ ID NO: 382849 - DNA, 543 bp, Homo sapiens
ccacatttctcaggttttttctgacacatattagattgataacttttttctttaagaaatgaaatatttttatacataatctccaaaaaattacatgtctgcattagaaaatagctgacctgcagtaacattcataaaaatatcattttgctaaaataatatacatcataataatttatatatatgtgctttcatactttatttcagaatcatacatctttattaaaggaaatatgttactattattaaggtactgtctatatacatttaaaaagtcagtacagtgtggtcattaagaattcagtatctggagttggagacttttgagatcaatttctgatgctttgaagctttttgaatttggcaggttgcgtaacctcatcttttaagtgagggcaagagtcaaaactacctcatagagtattgtgagaatgaaatgagttaatatattctcacccaaacatgtaagaagctcatgcygcctgctgtgtcctgagtaatgatgtccttactctctgaatgtcatctcctgtcttgtgccac

SEQ ID NO: 382850 - DNA, 490 bp, Homo sapiens
ttattcactatcacgagaatagcatggaaaagaccagccctcataattcaattacctccccctgggtccctctcacaacacatgggaattctgggagatacaattcaagttaagatttgggtcggaacacagccaaaccataccagattataagttaaatggatggaaagatgacatttcaatgtttaaatatagtcacaggaacagtaaacatgtaactcaccacatttaacagaatggccattttaggagtttatttatcattctctacattgttacaataatttattcctcaaaaatttatattgtatatccaatraaattaaataataatagtgaaaaattacaaccacatattttagaaatttaatagatgtatattatctttcaaaaacatatttaaaaaagcctattcttacagtataaaacagcatgtatcttgaagagagaatgttgcttattttggcacttgtcaaaatatttcttcttc

SEQ ID NO: 382851 - DNA, 595 bp, Homo sapiens
ctgatatattctcaaaattcttcagaattttgttgtcctggaaactttgctcataatcttgcaaaaatatataaaaacatatataaagcttgtaatatttaagtattttgacactcaaaaatagtgtttcattttaattatacaatttttcattgtatagaataattaggttccaaactttcattgacacacgtatcatggagacaaatatttcatcaacacaatgttggatctaagatgttcagtaattgataacattctttctccctatgaagaaaatttggtataagttatattcctaagaytagagagtgtgcatcagcatctaatggtatttgaagaaaatttattttatagaaagaaaaatttaaatataaattaatatcatttcaaaaactcttaagatttggcttagatttcattttatggtagtgaattaaagtagcatgattcattcttttaaaaatttttgtgttaatatttattttgaagaactgagttactcttgactgaggaaaaggatgttgtattcatcaaatctagtaacagatctgcccaacatgacattagtggaataggtaccatttcatttatg

SEQ ID NO: 382852 - DNA, 479 bp, Homo sapiens
tgtatgaaaaagctatagttctataaatgctaggaatttatatttctataagttcagctgatctaattgagatatattaccttagggtcttaggaggctttagctaaaaaattattwaaaaattgttaaacaataatagcatatatatgccataaataaaattgatttaacaattttattaatttcataaatatttacagaaaacctagtgtatataagtcattgtttatggttctgagggtacagaatgatcaagaaagaaaatgtttttgatctaaaaaaactgacattcttgtgggagaaaaattcaataaaataacaaaaaaatttagattgtgataaggtctaagaaggatataaaaaatggatagtaatatagacaggaagtagacctgagagtaaagggctctatgaagaaagttattgaggaaggcatcccttaggaagtaaactttaactcagacctgattaaattttaa

SEQ ID NO: 382853 - DNA, 589 bp, Homo sapiens
aggatttgtcatgctggattagatcattgctctattacatgtgcaatgctgattccagcatgagtcaaatatttgttgcatcagacgaaagtaaaagcttccaaaacaagttgtcatacttgccgtgctttcaactgcagtcaaaattccatgtagagctatacttcaatcattgagctcctattttagatataagactttttttaagaagtttaagacactatattttatagaggcctcaataaatgtgaaatatggtcacatcttccagcttcaattctcctgctctaaatgtttctctttatctcccatctatattcattttgtgccatggaagacaggggagaaaaagaggcagtaaacagctatatagttccataggacatggttgaagcaacaaccatgttcatcttttaggctgctgcatagagattttctttctgcttcaaagaagcctcaggaygttagctttactctattttacaaaggatacattgtatgaattgttatggtccattaacctgcaggaataactcattgtaatgctgtagaactttttctagctaatctgcataagagtcagtataga

SEQ ID NO: 382854 - DNA, 599 bp, Homo sapiens
gccttgctaaaaacaatttattggattggcttaatttccatcactagaaatttattactttaaattatggggtgtgcaaaaattttatttggtagcaagtgttctttggtaagatagcttaagtaatattaactcacttatgaaggtcaaggcttttaattatttgaagctaccttcttatttctattcaattgagttaattcaaattttagaataaataattttaataagacataraaacagtctctgactataggatgcatttatctttgaattaagctgctgtgggagactggaagattatacacattacagttacaatatacatctgtatatagacatataaatgcccatattgtacacaatacacattatatattagtgtgtggatataatctcatgtgattgttgcaacagtctgtgatggcaaacagtatgaatactattcctattttaggttttacagatgaagggctggctcaagtgactaagcagtgtgaaacaaccaataatggagtgtttgacagcaagttcagtgagcatttccctgccccctcctgcctttgtttctgtctacaaatttaccctggcctcttgtc

SEQ ID NO: 382855 - DNA, 426 bp, Homo sapiens
caagggtgcatgtacagctgtgcaagttgtatatggagcaaaaatgaggagttccacttacagaaactacagacatactgaccccggcagagatgagagaagtgggtcagagagaaaatagcaaggggtaagggatatgggaaaatggaaaatacatgttaccaaaaggtggcatccaccactcatctctctcactaatgaaaatctcatgcaagaccytgcacgcagaattgtcagatttttcaatttttcaagagtagctaaacatctggatttttaaataaaaaatcctggtttttaaatatttctgattcatattaatgctattttctgttggctttatttttttctatgtagattgccacattatctacaaataataagagttttactttattctcttcagactgttttacttcatttttt

SEQ ID NO: 382856 - DNA, 604 bp, Homo sapiens
tatattcctaatgtttatggtgagaagataggttcctcttcaactcatcataatggaatgaaagatttttccttccttttgggaaaggaggaatctgcttgtctctctcctgtaaacaaatggagaaaatctattgttctttgtccatcatttatgagacatamactgctacctgtgtagacaaattttattggttcttatcacatcactgtaagactaaggtgtgggagatgcatgctgctatgttactctggttgtcgatctatttatgagtatctgttaagaactccttacttctgacccaggtgttgtatctctagttaggtctatatctataccaatatctatatcatctatatctgtgggataatatctcagacctttcacaattcttcacaaaacagtacaacagtacttaaagtttcatattttaattaaaccactagtatgttttataaaaaataaaattattttaattacttgattagtttttcctgaatgcatagactaaaattattcatttgctcattcaatgagtattgtttatattctcactatgtaccaatcaaaatactttacccttgagatacattggtaaataagt

SEQ ID NO: 382857 - DNA, 604 bp, Homo sapiens
tatattcctaatgtttatggtgagaagataggttcctcttcaactcatcataatggaatgaaagatttttccttccttttgggaaaggaggaatctgcttgtctctctcctgtaaacaaatggagaaaatctattgttctttgtccatcatttatgagacatacactgctacctgtgtagacaaattttattggttcttatcacatcactgtaagactaaggtgtgggagatgcatgctgctatgttactctggttgtcgatctakttatgagtatctgttaagaactccttacttctgacccaggtgttgtatctctagttaggtctatatctataccaatatctatatcatctatatctgtgggataatatctcagacctttcacaattcttcacaaaacagtacaacagtacttaaagtttcatattttaattaaaccactagtatgttttataaaaaataaaattattttaattacttgattagtttttcctgaatgcatagactaaaattattcatttgctcattcaatgagtattgtttatattctcactatgtaccaatcaaaatactttacccttgagatacattggtaaataagt

SEQ ID NO: 382858 - DNA, 642 bp, Homo sapiens
catgtgcaaaatttgttttttytgtagccctttcctttttattgtggctcagacttgggctgactttctctttggtcttattgaagtaatcagtaatatcctagatatttctgtgcagagaagacattgcaaattgccatagcaacatatgccttttaacaaaactcttggttcattcattatcagaattgtcatgtatatgtgtgtgtgtgtgtatatatataatatatatatatatatatatatatgtatgtatttatataatattcttggaggatcggataaaatcctaaccctagattctgcagtggtaatctcatatcacatgcatatacagatgtatagtaataacccagcaagtgctctctttttcatgggacaaccaatccatatttcagttgacagaagtcagaagccaccttatagcttagccctgatgtcctctcccttcacccccaaatctctggaaattcacaaacataaactttctaaatcactatgtgaattctattatatttgataatttgagagcaacacctatgacagaggtattcaattataaaataaaatcaccaaaaagtattaagctaactttggaaggtagcactgtaccaggggctaataacattttatttcacaggc

SEQ ID NO: 382859 - DNA, 358 bp, Homo sapiens
tcggataaaatcctaaccctagattctgcartggtaatctcatatcacatgcatatacagatgtatagtaataacccagcaagtgctctctttttcatgggacaaccaatccatatttcagttgacagaagtcagaagccaccttatagcttagccctgatgtcctctcccttcacccccaaatctctggaaattcacaaacataaactttctaaatcactatgtgaattctattatatttgataatttgagagcaacacctatgacagaggtattcaattataaaataaaatcaccaaaaagtattaagctaactttggaaggtagcactgtaccaggggctaataacattttattt

SEQ ID NO: 382860 - DNA, 581 bp, Homo sapiens
tgaaaatgattattgtgattgagaaaatacatttctttggattgttaaagtgctttggtttggatgtggggttctgtgtaatcaagcacctcaggaaagttctgatctgacagtgcctgcgtgctgatcggaatcctgatcagtgagttttgaacactcactcaacttgtataaggattactttaaactctttcttctgttctctctctctcttctttttattgacatcaggtttctcaagcctttttgtgtgcagcctcttagagagtctcaagaaagtcgcaagatttcctatccgtagattttagttgttatttmaaagggctaatggatgcactagcattagaaactgtggtattagtaatgctattaaaaccaggacaaaataagataaagtcagtcacccgctctgcctaagtaataccaaatgtattcttcacgtgtatttttgttttgcttcatttgtttttccagtctgggacttttacaattattaaaaagaaaggaaggcttcatatagactggttgaaaaagtctaaggttaaatggataaatacaatataaagaggatgatggtattt

SEQ ID NO: 382861 - DNA, 524 bp, Homo sapiens
  misc_feature (1)...(524): n = A,T,C or G
gtgtatcttcattttattaaaaatgatacactttttaaaaattaaggcaagcaccttgttccatataaccttaaaaagtagggtaataggaagctaccataggcttccaaagaccagtgatgctgagtaattaaaactattcagttttataaccctattaaaatggaaaagtgtttctttcaaacccagtgttagaaagaatgttgagaaactggcatttttatatactgctagagaaaaacattagcaaaattttccttttcaaaaaatttgaagtactgcactatcttgttttcctgtgaaatctctttccttctttccttctttccttccttccttccttccttctttctttctttgtttctcaatagttatatatctaggagattcattaaaaatactccaagatttcaacagaggttattatctaggaatratgaaaacattnataaatacacacacacacacacacacacacacacacacacacgttacatttnttccaatttgtagattcagcatcc

SEQ ID NO: 382862 - DNA, 524 bp, Homo sapiens
  misc_feature (1)...(524): n = A,T,C or G
gtgtatcttcattttattaaaaatgatacactttttaaaaattaaggcaagcaccttgttccatataaccttaaaaagtagggtaataggaagctaccataggcttccaaagaccagtgatgctgagtaattaaaactattcagttttataaccctattaaaatggaaaagtgtttctttcaaacccagtgttagaaagaatgttgagaaactggcatttttatatactgctagagaaaaacattagcaaaattttccttttcaaaaaatttgaagtactgcactatcttgttttcctgtgaaatctctttccttctttccttctttccttccttccttccttccttctttctttctttgtttctcaatagttatatatctaggagattcattaaaaatactccaagatttcaacagaggttattatctaggaatartgaaaacattnataaatacacacacacacacacacacacacacacacacacacgttacatttnttccaatttgtagattcagcatcc

SEQ ID NO: 382863 - DNA, 622 bp, Homo sapiens
ggcctgtttgattcttcatgaagatgatgttcaggcatatgtatgtatgtatgtatgtatgtatctatctatctatctatatatcaatctatctaaaatattatttaatataaatataaaatactgttatatataaaacaatagatattgttataacagtatttcatatttatttaaaacaatattatatatatatgcaatattttgtaccaaagtcatttgtcatttttcaaataggttcatcattttcatgtgtcacactctagaatacattggatagcacagagtatcagttcactggtgactggtttcttaagaaatagatacacataattattttgaattaccattaaagatggtatttaattgcagcacagttttttctatgcacatctctctcaattgggttttgaaatatctcatcaacagagttcaaattataataatataggggcagyataatatctcacttacttataaccatacttccagcactcttgcttgggaaatacccatactggggagaactgtcatttttgtgtttgtactacttattttaccaactattgagtgactccaaccacagaatctattcagaggtttaaattcatttccagaaaac

SEQ ID NO: 382864 - DNA, 517 bp, Homo sapiens
aagatggtcaacattatgaagagggatcagtaattaaagaaaactgcaactcctggtaataaatttaagtggcacagaactgagttctactgtgtgtgtatgttttcttcaaataaaagaaatatttgtgaaccaaagtatacatttatgtacatataggcagaatcatacatcataagacatcatgtacctgtaactttgtataagcatatttaattttaagggattttgaaaatttaatcatgaatatcttttaatgtttgaggttgatgttcttgacaatgggtcttcatcatacaacaggtcttcattaaatgtacctcttaattataatattctgataccctaaggcaaattgtgttttttgagcacagtaactatataaaaacaggctgctttaaaaggactagcctgcagaaagtttccaaatacaagtacattgaatctactgtccaatttggcttgttttcaaacttcarcagatgtgtgatcatatcatttgttaattgcctggagt

SEQ ID NO: 382865 - DNA, 577 bp, Homo sapiens
acttcagctggcactacacatcagagggttgtggccaatggtcgaggaacactttggcccctctagcacagcaggttcctaaactcaagggaacttgagaacaaagccaagggcccaatacaagtcccccagagttagggtatgcagtccaggagtgctgatctggaccttttctccctaacatcttctaaaaatgaagccacttgactgaacccacttaataccacaagcaaacccccaaggaaatcaaataagataaaaacattgataaatccacccaaaggatggcaacttcaaaggctgaaagaatatcagcccacaaagatgagaaaaaagcatcacaagaactctggaaatttaaaatgccaaaatgtcttcttatctcaaaacaagttccccagaactaattccctaacaayggttcttaaccaggccaaaatcattgaaatgacagaaatagaattcagaatgtgggtaagaaggaagctcaagattcaagagaaagtcaaaacacaatccaaggattctaaccaatataataaaatgatataggagctgaaagatgatgtggccattt

SEQ ID NO: 382866 - DNA, 629 bp, Homo sapiens
cccaaaggatggcaacttcaaaggctgaaagaatatcagcccacaaagatgagaaaaaagcatcacaagaactctggaaatttaaaatgccaaaatgtcttcttatctcaaaacaagttccccagaactaattccctaacaacggttcttaaccaggccaaaatcattgaaatgacagaaatagaattcagaatgtgggtaagaaggaagctcaagattcaagagaaagtcaaaacacaatccaaggattctaaccaatataataaaatgatataggagctgaaagatgatgtggccattttaaaaaagaaccaaactgatctgatagagctgaaaaactcacttcaagaatttcagaatataattgtgagtattaacagtagaatcaaccaagctgaggaaggaatctcagcacttgaaggccaattctccaaaataactgtcagataaaaataatgaaaaaacaataaagaagaacaaaacctcccagaaatatgggactatgtaaagagaccaaatctatgactcattggcatccctgaaagacrgggagataaactagacagcttggaaaacatatttcaagatttcattcatgaaaatttccccaaccttgctagacaggccaa

SEQ ID NO: 382867 - DNA, 606 bp, Homo sapiens
ttccttttttgtttgcaaacgtaacactttgcgcttgtctctacaatggatcttattaaataataatgaaattagtagtgtcattcaaccaaaatgtaaataccttgagtataggtgcagggtcaatatttgttcctgtcatagtttctggcatgtactttgtgctcaatatgyacagaaaaatggatgaatgagtgccctgcctccctacagagggcttcattaaacattaggagacatcatagaaatatttgtactaaagctactgagacatctaactaaacaatcatttgggatatctcttgtgagaaaaaaattagaggtactagtaatctccactaattaaatattgctttaacttacattgtttctttataaccataaaaggctattgtattttgtctccactccaaatttactatttagtgataaatgtcattaaaacaaatgggtgcatcttgtctttaacaatttcattaatgtagcataatatacgtgagtttttcaaagtacaattgagagtaaattgcaaacacttaacattgtacaccaatcaatgggtttagtatgctctgataacaatgatattgcttattcatatttttc

SEQ ID NO: 382868 - DNA, 534 bp, Homo sapiens
cctgtaggaatgggttgatgagagacttggaataagaaagtaaatttttctttcagacattttgccattaaaggaaagaagggaatgagatggtagctggttaaagacatgaagttaagggagagattttataaagttgggaaaggcaaaaacacattttggaaattaatggttaatccacatgtattagcctgttctcacactgctaataaagacatacccaagactgagtaatttacaaaagaaagaggtttaatagactcacagttccacatggctgrggaggcctcacaatcattgcaaaagacgaaggaagagcaaagagacattttatatggtggcaggcaagagagagcttgtacagggcaactcccatttataaaaccatcagatcttatgagactcattcactactacaagaacagcatgggaaaaacctgtccccgtgattcaattccctctcactgggtccctcccatgacaggtgagaattatgggagctacaatccaagatgagatttgggtggtgacaca

SEQ ID NO: 382869 - DNA, 534 bp, Homo sapiens
cctgtaggaatgggttgatgagagacttggaataagaaagtaaatttttctttcagacattttgccattaaaggaaagaagggaatgagatggtagctggttaaagacatgaagttaagggagagattttataaagttgggaaaggcaaaaacacattttggaaattaatggttaatccacatgtattagcctgttctcacactgctaataaagacatacccaagactgagtaatttacaaaagaaagaggtttaatagactcacagttccacatggctgaggaggcctcacaatcattgcaaaagacgaaggaagagcaaagagacattttatatggtggcaggcaagagagagcttgtacagggcaactcccatttataaaaccatcagatcttatgagactyattcactactacaagaacagcatgggaaaaacctgtccccgtgattcaattccctctcactgggtccctcccatgacaggtgagaattatgggagctacaatccaagatgagatttgggtggtgacaca

SEQ ID NO: 382870 - DNA, 506 bp, Homo sapiens
tttcagagttgaatgcaaagaaaaatgctctttgttgcatcaggatttataagagacatctagtatttagaaggactgtattcataccacagaattttgtggttattttttcctgttaacttatttaaaaccaggtcaggtctagagttcaagcaccagaattttgggataataaaaaataattacatcaaagacagtttggaaaaaaaaagacacttcaccttattgttggcatcaacagaacatcatgtaagctttgcgatccctcatgccaaaaatgtgcaaaagggaagatcaacaaaattaattaactaattaatcatgataactaactagcaaatcatagcattgttttacaggaatattctcayatcttaggagatctttcacatctctgcacagaggtatcagagtggtgccttttaaaagaaagtcagattctgttgcttagatgttgaaactccactgacatacttcccatttcacttagaatgaatcccaagtcc

SEQ ID NO: 382871 - DNA, 523 bp, Homo sapiens
tgtttgtgtgtgcattaaaagcaattataaatcactaaaataatgagttttgagctttcagtcataattttgtcacataaataaaaaaccctttccctaaatggttgttaaacccctcaaaagtttcatatgagatttgcaagtttactgttaccaattagacatagtctcctttaggaatgattgaatgggctggcaagatggccgawcaagaacagctctggttggcagctcccagcgagaccaacgtagaaggtggatgatttctgcattaccaactgaggtacacggttcatctcattgggactggttagacagtgggtgcagcccatggagggtgagcagaagcagggtaggatgtcacctcacccaggaagagcaaggaggctgggaactccctcccttagtcaagggaagccatgagggactgtgttgtgagggatggtgcattctggcccagttactatgcttttcccatggtcttcgcaatccgcaaaccaggagattccctcaggtgcctaca

SEQ ID NO: 382872 - DNA, 509 bp, Homo sapiens
actgagaaaatgaaaatgacataaaaacaagaaaacataagtaataaaatgctaacaaacattaatttatgtattayttcacatttaaagtatcttcatatataatccctcatttgaacaactaacagtcactaagatcaaaagatactacggttctgaagtgaaatgctttcacatacttattctaacttaatggtgagttctgtaaggacgaaataaatgactcactctttctatttatttatttttaagacagggtcttgctctctcacccaggctggagtgcagtggtacaatcatggcttactgcagcctcaacctcttgggttcaagcaatcctcctacctcagcctctggaatagctgagaccacaggtgtgtgcgtgtgtatttttttgaagatggtgttttgccatgttacccaggctggtgagtgacactcttaaagggaaactaaaccaacaggtaaagccgattttaaaatgtttaaagtagaagagtttctaaagt

SEQ ID NO: 382873 - DNA, 509 bp, Homo sapiens
actgagaaaatgaaaatgacataaaaacaagaaaacataagtaataaaatgctaacaaacattaatttatgtattatttcacatttaaagtatcttcatatataatccctcatttgaacaactaacagtcactaagatcaaaagatactacggttctgaagtgaaatgctttcacatacttattctaacttaatggtgagttctgtaaggacgaaataaatgactcactctttctatttatttatttttaagacagggtcttgctctctcacccaggctggagtgcagtggtacaatcatggcttactgcagcctcaacctcttgggttcaagcaatcctccyacctcagcctctggaatagctgagaccacaggtgtgtgcgtgtgtatttttttgaagatggtgttttgccatgttacccaggctggtgagtgacactcttaaagggaaactaaaccaacaggtaaagccgattttaaaatgtttaaagtagaagagtttctaaagt

SEQ ID NO: 382874 - DNA, 509 bp, Homo sapiens
actgagaaaatgaaaatgacataaaaacaagaaaacataagtaataaaatgctaacaaacattaatttatgtattatttcacatttaaagtatcttcatatataatccctcatttgaacaactaacagtcactaagatcaaaagatactacggttctgaagtgaaatgctttcacatacttattctaacttaatggtgagttctgtaaggacgaaataaatgactcactctttctatttatttatttttaagacagggtcttgctctctcacccaggctggagtgcagtggtacaatcatggcttactgcagcctcaacctcttgggttcaagcaatcctcctacctcagcctctggaatagctgagaccacaggtgtgtgcgtgtgtatttttttgaagatggtgttttgccatgttacccaggctggtgagtgacactcttaaagggaaactaaaccaacaggtaaagcygattttaaaatgtttaaagtagaagagtttctaaagt

SEQ ID NO: 382875 - DNA, 570 bp, Homo sapiens
atcatttggatgacctgcatttgtttagattgttgaaggagcaagacacatgggttgatttgggatatggttcagaatagaacaaaactggatttattaagaaatatgatccttactgtaaaatttctggtgtgtttcatttaggagttattacagaaacctattcaagagtggaatttcctgatattacttaaaaggtaatgtttgagttagaagctaaataaagcgtctagtacctcctgtaatttttattactatctggtaatcaacatttatagcacaatgttaagactttttatcctttacttttattaaggtttgactggcccatggcatgaagttgcatgtgttttctgcacttctgaatgttgctggagttcactgttgcactgaatgtgcctagcagggcaccatacaaggggacaaagacagccagtgcatttgaacgagggcatgtttaagtagggagtaagaagccrgagattccagtcagttaaccggtcccttccacttcttattcccctttgcttaatccgaatttactgagtgccagacatgcacctggcaaaa

SEQ ID NO: 382876 - DNA, 566 bp, Homo sapiens
ggttacattaatccctgctttctcaaagttcaccaatctcataacttgtatcacatatgaaagatatcaactactgtaaaggtcaaatctgaagttgttgaggcccaaagtgacactaagcatacaatcttaatcttattatctcacacttacagaagtgagtttcactgctcccacaagaataccagctctgaaagggcaaggatttatctatgttttgttcactgacttactatccatagcaactagaccagcacctggcacagaagaracacatcatgtcatatgggtgaatgggtacatgaatgattgagcaaatgactgaatgaatgaacaaaagaacaatgaaccaagagaacaggctgggggcaattttagatacaccagaatcttaatacgtagctcaaatagcccaatctcatctgtgtgtctgtgtacttatacaaaacaatatagagtgggggttctttactctgggatttttaaaagtatacatgtctaggtgatattgtagctctccatttctttaacttacacatttcatgtcggtgtccctcgtttcttta

SEQ ID NO: 382877 - DNA, 575 bp, Homo sapiens
ggacactttgcagacagtccccaccatcaacaaggggagcctgggagtccaggttggtggctagacccagaagagcaataacaattacagcagttcagctctcaggaagcctcatccttaggggaagggaagagactacatcaagagatcatcctgtaaaacaaaagaatctgaacagcagggcttgagtttcagacmttatcactgaaatagtctgtccaaatgagaaagaaccagaaaaataattctggtaacatgacaaaacagggttctataacacccctaaatgatcacactagctccccagcaatggatccaaaccaagaagatctctgaattgacagataaaggattcagaaggttgattattcagctactcaaggggataccagagaaaggcgaaaaccaacttaaaatatttaaaaaaatacaggatatggatgaaaacttctccagagaaattgatatcaaaaattaaaaacaatcacaacttctggaaatgaaagatacacttagagaaatgcaaaatagactggaaagtttcaacagtagaattgaacaagtagaaggaactt

SEQ ID NO: 382878 - DNA, 569 bp, Homo sapiens
ggacactttgcagacagtccccaccatcaacaaggggagcctgggagtccaggttggtggctagacccagaagagcaataacaattacagcagttcagctctcaggaagcctcatccttaggggaagggaagagactacatcaagagatcatcctgtaaaacaaaagaatctgaacagcagggcttgagtttcagaccttatcactgaaatagtctgtccaaatgagaaagaaccagaaaaataattctggtaacatgacaaaacagggttctataacacccctaaatgatcacactagctccccagcaatggatccaaaccaagaagatctctgaattgacagataaaggattcagaaggttgattattmagctactcaaggggataccagagaaaggcgaaaaccaacttaaaatatttaaaaaaatacaggatatggatgaaaacttctccagagaaattgatatcaaaaattaaaaacaatcacaacttctggaaatgaaagatacacttagagaaatgcaaaatagactggaaagtttcaacagtagaattgaacaagtagaag

SEQ ID NO: 382879 - DNA, 618 bp, Homo sapiens
tagcctccttaaacaaaacagttatcagccaagaattttgtatctagtgaaaataggcttcaaaaatgaagaacagataatgtatttttcagacaaacaaatgctgagaaaatttgccactaccaagccagcactrcaagaaatgttaaaaggagttctaaaattgaaataaaaccttgaaatacaccaaaatagaacctctttaaaacacaaatctcatagggcttatgaaacaatgaaacaatggggaaaaaacaaggtattaaggcaacaactaacacaatgaatagaacagtacctcacatctcaatactaatattgaatgtaaatggcctaaatgctctgcttaaaaggtacagaatggcagaatggataaaaatccaccaactcaagtatctgctatctttaagagactcacctaacacgtaagggctcacataaacttaagctaaagaggtggaaaagataatccatgcaaatggaaaccaaaagtgagcaggagtagctattcttatatcagacaaaacagactttaaagcaacagaagttaaaaaaaaaaggacaaagagttacattatataacaataaaaggattagtccagcaggaaaatattataa

SEQ ID NO: 382880 - DNA, 498 bp, Homo sapiens
acatagatgcaaaaatcctcaacaaaatactagctaaccaaatccaacagcatatcaaaaagataatacaccatgaacaagtggattttataccagggatgcagggatagtttcacatacacaagtcaataattgtgatacatcacataaacagaattaaaaacaaaaatcatataattatctcaatagatgcagaaaaagcatttgacaatatccagcatccatttatgattaaaacccttagtaaacttggcacagaagaaacatacctctaggtaataaaagctacytaagacaaactcacagctgatatcatactgaatgaggaaaagttgaaagcattcctcctgagaactagaacaagacaaagatgcccactttcactgcttccattcaacatagtactagaagtcttaactagggcaatcagacaagagaaataaataaatggcacccagattagtaaagaggaagtcaaactctcactgttcgccaagg

SEQ ID NO: 382881 - DNA, 560 bp, Homo sapiens
gaactagaacaagacaaagatgcccactttcactgcttccattcaacatagtactagaagtcttaactagggcaatcagacaagagaaataaataaatggcacccagattagtaaagaggaagtcaaactctcactgttcgccaaggatataatttttatacctagaaaatctaaggactcattgaaacagttcctagatctgataaattaattcagtcaastttcaggatacaaaatcaatgtacacaaatcagtagtactgctatacaccaacaacgaccaagctgagaaccaaatcaggaactcaatctcttttacaacagctgcaaaacaaaaaacaaacaacaacaacaaaaaccacttaggaatatacctaaccaaggaggtggaagatctctacaaggaaaactacaaaacaatgctgaaagaaatcatagacgatacaaacaaatggaaacacatcccgtgctcagatgggtagaatcaatacagtgaaaatgaccatactgccaaaagcaatatacagatttaacgcaattcccatcaaagtactatcatc

SEQ ID NO: 382882 - DNA, 578 bp, Homo sapiens
tgattgccaccaaaatactctgacataatacttacagaggtgatatttcacatatcactattgtaagagaaacactgaaaatcagaacattcaaacagcacagatagatgataaaatcaaaatatgtcttcttcctgtcttccacacctatctcctcatatagcttaactattttcttttgatgatttccttcataatactaaatgacatgcttatatttatatttttatcaactctaagtaatatatattgactttttgccctaaaacttgagaaatttagctcatttatattacctctgcttccctgcttttctgctaacgtttactagctatatattggttaatgtttttattttgtcatgttagggtttcagaaatgcattcgtatcttttttatggattcaccacctttgcatsatttctgactccctagatataaggtaagagaacatgcacctctgcacctccttcctgacctctctccttgccgatagctcagaatttttctcagctctaccatcttcatgttgttaaggtttatcacagtaatgtctcccaatgctttatttcaccatt

SEQ ID NO: 382883 - DNA, 578 bp, Homo sapiens
tgattgccaccaaaatactctgacataatacttacagaggtgatatttcacatatcactattgtaagagaaacactgaaaatcagaacattcaaacagcacagatagatgataaaatcaaaatatgtcttcttcctgtcttccacacctatctcctcatatagcttaactattttcttttgatgatttccttcataatactaaatgacatgcttatatttatatttttatcaactctaagtaatatatattgactttttgccctaaaacttgagaaatttagctcatttatattacctctgcttccctgcttttctgctaacgtttactagctatatattggttaatgtttttattttgtcatgttagggtttcagaaatgcattcgtatcttttttatggattcaccacctttgcatcatttctgactccctagatataaggtragagaacatgcacctctgcacctccttcctgacctctctccttgccgatagctcagaatttttctcagctctaccatcttcatgttgttaaggtttatcacagtaatgtctcccaatgctttatttcaccatt

SEQ ID NO: 382884 - DNA, 623 bp, Homo sapiens
tttggaaattttattctttcggcaggaagttatgaaaaaggctgccagtatgacaccctgtaataaattattcataatcacagctgctaggagctcccagggaactgccaagctgagctgcttaagcattataccacactgaccaccctgaagtaccagatcacagccaagaaaggaaagatggtaactctatgtacataaaatagggtgagttacaggcatatgctgattgagtacgtttcaggaattaagaattaatgagaaagacacattttaattttcttcccctaatctgctttctagggccatgcattttcactattcaatgtgcatgcctttgttttgttttaaaataatgaatagaattatagaaatatggagtcaacttaaaaaaaacatgtcagactatttaaaagctggtatcaccagtgaaacaatttttttcttctatttttagtagaccctaattgtcagtgaagtagcagatggtctctggaatactaattagtttcctatggctcctgacattccttggcttgtggcaacatcactgcaatckctgtttctatcttcacatctcttctttgcctttactcagtctccctctgccttcctcttaaaat

SEQ ID NO: 382885 - DNA, 471 bp, Homo sapiens
gaactagggttgttgtagcagaaatgtaaggagaaaaacaattattttcggtagtcatttagtcatttttaagtcccacactaggcttctaagaatcaaaaggaaagtcttgctggagaatttttgacatggaagttattagagatgcaagggcattgggccccatctctgtgaccccataaggctccttgtctaggggcgcgtgaatatcatcaacatggaagaggtcactagtctaagagagaaggtcctgcccagtggatcctggtggaagcaaggcgagggtgacttctccatcctcttagacaaaggagtcatgacctcattcttcaaaactctttaagtgaaggccttttatctacagctgcyggcatgtcttctgtggcccactcagcaagaaggaccccttctcatgctgctggaaactgccccatgagaacaatatccttgtcatcagccaggacatggggc

SEQ ID NO: 382886 - DNA, 557 bp, Homo sapiens
atgtgatgatctcaatagatgagaaaaaacacttaataaaattcaacattccatcatgataaaaactctccacaaactaggcatagaaagaacatacctcaaaataataaagaccatatatgacaagcccacagctaacatattgaatgggggaaagttgaaagcgttttctctaaaaactggaacaagacaaggatgcccactttcactactcttattcaagagagtactgaaagtcctagccaaataagttaggcaaragaaagaaagaaaacatacttaaattggaagatagttcctttttgcaaaagacataatcttatacttagaaaaatttaaaaactccaccaaatagctctcatagctgataagcaaattcaataaagtagcaggatacaaaatgaacatacaaaaatcagtcgcatttctgtacactaatactgaaatagctgaaaaataaatcaaggccaggtgcagtggctcaaacctgtagtcccaagtctttaggaggccaaggcagaggattgcttgagcccaggagttcaagactagcctgt

SEQ ID NO: 382887 - DNA, 523 bp, Homo sapiens
agacaaggatgcccactttcactactcttattcaagagagtactgaaagtcctagccaaataagttaggcaagagaaagaaagaaaacatacttaaattggaagatagttcctttttgcaaaagacataatcttatacttagaaaaatttaaaaactccaccaaatagctctcatagctgataagcaaattcaataaagtagcaggatacaaaatgaacatacaaaaatcagtcgcatttctgtacactaatactgaaatagctgaaaaataaatcaaggccaggtgcagtggctcaaacctgtagtcccaagtctttaggaggccaaggcagaggattgctygagcccaggagttcaagactagcctgtgcaacatagagaaaactcatctctaccaatgaatgaataaacaaataaataaataaagcaatttcatttccaattggtacaataaaaatatacacctaggaatacatttaaccaagacagtgaaagaccctacaagaaaaattataaaacact

SEQ ID NO: 382888 - DNA, 365 bp, Homo sapiens
tgtcacgtccccactctgccgctctcgagttacccttgtcacggtgggcccaacccgcaggcattctgactttgtgatgtggttctaggcaatcagagggtttaggaakgtctcctttgcttctgtggagagggaactttgctggactttgtagtctgaccccaacgatgcctccttcacatcaccagaagcagaagcatggtgtggtggctagtcgatgaaatatgaagccactggacaagttacaataccttctctgaatgtgtttccttctctataaaatggacctaataatgctttccatacttaactgaccagcaggggagggtgggtgaaaaataagttaatgtagaatatgttaacat

SEQ ID NO: 382889 - DNA, 365 bp, Homo sapiens
tgtcacgtccccactctgccgctctcgagttacccttgtcacggtgggcccaacccgcaggcattctgactttgtgatgtggttctaggcaatcagagggtttaggaaggtctcctttgcttctgyggagagggaactttgctggactttgtagtctgaccccaacgatgcctccttcacatcaccagaagcagaagcatggtgtggtggctagtcgatgaaatatgaagccactggacaagttacaataccttctctgaatgtgtttccttctctataaaatggacctaataatgctttccatacttaactgaccagcaggggagggtgggtgaaaaataagttaatgtagaatatgttaacat

SEQ ID NO: 382890 - DNA, 365 bp, Homo sapiens
tgtcacgtccccactctgccgctctcgagttacccttgtcacggtgggcccaacccgcaggcattctgactttgtgatgtggttctaggcaatcagagggtttaggaaggtctcctttgcttctgtggagagggaactttgctggactttgtagtctgacccyaacgatgcctccttcacatcaccagaagcagaagcatggtgtggtggctagtcgatgaaatatgaagccactggacaagttacaataccttctctgaatgtgtttccttctctataaaatggacctaataatgctttccatacttaactgaccagcaggggagggtgggtgaaaaataagttaatgtagaatatgttaacat

SEQ ID NO: 382891 - DNA, 365 bp, Homo sapiens
tgtcacgtccccactctgccgctctcgagttacccttgtcacggtgggcccaacccgcaggcattctgactttgtgatgtggttctaggcaatcagagggtttaggaaggtctcctttgcttctgtggagagggaactttgctggactttgtagtctgaccccaacgatgcctcyttcacatcaccagaagcagaagcatggtgtggtggctagtcgatgaaatatgaagccactggacaagttacaataccttctctgaatgtgtttccttctctataaaatggacctaataatgctttccatacttaactgaccagcaggggagggtgggtgaaaaataagttaatgtagaatatgttaacat

SEQ ID NO: 382892 - DNA, 573 bp, Homo sapiens
tgatacatatttttaccagtcatagaattcttgatttgcagtttttctttttcagcactgtgaccatgtcttccagctgtcttctggcctccctaatttctgacaagaagtcagctgtttattttatagagaagctcttgtatttgatgtcttctttttctcttgatgcttttaagattctctctgtctttgtctttcaacaacttgactataatatgtctaggtgtagatatctttgtgactaacctactgcagttcattgagcttcttggatgtgtggatccatatctttcatcacatttgtgaagttttggccactgtttctccaaagattctttttgtcccctttctttctctctcccatatcattctccaattatgtgtatattggtatgcctggtgatgtcctgtaggtctctgaggctttgttcattgttaaataaactttttattatagaacagttttagatttayagaaaaatcattgacataatacagagatttcctatattgtacatatctattcgtacctattgctagcatcttacattggtgtggtacatttgttacaat

SEQ ID NO: 382893 - DNA, 610 bp, Homo sapiens
ttttcaacttcagaatttcactgtgttcctatttttataacttctatttctgtattgatactctcttattgttgaaatggtattctcatactttattttaactttaaccattttcccatttaccctgagaacactagctggtagtgcttgcagctatagcatttaccctgagataactttaccatgaaatatcttgcttttattattgtttttgcattgctctagtatattgactttggaaacaaaagacatcattctatttacaggattcagtttttagcagtgatatttccatttacaaaatgtagtaattctcaatcaccaaaaaygtcaaatcctagaaaacatagcattcctatgtataatgttaacactgttttccaacagttgttggccaaagatttatttggcgaatccaatttttccaaaatacatgattctgatgattcagatgattctggtgtttgctctgtttagaaataactccaagaacagtctttatattttattttcacattgaaaattcgtcagatttgcttcagcctcatagagtgtttatgtaaaattaaataagcactggcagtgtgctgcactttttttttctaaacag

SEQ ID NO: 382894 - DNA, 611 bp, Homo sapiens
gaatgtatgttcccctgtgtgtgggagtgtgtattcctttgggctatttctatagacttaccacacagtagttaattctcctctgtgtttaaaagtgctcaggtgaaagcttgtaataagtaccgtgctaaactattctctaggttgtcaaataaaacccagatactctaagaaactacagcaagagcccagatggatcactgaaataggtttcacccctctggagagtctcaaaaatgcaaataactcatttaaacaacagctcgtgagctgacttatgccagttcttctctaattagatgtgtactttcatttaatgggagtcaatgggaaggaatagtatttagtgagatctgccctcaagaataaaagaaggcagcagaagttaaagggcaatttctagctaccmatgtgcgtgggataaaaaataattaactatagctataagagttttgtaaagtggattagttttgtaacttcttaatctttgagaccttgctttcttctacttctccacagtgattagtatgaaaacctgttaaaagcaaaaggcctgtggactggtgtagcttgtattgtagcctgtactacagtggcttcaactaaattct

SEQ ID NO: 382895 - DNA, 537 bp, Homo sapiens
aaataaactataatctttattataacattgtaatagcaaaaaagttggaaatgacctacataaccatcaattttttaaaagataaattttgtataattatataaggaaagtggattaataatattttttaagtttgttggaagatatccattataccatgtaaatctttattccttttgtttgtstgaaatagtctactgtaaattttaaaaatatttttttgtttttgaaataagagaaaataaatcaagtgtttataattcttgtaacaagagaaacagtgagccacctctgttcccacctggaattctacttcctagatgccatcatgtccaagtcttagtcttgtttttttagaatttaccccattaaaaaaaaagatgctgagtacttgatcctgtatagaactgcacacaatgagcacatcacctaatcatgagtatagattccgcttaagaaaagaagtccctttatagcgtagaggtgtggctcaagttcatcactggctaaatttcagaccaatattagccctaggaa

SEQ ID NO: 382896 - DNA, 606 bp, Homo sapiens
tttgagtttatgtggataagaggaataagaagattatttcttgagtcatataaatagacaagggcaatggtctaaacaaaaatggtagtttgtaaggtgtctgggtcatgggaaccaggaaggatgaaacaattagcactaagtgtcaatttcttcgattgttgagtggataaaatgacaattttaaagtgtcttgaaaaagrtaaaagtgctttaaaaatgtgaagccatttaattccttcagtgtcttcttggtttggttttattaagttatgaggtatatagtcatccaccctttgtttattgtaaatttagaatccaaaataatttactttgttttaacagaatttttgacctttgctgttgttacagaatttaaaaagcgtttttcagaacccaaacgggggagattagtaaagagttctaagtgtcagatggcatttgtgggaggcaccttccaacatggtccccaataatcccacctcctggtattcatatcctgtgttatgcccttcacattgtaccagcgttggtctacgcgactgataggacatgacggggtgatggtgcatcacttctgaaattagattacagaagaatatgtgg

SEQ ID NO: 382897 - DNA, 606 bp, Homo sapiens
tttgagtttatgtggataagaggaataagaagattatttcttgagtcatataaatagacaagggcaatggtctaaacaaaaatggtagtttgtaaggtgtctgggtcatgggaaccaggaaggatgaaacaattagcactaagtgtcaatttcttcgattgttgagtggataaaatgacaattttaaagtgtcttgaaaaagataaaagtgctttaaaaatgtgaagccatttaattccttcagtgtcttcttggtttggttttattaagttatgaggtatatagtcatccaccctttgtttattgtaaatttagaatccaaaataayttactttgttttaacagaatttttgacctttgctgttgttacagaatttaaaaagcgtttttcagaacccaaacgggggagattagtaaagagttctaagtgtcagatggcatttgtgggaggcaccttccaacatggtccccaataatcccacctcctggtattcatatcctgtgttatgcccttcacattgtaccagcgttggtctacgcgactgataggacatgacggggtgatggtgcatcacttctgaaattagattacagaagaatatgtgg

SEQ ID NO: 382898 - DNA, 579 bp, Homo sapiens
ctttgtcatagtttccatggttatgtttatgtcttttttgtagccactgttttctgtttagcatgtgtttcacttcattttaaagtttactactaattttatttttaaccccagaccacaaagcatatttacatgatttaaaacatttacacacaataatttcaaaattctaacagtcataaaagccatggcagtcatgctgttttacttaatccacagagtgtacttatttttattttgattttttagaaggctattttttttgcctttagctgtgtgtttctgaacttttatttttactagtataattaattttgcacatagctttgcagaatgtgcaacaagttacacaattcaaagagattttctccagcttgctttcatttcctttgccctggtctaatastaacatttgctcccaggctctaccaatttcctccatccaaactcaactgactttattttttgtttctggcccttgctccatgggaccaaccactaatacgttactatctatgattttccaggttttctaattttattttttccatcttaacattcatcaccagtcaatattgg

SEQ ID NO: 382899 - DNA, 531 bp, Homo sapiens
cttaatggcaagaaactcaaagcttttcttcatgtattgggaataaagtaaggatgtctcctactactctttttcaacatcatccttggaagtcctagcttatacagtaagacaagagcacaaaattaaggatgtgcagattgagaaagaaaaaataaagctatctttgttcaaacagtagaaatctgaaggaatcaaaacaacaaacccctggaattaataagtgattatagcaagattgtaaaattcaaggttaagatacaaaagtcagttgcttccctgtatatcagtagaaaacaagtaaaatttgaaatttaaaatgtaacaccaattacwttagcacccccaaaaatgaaatactaagatataaagctaaccaaacaagtgtaagatctatgtgaggaaaactacaaaactctgatgaaagataataaagaagaactaaataaatggagagacattgaatgttatggataggaaggcaatgttgttgagatgttcattcttcccaacttggtatagattcaatgc

SEQ ID NO: 382900 - DNA, 634 bp, Homo sapiens
cttaatggcaagaaactcaaagcttttcttcatgtattgggaataaagtaaggatgtctcctactactctttttcaacatcatccttggaagtcctagcttatacagtaagacaagagcacaaaattaaggatgtgcagattgagaaagaaaaaataaagctatctttgttcaaacagtagaaatctgaaggaatcaaaacaacaaacccctggaattaataagtgattatagcaagattgtaaaattcaaggttaagatacaaaagtcagttgcttccctgtatatcagtagaaaacaagtaaaatttgaaatttaaaatgtaacaccaattacattagcacccccaaaaatgaaatactaagatataaagctaaccaaacaagtgtaagatctatgtgaggaaaactacaaaactctgatgaaagataataaagaagaactaaataaatggagagacattgaatgttatggataggaaggcaatgttgttgagatgttcattcttcccaacttggtatagattcaatgcaatcccaagttattttgtgaatgttgacaamttgattctaaagtctatatggagagtcaaaagacccagaatagtcaactcaatattgaacaaaaagttggag

SEQ ID NO: 382901 - DNA, 563 bp, Homo sapiens
taaagcattttttagcagctattattattcacctaaacttyggggaatagattgtgttatttttatttaatgtcatggttaaaagtgtgagtctcagttttaactcacacttattagatgcatgagtgtattagtcagctccatcaccaaaatattatagactggacagtttaaacagcagacattcctctcctcatagttctggaggctgaaagtatgagatcagggtgccagcattgtcagtttctggtgagttccctcttcctggtttgtagatggttgccttctggcttgttatctcatgacttctttgtgttagaggagaggtggggggaacgctgctatctctttttataagggcagggcactaagcccatcctgagggcaccacgctcatgacatcattaaacctataataataacctcccatctcccaatactatcacattggaggttggagcttgaacatatgcatttagaggggggcacaattcagtctatgacaatgagcctggacaatattgaccctctctaaactgaatttcttaaactgtaaagggagg

SEQ ID NO: 382902 - DNA, 563 bp, Homo sapiens
taaagcattttttagcagctattattattcacctaaacttcggggaatagattgtgttatttttatttaatgtcatggttaaaagtgtgagtctcagttttaactcacacttattagatgcatgagtgtattagtcagctccatcaccaaaatattatagactggacagtttaaacagcagacattcctctcctcatagttctggaggctgaaagtatgagatcagggtgccagcattgtcagtttctggtgagttccctcttcctggtttgtagatggttgccttctggcttgttatctcatgacttctttgtgttagaggagaggtggggggaacgctgctatctctttttataagggcaggkcactaagcccatcctgagggcaccacgctcatgacatcattaaacctataataataacctcccatctcccaatactatcacattggaggttggagcttgaacatatgcatttagaggggggcacaattcagtctatgacaatgagcctggacaatattgaccctctctaaactgaatttcttaaactgtaaagggagg

SEQ ID NO: 382903 - DNA, 530 bp, Homo sapiens
gattacaattcaacatgaggtttggtggggacatctattcggactatatttttccttccctggccccataaatctcatgtccttctcacattgcrtaagacaatcatcccctgccaatagtcactcaaaagttcaactcatttcagcatcactcaaaagttcaaagtccaaagtttcatctgagacaaggcaagtctctttcacctatgagcatgtaaaataaaaaacaagttatatatgtccaagatacaattagggtacaggcattggtaaacattctcatcccaaaagggagaaattggttaaaagaaaagagttacagggcctatgccagttcaaaaacccaacagggaagtcactaaatcttaaagcttcaaaatagtgtcctttgactccatgtcccgcatcagagcacactgctgcaagaggtgtgctcctatggctttaggcagccctgccctgtgactttccagggttcagcccttgcagcttctctcatgggttggagtttgtattagtccattttcaca

SEQ ID NO: 382904 - DNA, 530 bp, Homo sapiens
gattacaattcaacatgaggtttggtggggacatctattcggactatatttttccttccctggccccataaatctcatgtccttctcacattgcgtaagacaatcatcccctgccaatagtcactcaaaagttcaactcatttcagcatcrctcaaaagttcaaagtccaaagtttcatctgagacaaggcaagtctctttcacctatgagcatgtaaaataaaaaacaagttatatatgtccaagatacaattagggtacaggcattggtaaacattctcatcccaaaagggagaaattggttaaaagaaaagagttacagggcctatgccagttcaaaaacccaacagggaagtcactaaatcttaaagcttcaaaatagtgtcctttgactccatgtcccgcatcagagcacactgctgcaagaggtgtgctcctatggctttaggcagccctgccctgtgactttccagggttcagcccttgcagcttctctcatgggttggagtttgtattagtccattttcaca

SEQ ID NO: 382905 - DNA, 530 bp, Homo sapiens
gattacaattcaacatgaggtttggtggggacatctattcggactatatttttccttccctggccccataaatctcatgtccttctcacattgcgtaagacaatcatcccctgccaatagtcactcaaaagttcaactcatttcagcatcactcaaaagttcaaagtccaaagtttcatctgagacaaggcaagtctctttcacctatgagcatgtaaaataaaaaacaagttatatatgtccaagatacaattagggtacaggcattggtaaacattctcatcccaaaagggagaaattggttaaaagaaargagttacagggcctatgccagttcaaaaacccaacagggaagtcactaaatcttaaagcttcaaaatagtgtcctttgactccatgtcccgcatcagagcacactgctgcaagaggtgtgctcctatggctttaggcagccctgccctgtgactttccagggttcagcccttgcagcttctctcatgggttggagtttgtattagtccattttcaca

SEQ ID NO: 382906 - DNA, 530 bp, Homo sapiens
gattacaattcaacatgaggtttggtggggacatctattcggactatatttttccttccctggccccataaatctcatgtccttctcacattgcgtaagacaatcatcccctgccaatagtcactcaaaagttcaactcatttcagcatcactcaaaagttcaaagtccaaagtttcatctgagacaaggcaagtctctttcacctatgagcatgtaaaataaaaaacaagttatatatgtccaagatacaattagggtacaggcattggtaaacattctcatcccaaaagggagaaattggttaaaagaaaagagttacagggcctatgccagttcaaaaacccaacagggaagtcactaratcttaaagcttcaaaatagtgtcctttgactccatgtcccgcatcagagcacactgctgcaagaggtgtgctcctatggctttaggcagccctgccctgtgactttccagggttcagcccttgcagcttctctcatgggttggagtttgtattagtccattttcaca

SEQ ID NO: 382907 - DNA, 585 bp, Homo sapiens
tggtggggacttatattcaaattatatcagattctaagatcatagctttccattgtgttttctgtgacattgtatctactatactacaaaactgaagctcttagagacagagttcaaaaatattataatgatcttttagttggtaactgaaaataggtgtgacctaaacatagggcattctgaatgctttattgtgctgggtgacttcaataatactgatatagtttggctgtgtccccacccaaatcttatcttgaattgtagctcccataatccccatgtgttgtgggagggacccagtaagaggtaattgaatcatggggatgggtttttctcatactgttcttgtgacagtgaataagtctcatgagatatgatggtttcataaagggcacttcccctgcacacgttctcttgcttgccagcatataagacataactacataactttgctcctcctttgccttcygccatgattatgaggcctccccaggcatgtggaactgagtcaattaaacctctttttctttataaattacccagtcttgggtattgcttcatagcagtttgataatgaatgaatac

SEQ ID NO: 382908 - DNA, 632 bp, Homo sapiens
cacttggcttatacaaatgcttcacccaaaccacataagctgaaagcctgttatgctgtgtgtcattccagtggaacatagaaaggatcttttgcaaacaaattgtacctttggaacattatggcctttaaaaatcttctctgtaatagagcatactctaaaagggaaatgaatgcagggttttggtaaaatataaactccatctaatagttggtaatactayatatagactgaaacatggtaacacgtatacagacatgcagttggaaatggaggttgctgtgtgtactgtgttatgtgaacaaaccaatttaacaaatttagaaagtattgatggccaggcatggtggcttatgcctgtaatcccagcactttgagaggctgaggtgggaggattacttgagcccaggagattgagaccagcctggaaaccacagtgaggcctcatgtctacaaaaaaatgttttaaaattagcaaggcatggtgctacgtgcctgtagtcccagctacttgggaggctgaggtgggagaattgcttgagtctgggaggttgaggctgcactgagctgatcactcagctgcatttctagctgagtgacagagtgagaccctgtctcaaaaaaaaaaaaaa

SEQ ID NO: 382909 - DNA, 632 bp, Homo sapiens
cacttggcttatacaaatgcttcacccaaaccacataagctgaaagcctgttatgctgtgtgtcattccagtggaacatagaaaggatcttttgcaaacaaattgtacctttggaacattatggcctttaaaaatcttctctgtaatagagcatactctaaaagggaaatgaatgcagggttttggtaaaatataaactccatctaatagttggtaatactacatatagactgaaacatggtaacacgtatacagacatgcagttggaaatggaggttgctgtgtgtactgtgttatgtgaacaaaccaatttaacaaatttagaaagtattgatggccaggcatggtggcttatgcctgtaatcccagcactttgagaggctgaggtgggaggattacttgagcccaggagattgagaccagcctggaaaccacagtgagrcctcatgtctacaaaaaaatgttttaaaattagcaaggcatggtgctacgtgcctgtagtcccagctacttgggaggctgaggtgggagaattgcttgagtctgggaggttgaggctgcactgagctgatcactcagctgcatttctagctgagtgacagagtgagaccctgtctcaaaaaaaaaaaaaa

SEQ ID NO: 382910 - DNA, 591 bp, Homo sapiens
aattatgtattacattagtatggtgtatttgtcacaattagtgaacaaattattgatacattattaactaaagtccatcctttttacatttccttaatttttacctaacgtctgtgtctgtttcaggctctcacacaagataccactacatttggtcatcaggtctccttaggctccttttagctgtgagttttttgaattttccttatttttgatgaccttgaaagttttaaggagtactggttaggtattttgtagagtgatcctctattgggctttgtctgatgctttcctataactagattagcattgtggaatttgaagagggaggccacagtagcattttcatcacatcatatcaagagtacatactactgacatgacttgttgatgttgaccttgatcagctgaatcaggcagtgtctgtaaggcttctccactgtaaatttactctttcttttccttctccrtaccatactctttggaaggaactcacaaagcatagctcacacttaaggaatgaggagttatgctctaatgcttcatctccttgaaggccaagtatctataaaaacaaattatttggaattc

SEQ ID NO: 382911 - DNA, 627 bp, Homo sapiens
gcttttagcacttccttactttctgccacttcaagatgttcaaagcttatcttttatattttctgccagtatagaatcagccatttctccaaagagatctcagtttttaaatttgtgtttatctagtgttagtaaccaagttctgggtgctaagtatgttcattccttccaggccctctcagctaagagaaagaaaaatatgtgtgtatactaatacatgtatatatgtatrtctataaataagtatatatttagccagtatatttatattaagctaagaatgagtttatactgatatttccaactctaatccattgctacatcgattgttctagtttcctgctcctcttgcttatctataagcctcacattccaactgtgagaaactggtcttccaacatctgccataaatttactttattgttcatttccagtgtacacatatagtggtttcagaattgtaaacccataccctcatgggaagaaactctatttactagagtacactgcttatttatagtttcttttgctttttatcttacagattccactcgtttccaaagtcacttaggtcagcaccatttcatcccctcccctttagtgaggttattttgtacatttgtaata

SEQ ID NO: 382912 - DNA, 627 bp, Homo sapiens
gcttttagcacttccttactttctgccacttcaagatgttcaaagcttatcttttatattttctgccagtatagaatcagccatttctccaaagagatctcagtttttaaatttgtgtttatctagtgttagtaaccaagttctgggtgctaagtatgttcattccttccaggccctctcagctaagagaaagaaaaatatgtgtgtatactaatacatgtatatatgtatgtctataaataaktatatatttagccagtatatttatattaagctaagaatgagtttatactgatatttccaactctaatccattgctacatcgattgttctagtttcctgctcctcttgcttatctataagcctcacattccaactgtgagaaactggtcttccaacatctgccataaatttactttattgttcatttccagtgtacacatatagtggtttcagaattgtaaacccataccctcatgggaagaaactctatttactagagtacactgcttatttatagtttcttttgctttttatcttacagattccactcgtttccaaagtcacttaggtcagcaccatttcatcccctcccctttagtgaggttattttgtacatttgtaata

SEQ ID NO: 382913 - DNA, 584 bp, Homo sapiens
ttatactacattttttccaggggaaatttaattaatatttgaatagaaggaactcttatgtactctggcatttatattaatctgttccaatctcattaagtaatccaaaatgcttttgaaagcaccattgctgagcactttataatagttgtgttaattaaatatactctttactaatcttattcaaaaatggggccttgctaacacatgttaaatttataattcagtttagcatatataattgtataattttttaaacaacaaagacttctgaccactgtgtattcagaagtaaataatggatttaatattttaaaatcaggcacaatttaacttcccrtaattaaatgtcagaatagctacactagagttgcaatggaaattcctttgtttctataaagctttagttagttgaggtaggaggaattatttcctgaatccaaagtgttctattgtcttttccaaccaaatgccaaattgagtcaccatttttaatcttattatgtaactccagaattgcaggagcaaacttttagaagaaggctagctttttaggacagtgcacttcacatagtaggaattca

SEQ ID NO: 382914 - DNA, 650 bp, Homo sapiens
ataatagttgtgttaattaaatatactctttactaatcttattcaaaaatggggccttgctaacacatgttaaatttataattcagtttagcatatataattgtataattttttaaacaacaaagacttctgaccactgtgtattcagaagtaaataatggatttaatattttaaaatcaggcacaatttaacttcccgtaattaaatgtcagaatagctacactagagttgcaatggaaattcctttgtttctataaagctttagttagttgaggtaggaggaattatttcctgaatccaaagtgttctattgtcttttccaaccaaatgccaaattgagtcaccatttttaatcttattatgtaactccagaattgcaggagcaaacttttagaagaaggctagctttttaggacagtgcacttcacrtagtaggaattcagtaaatgtacggataatgactataaacaaacactcttctattagaagcaaagaagaggagcatagccttttaaaggccccaaataaattccctctcctgggatattacataagaaaccctgatgctaagtaccagggactggcttctttttctttcagctcctctttaagaacaatgggaagaagttaagtagagatgtttgctttt

SEQ ID NO: 382915 - DNA, 559 bp, Homo sapiens
ctgagctgctgtataagcactgctattgcctctgatctggctgggcacaggctgtagttatggagaaaaggtaatgctatttgacttcagtagttgcatagagttgcagaaggggccccaagttaagtagatcaggatggatggaataactgccattgtcagaaaaaatgcatggttgagatttgccttccaccctaggaagtttctggaaataggctttgaagctgaggggagccctgattaaacttccaggtgtggcagatctagcatctgcttgttatgggaacttgctacagattttctctcaccctgagtaggatcttggggtaaggtccaagactaggtctggagggtagctgtctagggattcaagcctggtaacattctctacctcttctgggagtgaccascttggctttgtgggtgagctatgctgttagctgatatctctgatggaactctgctgcttccaggtatattgagcttttaccaaattctgcatgctattctctgtggactccaccttcttgctttattttcttctgaccccagtggctta

SEQ ID NO: 382916 - DNA, 610 bp, Homo sapiens
attgggcttcttagaaactgtctcagaaagctagggaacctggatgtccatcaacctggttctcttttctcagtatagaaactgtgggccctgagggatcttctctgtgtggcatggtgctgacttagaggaggaggggaaatacaaccaaagccagaccgtttctcccacctttttccactttcgtggaacacacaggtgactcagacttattyccacatgttaaggtgttcatcaaggtgttttcgtgtgtgaatagtggctggttgaaatttcttctggggtaggagtgaagtctaggacctcctattttaccaccttgcattagcattttaaatattttaaaaaatatcagccaaagtaatttattgtaatcagctttgtttttattctgaggaaaatggatttctaacctcagctatagtcatttgttacatgactataataatttgctttattaaaagtcatcataaaataaaacctgacagtttttttcatttttgcataattttatatattttaccactggtaaacattaatgacatttaaaaaaaagtttaagagagttttaaatacattaaatttgttgctcttggaagtccatttaaac

SEQ ID NO: 382917 - DNA, 610 bp, Homo sapiens
attgggcttcttagaaactgtctcagaaagctagggaacctggatgtccatcaacctggttctcttttctcagtatagaaactgtgggccctgagggatcttctctgtgtggcatggtgctgacttagaggaggaggggaaatacaaccaaagccagaccgtttctcccacctttttccactttcgtggaacacacaggtgactcagacttattcccacatgttaaggtgttcatcaaggtgttttcgtgtgtgaatagtggctggttgaaatttcttctggggtaggagtgaagtctaggacctcctattttaccaccttgcattagcattttaaatattttaaaaaatatcagccaaagtaatttattgtaatcagctttgtttttattctgaggaaaatggatttctaacctcagctatagtcatttgttacatgactataataatttgctttattaaaagtcatcataaaataaaacctgacagtttttttcatttttgcataattttatatattttaccackggtaaacattaatgacatttaaaaaaaagtttaagagagttttaaatacattaaatttgttgctcttggaagtccatttaaac

SEQ ID NO: 382918 - DNA, 615 bp, Homo sapiens
gcatgattgaaatgtctacattagtattacacaaattcagcagtctctcaggaggtacataattcaaaggcaaacgttttcctccttgaggatttgacatagtaaggacaatgctctcctaaactgtggaatttcctagataaagtttgtgggcatcaattctatgctttctataaaagatcttcaaattcacttaacatttgtaatctccatggaagccttaaaatcctctaacaactaaatctgtatttcttcctagaggacatagatagatgatacccgccaaaaatgggcaaccacagattctttgtattcagaatgtgcwcacgcgtgcgcgtgcacacacacacacacacctagctctccaacattgcaatgaagggttgtaaacaccatggagacaggaaatccatatccaagtagtgctgcctaggtttcatgttttaaaacagagtttggcaacaatgagtttaatctataaagacgtgtacaagactgtcatgataaaatgtaggtttttcacgtagcctattctttggtttcaagaagtgtccttcattctcaaaattagggcttcctacgtctttcagtgtaattttattttcttatgtgaaa

SEQ ID NO: 382919 - DNA, 515 bp, Homo sapiens
tcacccgttggtgagcactcacttgggatatgaatatcttcatagtttttgaccactcagagaagttcatcctcatacctcttccccaaatttctttgttatcaattttccaatcatgcttcttccaagtccctaaccatccagtcaaaccattggctaaagcccattaatcagtgtataatcacacatctggccatttctcctcccatgcaaagtgtgctgctcgacattctgcccactgggaagacttcccttcrctgctctccttcagggatgtcctagaaagggactgtacgtgctgcagctgatctactttcaggtggtgcctgcatattgtgcagaaccatctgtgaatcaggctctagcattctctttctctgccttctgatcatagggaactccctatgagaccattggtgaagactggggaagagaaggcagggtaacaggcgcagagaccaggggcatttgagacacttcctcatgtaacttacttgtgccctcaggacctgctc

SEQ ID NO: 382920 - DNA, 572 bp, Homo sapiens
aactggacagagaatgagtttgacgaattgacagaagtaggcttctgaaagtgggtaataacaaactcctctgagctaaaggggcatgttctaacccaatgcaagtaaactaagaaccttgacaaaaggttacaggaactgctaactagaataaacagtctagagaacataaatgacctgatggagctgaaaagcacagcacgacaactttgtgaagcatacacaagtatcgatagctggatgaagcagaagaaaggatatcagataaaaacataaaatgttttatctcaatcatttttaaagtttttttgaaaaatttaataaaaaatatgcctccartcttaatggaattaaattagaaatcaataacaaaaagataattggaagatccataggtatttttaaattaaataacatatctaaatgatcctaagtcaaagacaaaaccaaaggaaaattacagaatattttgaactggattactaagaaagtgtaacatattaaattttgtgaaaggctgcaaaacagtattagggtgaaatttattgcattaaatagctttattaaaaaaa

SEQ ID NO: 382921 - DNA, 571 bp, Homo sapiens
acccaatgcaagtaaactaagaaccttgacaaaaggttacaggaactgctaactagaataaacagtctagagaacataaatgacctgatggagctgaaaagcacagcacgacaactttgtgaagcatacacaagtatcgatagctggatgaagcagaagaaaggatatcagataaaaacataaaatgttttatctcaatcatttttaaagtttttttgaaaaatttaataaaaaatatgcctccaatcttaatggaattaaattagaaatcaataacaaaaagataattggaagatccataggtatttttaaattaaataacatatctaaatgatcctaagtcaaagacaaaaccaaaggaaaattacagaatattttgaactggattactaagaaagtgtaacatattaaattttgtgaaaggctgcaaaacagtattagggtgaaatttattgcattaaatagctttattwaaaaaaatgagttgtcttgagtcaatgacttcagctctaccttaaaaaggcagtaaaagaagaggtaattaaaaccaagtaagtagaagaaaggaact

SEQ ID NO: 382922 - DNA, 542 bp, Homo sapiens
gtattagggtgaaatttattgcattaaatagctttattaaaaaaaatgagttgtcttgagtcaatgacttcagctctaccttaaaaaggcagtaaaagaagaggtaattaaaaccaagtaagtagaagaaaggaamtaataacaatgagagaggaaaataacataatttaaaaaaaaacaggaaaacaaaggagaaaaaccatagaaaccaaagtcttgctatttgagaacaataaaattgacaaatatctgccatgttagaacaaaaagacaaaaatacatattatcattttagaaatagaagaaatgatgttactacatattctacagctattaaatggtcaatccaaaaacatgatgctcctgaatttaatcatatatggaattaatatatttcttaaaacatagactttaaaagctcactgtggaaagcctgtacaaacaatgctgagaaactacaaaacagtgtggagaaaaattaaagattacctaagtaagtgaagaggtataccttgttcatggattagaagactcaatattgt

SEQ ID NO: 382923 - DNA, 542 bp, Homo sapiens
gtattagggtgaaatttattgcattaaatagctttattaaaaaaaatgagttgtcttgagtcaatgacttcagctctaccttaaaaaggcagtaaaagaagaggtaattaaaaccaagtaagtagaagaaaggaactaataacaatgagagaggaaaataacataatttaaaaaaaaacaggaaaacaaaggagaaaaaccatagaaaccaaagtcttgctatttgagaacaataaaattgacaaatatctgccatgttagaacaaaaagacaaaaatacatattatcattttagaaatagaagaratgatgttactacatattctacagctattaaatggtcaatccaaaaacatgatgctcctgaatttaatcatatatggaattaatatatttcttaaaacatagactttaaaagctcactgtggaaagcctgtacaaacaatgctgagaaactacaaaacagtgtggagaaaaattaaagattacctaagtaagtgaagaggtataccttgttcatggattagaagactcaatattgt

SEQ ID NO: 382924 - DNA, 577 bp, Homo sapiens
ctgctgggctcaagtgatcttcctgcttggtcttctgcrtagttgggaatagagtcacatgcctggctaattctgcaccaccatgaccagctagtttttttaaaaaaaatgttttttagagagagggtcttgctatgctatccagtttggtcttgaactcctgccctcaagtaatcctcccattcagttccctgagtagctgggattataggtgtgagccaccaagcccagctcagatgtatacttttatttcatgtaggtaaatacctatgaggagaatgattagactgtaccgtaaatgtatgttttacattttaagaaactgccaaactggtttccaaactggttgtaatattttatgttcccagaagggtgtataagagttccagtttctctatcttgccaaaaactattatggtttgcttcttaattctagccattctgatgcatgtgtaatggtatttcatggttgccttaattttcatatttctaatgactaatgacattggcatggtttcatgtggttgtttgaatatttcctttgatgaagtgtcttcagatactttatttataaaat

SEQ ID NO: 382925 - DNA, 599 bp, Homo sapiens
gaaccagctactaagaatgtttattagcattagagattgatawgaacattattaagaatctcttcccctgtaggagaggcaaaatttcacctctgtcctcttagggtaatagttcgggcccaagaattaaattgccattaacaggagaaaagcatacacatttatttaataaaagctttatgtggcataggaaccctataaagaaatgaagacccaaagaagcagtgagagacaaacacttatatactgaattggacaaaaagcagtaacttgcaaaaaatgtaataaggtgggggggcttgggctagggtagtcaagtgggcagagaagtggttgggatgttaagaatttgtgtaacaattgtttgtccagatttcctttggcctcatctttttattcttgatgataagaatgctgttttctttgtagtataggaagggcatctttcacatgggaatttcatctcctacttttaagaaacagcatggtcagaatgatcttcttgtacctgctgtttttttaagtgcctttaacttaaatagtcaatatgccagaatagctgttgggggtgtcatattcttaactcatttacccacaag

SEQ ID NO: 382926 - DNA, 599 bp, Homo sapiens
gaaccagctactaagaatgtttattagcattagagattgatatgaacattattaagaatctcttcccctgtaggagaggcaaaatttcacctctgtcctcttagggtaatagttcgggcccaagaattaaattgccattaacaggagaaaagcatacacatttatttaataaaarctttatgtggcataggaaccctataaagaaatgaagacccaaagaagcagtgagagacaaacacttatatactgaattggacaaaaagcagtaacttgcaaaaaatgtaataaggtgggggggcttgggctagggtagtcaagtgggcagagaagtggttgggatgttaagaatttgtgtaacaattgtttgtccagatttcctttggcctcatctttttattcttgatgataagaatgctgttttctttgtagtataggaagggcatctttcacatgggaatttcatctcctacttttaagaaacagcatggtcagaatgatcttcttgtacctgctgtttttttaagtgcctttaacttaaatagtcaatatgccagaatagctgttgggggtgtcatattcttaactcatttacccacaag

SEQ ID NO: 382927 - DNA, 560 bp, Homo sapiens
tcccctgacctccttgcttaaagcagtcaccatgaggttaatatgttttattttcttcattgcccttatcatcattggaattgatttgtttctttatgtgtagtctgtctccctcaatccagaatgtaagctccagaaaatctggrgttttgtctatcttgtccatactgtctcgagatggtagtagggtgtctagcacatagtaggtactcaataattatttatggatgaaatgaatcttcacctacaactggggggaaagtgccatttctgagtgaggtgggcttggtagctaaacaaagtcatatctttggtggtcattccctcatttaacaaacagttcttgaaacttactgtgtgccaagtgttattctgggatgcagctttgaaccaagcagaccaagatcccaatggagcttatggccaaatgctggcgacagataatgacaaccacaaagccagaaacacccagggcatggggaggaagaatactagaatctgctttagactgagaggttgggccggcctctctgaggaggggagtttaaactgggaaaagc

SEQ ID NO: 382928 - DNA, 560 bp, Homo sapiens
tcccctgacctccttgcttaaagcagtcaccatgaggttaatatgttttattttcttcattgcccttatcatcattggaattgatttgtttctttatgtgtagtctgtctccctcaatccagaatgtaagctccagaaaatctggggttttgtctatcttgtccatactgtctcgagatggtagtagggtgtctagcacatagtaggtactcaataattatttatggatgaaatgaatmttcacctacaactggggggaaagtgccatttctgagtgaggtgggcttggtagctaaacaaagtcatatctttggtggtcattccctcatttaacaaacagttcttgaaacttactgtgtgccaagtgttattctgggatgcagctttgaaccaagcagaccaagatcccaatggagcttatggccaaatgctggcgacagataatgacaaccacaaagccagaaacacccagggcatggggaggaagaatactagaatctgctttagactgagaggttgggccggcctctctgaggaggggagtttaaactgggaaaagc

SEQ ID NO: 382929 - DNA, 560 bp, Homo sapiens
tcccctgacctccttgcttaaagcagtcaccatgaggttaatatgttttattttcttcattgcccttatcatcattggaattgatttgtttctttatgtgtagtctgtctccctcaatccagaatgtaagctccagaaaatctggggttttgtctatcttgtccatactgtctcgagatggtagtagggtgtctagcacatagtaggtactcaataattatttatggatgaaatgaatcttcacctacaactrgggggaaagtgccatttctgagtgaggtgggcttggtagctaaacaaagtcatatctttggtggtcattccctcatttaacaaacagttcttgaaacttactgtgtgccaagtgttattctgggatgcagctttgaaccaagcagaccaagatcccaatggagcttatggccaaatgctggcgacagataatgacaaccacaaagccagaaacacccagggcatggggaggaagaatactagaatctgctttagactgagaggttgggccggcctctctgaggaggggagtttaaactgggaaaagc

SEQ ID NO: 382930 - DNA, 505 bp, Homo sapiens
ctatgagctcaagcacagtaggcttctggaggggctttgagagaaagatgggaatacagaggagaatgaaaggacagaaggaattattgaaaggaagaacagaaggaatgaaggctcagagacagggacatcctcagtttgcttaggtctttggaaatgggtgatcagtcaggatacttggaaggaatcaactcttatctgacagtacttgacaagtagatattctgttgagttaagtattttcrtaatagaggggtcctatatataagatgtgactataaagttatctgactttattccttctgaccaacacatcataacctagtcaaccacatgagtgtttgcccctttgagacagtcaccttgggaagccaccttcttacctgaatgtgttggcattgctgcagctgctttggtcaatcttctttagagcctggagcatggcctttaccagtggggccaagactatgtattcaaatggacaccttgtctttggaatagaaag

SEQ ID NO: 382931 - DNA, 625 bp, Homo sapiens
aatttgtagcacggtgtcaaaataaaatagagtgtatttcgctgcttcttaatttctttcaattaggctgagatctttttcttaaagagagaagagcatcttcackgcattttattttttctgaaaagagtaggccatattttactgagatcacggatttgttatatatgacattttggtcttctaacattcttcagtggattttctctaaagtagtatgtacagaaggagttgaaaagaaaaaagtaaatcatgtaataattctgagatttttgggtttgtcacaactgagaaatattgctgacggtgtatggtcctcaagtgtgaaaatgttccttgtgaattgtttgcatccaaaatatacacacagcattaagggctggtttttatcttttatttttccaatcctcttttcttcccagggtgtccaagtcacagccacggaatctcacagatgtctgagaattcctcctcatgggactctcagaggatccagaactgcagcccgtcctcgctgggctgtccctgtccatgtgtctggtcacggtgctgaggaacctgctcagcatcctggctgtcagctctgactcccacctccacacccccatgtacttcttcctctcca

SEQ ID NO: 382932 - DNA, 625 bp, Homo sapiens
aatttgtagcacggtgtcaaaataaaatagagtgtatttcgctgcttcttaatttctttcaattaggctgagatctttttcttaaagagagaagagcatcttcactgcattttattttttctgaaaagagtaggccatattttactgagatcacggatttgttatatatgacattttggtcttctaacattcttcagtggattttctctaaagtagtatgtacagaaggagttgaaaagaaaaaagtaaatcatgtaataattctgagatttttgggtttgtcacaactgagaartattgctgacggtgtatggtcctcaagtgtgaaaatgttccttgtgaattgtttgcatccaaaatatacacacagcattaagggctggtttttatcttttatttttccaatcctcttttcttcccagggtgtccaagtcacagccacggaatctcacagatgtctgagaattcctcctcatgggactctcagaggatccagaactgcagcccgtcctcgctgggctgtccctgtccatgtgtctggtcacggtgctgaggaacctgctcagcatcctggctgtcagctctgactcccacctccacacccccatgtacttcttcctctcca

SEQ ID NO: 382933 - DNA, 571 bp, Homo sapiens
tcacaatgagctctaagaatgtgtcaaactgtcaattgatttcaaagataacctaacaaggttaataactcttatcttccggatgataacctaataactaagtattgcacatctttagtgcccaaagctgctctatttgtcatgttatttttcaggaaaatacaaatggctattcaaaatttacatgatgcatttgcaccaggtgagggttaaatcataccaggacccaatgctgaaataaaaaatttgaataatttaagtgaaaagagactcaagtcaccacataacatggtgaggtagaagcaygatgaatgcaaaagtatatccagtactacattcagttgtacatcgtgatttaatttcagaaagataacatcctcaatcacattaacttaatgattttatttgaattttattttattttaattgtattcaaaccttatttgaaaatttgctctggtcttataattgaatatacattataaatattagggtctaattcataatgcaatggttttatattttaaatattattataataaaaatgcataagttagtggcaggatttcag

SEQ ID NO: 382934 - DNA, 643 bp, Homo sapiens
attcagttgtacatcgtgatttaatttcagaaagataacatcctcaatcacattaacttaatgattttatttgaattttattttattttaattgtattcaaaccttayttgaaaatttgctctggtcttataattgaatatacattataaatattagggtctaattcataatgcaatggttttatattttaaatattattataataaaaatgcataagttagtggcaggatttcaggcaaatgtttttcttttaaaaggagttgaaagttaagtctgaaaaacactggactatagaaacaggccgtcaatagacaataaggtttgccaaattctatgatctaaagctttcgtgaagcaacaggaaagggcaaattaatacctgtcaattgcctactgtgggcctattatatctcaagcactgtgctaggtactgttgtgattagcaatttcatttaattctcacatgaacactataaatctgctatcaaactgttaatgtccccataccatgggagaaaaattaggacatataaggatttggtgacttcaccaagctttcaacttcactaacaacaaagctgagatttttagaccctgattttagttttctccacaaccccatgttctcttccaaagcaattg

SEQ ID NO: 382935 - DNA, 566 bp, Homo sapiens
ttttgataatagagttcacaatgagctctaagaatgtgtcaaactgtcaattgatttcaaagataacctaacaaggttaataactcttatcttccggatgataacctaataactaagtattgcacatctttagtgcccaaagctgctctatttgtcatgttatttttcaggaaaatacaaatggctattcaaaatttacatgatgcatttgcaccaggtgagggttaaatcataccaggacccaatgctgaaataaaaaatttgaataatttaagtgaaaagagactcaagtcaccacataacatggtgaggtagaagcacgatgaatgcaaaagtatatccagtactacattcagttgtacatcgtgatttaatttcagaaagataacatcctcaatcacattaacttaatgattttatttgaattttattttattttaattgtattcaaaccttatttgaaaatttgctctggtcttataattgaatatacattataaatattagggtctaattcataawgcaatggttttatattttaaatattattataataaaaatgcata

SEQ ID NO: 382936 - DNA, 643 bp, Homo sapiens
attcagttgtacatcgtgatttaatttcagaaagataacatcctcaatcacattaacttaatgattttatttgaattttattttattttaattgtattcaaaccttatttgaaaatttgctctggtcttataattgaatatacattataaatattagggtctaattcataatgcaatggttttatattttaaatattattataataaaaatgcataagttagtggcaggatttcaggcaaatgtttttcttttaaaaggagttgaaagttaagtctgaaaaacactggactatagaaacaggccgtcaatagacaataaggtttgccaaattctatgatctaaagctttcgtgaagcaacaggaaagggcaaattaatacctgtcarttgcctactgtgggcctattatatctcaagcactgtgctaggtactgttgtgattagcaatttcatttaattctcacatgaacactataaatctgctatcaaactgttaatgtccccataccatgggagaaaaattaggacatataaggatttggtgacttcaccaagctttcaacttcactaacaacaaagctgagatttttagaccctgattttagttttctccacaaccccatgttctcttccaaagcaattg

SEQ ID NO: 382937 - DNA, 589 bp, Homo sapiens
atggcctcctgttccatcctcattgctgcaaaagacatgatttgttctttttaatgggtgaatagtattccattgtgtatatatgccacattttctttatccaatcatctcttgatagacacttaggttgattccatattgtttctattgtgaataatgctgtgataaacatatgcgagcaggcatctttgtggtataatgaatcttttcccttgggcagatagccagtagtgggattgctgaatcaaatggtaattctatttttagttctttgagaaatctccatactgttttccatagcagttgtactagtttaaaaatgtgtcacactttgatgctcaccctcttctcctamcattctccctcttaaacatcctctcatatctcctcttctaccaaatcagtcctttctcttgcttttctttgatgatgacagaaaccctctagcctcagggccttcgcatttgcttcgcccctgccccaacccacagaattacagatctatccctcttttcactcaggtgcacaaataaatattatcataaacaggagtctatctctggctaccttatctaaagtaacatttccc

SEQ ID NO: 382938 - DNA, 351 bp, Homo sapiens
ttgtatctcacactatcactgtcattttctaaagaggcaaacagttgtaatgattcaataactttagatagcacagttgaattaaaataaaatgtgattacaaatattcataatgagcatgatgcctagagytgaaaataatgtattatatacttgaaaattgctataagattagatcttaaatattctcacgaccaacaaggaaaatgattatgtgaggtgatggatatgtcaattaacttgatttattcatttcacaatgtgtacatatatcaatatatcaaaacatcatgttatacactaaatacataaaattttatttgtcagttgtatgtcaagaaagctgggagg

SEQ ID NO: 382939 - DNA, 293 bp, Homo sapiens
atattcaaattttattctctaaatttcaccactgaaggcctaattgtttactcaattttgttttgtttttaactaccagaactttggtacccggtgtgsttactttaaaataatacttttataatgcaaaataatttttaatcaagtgatacaagggtgcccacattaatcatattttcatgaaacccaaacataccagatgcaccaacattatcctatcatggctcctgaagataacagtagagaaaaataggccaaatgaagcaaaaaacttttaaaagttgtaatgtgtg

SEQ ID NO: 382940 - DNA, 293 bp, Homo sapiens
atattcaaattttattctctaaatttcaccactgaaggcctaattgtttactcaattttgttttgtttttaactaccagaactttggtacccggtgtgcttactttaaaataatacttttataatgcaaaataatttttaatcaagtgatacaagggtgcccacattaatcatattttcatgaaacccaaacataccagatgcaccaacattaycctatcatggctcctgaagataacagtagagaaaaataggccaaatgaagcaaaaaacttttaaaagttgtaatgtgtg

SEQ ID NO: 382941 - DNA, 637 bp, Homo sapiens
acaattgctggatgcttctcttcagccatcttgtttctcctcctaccaaatgaataattaagaagaataaatggcacagccattatttacctaattctcaaatttatcttattattatcttatcttataagaaatttattgtgaccatagcctttcaggattgtttgactattctgtggtagtttttgttttctttacttaagtaaaaacttcattttcttcagaagrtaaaagactattcggccttcagttttgtagacaaccatgagactaaaaaactgttcttaaggaacataatgtctgcacaacaaaacctctagttatcaagcctcttcctgactggcagatatgaagttagaagatgttggtagtggtgctttgaagatcctccaaagaaacctgtttgcagcccatacatattgtcagattatttcctaagaactgaagaaatggattgtcaaataactgttgaagatccaggtccaaaagcctgtcacataagtattaatggaattttaaattaattaatgcattatatattaataatatatttttgattagataatgagagaatatatgacctttgcaagaaaattgaatttagtcttggatagctacaacagctgtaatagaaaca

SEQ ID NO: 382942 - DNA, 529 bp, Homo sapiens
tgttcttgctgcctctcctggattctggcagtgtattctgaatacagcaaccagagtaaaacttctaaattaggccagtcatgttatttagcttcttagaggcctctggtttatatctttgatctctcacaagaatctcactaaactccattaggatagagaacttgatgtgattkgtcactactatatctccagttcttgggagagagaatgcttgatgtgtaggaactatttcttcatatttttgaattaattatattctggaagcatgatgtctcaaagatagaaatttgagcaccctctgtcactcttcagaaggtgattggaagtgtggaaggagaccctagatcagtgactcagtgaagcaaagaatgtcaacttcatccttctagagaaatgtccaaaatgtatgctaactggagacattaagagacatatgacaccaacatgctgagtgatttatcagagcattggcaaggtacagaatttaccccatatgattcaaatgaagatggttctacgaaaggaa

SEQ ID NO: 382943 - DNA, 529 bp, Homo sapiens
tgttcttgctgcctctcctggattctggcagtgtattctgaatacagcaaccagagtaaaacttctaaattaggccagtcatgttatttagcttcttagaggcctctggtttatatctttgatctctcacaagaatctcactaaactccattaggatagagaacttgatgtgattggtcactactatatctccagttcttgggagagagaatgcttgatgtgtaggaactatttcttcatatttttgaattaatkatattctggaagcatgatgtctcaaagatagaaatttgagcaccctctgtcactcttcagaaggtgattggaagtgtggaaggagaccctagatcagtgactcagtgaagcaaagaatgtcaacttcatccttctagagaaatgtccaaaatgtatgctaactggagacattaagagacatatgacaccaacatgctgagtgatttatcagagcattggcaaggtacagaatttaccccatatgattcaaatgaagatggttctacgaaaggaa

SEQ ID NO: 382944 - DNA, 499 bp, Homo sapiens
aaaccattaatacccactagggctgaaggaacaaggagagaaaacagtattgtgtgaccagtgagatatggaactgtaggccacatggctcacacctgtaattctagcactttgggaggccgaggtatgtaaaacacttgaagtcaggagttcgagaccagcctggccaacatggtgatatcccatatctactaaaaatacaaaaattagcctggcatgggagcacatgctggtaatctcatgtatttgggaagctgaggcaggaggattgcttgaacctgggaggcagaggttggagtgagccgagactgtgccactgcactccagcctgggtgacaaagcacgactccacctaagaaaaaaaaaaaaaaagagagagagagaaggaaaaaaaaagaagatatggaactgtaaaagagggaccaaccagtaggaattctcatcagagagggatgcartttttaccacagagagggatgcagctctgagacaggggagg

SEQ ID NO: 382945 - DNA, 507 bp, Homo sapiens
ctaggtttgctaaatgttcaaaggttgtatactgcctgattttcagataagtaaggcctgggacacatggagttagatgctagaaagagtcagatcttatatgcatttctgcctgggtcctaggctccacgcctggtacataattaaaattgcttactaaccaggtttctcaacaaatgtaaaasttgctaagagttaacagtgcagcatgtatttgagatcactgaacagttttaaaggcaaggtgtataaaaacagtaaaatgtgttttttagtaaaggattataagaaaccatagaaatataaatattgcccagggatgaggaattatcttaaatttgataagataaagctacaggtttaagcatgttgtggaaagatggtcttttcataaactgagcattgaaataaaagcactgtaaggctgtcttaagccactaatctgccctttagcaaaatgggttataaaaaaggtttgtaaggatttcatctcatggtcaaattggt

SEQ ID NO: 382946 - DNA, 507 bp, Homo sapiens
ctaggtttgctaaatgttcaaaggttgtatactgcctgattttcagataagtaaggcctgggacacatggagttagatgctagaaagagtcagatcttatatgcatttctgcctgggtcctaggctccacgcctggtacataattaaaattgcttactaaccaggtttctcaacaaatgtaaaacttgctaagagttaacagtgcagcatgtatttgagatcactgaacagttttaaaggcaaggtgtataaaaacagtaaaatgtgttttttagtaaaggattataagaaaccatagaaatataaatattgcccagggatgaggaattatcttaaatttgataagataaagctacaggtttaagcatgttgtggaaagatggtcttttcataaaytgagcattgaaataaaagcactgtaaggctgtcttaagccactaatctgccctttagcaaaatgggttataaaaaaggtttgtaaggatttcatctcatggtcaaattggt

SEQ ID NO: 382947 - DNA, 522 bp, Homo sapiens
cataaactgagcattgaaataaaagcactgtaaggctgtcttaagccactaatctgccctttagcaaaatgggttataaaaarggtttgtaaggatttcatctcatggtcaaattggttaagattagatggaattgtctttagggtggcatttaatcaaattggggttaacattaataaattaacgcaaaggtaaaatttggctttgagcaggatttttatgtaatagtaaaggcttatgaaaggtttttgccttttgagtcatcattttggcaaaataagtaatttatgactatctggaattctatttcataacatcaactgttttaaacctctaacatttaacagacataccaaaatcaaacttcaagtttcgaaattgtctttcctgatgcgtggctttctagattgttcagggggcccctgaaacattcagaaaataggtgaacaggattatttgacatgtttaatcacattgggattgccaaaatgatgtccagtcttaacttatatttttgtgaat

SEQ ID NO: 382948 - DNA, 522 bp, Homo sapiens
cataaactgagcattgaaataaaagcactgtaaggctgtcttaagccactaatctgccctttagcaaaatgggttataaaaaaggtttgtaaggatttcatctcatggtcaaattggttaagattagatggaattktctttagggtggcatttaatcaaattggggttaacattaataaattaacgcaaaggtaaaatttggctttgagcaggatttttatgtaatagtaaaggcttatgaaaggtttttgccttttgagtcatcattttggcaaaataagtaatttatgactatctggaattctatttcataacatcaactgttttaaacctctaacatttaacagacataccaaaatcaaacttcaagtttcgaaattgtctttcctgatgcgtggctttctagattgttcagggggcccctgaaacattcagaaaataggtgaacaggattatttgacatgtttaatcacattgggattgccaaaatgatgtccagtcttaacttatatttttgtgaat

SEQ ID NO: 382949 - DNA, 522 bp, Homo sapiens
cataaactgagcattgaaataaaagcactgtaaggctgtcttaagccactaatctgccctttagcaaaatgggttataaaaaaggtttgtaaggatttcatctcatggtcaaattggttaagattagatggaattgtctttagggtggcatttaatcaaattggggttaacattaataaattaacgcaaaggtaaaatttggctttgagcaggatttttatgtaatagtaaaggcttatgaaaggtttttgccttttgagtcatcattttggcaaaataagtaatttatgactatctggaattctatttcataacatcaactgttttaaacctctaacatttaacagacataccaaaatcaaacttcaagtttcraaattgtctttcctgatgcgtggctttctagattgttcagggggcccctgaaacattcagaaaataggtgaacaggattatttgacatgtttaatcacattgggattgccaaaatgatgtccagtcttaacttatatttttgtgaat

SEQ ID NO: 382950 - DNA, 589 bp, Homo sapiens
atggcctcctgttccatcctcattgctgcaaaagacatgatttgttctttttaatgggtgaatagtattccattgtgtatatatgccacattttctttatccaatcatctcttgatagacacttaggttgattccatattgtttctattgtgaataatgctgtgataaacatatgcgagcaggcatctttgtggtataatgaatcttttcccttgggcagatagccagtagtgggattgctgaatcaaatggtaattctatttttagttctttgagaaatctccatactgttttccatagcagttgtactagtttaaaaatgtgtcacactttgatgctcaccctcttctcctaacattctccctcttaaacatcctctcatatctcctcttctaccaaatcagtcctttctcttgcttttctttgatgatgacagaaaccctctagcctcagggccttcgcatttgcttcgcccctgccccaacccacagaattacagatctatccctcttttcactcaggtgcacraataaatattatcataaacaggagtctatctctggctaccttatctaaagtaacatttccc

SEQ ID NO: 382951 - DNA, 608 bp, Homo sapiens
gcttaattattatccttacaggagggataatagtcaccaaaaaaaaaaaaagaaaagaaaaaagaagtatgaaagttttactatcactgaatctgctagaacttcttattgggtttggtaatgtcacaccctggctatatacaaaggwtataaaggaaaaaatattttacataagaaaggatcttgtatgataaatacttctcctaaagagaacagttggttgtttaaaagagggatgtttaggagaagtcagaagatttgagcatgttatagatggttgtggaagtcatgaaaagattacaaggatggtaaatacctgtcctaaaaagaatagttggtcgtttaaaaagaaggatgttaggacaagtttaagcacgtcttagatggtctgttgaagtaatgagggaattaatacttacaggaaagatttagccaaggttaacactaaagttactctagctacccaaatccaataccacttattcaaaaaagaatgttacttgtatattaatatttcagcagcacctggtggaggaaaaccagtatcacaacccattggaatgactgacagcaattaaactccaaatggagctttagactgaacaaca

SEQ ID NO: 382952 - DNA, 582 bp, Homo sapiens
actgaacaacacatggatgcatctttcttccaggaacccttagatcgaaccaagaggagccctagctgctgttccccacatgacgtcccttttcagcaggaagtagccagaaagagtcatcatccaacaccccttaacwgcagttagggttaccactccagagaggggaatgatagaggagttaagaagaaatcacttaggcagatagcaagggtgtaacagtctttggtaatgcttttctttttaatgaaacacagccccaaatcatttactaacaaagagtagcctgtaaagttgacctgcagacatagacaagcaagctgggagtttgcatcggtgaatgctggcagaaactaagcactagacattttcaagatggtggctccatcttctcttctctgttagctatgtgtactctaggagcagacaagatggtgctgatcaactggacagcccatttgcataataacattagggtggggagaccagacttccctgtgcattatgtaaacatcatacatgatcgaaccaatctataagccctgtgtaaatcagacaccgccacctcaaactggactacaa

SEQ ID NO: 382953 - DNA, 582 bp, Homo sapiens
actgaacaacacatggatgcatctttcttccaggaacccttagatcgaaccaagaggagccctagctgctgttccccacatgacgtcccttttcagcaggaagtagccagaaagagtcatcatccaacaccccttaacagcagttagggttaccactccagagaggggaatgatagaggagttaagaagaaatcacttaggcagatagcaagggtgtaacagtctttggtaatgcttttctttttaatgaaacacagccccaaatcatttactaacaaagagtagcctgtaaagttgacctgcagacatagacaagcaagctgggagtttgcatmggtgaatgctggcagaaactaagcactagacattttcaagatggtggctccatcttctcttctctgttagctatgtgtactctaggagcagacaagatggtgctgatcaactggacagcccatttgcataataacattagggtggggagaccagacttccctgtgcattatgtaaacatcatacatgatcgaaccaatctataagccctgtgtaaatcagacaccgccacctcaaactggactacaa

SEQ ID NO: 382954 - DNA, 582 bp, Homo sapiens
actgaacaacacatggatgcatctttcttccaggaacccttagatcgaaccaagaggagccctagctgctgttccccacatgacgtcccttttcagcaggaagtagccagaaagagtcatcatccaacaccccttaacagcagttagggttaccactccagagaggggaatgatagaggagttaagaagaaatcacttaggcagatagcaagggtgtaacagtctttggtaatgcttttctttttaatgaaacacagccccaaatcatttactaacaaagagtagcctgtaaagttgacctgcagacatagacaagcaagctgggagtttgcatcggtgaatgctggcagaaactaagcactagacattttcaagatggtggctccatcttctcttctctgttagctatgtgtactctaggagcagacaagatggtgctgatcaactggacagcccatttgcataataacattagggtggggagaccagacttccctgtgcattatgtaaacatcatacatgatcgaaccaatctataagccctgtgtaaatcagacacygccacctcaaactggactacaa

SEQ ID NO: 382955 - DNA, 598 bp, Homo sapiens
tatttgtaaaggcaaaaatggaaaaaaacaagtccaccatataattatcacttggtttcttaacatctatgctacttttaaacaataatgtcaatatgtgaactattttaaattggtttttctatgaaaacatttgctgcttattgacatacactgtgcaataatatgcctctcacatctattatagaattaaggtctgtgtgatcaaatgtaattcaacaaatgtttattgcaccttctaagtgttagtcactatgttakgtgcttgtgatgtagaagtttaaaaacgtatgtttactagtaaaaaacattagtttttataatattttagaagaaacagcactagaattgagaaaagtaacattaggatgaaattagaattttgaaggaggttctccaggcaaagaaatggacaaggcatttcaaattgtattattaactgcctattagagagaaggtaatatgtattgaaagttttgcaacaaacatatcacttacacaataactactccatttcatagatgaatttaatgaatttgatgaggtaactacatctagtagagggtaggccaaggctcaaatctaagtttgcctgttt

SEQ ID NO: 382956 - DNA, 604 bp, Homo sapiens
cctgcaatccagtcaagttgacacataaaattaaccatcataaagtgcaaaatttgttaaatgtctgagcttgcagatccttttagggcaacatcacagaccctgaactccaggacaaaataccctaatcaaacgaactgcccaactagtgttctgaaacacaggatgaatcatcagttcaatcatggatggctaaacctaaaaaattattccttaataataaccgtatgtctggaagaaatcaaccttctaaaaaagacaaagttgaggaactgcaaaaggaaattcaaactcctctgaaactcttaacaggcaagaaaaaatakgcagttggataaactgacattcaccaaacttaaaattttgatataaatattcatagggttcatcccttttcttctgtctagcactactagctagaagtcagaatttataaaggacagcccaatatttcccctcctgggcccacagcagacacaaaaaattcataatgaaacgttttttctttaatctgcaaaaagtctattattccttcttaataccatgttttgggcaactactcttaatcaggtcagatgcatgaaataaatttgcttgcaatact

SEQ ID NO: 382957 - DNA, 604 bp, Homo sapiens
cctgcaatccagtcaagttgacacataaaattaaccatcataaagtgcaaaatttgttaaatgtctgagcttgcagatccttttagggcaacatcacagaccctgaactccaggacaaaataccctaatcaaacgaactgcccaactagtgttctgaaacacaggatgaatcatcagttcaatcatggatggctaaacctaaaaaattattccttaataataaccgtatgtctggaagaaatcaaccttctaaaaaagacaaagttgaggaactgcaaaaggaaattcaaactcctctgaaactcttaacaggcaagaaaaaatatgcagttggataaactgacattcaccaaacttaaaattttgatataaatattcatagggttcatcccttttcttctgtctagcactactagctagaagtcagaatttataaaggacagcccaatatttcccctcctgggcccacagcagacacaaaaaattcataatgaaacgttttttctttaatytgcaaaaagtctattattccttcttaataccatgttttgggcaactactcttaatcaggtcagatgcatgaaataaatttgcttgcaatact

SEQ ID NO: 382958 - DNA, 487 bp, Homo sapiens
gcctaacagggcttcatataggtgtcgttaggaaagaaccactgaactctaagaccaacattatgtcttctgtcatgtgttaggcaattccttttgatgtctatgcagttttacaatttaaagtagtcatttaatcaaacataactttcatttgtgaagactgtattccagaacatttctccagacatctagaaatcatcacaaaatttatccaagtctctcttctatacattagcttcacaattagcagcaatcagataatctttttcagataatcattttcaccatttcttctacatagaaatgctcccarttctgaaatgtgaaagtctaggtctgactgtaatggctaattttctattgtacatatctatggaagcatattgctgctactcactcataacattccaaaacaaaaacaaagcttatggtcctctcctaaaaattcgccttcttctgtaatttccttataagttaatgatgtaca

SEQ ID NO: 382959 - DNA, 487 bp, Homo sapiens
gcctaacagggcttcatataggtgtcgttaggaaagaaccactgaactctaagaccaacattatgtcttctgtcatgtgttaggcaattccttttgatgtctatgcagttttacaatttaaagtagtcatttaatcaaacataactttcatttgtgaagactgtattccagaacatttctccagacatctagaaatcatcacaaaatttatccaagtctctcttctatacattagcttcacaattagcagcaatcagataatctttttcagataatcattttcaccatttcttctacatagaaatgctcccaattctgaaatgtgaaagtctaggtctgactgtaatggctaattttctattgtacatatctatggaagcataytgctgctactcactcataacattccaaaacaaaaacaaagcttatggtcctctcctaaaaattcgccttcttctgtaatttccttataagttaatgatgtaca

SEQ ID NO: 382960 - DNA, 487 bp, Homo sapiens
gcctaacagggcttcatataggtgtcgttaggaaagaaccactgaactctaagaccaacattatgtcttctgtcatgtgttaggcaattccttttgatgtctatgcagttttacaatttaaagtagtcatttaatcaaacataactttcatttgtgaagactgtattccagaacatttctccagacatctagaaatcatcacaaaatttatccaagtctctcttctatacattagcttcacaattagcagcaatcagataatctttttcagataatcattttcaccatttcttctacatagaaatgctcccaattctgaaatgtgaaagtctaggtctgactgtaatggctaattttctattgtacatatctatggaagcatattgctrctactcactcataacattccaaaacaaaaacaaagcttatggtcctctcctaaaaattcgccttcttctgtaatttccttataagttaatgatgtaca

SEQ ID NO: 382961 - DNA, 487 bp, Homo sapiens
gcctaacagggcttcatataggtgtcgttaggaaagaaccactgaactctaagaccaacattatgtcttctgtcatgtgttaggcaattccttttgatgtctatgcagttttacaatttaaagtagtcatttaatcaaacataactttcatttgtgaagactgtattccagaacatttctccagacatctagaaatcatcacaaaatttatccaagtctctcttctatacattagcttcacaattagcagcaatcagataatctttttcagataatcattttcaccatttcttctacatagaaatgctcccaattctgaaatgtgaaagtctaggtctgactgtaatggctaattttctattgtacatatctatggaagcatattgctgctactcactcataacattccaaaacaaaaacaaagcttatggtcctctcctaaaaattcgccttcttctgwaatttccttataagttaatgatgtaca

SEQ ID NO: 382962 - DNA, 600 bp, Homo sapiens
ctaaccaaaaagaacaaagccagatacatcacatcttctgacttcaaactatactacaatgctacagtaaccaaaacagcatggtacttgtacaaacacagggagatagaccaacggaacagaactcagaaataaagctgcacacctacaaccatctaatcttcaacaaaattgacaaaaataagcaatcaggtaaggamtgtctattcaatcaatgttgctggatcagctggctagccatatgcaaaagaatgaaactggactcctaccttttaccatattcaaaaattaaccaagattgtttaaagatttaaatgtaagacctcaaactataaggatcctagaaaaaagcctagaacaaaccgttctggacatcaaacttgggaaagaatttatgactaagtccttaaaaacaattgcaacaaaaacaaaaattgacaagtcagatctagttaaacaaaagagcttctgcacaacaaaagaaatgatcaaccaagtaaacagacagcctgtcagaatggaagaaaatatctacaaactatgcatctgacaaaagtctagtatccagaagctataaggaatgtaaacagttcaacaagc

SEQ ID NO: 382963 - DNA, 441 bp, Homo sapiens
gtctaacctggcgaaatgcaagggttcaagtttgagaattcataaaattcgtagaagttttatgacggtacatggagatcattcctgttttcctgtattctgtccagctaacatgcacacaccctttttattttcattgttagaaataaactaatttccaaaagaaaatatgaaatcaagaaagctattgctctcctattatgtgcaaatattagtttccaaagaaataaagttaattatgaaaacaattcaaaatgcacaataaaaggayaagatatggacctaagaaagtaatacaaataaggaagaagagcaattaaaggcaagtgcaaataaagtaatacaagagcagaaatgaagagcaattgtgttcaaaagaggcaacagatgagaaacaaaaaatggtcacttcctaattttacatctggaaagatattactg

SEQ ID NO: 382964 - DNA, 441 bp, Homo sapiens
gtctaacctggcgaaatgcaagggttcaagtttgagaattcataaaattcgtagaagttttatgacggtacatggagatcattcctgttttcctgtattctgtccagctaacatgcacacaccctttttattttcattgttagaaataaactaatttccaaaagaaaatatgaaatcaagaaagctattgctctcctattatgtgcaaatattagtttccaaagaaataaagttaattatgaaaacaattcaaaatgcacaataaaaggataagatatggacctragaaagtaatacaaataaggaagaagagcaattaaaggcaagtgcaaataaagtaatacaagagcagaaatgaagagcaattgtgttcaaaagaggcaacagatgagaaacaaaaaatggtcacttcctaattttacatctggaaagatattactg

SEQ ID NO: 382965 - DNA, 441 bp, Homo sapiens
gtctaacctggcgaaatgcaagggttcaagtttgagaattcataaaattcgtagaagttttatgacggtacatggagatcattcctgttttcctgtattctgtccagctaacatgcacacaccctttttattttcattgttagaaataaactaatttccaaaagaaaatatgaaatcaagaaagctattgctctcctattatgtgcaaatattagtttccaaagaaataaagttaattatgaaaacaattcaaaatgcacaataaaaggataagatatggacctaagaaagtaatacaaataaggaagaagagcaattaaaggcaagtgcaaataaagtaatacaagagcagaaatgaagagcaattgtgttcaaaagaggcracagatgagaaacaaaaaatggtcacttcctaattttacatctggaaagatattactg

SEQ ID NO: 382966 - DNA, 441 bp, Homo sapiens
gtctaacctggcgaaatgcaagggttcaagtttgagaattcataaaattcgtagaagttttatgacggtacatggagatcattcctgttttcctgtattctgtccagctaacatgcacacaccctttttattttcattgttagaaataaactaatttccaaaagaaaatatgaaatcaagaaagctattgctctcctattatgtgcaaatattagtttccaaagaaataaagttaattatgaaaacaattcaaaatgcacaataaaaggataagatatggacctaagaaagtaatacaaataaggaagaagagcaattaaaggcaagtgcaaataaagtaatacaagagcagaaatgaagagcaattgtgttcaaaagaggcaacagaygagaaacaaaaaatggtcacttcctaattttacatctggaaagatattactg

SEQ ID NO: 382967 - DNA, 533 bp, Homo sapiens
tgtataactttcacccagatttccttgttaacatttctcttgtttygaaaaagttaagagtaagtttcagttatgataccccattactccttgtattagtttcctgtggctgcattaacaaattacaacaaacttggtggatttaaacaacagaaatttattctttcatggttctggagaccagaaatccaaaattagcctcattggattgaaatcagggtattggcaggatgggggtctcctccagagagagatctgttccttgcttctttcaactaatgttggttatcaatgtttcttggcttgcctccatattaacccaatttctgcctccatcttaacactttcttttcctcttctgtctggattaagtatcgccttgcctctctctgataagagcacttgtggtggtattttagggcccacctgaacaatccaagataatctcccagtctcaaaatcattaacttactcacatcttcaaagaaccttatttgttatatgacaacacttaaacaggtgtaggtttcaga

SEQ ID NO: 382968 - DNA, 533 bp, Homo sapiens
tgtataactttcacccagatttccttgttaacatttctcttgttttgaaaaagttaagagtaagtttcagttatgataccccattactccttgtattagtttcctgtggctgcattaacaaattacaacaaacttggtggatttaaacaacagaaatttattctttcatggttctggagaccagaaatccaaaattagcctcattggattgaaatcagggtattggcaggatgggggtctcctccagagagagatctgttccttgcttctttcaactaatgttggttatcaatgtttcttggcttgcctccatattaacccaatttctgcctccatcttaacactttcttttcctcttctgtctggattaagtatcgccttgcctctctctgataagagcacttgtggtggtattttagggcccacctgaacaatccaagataatctcccagtctcaaaatcattaacttactcacatctkcaaagaaccttatttgttatatgacaacacttaaacaggtgtaggtttcaga

SEQ ID NO: 382969 - DNA, 519 bp, Homo sapiens
aggtgcatgatatatgataactttttattacagtcctttggctttaaaactttcacrttaatcatatgtccaggttcctaaacacctaaatctcaattatataggaatttttaggaatatttcttggatcatttaacttccttctttctttccataaaaatatgtatacacatttcttgcatcatttaacttccttctttatttgcataaaaataagtatatacaatgttttgttgtgaaagaaatatctgcattaaaggacactgtctagtaacaggagataaatataaacaaatgagtgtaatacagagtttagaatgccacatccattgcacatatggctgtagtgggaaaaatggcatcaaacaaaagaacatctttatgaaactgttaataaaataagaagaggtgcttcactgtcaagcttttcccactcctggccattttggttaatcactagtttaagccacaaccctgtcaatatgggcagtttgggctaagatctcttgatgaacactt

SEQ ID NO: 382970 - DNA, 519 bp, Homo sapiens
aggtgcatgatatatgataactttttattacagtcctttggctttaaaactttcacattaatcatatgtccaggttcctaaacacctaaatctcaattatataggaatttttaggaatatttcttggatcatttaacttccttctttctttccataaaaatatgtatacacatttcttgcatcatttaacttccttctttatttgcataaaaataagtatatacaatgttttgttgtgaaagaaatatctgcattaaagracactgtctagtaacaggagataaatataaacaaatgagtgtaatacagagtttagaatgccacatccattgcacatatggctgtagtgggaaaaatggcatcaaacaaaagaacatctttatgaaactgttaataaaataagaagaggtgcttcactgtcaagcttttcccactcctggccattttggttaatcactagtttaagccacaaccctgtcaatatgggcagtttgggctaagatctcttgatgaacactt

SEQ ID NO: 382971 - DNA, 519 bp, Homo sapiens
aggtgcatgatatatgataactttttattacagtcctttggctttaaaactttcacattaatcatatgtccaggttcctaaacacctaaatctcaattatataggaatttttaggaatatttcttggatcatttaacttccttctttctttccataaaaatatgtatacacatttcttgcatcatttaacttccttctttatttgcataaaaataagtatatacaatgttttgttgtgaaagaaatatctgcattaaaggacactgtctagtaacaggarataaatataaacaaatgagtgtaatacagagtttagaatgccacatccattgcacatatggctgtagtgggaaaaatggcatcaaacaaaagaacatctttatgaaactgttaataaaataagaagaggtgcttcactgtcaagcttttcccactcctggccattttggttaatcactagtttaagccacaaccctgtcaatatgggcagtttgggctaagatctcttgatgaacactt

SEQ ID NO: 382972 - DNA, 519 bp, Homo sapiens
aggtgcatgatatatgataactttttattacagtcctttggctttaaaactttcacattaatcatatgtccaggttcctaaacacctaaatctcaattatataggaatttttaggaatatttcttggatcatttaacttccttctttctttccataaaaatatgtatacacatttcttgcatcatttaacttccttctttatttgcataaaaataagtatatacaatgttttgttgtgaaagaaatatctgcattaaaggacactgtctagtaacaggagataaatataaacaaatgagtgtaatacagagtttagaatgycacatccattgcacatatggctgtagtgggaaaaatggcatcaaacaaaagaacatctttatgaaactgttaataaaataagaagaggtgcttcactgtcaagcttttcccactcctggccattttggttaatcactagtttaagccacaaccctgtcaatatgggcagtttgggctaagatctcttgatgaacactt

SEQ ID NO: 382973 - DNA, 529 bp, Homo sapiens
ttgactatggttattaaaatgagggaaaatatgaggcaatatttcttatctatacttatccatattttagcattccatacaaacatcatgttttccatatttgagaaaattatatgtgccatgaaaatacttgtcaactttgtccatcttgcaaacctactctcccctgtcttctacctaggaactgtaataggaggtattgctcctaaaaatctatgatcgsatgatatattttgaaaataatggtcataattcaccatattttcttacatgatggaaaaaatttgttagtctcttttctagtaatatgaataaaaatgatcatcttgggtttggtaagtagtgactgcatgcttactaccatccctgctaggagtttctttcctctgcaccacctctttcacatatagcccccagaatatatctttctaaacccagattcggtaactatctttccacaagcttaaaaatgactgctcaaagcataaaaataagaggctattttttgcctgttttaaaaagtagtatg

SEQ ID NO: 382974 - DNA, 593 bp, Homo sapiens
aaacttaagtttatgtttgtcaatgagacccccaaattcttcatttttaaaataggtaacaatatgaaattaaatgcatttattacttattagtgaagctctatatgtggcttctaattacatatgaatagtttggtcaagagaggcctcaaaaaaatgagaacaagttttcccagttcatctggactgaatcactatatgcataagtgatacatgttttattctcaaacacttgggttttgtttaagcacaccaagsattctagtttggctgtttcccaagtttgctttaaagtaagattattggatcagactggtgtttcaaagaaataaatcaaaatgtacacagtcaaatttgttaggcagaaaaaaactgtcatctctccaaacgttttttggtgcctatgtttctcaagctcaaagaaaataagacatgccaaaaaaggagcatctgtcttaatgtaagtaaagaaaagtgataaaaaataatttgtgctgggtgcagtgacctgtaataccaatgacttgggaggcggaagagaaaggattgcttgaggacaggagattgagaccaacctgagcagcatagtgaga

SEQ ID NO: 382975 - DNA, 290 bp, Homo sapiens
tacacagtcaaatttgttaggcagaaaaaaactgtcatctctccaaacgttttttggtgcctatgtttctcaagctcaaagaaaataagacatgccaaaaaaggagcatctgtcttaatgtaagtaaagaaaagtgataaaaaataatttgtgctgggtgcagtgacctgtaataccaatgacttgggaggcggaagagaaaggattgcttgaggacaggagattgagaccaacctgagmagcatagtgagacccagtgttcaccaaaattaaaaaaaaaaaattagttt

SEQ ID NO: 382976 - DNA, 643 bp, Homo sapiens
ccatgaaaaagcctcaaaaatatttcagcccactttcttcatatacagaaataacaaatggcaatataaataagaaataaggtgagatgtgacatcatccacaataaaataattctcagtttatgatatagagccggtacaaaggaaaaacaacaacaataacaactgtattttatctcttttagagccctgtgtggggctagaaattcacaagtctctgtctttgctcatgctagttcctcaacayggttttccagccctgcttttggtttcttctttgcctgtttacattgtacttatcaatgggacccagatcaaaggctagtgtctgtttgcaccttccttaatctctctaattaggatgattttttttttttactttggttctttcaatatgctttctctatctttgtgttcattttaattttgcatggttaggtgttaataaagtcatttctctcatttttatgcatattccttaaagtggtatatattttactcaattatgtagcataatcagaactcaatattacagtgactggcaaagtacataaaatatttgttgaataagtaagatgaagtgttttatttgtaatgcttttcagatagcatatagtatttgaaactcattggagaatcacta

SEQ ID NO: 382977 - DNA, 643 bp, Homo sapiens
ccatgaaaaagcctcaaaaatatttcagcccactttcttcatatacagaaataacaaatggcaatataaataagaaataaggtgagatgtgacatcatccacaataaaataattctcagtttatgatatagagccggtacaaaggaaaaacaacaacaataacaactgtattttatctcttttagagccctgtgtggggctagaaattcacaagtctctgtctttgctcatgctagttcctcaacatggttttccagccctgcttttggtttcttctttgcctgtttacattgtacttatcaatgggacccagatcaaaggctagtgtctgtttgcaccttccttaatctctctaattaggatgattttttttttttactttggttctttcaatatgctttctctatctttgtgttcattttaattttgcatggttaggtgttaataaagtcatttctctcatttttatgcatattccttaaagtggtatatattttactcaattrtgtagcataatcagaactcaatattacagtgactggcaaagtacataaaatatttgttgaataagtaagatgaagtgttttatttgtaatgcttttcagatagcatatagtatttgaaactcattggagaatcacta

SEQ ID NO: 382978 - DNA, 643 bp, Homo sapiens
ccatgaaaaagcctcaaaaatatttcagcccactttcttcatatacagaaataacaaatggcaatataaataagaaataaggtgagatgtgacatcatccacaataaaataattctcagtttatgatatagagccggtacaaaggaaaaacaacaacaataacaactgtattttatctcttttagagccctgtgtggggctagaaattcacaagtctctgtctttgctcatgctagttcctcaacatggttttccagccctgcttttggtttcttctttgcctgtttacattgtacttatcaatgggacccagatcaaaggctagtgtctgtttgcaccttccttaatctctctaattaggatgattttttttttttactttggttctttcaatatgctttctctatctttgtgttcattttaattttgcatggttaggtgttaataaagtcatttctctcatttttatgcatattccttaaagtggtatatattttactcaattatgtagcataatcagaactcaatattacagtgactggcaaagtacataaaatatttgttgaatragtaagatgaagtgttttatttgtaatgcttttcagatagcatatagtatttgaaactcattggagaatcacta

SEQ ID NO: 382979 - DNA, 523 bp, Homo sapiens
agataatattagtttaagatgttgtgtgtgtttgtgtaacttgaataagcttctgtaacaaatagatcataggaggtatastggctccaagataaatggatgcttttttctcacctacctaatagttcaacgtgggtggctctgcttcacatagcataacttacgaagctctgcttcttccatcctatggcccctgcttcccctagattttcactgaaatctgcatccatcaggcaagagtgaagaggtagtgaaggagatatagcttcttcttaaacgtctttgtctggaaatggcacatatcacttctacttgcattccagtggttaaaacatcatcatttggcctcaagtagctaaaaaggaagctgaaatggagccttactctgtacataggaagaagaaacattgatttatcttggacagctagcagcaacattaaactgaaagtaattaaactactacattagtcaagctttgggtaggcatgcccagtggggacagagaacagcatgtcagggccc

SEQ ID NO: 382980 - DNA, 523 bp, Homo sapiens
agataatattagtttaagatgttgtgtgtgtttgtgtaacttgaataagcttctgtaacaaatagatcataggaggtatagtggctccaagataaatggatgcttttttctcacctacctaatagttcaacgtgggtggctctgcttcacatagmataacttacgaagctctgcttcttccatcctatggcccctgcttcccctagattttcactgaaatctgcatccatcaggcaagagtgaagaggtagtgaaggagatatagcttcttcttaaacgtctttgtctggaaatggcacatatcacttctacttgcattccagtggttaaaacatcatcatttggcctcaagtagctaaaaaggaagctgaaatggagccttactctgtacataggaagaagaaacattgatttatcttggacagctagcagcaacattaaactgaaagtaattaaactactacattagtcaagctttgggtaggcatgcccagtggggacagagaacagcatgtcagggccc

SEQ ID NO: 382981 - DNA, 523 bp, Homo sapiens
agataatattagtttaagatgttgtgtgtgtttgtgtaacttgaataagcttctgtaacaaatagatcataggaggtatagtggctccaagataaatggatgcttttttctcacctacctaatagttcaacgtgggtggctctgcttcacatagcataacttacgaagctctgcttcttccatcctatggcccctgcttcccctagattttcactgaaatctgcatccatcaggcaagagtgaagaggtagtgaaggagatatagcttcttcttaaacgtctttgtctggaaatggcacatatcacttctacttgcattycagtggttaaaacatcatcatttggcctcaagtagctaaaaaggaagctgaaatggagccttactctgtacataggaagaagaaacattgatttatcttggacagctagcagcaacattaaactgaaagtaattaaactactacattagtcaagctttgggtaggcatgcccagtggggacagagaacagcatgtcagggccc

SEQ ID NO: 382982 - DNA, 523 bp, Homo sapiens
agataatattagtttaagatgttgtgtgtgtttgtgtaacttgaataagcttctgtaacaaatagatcataggaggtatagtggctccaagataaatggatgcttttttctcacctacctaatagttcaacgtgggtggctctgcttcacatagcataacttacgaagctctgcttcttccatcctatggcccctgcttcccctagattttcactgaaatctgcatccatcaggcaagagtgaagaggtagtgaaggagatatagcttcttcttaaacgtctttgtctggaaatggcacatatcacttctacttgcattccagtggttaaaacatcatcatttggcctcaagtagctaaaaaggaagctgaaatggagccttackctgtacataggaagaagaaacattgatttatcttggacagctagcagcaacattaaactgaaagtaattaaactactacattagtcaagctttgggtaggcatgcccagtggggacagagaacagcatgtcagggccc

SEQ ID NO: 382983 - DNA, 533 bp, Homo sapiens
tccacccatgttgctgtgaagggcacgatcattttatattttatggttgcatagtattccatggtgcatatgtaccactttttttaaaatccagtttattgttaatgggcatttaggttgattccatatctttttcactgtgaatagtgcataaatagattttttttayctgactctctttagaggacatacatgtaattacaccgcagttatgaggagcacatatagtgtcctattatttgtttctagatactagggagccagagcttcctggggaagagtacctgactccagggctgaggcagggaaaatacaagatgatctggtaacatcctgttgtgccagaggtactctaggggcatgtgcaaaagacataagaaccagttgaaggagcttccactagtcaagtctgggacaaattcaaataagtgataattgacacggcaggagcatcgccatcttggacaagcactgccatcttaaagttccccttgatcaaaaactgcctaaatccaaagggcatcagcctaatg

SEQ ID NO: 382984 - DNA, 522 bp, Homo sapiens
ccctcccggcgttatgaaatcatgatagtgagactagttagaccctccatgacttgagaggctactgttgttttaaaagactggtttctctcaggataaactaattactcatcacaggagaattccaaggccccaattctcctttcacctgcctgtgactttcccattattcattaggtttagattatttaagagttaatagcagcatcaggaatgaaactgcattgctgaacaagaagatgaaaaattatggctctttgtgaaatgaatttttcttaaaactaggtctgttttaaagacggtaggaggtgtatgaaggattttgatacactctatagtatttatgtcttttctcacacagtaaagagtgcaatcttaaagaaatacaaattgaagttaggaatcctgcgttcaatctcggctcttccactcactgaatgtgtgtctttgacaagttycctactctgagcatcagttacctcattagcaaaatggagataatagatacctaatagagaatgg

SEQ ID NO: 382985 - DNA, 493 bp, Homo sapiens
tgataggtgcagcaaaccaccatggcacatgtatatctgtgtaacaaactggcatggcacatgtatcccagaacttaaagtaaaatgaatgatgtttttaatgcattggtgaatttggtttgctagtattttgttgaggatttttgcctctatgtttatcagagatattgtcctgcatttttgtttttttgatgtgtcttcgtcctgttttggtatcaggatattactggcctcatagaattagtagtacttccaatgagtttggaaatattccctcctcctctatatattggaacactttgagtagtatttgtattagttcctcataagtgtttggtagaatttagcaataaatccagtgggccctgaggtttttttttttttggtttttttttttttttggctgggaraatttttcttatgactttaatcttcttacttgttattggtctatttaggttttagatttcttcatcatttgatactggtaatt

SEQ ID NO: 382986 - DNA, 625 bp, Homo sapiens
aatacatgtagtttatatagtatagatgttgccatataaatattttataaagtattatattatatataatattcagtatattatatacttataatcatgagaatttatggtttggtcttaattgaaaaactgagatccttgcttaagatttagtcttgtcgcaggtgaatgtgtaaacttatgaaaaacatttacagttttatcctatacaaccatggggaagttattgataaggawaaaaagttcaaagtcttttgcaaaatttggggactaaggacaaatgttagtctttaaaaattaatgaaaaggggattaatattgacagtcagctatatgccaggacacaaggacctttatatatgtgatctaatttagcactcacaataaaatattgatgtagctattatgggctccattcaatacatagatcagaaaacagagcagttaggtccatatttaccttgagttacactagcagtaagtggagggctgaactcattcacagatctaatagcataggttctgctccctctacttgtctaaggctgactcttgggagtctcagaattctaattacatccgcatttctctttcccatttcagagtgacaattctccaattttag

SEQ ID NO: 382987 - DNA, 625 bp, Homo sapiens
aatacatgtagtttatatagtatagatgttgccatataaatattttataaagtattatattatatataatattcagtatattatatacttataatcatgagaatttatggtttggtcttaattgaaaaactgagatccttgcttaagatttagtcttgtcgcaggtgaatgtgtaaacttatgaaaaacatttacagttttatcctatacaaccatggggaagttattgataaggaaaaaaagttcaaagtcttttgcaaaatttggggactaaggacaaatgttagtctttaaaaattaatgaaaaggggattaatattgacagtcagctatatgccaggacacaaggacctttatatatgtgatctaatttagcactcacaataaaatattgatgtagctattatgggctccattcmatacatagatcagaaaacagagcagttaggtccatatttaccttgagttacactagcagtaagtggagggctgaactcattcacagatctaatagcataggttctgctccctctacttgtctaaggctgactcttgggagtctcagaattctaattacatccgcatttctctttcccatttcagagtgacaattctccaattttag

SEQ ID NO: 382988 - DNA, 493 bp, Homo sapiens
tgataggtgcagcaaaccaccatggcacatgtatatctgtgtaacaaactggcatggcacatgtatcccagaacttaaagtaaaatgaatgatgtttttaatgcattggtgaatttggtttgctagtattttgttgaggatttttgcctctatgtttatcagagatattgtcctgcatttttgtttttttgatgtgtcttcgtcctgttttggtatcaggatattactggcctcatagaattagtagtacttccaatgagtttggaaatattccctcctcctctatatattggaacactttgagtagtatttgtattagttcctcataagtgtttggtagaatttagcaataaatccagtgggccctgaggtttttttttttttggtttttttttttttttggctgggagaatttttcttatgactttaatcttcttacttrttattggtctatttaggttttagatttcttcatcatttgatactggtaatt

SEQ ID NO: 382989 - DNA, 444 bp, Homo sapiens
agttaactcaagtggtcagaaaaagatcaataaaacaacatattgaacaaatacaatatacctagcagatctgtatattataatccaactacatcaataatagcattttctataggtrttataaacacaccaattacaaaattgttagactgaataaaaatctaaggcatatagctatattctatctacaagaaacgtacttgttttattcagttcaggctgcttttacaaataccttagacagggtggcttataaactttagaaatttatttttcacagttctggaggctggaagtataagatcagtttgccagtgtgttgatttctggtgagaggcctcttgcaaggttgcagacttcccattctatcctcacatggaggaaagagggctagctcactctctggccttttcttctaagggcactaattccattcatgaatta

SEQ ID NO: 382990 - DNA, 444 bp, Homo sapiens
agttaactcaagtggtcagaaaaagatcaataaaacaacatattgaacaaatacaatatacctagcagatctgtatattataatccaactacatcaataatagcattttctataggtattataaacacaccaattacaaaattgttagactgaataaaaatctaaggcatatagytatattctatctacaagaaacgtacttgttttattcagttcaggctgcttttacaaataccttagacagggtggcttataaactttagaaatttatttttcacagttctggaggctggaagtataagatcagtttgccagtgtgttgatttctggtgagaggcctcttgcaaggttgcagacttcccattctatcctcacatggaggaaagagggctagctcactctctggccttttcttctaagggcactaattccattcatgaatta

SEQ ID NO: 382991 - DNA, 613 bp, Homo sapiens
agctataatcaaaaaaaaaaaataagaaataatcattgttagccagggtgtggagaataggtaactcatgtacactgtttctgagaatgtaaattggtacaaccattttggaaaatagtttggagcttccttaaaattttaaaatataactactataaaaycagcaatacctctgctaggtatctatgtaaaggaaatgaagtcagcaccttgtagaaagatctacattcccatgtttattgcagcatcatgcacagtaacaaaggtatgacagcaactcaagtgtccatcagtggataaataaattgttattttatatatacatccaaatgaatactattcagccttgaaaaagaaggcaatcctgccatttgcaacaatataatgaatctgaaagacattatactaagtcaaataagccagacacaggaaaatagatactgcatgatctcacttacatgtcgattgtaagaaatagtcaaatatatggaaacagaaagtagaacactagttaccagggacacagaggaagagaaaatggggagatgtaagtcaaaaatgtacaaacttgcagctacgtaaaatgaataagtttagatatctaatattataa

SEQ ID NO: 382992 - DNA, 590 bp, Homo sapiens
tgaccagctattatatgcacaacactatgttaggtgcctcctgcaccttttcccatttgattccctaaactctcaatgaatrcattacttctgtgtcttacagataaggtcacaagcagcagtctgcagagcccatattcaaaaccaaatccttctaaaatcaaaaaccaggctgactcccctggatgctattctaaagtcaaatttcaaattatactttgttttctacagtgtgagttgtgaaaagtagtacaaattcactgtgattaccactagcatgttgaaagataacattttatgggtaaaataagtacttattgctttaaaatgatagcctcagatatcatccaggcattaagtttatatctacagagagtgttcatacaaaacttacgtatatatctactgatggtgttcatataaaacttgacctttccatccattcagtctttatctcttcacatatacctttgtatttgcttaaagactactttgtctatttagcaactcaacttttggttcattgaagctagaattttcacctgtatctctacaaatctatattaattttatttcaaaatgactgtttt

SEQ ID NO: 382993 - DNA, 467 bp, Homo sapiens
taaaagataaattcattataacttaaggtgaggctgcaattatttctccttcaagacctttatatttttatatattagctattattattaagagataggcaatatttaaaaatatataaattgtgagggaggcagaagaagatggcaaatagraagctacaaagatcttccctctcccactgcaaggaagggatgaaaaatatatttcacacaaatagaaactagaataagagattttaataaacagacctgaatcactgacaccaccccttcctcaccctggcagtgacagagagcatctctgggaatttagagagggaaaacacagcaattgtgaggtattgaataaaaaacaaggaatcaaagcatattactagaaaaaatcacttaatcacaaagaacaaatgtaaaagaagaaatgaaaaaaggatcaacaaatcaactggaaaacaagtaacaaaatgaca

SEQ ID NO: 382994 - DNA, 467 bp, Homo sapiens
taaaagataaattcattataacttaaggtgaggctgcaattatttctccttcaagacctttatatttttatatattagctattattattaagagataggcaatatttaaaaatatataaattgtgagggaggcagaagaagatggcaaatagaaagctacaaagatcttccctctcccactgcaaggaagggatgaaaaatatatttcacacaaatagaaactagaataagagattttaataaacagacctgaatcactgacaccaccccttcctcaccctggcagtgacagagagcatctctgggaatttagagagggaaaacacagcaattgtgaggyattgaataaaaaacaaggaatcaaagcatattactagaaaaaatcacttaatcacaaagaacaaatgtaaaagaagaaatgaaaaaaggatcaacaaatcaactggaaaacaagtaacaaaatgaca

SEQ ID NO: 382995 - DNA, 467 bp, Homo sapiens
taaaagataaattcattataacttaaggtgaggctgcaattatttctccttcaagacctttatatttttatatattagctattattattaagagataggcaatatttaaaaatatataaattgtgagggaggcagaagaagatggcaaatagaaagctacaaagatcttccctctcccactgcaaggaagggatgaaaaatatatttcacacaaatagaaactagaataagagattttaataaacagacctgaatcactgacaccaccccttcctcaccctggcagtgacagagagcatctctgggaatttagagagggaaaacacagcaattgtgaggtattgaataaaaaacaaggaatcaaagcatattactagaaaaaatcacttaatcacaaagaamaaatgtaaaagaagaaatgaaaaaaggatcaacaaatcaactggaaaacaagtaacaaaatgaca

SEQ ID NO: 382996 - DNA, 557 bp, Homo sapiens
aagatacacgaagactgaaagtgaagtaaggaatgaaaaagatattccacacaaatggaaactaaaataaagcaggagtagctatacttacattaggcaaaatagagcttaagccaaaaactgtagaaagataaagacactcacaatgataaaagagtcaatagagcaacaggatataacaaatataaatatacatgcactcaacataggagtgcctaaatatataaagaaaacattaatagacttaaagaaagagattgcactgcagtacaataatagcggtgggtttcaacaccccacttttagcaatagacagatcatccagatatagtgaaatatagtttatttacatagttaagccacactgtagaccaaataaacctaataaatgtttacagaaatattcacgtaacagcctcagaatatgtatttttctcagcagcacatggaacattctccaggatagaccatatgtgaagtaaaaaaaatastcttatcacatttaaaaatgttaaaattatatcagataacttttctaaccaaaatataataaaact

SEQ ID NO: 382997 - DNA, 556 bp, Homo sapiens
ggcggtggctgctgaatgtttgggtggctgtggcaatttcttaaaataacaatgaagtctgccacatgaattgactgttttttttttttcatgaaagatttcttggtagcatataatgctgttggataacattgygcccacagtcgaactgcttttaaaattggagtcaatacactaaaaccctgctgctgctttattaactagatttaggtaattttctaaatcattctcatttcatcaaggctcacagcatctttgctgtagcagattccatctcaaaaaagcacattctttgcttatctattagaagcaacttctcatccactcaagttttaccataagattgtataaattcacattgtgaggctcaccttctaactctggttctcttactcttctaccacatctgtagttaattcttctacttgaagtcttgaacccctcaaaatcatccatgagggttggaatcaactttttccaaattcctgttaatattgatattctgacccactcccatgaatcactaatgttattaatggtaattaaaatgttgaat

SEQ ID NO: 382998 - DNA, 629 bp, Homo sapiens
ttaaagtaaaaataaaaaatattgtctctatgggggaagatcattttaaagcatgaactaatcctgcaatattcttcaatstaatagagagaaattatcttcattctttctgatatgatcctgttagttttccagcaataaatgaaatatatttatatgtccattttcattatagtaagttggtgaaaaaacaggaacatactttcttctgtgattttatagtgatgtctcaatctccattaccaatcattacaccatttcaagacaacctcatttttttcttatcttcatccccgttgtttagaactaagttcaagatcttgtcatctatgtcctggaactgttgagataaacttacagcttgttttctcacttaatgcttcagcactctaaagtgtatttcatcccacattgcttttggtaaaatggaaatacatccacagtcctcctcttctgaatgtttatgagatctctttgtcatgttctttagtctcttctccatccgccttctgctttagccatactgtgctgcttacaattctcttgaatatattcttctgaggatgtgttttttcatcggaagcatccattcctttcttagtgatgtcacctggaaaattcctactcat

SEQ ID NO: 382999 - DNA, 629 bp, Homo sapiens
ttaaagtaaaaataaaaaatattgtctctatgggggaagatcattttaaagcatgaactaatcctgcaatattcttcaatgtaatagagagaaattatcttcattctttctgatatgatcctgttagttttccagcaataaatgaaatwtatttatatgtccattttcattatagtaagttggtgaaaaaacaggaacatactttcttctgtgattttatagtgatgtctcaatctccattaccaatcattacaccatttcaagacaacctcatttttttcttatcttcatccccgttgtttagaactaagttcaagatcttgtcatctatgtcctggaactgttgagataaacttacagcttgttttctcacttaatgcttcagcactctaaagtgtatttcatcccacattgcttttggtaaaatggaaatacatccacagtcctcctcttctgaatgtttatgagatctctttgtcatgttctttagtctcttctccatccgccttctgctttagccatactgtgctgcttacaattctcttgaatatattcttctgaggatgtgttttttcatcggaagcatccattcctttcttagtgatgtcacctggaaaattcctactcat

SEQ ID NO: 383000 - DNA, 629 bp, Homo sapiens
ttaaagtaaaaataaaaaatattgtctctatgggggaagatcattttaaagcatgaactaatcctgcaatattcttcaatgtaatagagagaaattatcttcattctttctgatatgatcctgttagttttccagcaataaatgaaatatatttatatgtccattttcattatagtaagttggtgaaaaaacaggaacatactttcttctgtgattttatagtgatgtctcaatctccattaccaatcattacaccatttcaagacaacctcatttttttcttatcttcatccccgttgtttagaactaagttcaagatcttgtcatctatgtcctggaactgttgagataaacttacagcttgttttctcacttaatgcttcagcactctaaagtgtatttcatcccacattgcttttggtaaaatggaaatacatccacagtsctcctcttctgaatgtttatgagatctctttgtcatgttctttagtctcttctccatccgccttctgctttagccatactgtgctgcttacaattctcttgaatatattcttctgaggatgtgttttttcatcggaagcatccattcctttcttagtgatgtcacctggaaaattcctactcat

SEQ ID NO: 383001 - DNA, 513 bp, Homo sapiens
gagtttctgatgctgttttgtgaagctgatctgacgttagcaagacaaaatacaaatgctgtttcacaattgaatttttaaaaaaataatttgtaaccagcattatttaagaacctatcttataggaactttaaagagattcaaatggtcttcaactcatggtacattcagactactaactaataacaaggctttcagataaatatctattgtgcaaagtgtgagatcaagatcagaattgctaagaaaatactgaacaaggagtgatgaattctgatgagagaaaagactttctgtagtgggaggcatttgatctagatgctgaaaaatgttaaggtttagtaggtggacaagtgggaagrgcactctgaatgaacagaactccacacacaatggaaaagaagcaagaaagttcaggatacatttgggacaaggacggaacaaggtatgatcagagtgtagatgaaatgtgaagaaattagatagaaaaaaagcattttaagctaacgaaga

SEQ ID NO: 383002 - DNA, 339 bp, Homo sapiens
gggagcacacaaatgttaagcaaaaacactttagcattctctctagaagaacactacaaaatgtcaggtatctctgtattatttttggagggctcatgaggtcaatgamaagcttttgaattcttaactaattttctttaagatatgcagcatttccatcttaggtggaacagttttgatactgttgatgtagaaggcaccacatgactggtattgtgctttcccaactcttccactgggaagaaacagcattttagctaacctatggacttaacattgaataaaactgctaagaaatgaccagaatatgaacctaattttaatgaaaggagaacagca

SEQ ID NO: 383003 - DNA, 339 bp, Homo sapiens
gggagcacacaaatgttaagcaaaaacactttagcattctctctagaagaacactacaaaatgtcaggtatctctgtattatttttggagggctcatgaggtcaatgaaaagcttttgaattcttaactaattttctttaagatatgcagcatttccatcttaggtggaacagtyttgatactgttgatgtagaaggcaccacatgactggtattgtgctttcccaactcttccactgggaagaaacagcattttagctaacctatggacttaacattgaataaaactgctaagaaatgaccagaatatgaacctaattttaatgaaaggagaacagca

SEQ ID NO: 383004 - DNA, 339 bp, Homo sapiens
gggagcacacaaatgttaagcaaaaacactttagcattctctctagaagaacactacaaaatgtcaggtatctctgtattatttttggagggctcatgaggtcaatgaaaagcttttgaattcttaactaattttctttaagatatgcagcatttccatcttaggtggaacagttttgatactgttgatgtagaaggcaccacatgactggtattgtgctttcccaactcttccactgggaagaaacagcattttagctaacctatggacttaacattgaatraaactgctaagaaatgaccagaatatgaacctaattttaatgaaaggagaacagca

SEQ ID NO: 383005 - DNA, 484 bp, Homo sapiens
tctcttacaattgcctagatgagctggttccagcacaacactggactatgccaataaaatatcctaaaattcttctagtcaatgatctctgtcatattttcagttactccatgactttgaagggaccactgacttaactggctataatagagactccctttttataaagatccagtacaataaaggtgaacgtttaatgatgtagaatggaaaataytgtcatagctgttttgctgtactaggaaaaggtctgttcataaagtataatttaaatgtgaccctgcagaaggagttgactttggcattctagatggagtaaacagagcataggcaggttaaagtgggtagtatgtggtcaaaatccagtctgcctacagttgaggcccctatatgatgggagggcaagtaggctaagattacaagggggaggcccaaacttgatacataaagaggtgcaatagaagaggtttctgaaggcaggtaa

SEQ ID NO: 383006 - DNA, 484 bp, Homo sapiens
tctcttacaattgcctagatgagctggttccagcacaacactggactatgccaataaaatatcctaaaattcttctagtcaatgatctctgtcatattttcagttactccatgactttgaagggaccactgacttaactggctataatagagactccctttttataaagatccagtacaataaaggtgaacgtttaatgatgtagaatggaaaatacwgtcatagctgttttgctgtactaggaaaaggtctgttcataaagtataatttaaatgtgaccctgcagaaggagttgactttggcattctagatggagtaaacagagcataggcaggttaaagtgggtagtatgtggtcaaaatccagtctgcctacagttgaggcccctatatgatgggagggcaagtaggctaagattacaagggggaggcccaaacttgatacataaagaggtgcaatagaagaggtttctgaaggcaggtaa

SEQ ID NO: 383007 - DNA, 573 bp, Homo sapiens
ctaactctcaataatgttagatgtcattgatacattttttcaacatttttaaattttatttttaactgacaataataattgtacgtattcatggagtacatagtggtgttttcatacatataatgtayagtggtcacatcacactaatttagcatatccaccatccaaacatttagcatttctttgtattgagtgggagtattcaatctattattattattattttcaaacaacctttcttccctttaatcgtttatttaattctgagcaaaagctctggcgtaagctctctgttctttctcttcactcagtttcttggctttacctctcatttttacacgtacacccatatcccccactgcccagacctctcatgagagctccattattaggttaatttttgagtccaaaatgtcgttttgtagattccttgtggtaatccatgtgtccacaatggaacacaagattccctttcaaacatcagcttctactgcctggctatcctatctgttagttggtctatcagactacaaactatgaaatcattcttaattctttctttttatgcattac

SEQ ID NO: 383008 - DNA, 594 bp, Homo sapiens
aagacttaggactttgaacctttaagttgctgctggaccaagttaagactttggagctatgcagatggaatatatgtctttgtatgtgggaaggacatgagtttttgggggctaggacagaatgctatggtttgagtgtcctctcaaaaactcatattgaaacttcatccccaatgtggcagtattgaaaggtggggcttataaaaggtgatcaggtcatgaaggctaagcctcacaaatggagtaatccattcatggattaataggttaatggattaatgagttatcatgggaggagaactggcggctttataagaaaaagaagaaagacctgagtgagcacattagcatgctaagtccccttgccatgtgatgccaccttgtgatgccataaatagtccccaccagcaagaaggccctcactagatgcagcacctcatccttagactcctgagcctgcayaactgtaagaaatatatttctttgctttataaattacacagtttcgggtattctgttgtaagaacagaaaatgggctaagacaaaataaataaacaaaatgtggtatatacattcaaggaaatacaattcaa

SEQ ID NO: 383009 - DNA, 567 bp, Homo sapiens
ttcctaatttctctgggcttcaatttctcatctgcaaaataagggccctagctcaaagcatctctaatttgtcttatagctctgatagtctatggacttactatgtcggacatattccttccttggcagtcctctcagttctcagggctcctgaaccccagaaggaatcctcccattgagctggtcctctgtcmagatgggcatgaggaaagcaatagagataacaatttttctcaaccctacaccaagaatttcagcctctggaactataattcagtgcttgtagttctcttcctggcttgaacatcaagacaagcaaacaaaagctccagtgggagaggcccaggatccaggaatttccctgaggagtttatttataacacataagatacatctaacaagttcattatgtggcatgtggcaatgtgtgcaaagaaagaactatcacagagaaatctttgccaagacagaagcaaagcccatgagcaaacccagaattccccatctgcagcaagtataagaggcagtaagagaggcaggtgaggcctccttagattgaaacatctt

SEQ ID NO: 383010 - DNA, 589 bp, Homo sapiens
gcaataatagtcacaatgccttatttttatgtatcgattttgctgcattgcaaaaaatatatatattttctgggtatctactaagctccaagcaatgyaagatagaaatgcataaaatacagatccagcatcgagacagatgctcatactgtagagagggaggacaacataacaaagtgcttgctgcaaagccagcagtgataactccacagtagctaatatttatacagtgtgtgtagtttacaaagcacttgttcctgcctctcctctttgtacaatgattagtatatcaaatactgcaacctccatttttcagatgaggaaaaagggtctcagagtctgaaaaacaatgagtaagccacatgttctaggtcctacagtaggggtgagacaaaagaaaaccaaacttcatttttgtatacattgtcctattgactaatacatctcctaggcaagtattattacctctatcttactgaagagagatctgaggcccagagagggcatgtgacttgcccaagttcacacagccaaggtcttcacagccaagactgccctagaacacgggcctcctgattctccattcaac

SEQ ID NO: 383011 - DNA, 589 bp, Homo sapiens
gcaataatagtcacaatgccttatttttatgtatcgattttgctgcattgcaaaaaatatatatattttctgggtatctactaagctccaagcaatgtaagatagaaatgcataaaatacagatccagcatcgagacagatgctcatactgtagagagggaggacaacataacaaagtgcttgctgcaaagccagcagtgataactccacagtagctaatatttatacagtgtgtgtagtttacaaagcacttgttcctgcctctcctctttgtacaatgattagtatatcaaatactgcaacctccatttttcagatgaggaaaaagggtctcagagtctgaaaaacaatgagtaagccacatgttctaggtcctacagtaggggtgagacaaaagaaaaccaaacttcatttttgtatacattgtcctattgactaatacatctcctaggcaagtattattacctctatcttactgawgagagatctgaggcccagagagggcatgtgacttgcccaagttcacacagccaaggtcttcacagccaagactgccctagaacacgggcctcctgattctccattcaac

SEQ ID NO: 383012 - DNA, 559 bp, Homo sapiens
ccctcaagaaagctaaaattccttcttggtggggaaggtcttgctttttaaatgcacaatacacagatggacatacagtacataaacagatatatagtctatctgtgatattaaaatttcatggtgggggccttaggaaaattatatttaaaaaagctcctggtgaagggtgaaaatgaagaaaatgagtgagaaaccttgctctgccctaagcattcttggccctgactgtactgaacacatagtagatactcaagaagaacttaaccgaataaaaaaatagaaaatatacactctttaagaaaaatcctgcacgtgcctgttcttttggttttggattgctttatactgatgtgttatatagggttttattcagaagcaaatagcaggttttgaaggaggaagaaaaaaacttttgtctccagacttgygctcccccagtgatccctcactcagcttccaagtgagatttcaagcacagatgcttatcctggaccacactaatctattgactgttccctgaaacattccaagttctaccacacttctgactgtttgc

SEQ ID NO: 383013 - DNA, 654 bp, Homo sapiens
ttttgtgactctcagtagcaacaccattgctaagacctttctgcactagtgttttctggaaagaatggtactgttttaccttgcagtagtaaaccaagaggaggaggagcatcccaggcaatggggagtagcatatgagaaagcrgagatatgaaaggacaccaggcatttgtggaaaactgaatgatatagtccctagagagacagacagtttgggagaaagaacatcacaccatttgggaagatctctatgtgcaggattataaaaagccttgaatacacagcttgcttttgggaatagggagccatctaaggattttaaaccaaagagagatgtgatcagctttccctttcaaatgaggcattaaatgcagtgaactgagggagactcaagatggctacagtacattaggcaagagacctaatggtcctgaacgaggcaggccagcttacagggaggagaggaatctccttctgggggctctgagaacctagggctgggcttagagaagtcacttttaacagattctcaacctctgttaacacttcacagtgaattagtagagaagtagagagaaaagagggcagaaaccaaaacccaaaagcagaaatcgtttcccaggtccctggtctttctgtgacccactggtacca

SEQ ID NO: 383014 - DNA, 597 bp, Homo sapiens
actagcacagcaagggggccaagattcaggatgggctcctgccacaatggtatacacctgctgaatgtcagccctgcccactcctctaggcataggatgagtctagtggtggacccaagaccacatggggccaatcagatctttctctgggcatgaaaaaaaaatggaccttggaaagaaggaaagctctttacattaggagagttaagatgtaaaacctgagataagagaggaaaatgaaaacaatcagacaagcaggaatgagagataagcagggaaaaaaccctggtgaagttgtgtcctgattctcaagtccctgrtcctacagttctctccttaattctatggtctgcaccaccatccttcccagttgcctgagccaatcaactcattttttcttaagctagttcaaattgggtttgtcttggacaatcaagggttctgacaaaaactcctccactcacaatgtcaaactttagctgtgcacaagaagtggccatgtaccaaattaattacagtagaaagacaagggagcatttgaaggagaaaaaaggaaaggccctgaatctgaggattcacccttgggagaaaaacatc

SEQ ID NO: 383015 - DNA, 561 bp, Homo sapiens
attatggaattgcaaatttaaaaaaatgagataccagtacacattgattaggattgtaaaaatccaaaacactgacaacatcaaatgctggtgagtacatggagcaacaggaactccttcactgctggtagaaatgcaaaatggtacagccactgtgcaaaacagtttggcagcttcttgtaaaactagatttactcttaccatgcactccaccaaagatgttcttcactgggtgaatgaataaataaactatgatatatccctatgatgtgatattatttagctgtataaggaaataagctacccagttatgaaaagacatggaggaaacttaaactcatatttctaagtgaaagaagccaatttaaaaagggtatatacagtataatttctattatatgacattctggaaaagggaaaagtatgaagacagtaaaagatcagtgaytgacaggggtcagtggggtaacagggatgaataggtggaacacagagtttttggaacgcttaaaccattctgtatgatataatggtttgtcattatacgtttgtcaaaaccca

SEQ ID NO: 383016 - DNA, 561 bp, Homo sapiens
attatggaattgcaaatttaaaaaaatgagataccagtacacattgattaggattgtaaaaatccaaaacactgacaacatcaaatgctggtgagtacatggagcaacaggaactccttcactgctggtagaaatgcaaaatggtacagccactgtgcaaaacagtttggcagcttcttgtaaaactagatttactcttaccatgcactccaccaaagatgttcttcactgggtgaatgaataaataaactatgatatatccctatgatgtgatattatttagctgtataaggaaataagctacccagttatgaaaagacatggaggaaacttaaactcatatttctaagtgaaagaagccaatttaaaaagggtatatacagtataatttctattatatgacattctggaaaagggaaaagtatgaagacagtaaaagatcagtgactgacaggggtcagtggggtaacagggatgaataggtggaacacrgagtttttggaacgcttaaaccattctgtatgatataatggtttgtcattatacgtttgtcaaaaccca

SEQ ID NO: 383017 - DNA, 582 bp, Homo sapiens
tatgtccaaacagcaaaaatttaagaggtaagagaggttctaaggatgataccaatagtggtataatgatattaaggacacaggttgttctgctgtcttcagctcaggttttaccctaaagttggatcctctcatggttgcaaaacatctgccaatagcattttttcattcattctaagtcaatttaagttgaatatctgcccctttcccacccaaatcaataataattgccagaaaaactcgtggtaattaatttagactaatgtggcttttctcctaggcctgaggtcaccttatcctgatcatgttttgtgtgtttgtgtgtgtgtgygtgtgtgtgtgtgtgtgtgtgtgtgtgtgttcttttttttttttttttaatctgaaggagaagaggaaaggtttggataggtgagcaaaagtccttgccacatataatttgattctttatctaaaaatagggccaaggatttaaaatattggttagttaggttatgaggtctttacatgtatttgtaagcaataaaattatttgatttaagcttaaccaaattttagcttaatatcagatctcaaggccag

SEQ ID NO: 383018 - DNA, 608 bp, Homo sapiens
tgtttttctttcaaaagtcaggtccctcttctgtagggatgctgcaatttggtgggggttcatttcaggccttattcgtctgatttgctcctgtgcctggagatgtcactcaaggaggctggagagcagcaaagatggttgcctactccttctgggagctctgccctcgaggggcactgacctgatgccaatgggggttccccttccccgtgtggctctcagggtggccgccacaccacactgctcttccttctctccgtgggtcacgacagccttctagtcaattttgatgagagaacctggataccttggttgccggtgaaggattctcatgcttattatagttttcttctatgggagcctcagaatgctgctgcttctagtcagtcatcttggcctgtcaatcacaacttatatatggtttttataaaacaaaattgagtcatactataaaggctattcatttaatttattttgtatatcttgtgaaagttctrtaaaggtctaggtctttttaaaatagctgaattaatttatttaagcatttccctactgatgaatatgtgagttattcccagttttcattgttaaaattttttccaataaac

SEQ ID NO: 383019 - DNA, 521 bp, Homo sapiens
tggtaagaacagtgacacttatgacaaaaataaatatacaagtgctagatgtgggctagactcaaactcgcttcttactaagctggcatattccctacatttaaaagtagatgagagaaacagaacacaattatggaactgcataggatacattgagatgccagattacttaactagtaaaaggcaactggcctttggtgttcctgaaaggaaggtgatgtaggtagcatgcaaaatagattaaataacccactaacgaattccttaaaaggcttagtgatggaacaaaatgatcaaaaatgcaagtttagggtcagactatctatattcaaatgctagcttggccrtgcatgcactagctattgatttagggcagattatttagtatctttctacctcagttttcttcacttttaaaataagctagctaacaatagtacctgcctcagaggaaaaaaaatgacataatacaattaaagtgtgtagaagatgttaagtacaaaatatatgatgtgagggac

SEQ ID NO: 383020 - DNA, 561 bp, Homo sapiens
gttttaaatttaaaactaggtaggaaattcatgggagaagaggcttaggattttgggtctaccatacaggtttgagttttagatttttttctgccatattgactggttatgaaaagccacttaactcctctgaacatgttctattttctatgatgaataatactttagagatttcttttagagattataaaattacgatatagatggatatacaatattacttggttctgaattataacttaaacacagcaatataacagactgagagattcttttcttgaatttctcagttattattcaactctgaggtaactgagtcagtaatcctcttttcttttgaaagcacttcagaaagtgaattaatatgtgactaagaaacataatgattatgttattgactaagtatccattattcccctacaaggaccatttcaggctaattaaatggctaatttgrttgtggtgagatatagtacaatgagcttagaccaccatgttgaaatgctatggcagtttcagaagacatttcaaggttctgatcttgaatctgacaatcactat

SEQ ID NO: 383021 - DNA, 527 bp, Homo sapiens
ctgtaggtcagaaggctgtcaggctcagctagtttctctgctgagggattgcacaaggctgaaatcaaggtgtcagcagggcggagttcctttctgaaggctctgaaaatgaatttacttctaaactcattcaggccattggctgacttcagttctctgtggttgtgggactgaggctccatttccttgctaatgtcagctgggggatatccttaacctctggagcaaccagcattccttggtacatggaaccctctatccaatctcaaagtcagttcgcggtgggggttgggagtcaggtccttttcacccttcaaatctctctgacctgcaaaatatcttcacagcactaccttaatctaggtagtgtttgattcartgatcagtggatggaatcttggggtgacatcttgagaattcagcccaccatacctgacaaaaaaggcattcagacatattgtcattttgttgatgatgattcacaaatatactttcaaggaagagggctggttttttttaagacttaa

SEQ ID NO: 383022 - DNA, 616 bp, Homo sapiens
cgggaaagttgagttttgtccaattttctaagacgttgtgttgaagatagtgactaagagagcaaatgtaatgtttagttcttaaaaatttcattcacaactacatttgtctagcctttaagacccataagacatttttatgcatattcactttttatatacatattacaacttttcagagtagaaaagaaatttatttatttatttatttatttatttttttgagacagagtctcgctctgtcgcccaggctggagtgcagtggcgcgatctcagctcactgcaagctccgccccccgggttcacgccattcttctgcctcagcctcccgagtagctgggactacaggcgcccrccaccacgcctggctaatttttttgtatttttagtagagacggggtttcactgtgttagccagggtggtctagatcttctgacctcgtgatgcaccctcctccgcctccaaaagtgctgggattacaggcgtgatccaccgtgcccagcctccaagaaatttatttttaatatcacttcaaacaagtggggaaacagagtcacagataagctatgggatttactcaagtcatgaagtaagggcagcatcagaacagaaatt

SEQ ID NO: 383023 - DNA, 499 bp, Homo sapiens
cgggccacttattcatgtaacttgcttgtgccttcagaacctgctcaggcctgatcacagatacacgactttcatttgaagatggaagcctgctgtacacatccaacttcatgtctgtcttgggtgggtcagataacactcagctcataacagacagctcaggttttatggtaacttgttggcccacagtcatgcgttcagtaaaagacttagtagagtgccaaaagctgtctctctaaaggagagtagttatgtgcaaatgacggcagttctttgctacgaaattataacagcatctgctgcgattcacctrcagaagccttccaaatgctccaagcagcacctctatctggcactgacactacaagcaccatggggtctggtgaatcatatggaccaaggggcagaacagtttgcacaggtgcctggacctattgcagagatttttctgttctgggccccactacaaactagcagcttttcaggtcacttaataaat

SEQ ID NO: 383024 - DNA, 498 bp, Homo sapiens
gtgtacactgtacctaatgtgtattcttttatcccttgcccctcacccctcttcccccaccccagtccccaaagtccattaaatcattcctatgtctttgtgtcctcaaagcttagctctcacttataagtgagaaaatatgatatttgtttttccattcctgagttgcttcacttagaataatggtctccaactccatccaggttgctgacgatgccattatttcattcctttttrtggctgagtagtatgccacctaccactactttctttactactttatactctatatagggagtgggagatgtacgagttgaagcacaaaattcgttatcctcttttgaaaatgagctaggggaagtactgaaagtggcgtatggtcgttagaaatgtaccttttgtaatggcatcagtgtctctgattgacttccttagaagcagagtcgaactcagggattctggggcatacattattgaggcattgcttatggaacaaag

SEQ ID NO: 383025 - DNA, 498 bp, Homo sapiens
gtgtacactgtacctaatgtgtattcttttatcccttgcccctcacccctcttcccccaccccagtccccaaagtccattaaatcattcctatgtctttgtgtcctcaaagcttagctctcacttataagtgagaaaatatgatatttgtttttccattcctgagttgcttcacttagaataatggtctccaactccatccaggttgctgacgatgccattatttcattcctttttatggctgagtagtatgccacctaccacyactttctttactactttatactctatatagggagtgggagatgtacgagttgaagcacaaaattcgttatcctcttttgaaaatgagctaggggaagtactgaaagtggcgtatggtcgttagaaatgtaccttttgtaatggcatcagtgtctctgattgacttccttagaagcagagtcgaactcagggattctggggcatacattattgaggcattgcttatggaacaaag

SEQ ID NO: 383026 - DNA, 498 bp, Homo sapiens
gtgtacactgtacctaatgtgtattcttttatcccttgcccctcacccctcttcccccaccccagtccccaaagtccattaaatcattcctatgtctttgtgtcctcaaagcttagctctcacttataagtgagaaaatatgatatttgtttttccattcctgagttgcttcacttagaataatggtctccaactccatccaggttgctgacgatgccattatttcattcctttttatggctgagtagtatgccacctaccactactttctttactactttatactctatatagggagtgggagatgtacgagttgaagcacaaaattcgttatcctcttttgaaaatgagctaggggaagtactgaaagtggcrtatggtcgttagaaatgtaccttttgtaatggcatcagtgtctctgattgacttccttagaagcagagtcgaactcagggattctggggcatacattattgaggcattgcttatggaacaaag

SEQ ID NO: 383027 - DNA, 585 bp, Homo sapiens
ctcccaaatttgttagtttacagtttttttgtctctctctcgacaatgaagaaatgcatgcctacatcagatcatgagcgagaaacagcaccaaagccagacctgaatgtgtgtttcatcgtaatgagtaactacttaaggaagcatccataataaaaataaatcmaacttgtctaagaaaataaactaccccttctacacctccccgcccccggccccaaagcatgaacactacttgattcttggcaaagtgaaaagagctttgaaattagatttaagtgacaaccacagtaattaaaggtatcaacatctgttgaacaacagtaggcaaaaaaaaaagaaaaaaaaacacattattttgagagaaaaacaacaccctaattgtggttttatacaaggaggcctctttaaagttcaaattataattattgaataggtgtctcacttcttcagtgttgggctaattttgtcttgagaacatcttaggtgggacggcaggtgagttacttttatgttcttttaaactgcagatggtgatgcattacatagcaagtgattatagcattttttctttaaagagctgaa

SEQ ID NO: 383028 - DNA, 585 bp, Homo sapiens
ctcccaaatttgttagtttacagtttttttgtctctctctcgacaatgaagaaatgcatgcctacatcagatcatgagcgagaaacagcaccaaagccagacctgaatgtgtgtttcatcgtaatgagtaactacttaaggaagcatccataataaaaataaatccaacttgtctaagaaaataaactaccccttctacacctccccgcccccggccccaaagcatgaacactacttgattcttggcaaagtgaaaagagctttgaaattagatttaagtgacaaccacagtaattaaaggtatcaacatctgttgaacaacagtaggcaaaaaaaaargaaaaaaaaacacattattttgagagaaaaacaacaccctaattgtggttttatacaaggaggcctctttaaagttcaaattataattattgaataggtgtctcacttcttcagtgttgggctaattttgtcttgagaacatcttaggtgggacggcaggtgagttacttttatgttcttttaaactgcagatggtgatgcattacatagcaagtgattatagcattttttctttaaagagctgaa

SEQ ID NO: 383029 - DNA, 585 bp, Homo sapiens
ctcccaaatttgttagtttacagtttttttgtctctctctcgacaatgaagaaatgcatgcctacatcagatcatgagcgagaaacagcaccaaagccagacctgaatgtgtgtttcatcgtaatgagtaactacttaaggaagcatccataataaaaataaatccaacttgtctaagaaaataaactaccccttctacacctccccgcccccggccccaaagcatgaacactacttgattcttggcaaagtgaaaagagctttgaaattagatttaagtgacaaccacagtaattaaaggtatcaacatctgttgaacaacagtaggcaaaaaaaaaaraaaaaaaaacacattattttgagagaaaaacaacaccctaattgtggttttatacaaggaggcctctttaaagttcaaattataattattgaataggtgtctcacttcttcagtgttgggctaattttgtcttgagaacatcttaggtgggacggcaggtgagttacttttatgttcttttaaactgcagatggtgatgcattacatagcaagtgattatagcattttttctttaaagagctgaa

SEQ ID NO: 383030 - DNA, 530 bp, Homo sapiens
attatgcccaatagacatgtttatttggtgtattttaaaattaggagatttctgattaaaaaaaaaacaattccaggccatgagttcatgtcctttggcccctcactatcacaagtccatgcaagccctgtacttaattttatatttttatattcttatttttcaagagacttcaccactgcactgtgtgtttcagccccacacctcctatagaagccgctgctttytccatcagattgccaaaccagaatgaaattaagccactggaaaaaaaaaaaaaaaaaaaaaaaacctcacatgctaaaagattactggtactccttactcatacacatttgatgggattccacaggggaaaatggatatctgcctttattggacattatctctagtagggcatggagaattaattgataaaacgatagagtccttttactcttaggatgctttttaaaatgcagaggaatgctagcagccaaaagtaattaaaaatatgatcaaaagttacagccagaccacttggtacagtg

SEQ ID NO: 383031 - DNA, 569 bp, Homo sapiens
ataattaggtatcaaaagggatctacagagggatgacaaacataaatattataaagagttaagtttcagtacaggcaagaaaacgatggatgaacattattttgcagaagcctgttgtaaaatgggtcaaaggaaaaactttaatgagtttaatgaaggactttttgatctggcacctttcaagratattaaataagtaaagcaaaacataatctctaatggagagtatattctggaaaatatcaggaatcttttccatatcttgaccatgacattaacaaattatctctccataacagtgttttgcaattaagtctttttttaaactaatgatcactctctcgaaacataaagaaacaatttcctttgggtgttgccagaaaaatatctgaaaaaatgcaactcttttattttctcaaaacgtttaatcatgcagtatgatctctagaaccacttcttatgtaagacagatgatacatgtgctatcaataaatatttgttgaatggagattttattgaaggtattttatggaccagatccaggactaagaacttcataaacattatct

SEQ ID NO: 383032 - DNA, 580 bp, Homo sapiens
atagtgtagattaaaaatcccttaaaggtaacctattatagctttctcctttttcaaatgataaaaatgaagttcagaaatattcagtggtgtgctgaaggcaatgctttccaaatgttttcatgtcatggcaaagatagaaggtgatgatcattctaagacacactgggctaacattttgaggttgttagtggctgcagctgaacagccgaagggctccaaaaattaagatttaagcacatatttgaactcatttatggtatattccataatataccatttgcaaagctctgacctaaattcaactggtagcagagmtaccagtagcccaatctctattggcttaaggtaaaacagtatttattaccttatacaatataggtaaggttgaggcttgattcagtggatcaaacttcaccttgaacttaatttcctagctaaaattggttcttgtctctcatgtatgttggcttcattctcaggaagatgacaatctcctggtggcaaaatggtttcagcacttccagactgttcaggcttctgggttaaaatcctacaataatgagagagtttttataaa

SEQ ID NO: 383033 - DNA, 587 bp, Homo sapiens
actttcaagaaagcaccagctatggtagtagaagggkgatataagcttgccctgcattggctaggataagtacctgtgtttctcaagtgatgggaggagccatagagctcccaaaagtttatgtctgttgcctttagctaccagggctggtagaaaaaaccatccatccagtaggggcagggttaggcagttcagagctcagactctcgttgggtggggcttgctgaggccaagtttttcaactgtctcacagagcttgcagcagtaagctgtttctttcaaaggttctgtgaattctttcagttttcctggtatgttcctgtcgtggttcttggagcataagttcacaatgtgagtctccacacgctatttctgttcatctaagtgggagctgcatgttactcctatctcttatccaccattttcccccttagagaaacatgtctttaactcaaggaaaagatctttcaagacttggttgttattgattctgatattcattcatatataaaccagaggggaattaggcaaagacatactccatgatttcaaagcttatgtatgtatgctacttggaaaaacgattt

SEQ ID NO: 383034 - DNA, 587 bp, Homo sapiens
actttcaagaaagcaccagctatggtagtagaagggggatataagcttgccctgcattggctaggataagtacctgtgtttctcaagtgatgggaggagccatagagctcccaaaagtttatgtctgttgcctttagctaccagggctggtagaaaaaaccatccatccagtaggggcagggttaggcagttcagagctcagactctcrttgggtggggcttgctgaggccaagtttttcaactgtctcacagagcttgcagcagtaagctgtttctttcaaaggttctgtgaattctttcagttttcctggtatgttcctgtcgtggttcttggagcataagttcacaatgtgagtctccacacgctatttctgttcatctaagtgggagctgcatgttactcctatctcttatccaccattttcccccttagagaaacatgtctttaactcaaggaaaagatctttcaagacttggttgttattgattctgatattcattcatatataaaccagaggggaattaggcaaagacatactccatgatttcaaagcttatgtatgtatgctacttggaaaaacgattt

SEQ ID NO: 383035 - DNA, 587 bp, Homo sapiens
actttcaagaaagcaccagctatggtagtagaagggggatataagcttgccctgcattggctaggataagtacctgtgtttctcaagtgatgggaggagccatagagctcccaaaagtttatgtctgttgcctttagctaccagggctggtagaaaaaaccatccatccagtaggggcagggttaggcagttcagagctcagactctcgttgggtggggcttgctgaggccaagtttttcaactgtctcacagagyttgcagcagtaagctgtttctttcaaaggttctgtgaattctttcagttttcctggtatgttcctgtcgtggttcttggagcataagttcacaatgtgagtctccacacgctatttctgttcatctaagtgggagctgcatgttactcctatctcttatccaccattttcccccttagagaaacatgtctttaactcaaggaaaagatctttcaagacttggttgttattgattctgatattcattcatatataaaccagaggggaattaggcaaagacatactccatgatttcaaagcttatgtatgtatgctacttggaaaaacgattt

SEQ ID NO: 383036 - DNA, 587 bp, Homo sapiens
actttcaagaaagcaccagctatggtagtagaagggggatataagcttgccctgcattggctaggataagtacctgtgtttctcaagtgatgggaggagccatagagctcccaaaagtttatgtctgttgcctttagctaccagggctggtagaaaaaaccatccatccagtaggggcagggttaggcagttcagagctcagactctcgttgggtggggcttgctgaggccaagtttttcaactgtctcacagagcttgcagcagtaagctgtttctttcaaaggttctgtgaattctttcagttttcctggtatgttcctgtcgtggttcttggagcataagttcacaatgtgagtctccacacgctatttctgttcatctaagtgggagctgcatgttactcctatctcttatccaccattttcccccttagagaaacatgtctttaactsaaggaaaagatctttcaagacttggttgttattgattctgatattcattcatatataaaccagaggggaattaggcaaagacatactccatgatttcaaagcttatgtatgtatgctacttggaaaaacgattt

SEQ ID NO: 383037 - DNA, 513 bp, Homo sapiens
cacacatgaaaacatggttctctcatttctcccacaccattgcagttatagctaggcatccctgggagtaattgttctctttgcatccccctggaatatgattcttctcacaagggaaatgattcactggagaaatcacagaagtgatcccaatgaaattcactgggttttcctcagtatttcagtaactaggttaactctgaagaagaaattcatgccatcagctttgtaagcaggctgaaaacatgaagaccttcggatgacttttggaaatcacaaattccagcattcggaaaactgaggtgggttattaaaattgatataggtcatgctggaacacatcaaattggtgagctggtaaccacttggctaatgttgttaaaatctgagatcaatacttttacagtattgaaattacctaggtacacggtagacaagtgcccatgaaatgtaaaccatataataagcattttccttctcaaytatggttgccgtcacctaattcaaataaaa

SEQ ID NO: 383038 - DNA, 221 bp, Homo sapiens
gagatgaaattataaactatgttctcttttgcattyggcttccttgatctgacatatgttgaagattcatctatacagttgtgtgtattagtagttcattcctttctactgttgagtagtattcccttgtatgaacacagcacaatcttattagccttcctcctcttaataaacatttgagtctcttctagtttgcgctataataaatagagctgctataa

SEQ ID NO: 383039 - DNA, 571 bp, Homo sapiens
acatttagtcatttttaagttgttttttacatccctactgaaatttgtgtcccttaattcattgtatactttctttccctgtaagttcttaaacatagttataatgattatgyttaagtcatttaaagctcattccaacatatgcagtctatcttggtttgcttctatagactgttccttcatttgtttttgagtcgaatgtttctcacttcttatgatggatattttttgattatctactggaaattatgaatggtacattgtcaaagccagcaaatcatttatattttttgaagactattgttttgttctagcagtggtgaaataatgaacaggtcatcttaatcttgtgggagtttggttcagagttcattttacccttagttttgggcatattagttctaaggcatgatgttacttctggagtttaaaataaggtgcttaccaaatccttctaacttggtgggatttgagctctaagccctgtcttcaaaaaaaatggacagttgctgaaatatctgctgagactttgaagtctttcagctgtttttttctattgaatattttagaa

SEQ ID NO: 383040 - DNA, 614 bp, Homo sapiens
ttaccaaatgagaaaactgttaccagggaacgtgatatgccaaatgtcacacaaaaagtatgacaagaagtaatattttaactcagstgtactgttttcagagaccaaggactttccatctagtcctggtattccagctcaacatgctaccttttactgagttttgctaatgtagataaattaaagtttgccccaaacaataaagaaggggtaaggcctttttatgattaatgagggtatgaaatgctaaatatccctgacttttcaattaagcagtaatttcactttaattttaacaaagcaaatatgcctgtttctgatagtaatgtatccagacactggaaataacactggcaagaaagattctcctgtggtcaccagtctcccttcctgacacccagcacacatggcaaagttttgaaaggaagggaacaggctactgttttcaaaaccaggagatagctgaatatgaccatagcagaaaaaatcttaaccataactggccgggcatttcagaatagcagttcttttggtttcaatgactgtaagtgtctctttctcacacacacagacataaacacagaccatgcccacaagcacacacaccaaataga

SEQ ID NO: 383041 - DNA, 556 bp, Homo sapiens
aatattagtaaacatttttgggtgaagcttctaagttctaggtcctttttaaagtacttaacatctgtgaactcactgggtcctcamaaggatctcctaagagaggttaactataccgcattttacagatgagagattgcagtcccccaaaagttcaataacttgtccaaagctacagaccacataggtggtagagctggcatgtcagcaggctgcctggatcttgattctattatctcaaccacaatggtactaattaaacagcagcggttctcaaagtgtggtacctggtccagtcgaatcagcatcacctagaaacgctttagaaacaaaaattccatgaccccagaccagatatgttgagttagattctctgtctgggatggaacctaggaacctgctttaacttaacattctgtaggtaattttaaagtaggctaaagtttggaaatgattagtacagggtagacagacttgaacaggataggttcttccctcggtgtactctggagataaaaaataagtttcattttctatgctgatggtaaaaattgtg

SEQ ID NO: 383042 - DNA, 556 bp, Homo sapiens
aatattagtaaacatttttgggtgaagcttctaagttctaggtcctttttaaagtacttaacatctgtgaactcactgggtcctcacaaggatctcctaagagaggttaactataccgcattttacagatgagagattgcagtcccycaaaagttcaataacttgtccaaagctacagaccacataggtggtagagctggcatgtcagcaggctgcctggatcttgattctattatctcaaccacaatggtactaattaaacagcagcggttctcaaagtgtggtacctggtccagtcgaatcagcatcacctagaaacgctttagaaacaaaaattccatgaccccagaccagatatgttgagttagattctctgtctgggatggaacctaggaacctgctttaacttaacattctgtaggtaattttaaagtaggctaaagtttggaaatgattagtacagggtagacagacttgaacaggataggttcttccctcggtgtactctggagataaaaaataagtttcattttctatgctgatggtaaaaattgtg

SEQ ID NO: 383043 - DNA, 503 bp, Homo sapiens
ctttcactcagaaatatttcatatctttcgggtaartgattcttctctaaagctctgttctcttctctgagccaaaagttgtgccaaaattaacaatgctaaagaacaaagagaagcattgtctgtatggcctttcttcacttatagccttaagatgtgtttgatcttgtttcctcttagctacaggaagctgtgagaggcagagcctgtctctctgcaggtgccaggtacaagcaggggaagcaataaataccagccctcactaccagttctagacttgatgcagacacgtaattcctacccttgcactgttagaacacattgcaaagataattcaagctggcttttgtgacagaacattgatttcacttaaggctcctggtcagagatttgcaattactaattcttttgcttctcatggatatttatttgttcctttctctagaataaagtggcaaaagtgattaatccaaaactgaggtattatggttgagggcaagggc

SEQ ID NO: 383044 - DNA, 539 bp, Homo sapiens
gcctaaaatattaatagtcccaaggttgaggaaccctgacatagagccatgatttataacttaggtggtacccaataatttttctctaaagccrtatttcctaaactttactgatcatattagtcacctgggattcatgtcatatatatggaatcttaacatcatgccagaccttctgtcttggtccattttgtgttgctataatgaaatacttgaggctgagtaatttataaaaaggaaagaggtttatttagcctccattctacaggctgggaagttcaagtgcatagtgctgcacctggttggttcctggtgagggcacatgctgggtcataacatggtaaaatggcgaagtgaatgggcatatgccaggggatcacatggtgagggaggtggcagagaaactgaggaagccacattctttttaacgacatgctcttggaaaatcaagaaatcactcaccctggcaggagggcattaatatattcttgagggattttcccccataatacaaacacctcccactaggccctacctcc

SEQ ID NO: 383045 - DNA, 539 bp, Homo sapiens
gcctaaaatattaatagtcccaaggttgaggaaccctgacatagagccatgatttataacttaggtggtacccaataatttttctctaaagccatatttcctaaactttactgatcatattagtcacctgggattcatgtcatatatatggaatcttaacatcatgccagaccttctgtcttggtccattttgtgttgctataatgaaatacttgaggctgagtaatttataaaaaggaaagaggtttatttagcctccattctacaggctgggaagttcaagtgcatagtgctgcacctggttggttcctggtgagggcacatgctgggtcataacatggtaaaatggcraagtgaatgggcatatgccaggggatcacatggtgagggaggtggcagagaaactgaggaagccacattctttttaacgacatgctcttggaaaatcaagaaatcactcaccctggcaggagggcattaatatattcttgagggattttcccccataatacaaacacctcccactaggccctacctcc

SEQ ID NO: 383046 - DNA, 536 bp, Homo sapiens
ttttggttatgttttttaaataaaaagctaattttctaaacatcattcactgaaaagtcttctaatattgcattccccgaaacactaaatgctagaagtctgatgccacattgatgtttttcctgtctataagaccattttcttcctgtccgtaagaccattcagaaattctaccaaaataaggatacatttctttatttagcatttggaaagcttggtcaatatttaaaaaaaaaaaacctttcctgttctttttttaaatctcagacgttttcttctaatagttttttaaaaataattatttcattttactctgttctcttgataatttctattatctagaagaaatttgatgtcatgaagcattcctccatgtcaattctatttctaaaagtttacatataaacttttaagtattattaccagaaaaagttkatgcacatagatgactatgttatcatttgtactcataaagagagaaatctctaaatattcagtactatctttcagccagtaaataaaatatgggtatgaag

SEQ ID NO: 383047 - DNA, 565 bp, Homo sapiens
aaaagacatcactactggtagctttaaggtttgcctcctgatggaatggcatgaagagagagctttaacaccattccaaaatttaggattttatgagtagtccagtgagcctaagtgcatgaaaaatactgagagtagagtatttattggtgcaaagagagrcaactcaattctctgaaagacaagatttaccaaacattaaatacaaaggtgcagcaaaaagatttcaaatagaaatctacattaggattcttttgagtaacaaagacaaaattcaaattgatttatatataaggaaatttattgacctgtgtaccaaaattatgtgaagacaaatctggctacacggatggctgtctccatgaatattttcaggagtctatcttttcatctttgagtatgtgtgtgtgtaaatagatatggacactgtgtatctagagagagacagacatacggtaatatacacaaatttaaatatacaatttaatgcatttccataaatgcatataattatttaccctacctaccaatcaagatagtaaacttttatatcacctgcaaaagt

SEQ ID NO: 383048 - DNA, 619 bp, Homo sapiens
tttgagtaaaagaattcagtaaaaggcaactctgtgggacatttaaatcccagatcgtaattatacataaatacatgtgtaaacattttccccctaaatctagtaatatagcaaaaaatcaataacaatgcacttttttaagttagcataatacttagtttatctggagagtgaattttagaaaactacaaccatacaaaatgtaatagaaaaataaactaaaaatatattgatgctaacagttttcaaataatgtcacttctgccctaatagcttttagagcatgtagatacagcagagactgggtctgtgtaattttaccttcctgcccttcaacctgaacacttctgtttttaactaatatattatctgaggttctgttgtgagagagaaaaaragagaataggtcactggcctatgccatatgtcacaaagccagtgtaccaaatccaatttgttccttaaaggaggctccaaaactttagtaatatgcaggtataataaacttgattgattagtgtcttaaattcatagattagaagtaaaaaaaatgagatggggtggcaaaagaattatagtaggcatatttactacaatttaaaaaaatcaatgatacata

SEQ ID NO: 383049 - DNA, 619 bp, Homo sapiens
tttgagtaaaagaattcagtaaaaggcaactctgtgggacatttaaatcccagatcgtaattatacataaatacatgtgtaaacattttccccctaaatctagtaatatagcaaaaaatcaataacaatgcacttttttaagttagcataatacttagtttatctggagagtgaattttagaaaactacaaccatacaaaatgtaatagaaaaataaactaaaaatatattgatgctaacagttttcaaataatgtcacttctgccctaatagcttttagagcatgtagatacagcagagactgggtctgtgtaattttaccttcctgcccttcaacctgaacacttctgtttttaactaatatattatctgaggttctgttgtgagagagaaaaaaagagaataggtcactggcctatgccatatgtcacaaagccagtgtaccaaatccartttgttccttaaaggaggctccaaaactttagtaatatgcaggtataataaacttgattgattagtgtcttaaattcatagattagaagtaaaaaaaatgagatggggtggcaaaagaattatagtaggcatatttactacaatttaaaaaaatcaatgatacata

SEQ ID NO: 383050 - DNA, 561 bp, Homo sapiens
taaacataatactggaagtcctagccagagcaataaggygagagaaagaaataaaaggcatccaaattggaaaggaggaattcaaattgtccctctttgcagatgagatgatcttatatctagaaaaacctgaagactttaccaaaaaaactcttagatctgataaatagattcagtaaagttgcagaatacaaaaccaacatacaaaaaatagcatttatacaataatgaactagctgagaaaaaaaatcaagaagacagtctcatttacaacagctacaaaaaccatgaaatacccaggagtaaatttaaccaaggaggtgaaaaacctctacatggaaaactacaaaacactgatgaaagaaactaatgaagactcaaatattcaatttgagtctcaaagagtcaatgcaatccgtaacaaaatacaaagtcattttcatagaaatagagaaaaaatcataaaattcatatggaaccaaaaaaacagcttgaagagccaaaacaatcctgagcaaaatgaacaaagctggaggtgtcacactacttgactacaaaata

SEQ ID NO: 383051 - DNA, 572 bp, Homo sapiens
agctgttacctgatttgtgcaccaagtaaatttatggtctagcaaggaaagttgcttaataaatgaccacttaaaaattgtataaatgaaagaattactttttatcacacctgaggatggtattatgaacatcttttatctttatataattttacaataaattaaaaataaacctgaaataaattttacaatggagagaaaaacatttaatgtagtgaacacaaatcctaacatggacggaatcagattgtctaactaacggggtacaaatgttgccaggacagctgcgaaaggcttcctggagggacggaggtgagaacaaaaactytgtctcccacgaaggccagtgaaaactcagcttgtgtttattcctgtgatatgtgttccatgggaggaaattctccttgacagtttcatgggaagggggttagaaaagcaggaaataagtgaaaggacttcttaatcccctcctggaaactcttcatcgtccgcatctgtagagtgtggataatagaggtacctaactaactcttaagtttttatgagaaataaattaatttaatgcacataaa

SEQ ID NO: 383052 - DNA, 545 bp, Homo sapiens
aagggtcttaaaaatcatgttggtgatacctgtgagcctcaatataaagttgaattacaagggtgaaatgagaatgcctgaaactccagctcaacaaatttgatgcttcactcaatggatgataatagaatatttcgtaaagttrctttacctgtgttgttaataacaaggtgacatttatggaactaataaactgtaaagtccattatggcttattgctgattcttgaacataagccttgtaatatattcatttataaaaaccatttgagccatttaaatatcattaaaccatggcagaattaaaatgagttttctccctgtgggctcaggtgcatgggagtacagttattatttctgcaggccagttattggcttggaggctgatatatgatggtgatgggcttctgctgccattgccggggataggggtcagatcaaggagtgtggtgacttcctagggaaggtaactggagtgaagtatccttttattcctcattcctcagtcagaaaagtagtgcgtctttttaccagattgaagcatga

SEQ ID NO: 383053 - DNA, 545 bp, Homo sapiens
aagggtcttaaaaatcatgttggtgatacctgtgagcctcaatataaagttgaattacaagggtgaaatgagaatgcctgaaactccagctcaacaaatttgatgcttcactcaatggatgataatagaatatttcgtaaagttgctttacctgtgttgttaataacaaggtgacatttatggaactaataaactgtaaagtccattatggcttattrctgattcttgaacataagccttgtaatatattcatttataaaaaccatttgagccatttaaatatcattaaaccatggcagaattaaaatgagttttctccctgtgggctcaggtgcatgggagtacagttattatttctgcaggccagttattggcttggaggctgatatatgatggtgatgggcttctgctgccattgccggggataggggtcagatcaaggagtgtggtgacttcctagggaaggtaactggagtgaagtatccttttattcctcattcctcagtcagaaaagtagtgcgtctttttaccagattgaagcatga

SEQ ID NO: 383054 - DNA, 545 bp, Homo sapiens
aagggtcttaaaaatcatgttggtgatacctgtgagcctcaatataaagttgaattacaagggtgaaatgagaatgcctgaaactccagctcaacaaatttgatgcttcactcaatggatgataatagaatatttcgtaaagttgctttacctgtgttgttaataacaaggtgacatttatggaactaataaactgtaaagtccattatggcttattgctgattcttgaacataagccttgtaatatattcatttataaaaaccatttgagccatttaaatatcattaaaccatggcagaattaaaatgagttttctccctgtgggctcaggtgcatgggagtacagttattatttytgcaggccagttattggcttggaggctgatatatgatggtgatgggcttctgctgccattgccggggataggggtcagatcaaggagtgtggtgacttcctagggaaggtaactggagtgaagtatccttttattcctcattcctcagtcagaaaagtagtgcgtctttttaccagattgaagcatga

SEQ ID NO: 383055 - DNA, 418 bp, Homo sapiens
gtcatagcaatccagtaagaaatrctgagatttgttttttgtcctacttcccatctgcaaagtcatgtttaatatctaactgtatgcgtttatgattaaaaaataaagttgaaatccctgttccccacgtctcttacctctaccaaaaagcagtttcttatcctacttttccttactaaaacagatgaaatttatttttctactagggaactcataaatgtcatttttaatttcaaaaactatacagataaatgcattttcttgtttatttctggcaccatcgagcgtgtgcacgagccttgttctctgtggaggatcctatgtaagagcactgtctctaaattaaataaataaaccactgagctggggaccttgaagaaacgcggagtaagtgaaagacacagaggcaagtcaagag

SEQ ID NO: 383056 - DNA, 586 bp, Homo sapiens
cttcaggattcttcctaggagtggaaactcatcgctttccaagaccattcattcaatctttgtaatcatgtaatgggggtaccagaagctatctctcccccaactccatttttctgcctgtgtgacatgccttggagagatccattttttwaaaaaaaagattcatcctcggtagtataactgaaaagtgaaactagataaagagggccttatatcctgctatggaggtggccccctcacaatcctccatggtataccacatgggtcattagtgtgtaaggacatcaatttgcataagaagactggggcccttttgtaaagaaattggtgaaattgctcagagcagaaagcttttgtttaacacggacacagagagatattatttggctcctgctatagaaggaactttctgtccctctctaacttccacatattcatcaatcatcatgtgccccttagtctccctttttcttagcttaagcatctttccttccttcaattattcctcctaaaataagttttaacgttcatgtcttgctggcccacttctctgaagcgctcttgttggtctgtatttcatttttaa

SEQ ID NO: 383057 - DNA, 513 bp, Homo sapiens
gcaactctttgggtctatgtgttttatgaaactggtttttttttttttttttttgagacagagtttcactcttgttgcccaggctggagtgcartggcacagtcttggctcactgcaacctccgcctcctgggttcaagtgattctcctgcctcagcctcccaagtacctgggattacagacgcctaccaccacacctggctaatttttgtatttttagtagagatggggtttcaccatgttggccaggctggtatcgaactcctgacctcaggtgatccacctgcctaggcctcccaaagtgctgggattatagatgtgagccaccacgcctggcctgaaacttcttttaaagacatggatagagttttcactttaaataaaaaaattaatgcaggttcacagatggatagcaagtggcacagcatcaagatcagacgcacagttgtatgtggtaaagactggaatgccaggacacaaatgctactcagcttgtggcacttgatgtcatagg

SEQ ID NO: 383058 - DNA, 513 bp, Homo sapiens
gcaactctttgggtctatgtgttttatgaaactggtttttttttttttttttttgagacagagtttcactcttgttgcccaggctggagtgcagtggcacartcttggctcactgcaacctccgcctcctgggttcaagtgattctcctgcctcagcctcccaagtacctgggattacagacgcctaccaccacacctggctaatttttgtatttttagtagagatggggtttcaccatgttggccaggctggtatcgaactcctgacctcaggtgatccacctgcctaggcctcccaaagtgctgggattatagatgtgagccaccacgcctggcctgaaacttcttttaaagacatggatagagttttcactttaaataaaaaaattaatgcaggttcacagatggatagcaagtggcacagcatcaagatcagacgcacagttgtatgtggtaaagactggaatgccaggacacaaatgctactcagcttgtggcacttgatgtcatagg

SEQ ID NO: 383059 - DNA, 513 bp, Homo sapiens
gcaactctttgggtctatgtgttttatgaaactggtttttttttttttttttttgagacagagtttcactcttgttgcccaggctggagtgcagtggcacagtctyggctcactgcaacctccgcctcctgggttcaagtgattctcctgcctcagcctcccaagtacctgggattacagacgcctaccaccacacctggctaatttttgtatttttagtagagatggggtttcaccatgttggccaggctggtatcgaactcctgacctcaggtgatccacctgcctaggcctcccaaagtgctgggattatagatgtgagccaccacgcctggcctgaaacttcttttaaagacatggatagagttttcactttaaataaaaaaattaatgcaggttcacagatggatagcaagtggcacagcatcaagatcagacgcacagttgtatgtggtaaagactggaatgccaggacacaaatgctactcagcttgtggcacttgatgtcatagg

SEQ ID NO: 383060 - DNA, 513 bp, Homo sapiens
gcaactctttgggtctatgtgttttatgaaactggtttttttttttttttttttgagacagagtttcactcttgttgcccaggctggagtgcagtggcacagtcttggctcactgcaacctccgcctcctgggttcaagtgattctcctgcctcagcctcccaagtacctgggattacagacgcctaccrccacacctggctaatttttgtatttttagtagagatggggtttcaccatgttggccaggctggtatcgaactcctgacctcaggtgatccacctgcctaggcctcccaaagtgctgggattatagatgtgagccaccacgcctggcctgaaacttcttttaaagacatggatagagttttcactttaaataaaaaaattaatgcaggttcacagatggatagcaagtggcacagcatcaagatcagacgcacagttgtatgtggtaaagactggaatgccaggacacaaatgctactcagcttgtggcacttgatgtcatagg

SEQ ID NO: 383061 - DNA, 597 bp, Homo sapiens
tgtgttggggaatctgtaaattataattctctaactcagtccccagtggcctaggtgacctgattcaatgttaaaatctgagcaagaaagtggcaaagttggggcaaggtgcgatggttcacgcctgtaatcccatcactttgggaggctgaggtgggcagatcacgaggtcaagagatcaagaccaccctgcccaaaatggtgaaaccccgtctctactaaaaatacaaaaattagctgggcgtggtgtgtgcctgtagtcccagctactcaggaggctgaggcaggggaattgcttgaacccgggaggcagaggcagcagtgagctgagatcgcgccactgcactccagcctgggtgacagagagagactccatctcaaaaaaaaaaaaaaaaagtggcaaagttagattattacacatagtaaatgatgatgttgatgatgacaatgacagcaatgctcaccatttagagaaaacatactatgaactagtagctgtgccctgtctgcatttcatatacaatgtcttgaaycttcataatagccccataagctaggcactgtatagttacctacattttgtataagaagaaactg

SEQ ID NO: 383062 - DNA, 577 bp, Homo sapiens
gacggggctggttgtggttaatactgcctatctgcaaggctacagtaaacctcagaattggtttcccaagaatattcctttgagctgattagagcttttctaacatgcaatttgcatctattggaatcttccgtgctgtttatgttggtttcttattataccatttaccttaaacagctttgttctttttaaagcaaaacatgccattctttccatggtggtctaaaccacatttcaaatgagcactgccctgtgaatgtgatcccagtggctgtgtgacaaggcaaagtggggaggaatcatagggagagtggaaagaggtctgggctgggagtctaggccctrttatgtgtgactttctgacactctgagaacctgagtcttgggtcctttattaatttttttgtaaaggatagggtttggacgtgataattgctaagtgccttccaccactgaaattcttgtcatttgtttggctcagtgtcagcctggtggaagtgtgtgaatgaatgaacattgcaagtgtgcctttctcatccattttcaggctacactgacagttattacaactgagggc

SEQ ID NO: 383063 - DNA, 631 bp, Homo sapiens
aacactgtacagtaaggttacgctaaattttttagggagattttctttttacaataataaattagcttacagtaacatttttataaactttaaatttttaaaaactttgatttttgtaataacacagcttaaaaacacattgtacagctgtgcaaaaatatcttttttytttctattcttattctataagcttttgttcatttaaaaattatttatttttaagcttgtttgttaaaaactaagacacacacacacacacacacacacacacacacacacacacacacattctttagcctaggctgacataggctcaagatcatcatcatgttacagtaagcaataggaattgttcagttccattataattttatgggactatcatatatatagtcgtttgttgactgaaatgtagttatgcagcacatgactatatatatttatttgcatcctcgggacttagcaaaatgctggacatgctagagatgctgaatatttactcattgaagaaatgaataaatgcttttgattgaaaggaggcttcggctttagcctgtacaatagttactccttacccacgtagactgttaaatgatcagtgcgtggaaaggcagtaataattgagtatctc

SEQ ID NO: 383064 - DNA, 598 bp, Homo sapiens
ttgtacagctgtgcaaaaatatcttttttctttctattcttattctataagcttttgttcatttaaaaattatttatttttaagcttgtttgttaaaaactaagacacacacacacacacacacacacacacacacacacacacacacattctttagcctaggctgacataggctcaagatcatcatcatgttacagtaagcaataggaattgttcagttccattataattttatgggactatcatatatatagtcgtttgttgactgaaatgtagttatgcagcacatgactatatatatttatttgcatcctcrggacttagcaaaatgctggacatgctagagatgctgaatatttactcattgaagaaatgaataaatgcttttgattgaaaggaggcttcggctttagcctgtacaatagttactccttacccacgtagactgttaaatgatcagtgcgtggaaaggcagtaataattgagtatctctcatataccaccttttggaggaaaataaaagcaaaaagatagtctgtcaccttaagagtctttttttgtttgtttgtttctttttcttttcttttctttttttttt

SEQ ID NO: 383065 - DNA, 598 bp, Homo sapiens
ttgtacagctgtgcaaaaatatcttttttctttctattcttattctataagcttttgttcatttaaaaattatttatttttaagcttgtttgttaaaaactaagacacacacacacacacacacacacacacacacacacacacacacattctttagcctaggctgacataggctcaagatcatcatcatgttacagtaagcaataggaattgttcagttccattataattttatgggactatcatatatatagtcgtttgttgactgaaatgtagttatgcagcacatgactatatatatttatttgcatcctcgggacttagcaaaatgctggacatgctagagatgctgaatatttactcattgaagaaatgaataaatgcttttgattgaaaggaggcttcggctttagcctgtacaatagttactccttacccacrtagactgttaaatgatcagtgcgtggaaaggcagtaataattgagtatctctcatataccaccttttggaggaaaataaaagcaaaaagatagtctgtcaccttaagagtctttttttgtttgtttgtttctttttcttttcttttctttttttttt

SEQ ID NO: 383066 - DNA, 597 bp, Homo sapiens
agcccggctgatgcctataaatcttaacctgaatatttactcagaaattctcaatgcttcttaagtatagtcataagctgagctttcatttccaaagccaattaacattatacaaaattgtttatataagcaatcgaggcataaaacacaataatatagtttgcaaatgataaaaaagggaaaattatatctctcaatgtccgtgctgccttttcatggaaaaatgattgaaaggacccagctcagcattcaggccattratccatgtaaaagctgaatcataatttaattattttctttcctagtaattaactgggaatttctaattattcaatttgagtatgttttgattcattaagcaccctgttcatttttttttcccaccagtgtattaaatcttaagagcaagcacatagagaaactgacatgctgagaccaataagtagttctggtggcagtgcttacatgagagatgatgggaatatttttgatcaaaattacttaataattatccaatccactgataaattagcagggtgttaattgagttacacctgaaaggcagacatgcatgactcagaagagagtaggagtggt

SEQ ID NO: 383067 - DNA, 597 bp, Homo sapiens
agcccggctgatgcctataaatcttaacctgaatatttactcagaaattctcaatgcttcttaagtatagtcataagctgagctttcatttccaaagccaattaacattatacaaaattgtttatataagcaatcgaggcataaaacacaataatatagtttgcaaatgataaaaaagggaaaattatatctctcaatgtccgtgctgccttttcatggaaaaatgattgaaaggacccagctcagcattcaggccattaatccatgtaaaagctgaatcataatttaattattttctttcctagtaattaactgggaatttctaattattcaatttgagkatgttttgattcattaagcaccctgttcatttttttttcccaccagtgtattaaatcttaagagcaagcacatagagaaactgacatgctgagaccaataagtagttctggtggcagtgcttacatgagagatgatgggaatatttttgatcaaaattacttaataattatccaatccactgataaattagcagggtgttaattgagttacacctgaaaggcagacatgcatgactcagaagagagtaggagtggt

SEQ ID NO: 383068 - DNA, 538 bp, Homo sapiens
tcagggctgcttataacacacatgaagtatagctgggtggcttctgtttgcaagaggtytatttttaattaacttttgtgctttttgccttgaagtgacctcatagcgttcagcaggatatacacatacactgtcacactcacacatcaccactatgattgtgtgagaaaattccactgcaagaaaaactggacaagtttttcttagcttctaggaagacggaagactccctgacaaggattttattttcattgtagtgggctgtcagcaaggccatttatcatagcctgaattaataaggaaaggacagaagaaaaacgacttgctgccaaacagcttggggatgttcggggctgcatagatcaatcagctgggcacactagctattgtctgctcatcaattcattttcattgagtttcaggacagataacaccaggcctttttctgaggcaggatcctaaagtgcctacctaaacttgctttccgttccaaccttttcatcccacaggacactcatgaaggtggcatactgtgttt

SEQ ID NO: 383069 - DNA, 536 bp, Homo sapiens
acacatgaagtatagctgggtggcttctgtttgcaagaggtctatttttaattaacttttgtgctttttgccttgaagtgacctcatagcgttcagcaggatatacacatacactgtcacactcacacatcaccactatgattgtgtgagaaaattccactgcaagaaaaactggacaagtttttcttagcttctaggaagacggaagactccctgacaaggattttattttcattgtagtgggctgtcagcaaggccatttatcatagcctgaattaataaggraaggacagaagaaaaacgacttgctgccaaacagcttggggatgttcggggctgcatagatcaatcagctgggcacactagctattgtctgctcatcaattcattttcattgagtttcaggacagataacaccaggcctttttctgaggcaggatcctaaagtgcctacctaaacttgctttccgttccaaccttttcatcccacaggacactcatgaaggtggcatactgtgtttagatgaaggtgctcc

SEQ ID NO: 383070 - DNA, 346 bp, Homo sapiens
tgcataccctgtagcacctcacggagaggtctctggagtcaggtgactggatttaaattccagctctctcctaagggatgtgtggccatgggtgaataatgtaacctctttaagtctcatttcttcataagaaaatgggttttataaagttgagaggatgaaatgagaygaagcatgcaaggcacctcacattttgtagacaaataagtaaaataaaattgtacttaccttgtacatcagataagggcaattttatttatctgtctacaaaaatgttcctgatgcaaggcaaaatcatacctgggcagaaatggctttatgtcatacctcctccttcccgcccttg

SEQ ID NO: 383071 - DNA, 650 bp, Homo sapiens
atgtccacagtcacaatgatagaaaaataatacaattaaaagagtctctgtagccctgatgtcaacaactgggttcttttcaccactccaaaaacctacctcactttcctgggactttattgaacatttttatcaggttaagaaactaatcttagaagaggtaattaactgcaaattarcaataacctcccatataggtgtgacatgacgtatattatacagtcttctcctgcacagaaaggcatcatcaaaacagtagccctgagaggtagaattattgccattttgcaaatgacacttaggctaagtgtgagggaccatgtgtcttttttccaaggtaggtcaattgactaagccaagtcttatgttcatttttcattatcatccttcacctcctattttcaatttaaaaatgaaatacaggccaggtaaatacgattgagaaaaagacaaagaagaatttagatgcaaaggctatttcctgagcatactgaaaagcacatgttatgaaataaccacatgagaatacagggttctgggtcaggggagccaagagagttggggagacaactgttcactatgaaacaagtcatgcatgttggggagaaggcaaaattctttgcatacatttcttaattcttacaactctt

SEQ ID NO: 383072 - DNA, 536 bp, Homo sapiens
tttagtcctttaatgttttcttgattttctgcctttgcagctcccctctctgcaggagcacatgcccttcccaaggcccagagaactcaacacagggcactgagctaatgatcagaaaggaaagatttcctttttccatctatctgtagaatatgtaggcattaagtacatcttgtcttcttaaagtcccaggggaatgaaaacacctgtcacaatttttttttttttctaattgggaaagatgatggctgtsagcatctaggaagaagataactagatttgaaaagaagaaacagaaaaagatttaagggattattccttttcattaagaattttatacatacaatattaattgaatctttaaaaatgttaaaattattatctgtgggtggtagaaaaataggaacttattttttttcttctcattttctgtgctttaatatagtagttaggaggtagcaaactaggaggtaagtgcgaagaattggtagtgggtctagaaatcagagtttaataggatcaggctatctgattaa

SEQ ID NO: 383073 - DNA, 548 bp, Homo sapiens
taccctgtgcctgataatatatatgtattttttcttcaaatacgttagagccatactctgtattttcactgaaaaatgaaactgaaattctaaagagtaagagccaattcacatgcatacattttaattcagggtatgttgctcaggtgggaaaaatatgtttacttctaaactttttatttaatcacattcgtgttggtatcatgtagacataaagaaatctagtgctatgaattccacaagattttaatgtatgttacaatattcattgatatattagaactaaaaagcatacattggcaaaggattaattatatatttttttatttagaataaagtattgccaaccaaccactggaaaatgcgagaaattctcacttaactcttgattgaatggagaaattgaaatataatcaaagactatctataaaacaatgatgataaagataaaacctatgaatacaaataaggctatrctcagtgaaaaaagaaatcacagacaaatacaacaaacgagagactgaaataaatgatttgggcttttttgg

SEQ ID NO: 383074 - DNA, 615 bp, Homo sapiens
aatctaaaccaacacaaggtcaggatttatttaaagggtgataaaaagataatgtaaaagatgttaaaacttaatctattttaataccatttgttttctctatatttattctctctgaactggctcactcctgaaacagctgcttctggagttcatacagtgcatggttaaaaaggagagcattggcagccacacaaatgacagaataatgastatgtggaaaaacagctgagtgctataatttacagatgatatgaccacatcaaaaccagggaaatgagctctctctgtttaatagtctccagactgctgtctctggccatccattcttctgactttacaagccagctctgctgcattcaactctaatcaaaaagaaatgaagagagaaagaaccttgctgtactttttcataaactgctctgagtgttctctaatcttctccactggggaacaaaagcaatgccaatataaccatagaaagactggcttttctggcaaagaaatgtgtgtgtgtgtgtgtgtgtgtgtgtgtgtgtgtgtgtgtgtgtgtgtgtatggatgattaactgacaagaacctaattgctggagtagtgaacattaattaccaaag

SEQ ID NO: 383075 - DNA, 557 bp, Homo sapiens
tcttcactccttcatctggattttgcttctctttaggtctcttacaatgtttaagcgacatactcttaggttctgcatgcctctcttgtctttgtgtggtttcaggtcaccattttgaagggtccttttccctaatgcatgtactctctccctctctgaagcactattttataccttctcctccattctcaaaccttcaacacttgttccaccaactttactctgagttgaagacctttcctatagtgaaactagagttcactgagaaaaaacaaagtgatcagaagagaaattccagactctccaaaccacactccccacttttgagcatctgcctctacattactcaggtgaactaccataccacgttactcaacatgaacccctctcttcctgactattcaaacattaatccagtaattcttccctctccctttctcacagtatcattttctccctctctacsagatattccccatcagcattttaaaatgctgtgattttttttccatcttcataaagaaccctctcaatcccacttcctttgccaggccagt

SEQ ID NO: 383076 - DNA, 615 bp, Homo sapiens
aatctaaaccaacacaaggtcaggatttatttaaagggtgataaaaagataatgtaaaagatgttaaaacttaatctattttaataccatttgttttctctatatttattctctctgaactggctcactcctgaaacagctgcttctggagttcatacagtgcatggttaaaaaggagagcattggcagccacacaaatgacagaataatgactatgtggaaaaacagctgagtgctataatttacagatgatatgaccacatcaaaaccagggaaatgagctctctctgtttaatagtctccagactgctgtctctggccatccattcttctgactttacaagccagctctgctgcattcaactctaatcaaaaagaaatgaagagagaaagaaccttgctgtactttttcataaactgctctgagtgttctctaatcttctccactggggaacaaaagcaatgccaatataaccatagaaagactggcttttctggcaaagaaatrtgtgtgtgtgtgtgtgtgtgtgtgtgtgtgtgtgtgtgtgtgtgtgtgtatggatgattaactgacaagaacctaattgctggagtagtgaacattaattaccaaag

SEQ ID NO: 383077 - DNA, 623 bp, Homo sapiens
ccctttccatcccttgcacatgaacccccrtccttttttttttttttttttaactagagcccatccataaagtctgaaagacgggatgacttcaaatatgcagatatcttcacaagactacaataatcaggaatgagaaaagtgtgaggaatcagaaaaatgtgtcaacatcaaaggaacaaaaattccaggaactgaccgtaaaggaatggaggtcaacagaaggcctgtcaaagaattcaaaataattattccaaagaagctcactgagttacaagggaacacagacaaatatgttaatgaaaccaggaaaacaatacaagaacaaaatgaaaagctaaacaaagagaaagcagaagttttagatccgataaacacaatgactgaattatgaagtacaactacaaaacgcaatagagagcttcaatagcaggctagatcaagcagaagaaagaagaagtgaattcaaggacagattatttgaaatagtccagtcagcagagaaaaacatttttttaaataaaaagggacgaagaaagtttacggaatcagatctatggaactccatagatttgcataataatagttagagaaggacatttgcataataatagttagagaag

SEQ ID NO: 383078 - DNA, 569 bp, Homo sapiens
acgtttatagatctaaaggggggaatatagggcaatataataatagtaggcgatgtcagtgccccactttcagcaatgggcagttcatccagatagaaaatcaaaaatgaaaaatttgacttaagcacacttttgactaaacggaccttgcagacatatatacagaacatttaatccaatggcagcagaatacatagttttctcaagtgcctataaaacatattccargataaatcacaagttagaacataaaacaagtcttaagaaactgaataagattgaaatcaactcaagtatattttccaacaatagtggtataaaactagaaatcaataatttaaaaacccacaggcaacaaaagcaaaaataaacaagtgggactgtatccaattaaaaagcttctgcacagcaaaggaaacaatcaacaaaatgaaaaggcagcctacagaatggaaaacaatactttcaaaccatataattgataaggtatttatatccaaaatatataaataaaactcacataactcagtagcaaaataaccccaaataacctggcttaaaaatgggca

SEQ ID NO: 383079 - DNA, 535 bp, Homo sapiens
tttcaaaccatataattgataaggtatttatatccaaaatatataaataaaactcacataactcagtagcaaaataaccccaaataacctggcttaaaaatgggcagagggtgactatgtgaagtgctagatatattaatttgcatgactacagtaatcatttcatatatatatcaaaacatcatcctgtacaccataaatacacaaaataaaaaataaatttaaaaaatatattaaaaaggaaaacaacccaatgaacaaatgagaaacttaaaaatgggatgtcattgaaaaagactacagccaatgaattaataaaaatatggtcaatctcacacataatttaaaaaatgaaaaataactcaatgttataytttttctcagcagaaacaacagatggtatatttttaaaaatatcaaagatctcatatatgaaaattaacagtataaatacgttgtttataagcattttagtgtttattaaataggaaaagttattagaaaactaccaagcaaaaataattaccgcaaataa

SEQ ID NO: 383080 - DNA, 579 bp, Homo sapiens
caccagagaaaggtgaataccaacttaaagaaaaaaaaaaagatacaggatatagatatggaaaatctccagagaaataaatagcataagtaaaaaaaatcacaacttctggaattgaaggacacacttaaagaaatgcaaaataacactggaaaatcttagcaatagaatcaaacaagtaaaagaaataacttcagaacttgaamaaatgctttgaattaacccaatccacagagaaagaaaaaagaatttaaaaatgaacaaagcctccaagaagtttgggattatgttaaatgagcaaacctaaaaataactggtgttcccgaggaaaaagagaaatctaaaagtttggaaaacatatttgagggaataatcaaggaaaacttccccaatctcgctaaagatctagacgtccaaataaaagaagctcaaagaatgcctgggaaatttattgcaaaaggatcatcacctaagcacatagtcatcatgaagtcgagatgaagggaagaatcttaacagctgtgaagcaaaagcatcaggtaatctataaagaaaaactcatcagattaacaaaagaaa

SEQ ID NO: 383081 - DNA, 579 bp, Homo sapiens
caccagagaaaggtgaataccaacttaaagaaaaaaaaaaagatacaggatatagatatggaaaatctccagagaaataaatagcataagtaaaaaaaatcacaacttctggaattgaaggacacacttaaagaaatgcaaaataacactggaaaatcttagcaatagaatcaaacaagtaaaagaaataacttcagaacttgaaaaaatgctttgaattaacccaatccacagagaaagaaaaaagaatttaaaaatgaacaaagcctccaagaagtttgggattatgttaaatgagcaaacctaaaaataactggtgttcccgaggaaaaagagaaatctaaawgtttggaaaacatatttgagggaataatcaaggaaaacttccccaatctcgctaaagatctagacgtccaaataaaagaagctcaaagaatgcctgggaaatttattgcaaaaggatcatcacctaagcacatagtcatcatgaagtcgagatgaagggaagaatcttaacagctgtgaagcaaaagcatcaggtaatctataaagaaaaactcatcagattaacaaaagaaa

SEQ ID NO: 383082 - DNA, 514 bp, Homo sapiens
cacctcaaatacactgccatggtttaccatctgtgccctccaaagaaggggmagccaccacagtccacaatgcatctagaagcactggagccaaacctggggcagctgaggagtgctgtgccataagcagggagcagggccttgaagcaggaccaggcaatgagtgctgaggtcccatgggtaccctaattccttcctttgaaattgttctgttctcaaggcccttgtactctggacctgtgatgacaggaacagcactaatgatggggaagtacctttggggtcattctttcaatgttttgatgaatagcaactggccagtgcatgctagtctccttatcaaacagttcttggccacactcttggtgttctgtcttgaatatgatttctcatttgttataacatggacaggctgaaaattttccaaatctgtaagttttacttcctttttgattaaaaatttcatccttaaatcattcatgttttattttactataagcagtcgagagaagcc

SEQ ID NO: 383083 - DNA, 420 bp, Homo sapiens
aaattttccaaatctgtaagttttacttcctttttgattaaaaatttcatccttaaatcattcatsttttattttactataagcagtcgagagaagccatgccacaccttcaacactttgcttagaaatttcttttgccaagccaggtacagtagcacatacctataatctcagtgctgtgggaggccaagatgagaggattgcttgaagccagcagttcaagacaactcggcaacatagcaggaccctgtctctaccaaaataaaaataaaacaatatgccaggtatggtggcatgcgcctgtgtcagctatttgtgagggtgaaagagggggatcaattgagccaaggaggttgaggttgcagtgagttatgactgtgccactgcactccagcctagacaacagagtgagaccctggc

SEQ ID NO: 383084 - DNA, 420 bp, Homo sapiens
aaattttccaaatctgtaagttttacttcctttttgattaaaaatttcatccttaaatcattcatgttttattttactataagcagtcragagaagccatgccacaccttcaacactttgcttagaaatttcttttgccaagccaggtacagtagcacatacctataatctcagtgctgtgggaggccaagatgagaggattgcttgaagccagcagttcaagacaactcggcaacatagcaggaccctgtctctaccaaaataaaaataaaacaatatgccaggtatggtggcatgcgcctgtgtcagctatttgtgagggtgaaagagggggatcaattgagccaaggaggttgaggttgcagtgagttatgactgtgccactgcactccagcctagacaacagagtgagaccctggc

SEQ ID NO: 383085 - DNA, 605 bp, Homo sapiens
atggcaggacagaggtttaatggaaagaacactagattgggtgtcaagtatattgggtccaggcaccagctgtggtactcaccagctgtgtgaacatgctcaagtgacattacttgagcataatgtcacttaatactacctagcctactctctgagttcctgccactgtggcctttagttttcctaaaggagtgatgctcctactcacccaggagcctttgcacatgctgatctctctawcattaatgcacctcccatccccaatccttcaactagcttattcctccttcattttcaattatgacctcaactatcacttatacttacataatgtgttaatttggtttttccaagaagtagacactaagactgggttagatgtgcaagaaattgaatggggaaatgcctctgaaggttaaaggggaggaagcaggagtggctgttgagtgacatcagactgcaatgcaggtctgacatccatgaaagcattgcgggaaggaaagagaattgcacctgggttataagaaaggttaggccaggctgacggttaggccagatagtggaggaatagacccccactagcatcacctcctgcagctgtcatt

SEQ ID NO: 383086 - DNA, 605 bp, Homo sapiens
atggcaggacagaggtttaatggaaagaacactagattgggtgtcaagtatattgggtccaggcaccagctgtggtactcaccagctgtgtgaacatgctcaagtgacattacttgagcataatgtcacttaatactacctagcctactctctgagttcctgccactgtggcctttagttttcctaaaggagtgatgctcctactcacccaggagcctttgcacatgctgatctctctatcattaatgcacctcccatccccaatccttcaactagcttattcctccttcattttcaattatgacctcaactatcacttatacttacataatgtgttaatttggtttttccaagaagtagacactaagactgggttagatgtgcaagaaattgaatggggaaatgcctctgaaggttaaaggggaggaagcaggagtggctgttgagtgacatcagactgcaatgcaggtctgamatccatgaaagcattgcgggaaggaaagagaattgcacctgggttataagaaaggttaggccaggctgacggttaggccagatagtggaggaatagacccccactagcatcacctcctgcagctgtcatt

SEQ ID NO: 383087 - DNA, 522 bp, Homo sapiens
ttccagggattaggctatagacatctttgggaagcagggtattattctgcctactatattagtatacaaatcartaagactgaatgaattcacctaggacatgaattagcctaggacatgagtatgggtaaggaagaaaagcaatccaatgcctaaaactggggagttaaaggaaaccagccaaagagatcgagaaagagtagatggagagaaaggaggaaacataagagaaggttgtgttccagaagtcaaatgagcaaagtctttcaaggaaaagataatgacctactgcactaatgctactcataggctcgataaatgagggctgagattaggccattgggtttggccatgtgaaagtcactggggacctggaaaaagtgggtggagagttctgtgcaggtctgtttcctgccctgatcaccaacactgttcatattagtttgccaagcacctgaatgaagttgtccattctttgtcaccagtatcttccatctttataaaccctcatttccaccagcc

SEQ ID NO: 383088 - DNA, 522 bp, Homo sapiens
ttccagggattaggctatagacatctttgggaagcagggtattattctgcctactatattagtatacaaatcaataagactgaatgaattcacctaggacatgaattagcctaggacatgagtatgggtaaggaagaaaagcaatccaatgcctaaaactggggagttaaaggaaaccagccaaagagatcgagaaagagtagatggagagaaaggaggaaacataagagaaggttgtgttccagaagtcaaatgagcaaagtctttcaaggaaragataatgacctactgcactaatgctactcataggctcgataaatgagggctgagattaggccattgggtttggccatgtgaaagtcactggggacctggaaaaagtgggtggagagttctgtgcaggtctgtttcctgccctgatcaccaacactgttcatattagtttgccaagcacctgaatgaagttgtccattctttgtcaccagtatcttccatctttataaaccctcatttccaccagcc

SEQ ID NO: 383089 - DNA, 649 bp, Homo sapiens
taaatgtcgtcctctcttggtctaaaaagtctagtttctgtgtcccagaaaagttttgtatgcctattttactgtagaattattctgttattacggttgttgttattgtcagtcttttcagcaccatccacccttcttctgagaccagaatgcctcttttcaatagggaatctctttcatctcgtttgggtgtagagaaagccttttggccatgtggcatgaaagatatgctccctctccagtgtgatccagccccagccaatcagaactctatcgtacttggtggttgggataggcacgggacttagagagcatcagttgcaagtttctctgagacttgctrtatgggtgcttgaagaaagagactttgtcttccttttgaatcatcagtcatgatgacataggcttgagttgatcagacaccacatcaccctacagatgaaactaacctgctagagaacaaagtaaacacatagagatgaggagagttgagagacagaaaaagagtcaaaaccctgaggatgccatataggtttctgtatccagttgactttgagatttatttaatcctgtacatcatagttatgtgagtcaatacatgcttttttttgctaagtaaattcgactttagattctgtgatatgccgca

SEQ ID NO: 383090 - DNA, 649 bp, Homo sapiens
taaatgtcgtcctctcttggtctaaaaagtctagtttctgtgtcccagaaaagttttgtatgcctattttactgtagaattattctgttattacggttgttgttattgtcagtcttttcagcaccatccacccttcttctgagaccagaatgcctcttttcaatagggaatctctttcatctcgtttgggtgtagagaaagccttttggccatgtggcatgaaagatatgctccctctccagtgtgatccagccccagccaatcagaactctatcgtacttggtggttgggataggcacgggacttagagagcatcagttgcaagtttctctgagacttgctgtatgggtgcttgaagaaagagactttgtcttccttttgaatcatcagtcatgatgacataggcttgagttgatcagrcaccacatcaccctacagatgaaactaacctgctagagaacaaagtaaacacatagagatgaggagagttgagagacagaaaaagagtcaaaaccctgaggatgccatataggtttctgtatccagttgactttgagatttatttaatcctgtacatcatagttatgtgagtcaatacatgcttttttttgctaagtaaattcgactttagattctgtgatatgccgca

SEQ ID NO: 383091 - DNA, 649 bp, Homo sapiens
taaatgtcgtcctctcttggtctaaaaagtctagtttctgtgtcccagaaaagttttgtatgcctattttactgtagaattattctgttattacggttgttgttattgtcagtcttttcagcaccatccacccttcttctgagaccagaatgcctcttttcaatagggaatctctttcatctcgtttgggtgtagagaaagccttttggccatgtggcatgaaagatatgctccctctccagtgtgatccagccccagccaatcagaactctatcgtacttggtggttgggataggcacgggacttagagagcatcagttgcaagtttctctgagacttgctgtatgggtgcttgaagaaagagactttgtcttccttttgaatcatcagtcatgatgacataggcttgagttgatcagacaccacatcaccctacagatgaaactaacctgctagagaacaaagtaaacacatagagatgaggrgagttgagagacagaaaaagagtcaaaaccctgaggatgccatataggtttctgtatccagttgactttgagatttatttaatcctgtacatcatagttatgtgagtcaatacatgcttttttttgctaagtaaattcgactttagattctgtgatatgccgca

SEQ ID NO: 383092 - DNA, 610 bp, Homo sapiens
atattatttggcaatgaagagtggcaccccataatatgccataatatgcctttttgacatraagattattttgagctaaaggcacttgagaaacagcagatgcaagaaaggcattctgatctactcctttcttcctgaaaacaggccatagaaactcctgtgtgaaagatgtcctcactgtaccagcagaaagcaaagcattctttgacagggagttacagcagaaagagttctgtgcacgtgggccttgttaaaaataattcttatcttcctttagcctccctgtatggcttagccacttttctaccattgcctgtctttgttacacctagcgtaaaagcatctaggttttgccagttctttgggtcttcatttccttataaggtctcttgtgtcacataaaacgtatgtaagtgcttttctcttgtttatctgtctgatgtcaatttaattctcatgtccagccaaaaatcctaaaagggtagaggtaaaattttccctcccctatagcaataaaagggaatgaagtactgatgtgcgctacaacatggatgaactttgaaacattatgctaagtgaaaagtcagtcacgaaaggtcgtatgttgtag

SEQ ID NO: 383093 - DNA, 610 bp, Homo sapiens
atattatttggcaatgaagagtggcaccccataatatgccataatatgcctttttgacataaagattattttgagctaaaggcacttgagaaacagcagatgcaagaaaggcattctgatctactcctttcttcctgaaaacaggccatagaaactcctgtgtgaaagatgtcctcactgtaccagcagaaagcaaagcattctttgacagggagttacagcagaaagagttctgtgcacgtgggccttgttaaaaataattcttatcttcctttagcctccctgtayggcttagccacttttctaccattgcctgtctttgttacacctagcgtaaaagcatctaggttttgccagttctttgggtcttcatttccttataaggtctcttgtgtcacataaaacgtatgtaagtgcttttctcttgtttatctgtctgatgtcaatttaattctcatgtccagccaaaaatcctaaaagggtagaggtaaaattttccctcccctatagcaataaaagggaatgaagtactgatgtgcgctacaacatggatgaactttgaaacattatgctaagtgaaaagtcagtcacgaaaggtcgtatgttgtag

SEQ ID NO: 383094 - DNA, 605 bp, Homo sapiens
catgtgagaataaaaccaggggaaggcagagtcaaaggaaagagagagaattctgaagatgttgtttgagtacctgaacgcaactgccgtaagccacaagctctgcctcttgaatttccttctcacatgaaacagtaaattcttctcccctcttttttaasttagtttgaattgagtatctgttacttgcaattaaatgggatcttactgccgcaactgtactgtggagacctataatgaatagtaatatacattgccaataagcatgttattctgtctatttagttgccattttaaattaaacactgctcatctttgcaatgggagttacatactaattcccaagaaaggttaatttttatgagtttgtaagcccttaggaatcattttttatccaatatttgcctctcggccctggtttttccctcgagccatcttgctgtttgactttaagaaaatgaaagttagtgatttcacattacattttaattatttctttcagaataaaccaaattaaattttaaaagctaaagacattttctgctcttgaacttagagctgtagcttttaatgaaatctgctgcagtctttttttaattttaata

SEQ ID NO: 383095 - DNA, 558 bp, Homo sapiens
tgtgaatgcaggactttaaagaaataacttacaataaaccaaccatcaatctatgctcccamagttactagaggagaacacattgaaaatacgatagaggagagagttatgcagaacagaatggagaagtctgaacattgtgaggacattctgcctatgctattattacatttatgactatgaacctattgtgtgatttcctcagggctttgaagttttataaatgtaaagttgtttctgctgaaagctttgggatagacagatgagattcaagtcagatgaccttaaaccaccaacttgaaacttaaggttctcggcttccctcacatataaaaaggtgagagaacagggctggaacgctaatgattattaaccctttcactccagctccctgtaatctgatgatttcaggacatgagtatctgaaaacttgagtatcaagatagaacatggttttgaaagtgatggatgctagtggaatttccaatcctggattccctttggctactgaattatagcattcctcagagtctacaaaattaggtttacaaaagtggc

SEQ ID NO: 383096 - DNA, 579 bp, Homo sapiens
gttattggtctgttcagggcatctaattcttcccaatttaagctagtagggttgtatttttccaggaatttatccatctcttctagattttctagtttatgtgagtaaaggtattcatagtagcctcgaatgatctttttatttcagtggtgycagctgtttcatttattagtgaggttatttggattttctctcttcttttcttggttaatcttgctaatggtctatcaattttatttatcttttcaaagaaccaggtttttgtttagttatcttctgtatttttttttgtttcaatttcatttagttctgctctggtcttggttatttcctttcttctgctgggtttgtgttagatttgttcttgttcctctaattccttgatgtgtaaccttagaatgtcagcatgtgctctttcagtctttttgatgtaggcgtttaggactatgaacttttctcttaacaccacctttgctgtatcccagaggttttgtagattgtgtcattattgtcattcagttcaaagaatttttaatttccatcttgatttcatttttgacccagtgctcattcaggaga

SEQ ID NO: 383097 - DNA, 544 bp, Homo sapiens
attttacagacgataagactaagactcagagcgggtgagactctcagggcacacagcgaggaacagcagagctgagattcaggtccacgaggcccagccctatcacctgtggaggcacacaggaggctcagagggggacagtcttgcctgggagcaccccaaggcacaggctcagagcccagcatggccttgcccataccactctgtggaccacttggacccacagggtggtgtctggacarccacagtgggccacggccaccgggcagctcagcagccatcccctctaatggatcactgtcacccccacagtaggccacccacgaacacacatccttagctctctattactgacaagtgtcccacctccctggcttggcattcaaggcccccgcatgcctgtccaatctcatttaccatcccatcttgttccaagtaccccatcaggctctaaatccatcgtctccatcgatgccctgccttcaggcctaggggcatctctgccctggaaatctgtctgaatgacagacaggaccacaggcat

SEQ ID NO: 383098 - DNA, 554 bp, Homo sapiens
accagtggtagagctcgccatctcttctgtagaatttggggctccaggctcagccagtggggctgggttaagagaccatgggggaaagggcctcaggcaccagaacaaaacccaggagcagagagagcccccaccagcrtcaacccaggctggacatcaggagctgtgcagccctaggtggaggctgggcaaccgtggcttgttgatttcactttgcggcggcgtagtgaggaggtaccagaaagcagggatcggtctccccctcacttcacaaggaaatactaaattaacagatcatagacaccattccccagggaactggcacagcataggttaactgggacccaggttgtcctccaaatcatctctatgaagactggccttgctctccagagagagagatgagtatcatgaagactgtcaaccacccaaatattataaacgcgtaccaggtaattgacaaagttacaacacaaaatccacaacttagagaagcaagaaacagaacagcaccaccagatatgccaccatggccacatcaggcagccacatca

SEQ ID NO: 383099 - DNA, 554 bp, Homo sapiens
accagtggtagagctcgccatctcttctgtagaatttggggctccaggctcagccagtggggctgggttaagagaccatgggggaaagggcctcaggcaccagaacaaaacccaggagcagagagagcccccaccagcatcaacccaggctggacatcaggagctgtgcagccctaggtggaggctgggcaaccgtggcttgttgatttcactttgcggcggcgtagtgaggaggtaccagaaagcagggatcggtctccccctcacttcacaaggaaatactaaattaacagatcatagacaccattccccagggaactggcacagcrtaggttaactgggacccaggttgtcctccaaatcatctctatgaagactggccttgctctccagagagagagatgagtatcatgaagactgtcaaccacccaaatattataaacgcgtaccaggtaattgacaaagttacaacacaaaatccacaacttagagaagcaagaaacagaacagcaccaccagatatgccaccatggccacatcaggcagccacatca

SEQ ID NO: 383100 - DNA, 609 bp, Homo sapiens
tactgtacaccatctattaacattgcttgaaacagcagggttcacagatcaaagtccaggaaatgctgtcctagggagaacacatggaaaaagcatattaggcactcaytatttggtgcctaacgaacggccatgccctcttcttcttggagtcacagcttgattttgtttgaggtgttcctttccccagctcctgtagtaagttctgagtggtccaaactggtcttggcagtcccagtccccttagctgtggctgctgtaagcatcagcatgtgatgcaaatctggccaatgaaagggaactgtgctggagggatctgggaggagacttataaaaagagactgtctatatatgagcacctctgaaggtaatgatcatgaggggtaataaagagagtgaacatgacagagcagaaagatggaaagagcctggtccctgacaaaatctttaaacctctgaattaactttagggctctgctaccttggatcttcttgtttttccttattgtataagttaagttggtttttttgttacttatagatgtaggcctcataactgacacaggttatctttaaatacccaagagttgttttaaaaagaataactac

SEQ ID NO: 383101 - DNA, 574 bp, Homo sapiens
tttcctagggagtaaacaccatagcttgattcatattatcagttttggggtccatctaccccataaaccacacatgactccactttgctgaaataggaaagatggtgcagtgatgcagtaatattagcaagaaacagccagataggatctaaatggggcaagggtgttgatttgaggttcaggagaagccttgtgccattttcccaacctcaccatataaagcatgggtgagggccaaagataaaagctgcttccgcccagagcacattcccagggatctcctggtacagtccacagtactgatgatcaaagcagtaacagcagggtctttgcaccacctaggccaactgagggttcataagctaagcaggcgttcagctttgttacccttggagaaatgctgcattttcactaaagagcatttcctgttgcagagaggagagctcggccccctgccgggataatcacaataaagtctccgttgataaaatggccaaggggcagtgtctcaggtttctctggtttgcaggttatsgagctcacttgtgagctccaatccttgtgagtggaagca

SEQ ID NO: 383102 - DNA, 535 bp, Homo sapiens
gatcaatggatcagatgtttattatgtgatggacactgttctaaacatcctagaattaattcatcttctcccaaactccttgagattggtattgccattgaccacattttatatatcaataacccaagatagagagaggttaagaaatttgctcaaggtctcccatctggtgagtgtcagatcaggattcaaaccctggagcttccattatgagccacaacactctagaccagggctgcccagtagaactttgcaatgatgaaaatgttctgtgtctgcactgcccgaagtgactgccactggatatgtgtaagtgttgagcatttgaaatatgtgtgaccaaggaactgaattttgaattttattgcatttccatgactttagatttaaatagccaggctagtggctaccaaattgtacatagagccctcgcacctcttatttgctcctttgttaatttctgtctgccacataaggatgaaactkgcctatgcattagtttcctcattttacagtaagggaaacacccctggta

SEQ ID NO: 383103 - DNA, 609 bp, Homo sapiens
gggctagttagggttgaagaggtatcatgttttaagtatgactgccaatatatagttctagtgggatacccacaatgctatttgaacaatgctatatgaaccaaaaagaaagtaataaaaatggctaacattaaaaagcaggacaaaggtaattgcaaataaaaagtaggaaattacaattctgggcaaatagatccaaatattttgatattgataaagatatagtgaatgccgaacagacagtattcatgagccagtggtgttccatcaaaatatacaaagaaagggtggttagcaatacaaatagaacttgattaaaacacaatcacagggccgggcgcagtgactcacacctgtaatcccagcactttttgaggccgagacgggtagatcacctcaggttaggagttcgagagcagcctggccaacatggtgaaatcctgtctgtrcaaaaaacacaaaaagttagctgggtgaggtggcgggcacctgtaatcccagctactggggaagctgaggcaggagaattgcttgaacccaggaggcggaggttgtagtgagccgagattgcgccactgcactccagcgcaggtgacaagagcaaaactc

SEQ ID NO: 383104 - DNA, 438 bp, Homo sapiens
attatttgttgttttcttaggcaaggaattgttcctcctggtcttacagaaaatgaattgtggagagcaaagtacatctatgattcagcttttcatcctgacactggtgagaagatgattttgataggaagaatgtcagcccaggttcccatgaacatgaccatcacaggttgtatgatgacgttttacaggtatgttatgaatatgtagcaacagtgtgtttaccattacagaagctcaaagtatatttttgtatgtaaataattttgttgaaataagtattatttcataagtatatgaagtgacaaacaaggtaattagcttgawtgaatcattccgtaatgtacttatgaatcaaaacatcatgttgaactcctttagtatatacaataaaaaataaaattgaagacaataaaaaacaaaaaatggggtattatt

SEQ ID NO: 383105 - DNA, 539 bp, Homo sapiens
ataatacttcacctctctgtgattcagtttccacatgtgtactatggaaacagcagtacaaagagggctcagcaacacagcttacacaagagagcccagcccagagctgggtatatgctgtgtgctcaataaaccctggtttcccrtcttcatgccatcagttatggctctttagattgcatataacagaacatctggcccaatttattcagaggtgagactaatggcagaagagcccagagcttgtactgactccagaaggtcagcatcgaggccaggcactggatttctctccctctctctgccatgcacttgggtatgtcagcataatcctctggccccatgtgctgcactccctcccagcagcacccacctctccctttgggcctccagagctctctgcctcccatgccatcctgaaggccctctctctgtccccagttggaacacatgccttttgtcttagccaagaactgcagctatgggcacgtaacatgctagtaggattaagcaaatcatcctggagctgaaatctggat

SEQ ID NO: 383106 - DNA, 539 bp, Homo sapiens
ataatacttcacctctctgtgattcagtttccacatgtgtactatggaaacagcagtacaaagagggctcagcaacacagcttacacaagagagcccagcccagagctgggtatatgctgtgtgctcaataaaccctggtttcccgtcttcatgccatcagttatggctctttagattgcatataacagaacatctggcccaatttattcagaggtgagactaatggcagaagagcccagagcttgtactgactccagaaggtcagcatcraggccaggcactggatttctctccctctctctgccatgcacttgggtatgtcagcataatcctctggccccatgtgctgcactccctcccagcagcacccacctctccctttgggcctccagagctctctgcctcccatgccatcctgaaggccctctctctgtccccagttggaacacatgccttttgtcttagccaagaactgcagctatgggcacgtaacatgctagtaggattaagcaaatcatcctggagctgaaatctggat

SEQ ID NO: 383107 - DNA, 607 bp, Homo sapiens
tctggccccatgtgctgcactccctcccagcagcacccacctctccctttgggcctccagagctctctgcctcccatgccatcctgaaggccctctctctgtccccagttggaacacatgccttttgtcttagccaagaactgcagctatgggcacgtaacatgctagtaggattaagcaaatcatyctggagctgaaatctggattctatgctctccaaccaagtggctgctacaaactggggtacaagtgactgcttctctcagcagaagaaggggagtaatgatatgggaagataatcaacgaatgtccattgaacacattctgtctgtcagggagttcatcaggaaacagaaaatacagaagttattttaacagaggatttaatctaaagaattgtttaaacaggtgacagaacactgaagccatcacagtgtagcaactgcaggaatcagctaccattcctaataccaggggaatgaagaggagaggctgggattatgaaatcggagagactcggggaaaagagagcactttttggctggtgctcctggccctgagcttagaggagaggccctttggttccaggacccagaaccctgaggag

SEQ ID NO: 383108 - DNA, 595 bp, Homo sapiens
ggggtacaagtgactgcttctctcagcagaagaaggggagtaatgatatgggaagataatcaacgaatgtccattgaacacattctgtctgtcagggagttcatcaggaaacagaaaatacagaagttattttaacagaggatttaatctaaagaattgtttaaacaggtgacagaacactgaagccatcacagtgtagcaactgcaggaatcagctaccattcctaataccaggggaatgaagaggagaggctgggattatgaaatcggagagactcggggaaaagagagcactttttggctggtgctcctggccctgagcttagaggagaggccctttggttccaggacccagaacccygaggagaggtgctgggatctctaaaggggtgtaatggggctgaatcagggtgtgtggaaaaaacctagctcttggatgaagaagcaaggctgtagtgatgccaacaagaataagatgcagacaggaagggacatgtctctccttctgctttcagtctttcctccctccccgggtctgcattagagccagctggcaaagcacaaatgtggcttacagagtcatagaatcacaaag

SEQ ID NO: 383109 - DNA, 595 bp, Homo sapiens
ggggtacaagtgactgcttctctcagcagaagaaggggagtaatgatatgggaagataatcaacgaatgtccattgaacacattctgtctgtcagggagttcatcaggaaacagaaaatacagaagttattttaacagaggatttaatctaaagaattgtttaaacaggtgacagaacactgaagccatcacagtgtagcaactgcaggaatcagctaccattcctaataccaggggaatgaagaggagaggctgggattatgaaatcggagagactcggggaaaagagagcactttttggctggtgctcctggccctgagcttagaggagaggccctttggttccaggacccagaaccctgaggagaggtgctgggatctctaaaggggtgtaatggggctgaatcagggtgtgtggaaaaaacctagctcttggatgaagaagcaaggctgtagtgatgccaacaagaataagatgcagacaggaagggacatgtctctccttctgctttcagtctttcctccctcccygggtctgcattagagccagctggcaaagcacaaatgtggcttacagagtcatagaatcacaaag

SEQ ID NO: 383110 - DNA, 540 bp, Homo sapiens
cctttctttctgccttgatgcagcttatcattgagaaaattagcccagaacagctcagccatttgatgaggaaggagaggaatagcaaagggagttgggggttggatcagttaatcagctaaccagccaaaatctcgatatattatccctccacgaatgtttcrgggttcttggtgagagttttcaaatccataacaaaataaccagaaaaagaatgtctactctgtgttgcaatttgcctatgacttggatgagtctgtttcaaatgaccctccgtgaggactgccacattcagttgtgcagcctgtgcactgcacaaaggtgctcctgcccaggggagcaggaggaagctggaattcaccagggactctgcttacgagctgggcctgcctgggcctctttcaatcatagcctggggctctttcaatcttagagaggagcctcaggaggtcagctgtaacttgtctgccagaaagggtaaccttgcgaaattcctacaatggtgctgtatgtacttgctggagccctgacttagtttac

SEQ ID NO: 383111 - DNA, 524 bp, Homo sapiens
ataatcaataaatagtcataaaaatgggcaaccagcagccctcggggctgctctgtctacggagtagccattatttattcctttactttcctaataaatttgctttcgctttactctatggactcaccctgaattctttcttgcacaagatccaagaaccctctcttggtgtctagattgagtctcctttccagtaacaaaactactaaaatatgtggacttcttccagtttctctacttcatgagcataacaaggtctctcgggtatccttgagactctataaatctctggataaaagtacattgacctcaaaagtgctctgattttaaaaggaccctctttctcccstccccacacactcccacctgagtctttgcatacattgttccttctgcgaacatgcttttccctccttcttcgtctaagcatgtcctatgagatctttctttaagatcagattcagtgttgcatcctccgtaaagtctcttttggtgctctatccaccctcccaaagctgggatgg

SEQ ID NO: 383112 - DNA, 470 bp, Homo sapiens
  misc_feature (1)...(470): n = A,T,C or G
aagattccttctgatcagtagttgaaagaacagataaagtattagatgagagaaacctccttgcttaactgctgtgatgttctgtgatgcaatgagatgcccaccttgaatagaaattgaggcaggagctggaaggaaagatgcragcagcatagttttgctgggtttatgggtatcaaaggcacactagtattcagagagcccatcattggcagtgcagggcagcatcattctcatcattgcaaacatttatccggcaacaagtgtgccaggcactgtgtgagtcctcctcacatcatacctaacagacgactattattacgttcatgttaactgaggaggaaattgaagcacagagaatttaggttacctatcatcacaaagctggtaagtaatgcagacaagactcaaacccaggctgctgactccagagccagtgctcttcactngctccatcatgctgcttccca

SEQ ID NO: 383113 - DNA, 416 bp, Homo sapiens
tggcttgcactgagagctgccctcccactctctctccaaatttcctcttcggagtagcctaacaaggtgctgtcacagacccttgtcagccaygatgaccccacccagaccatccctctgctgtttcactctttgatactctctggagctctctggggaggggtgagacctgccgtcttctttgtacggtttgcccaggtcttacagtcatggctggctgcctctctctgagaactgggactcctgaacttggtgaaatacctcagccatcgatcatgttgaattattgggaacactcatttaaaatccgagcctgttccagatagactctctctctttctgccctgactgtgagagaagccctgctggatggtggagatgctcgtgggctgtgagcaagggatgcaaaggctgcc

SEQ ID NO: 383114 - DNA, 582 bp, Homo sapiens
aaggaatgcactcctggggggaggtctataaatggccgctttsggaatgtctgtcttatgcggttgagataaggactgagataggccctggtctcatgcagtacccaaaggcttactagggtggagaaaaactctgccctggtaaatctgtggtcagactggttctcttgttttctgttttctgttgtttaagatgtttatcaagacaatacatgcgccaatgaacatagacccttatcagtggttctgcttttgacctttgctttgtgatcattgctggacccttatcagtagttctgcttttaccctttgccctgttccctcagaagcatgtgatctttgttagaaccttagtagtaattctgctctttgccctttgaagcatgtgatctttgtacctactccctgttcttacaccccctccccttttgaaacccttacttaagaacttgctggtctgagactcagggggcatcatggccctactgataggtaatgtcacccccagtggcccagctgtgaaattcctctctttgtagtgtctctctttatttctcagctggctgacacttatggaaaaca

SEQ ID NO: 383115 - DNA, 582 bp, Homo sapiens
aaggaatgcactcctggggggaggtctataaatggccgctttgggaatgtctgtcttatgcggttgagataaggactgagataggccctggtctcatgcagtacccaaaggcttactagggtggagaaaaactcygccctggtaaatctgtggtcagactggttctcttgttttctgttttctgttgtttaagatgtttatcaagacaatacatgcgccaatgaacatagacccttatcagtggttctgcttttgacctttgctttgtgatcattgctggacccttatcagtagttctgcttttaccctttgccctgttccctcagaagcatgtgatctttgttagaaccttagtagtaattctgctctttgccctttgaagcatgtgatctttgtacctactccctgttcttacaccccctccccttttgaaacccttacttaagaacttgctggtctgagactcagggggcatcatggccctactgataggtaatgtcacccccagtggcccagctgtgaaattcctctctttgtagtgtctctctttatttctcagctggctgacacttatggaaaaca

SEQ ID NO: 383116 - DNA, 582 bp, Homo sapiens
aaggaatgcactcctggggggaggtctataaatggccgctttgggaatgtctgtcttatgcggttgagataaggactgagataggccctggtctcatgcagtacccaaaggcttactagggtggagaaaaactctgccctgktaaatctgtggtcagactggttctcttgttttctgttttctgttgtttaagatgtttatcaagacaatacatgcgccaatgaacatagacccttatcagtggttctgcttttgacctttgctttgtgatcattgctggacccttatcagtagttctgcttttaccctttgccctgttccctcagaagcatgtgatctttgttagaaccttagtagtaattctgctctttgccctttgaagcatgtgatctttgtacctactccctgttcttacaccccctccccttttgaaacccttacttaagaacttgctggtctgagactcagggggcatcatggccctactgataggtaatgtcacccccagtggcccagctgtgaaattcctctctttgtagtgtctctctttatttctcagctggctgacacttatggaaaaca

SEQ ID NO: 383117 - DNA, 568 bp, Homo sapiens
gggatgaaagcaacttccatcaatgctcaaaagttattcgtttaactttttttttttttttgagatgaagtctctctctgttaaccaggttggagtgcagtggtatggtcccgggtcactgcaacctccacctcctcrgttcaagtgattctcctgcctcagcctcctgagtagttgggactacagttgtgtgccaccacacctggctaatttttgtatttttagtagagatggggtttcaccatgttggccaggatggtctcgatctcttgaccttgtgatccaccctccttagcctcccaaagtgttgggattacaggcatgagccaccacgcccagcccacttaacttctatattactttcctgttggtggatttaccagtgcaaactgagcagcttaaacaccacccagttattatctgttttcatgagccaagggtctgggcagggtttaactgggtcttctattcagggtcacaatactgcaaccagagtgtcagttggagctggggtctcatcagatgctcagggtcctctttcaagcttattcagtttgtggactgaatt

SEQ ID NO: 383118 - DNA, 568 bp, Homo sapiens
gggatgaaagcaacttccatcaatgctcaaaagttattcgtttaactttttttttttttttgagatgaagtctctctctgttaaccaggttggagtgcagtggtatggtcccgggtcactgcaacctccacctcctcggttcaagtgattctcctgcctcagcctcctgagtagttgggactacagttgtgtgccaccacacctggctaatttttgtatttttagtagagatggggtttcaccatgttggccaggatggtctcgatctcttgaccttgtgatccaccctccttagcctcccaaagtgttgggattacaggcatgagccaccacgcccagcccacttaacttctatattactttcctgttggtggatttaccagtgcaaactgagcagcttaaacaccacccagttattatstgttttcatgagccaagggtctgggcagggtttaactgggtcttctattcagggtcacaatactgcaaccagagtgtcagttggagctggggtctcatcagatgctcagggtcctctttcaagcttattcagtttgtggactgaatt

SEQ ID NO: 383119 - DNA, 576 bp, Homo sapiens
ctactactgttaccaaggaaataaaaaggatgattagaggctattatgaacaaycatatcctaacaaattggaaaacctagaggaaagggataaagtcccagacatacacagcctaccaagattgaactaggaaggaacagaaaacctgaactgacccaaaatgaatagcaggtttgaatcagtaacaaaaagtctcccaaaagagaaaagccctagactaggcttttatgctgatttctacccaatttataaagaaaaacaaacaccaattcttctcaaactattcccaaaaattgaagaggagggaattcttcctaactcattgtataaggccagcattaccctcatatccaatcaagacaaggacacaacaaaaagagaaaactacaggccaatattcctaatgaacacagatggaaacattctcagcataatactaccaagccaaatctaatgatgaatgaaaaagataatataccatgatcaagtgggatttatcccaggaatgcaaagatggcttaacatacacaaatcaatacatgtgatacatcacatcaacaagatgaaaggcaaaa

SEQ ID NO: 383120 - DNA, 576 bp, Homo sapiens
ctactactgttaccaaggaaataaaaaggatgattagaggctattatgaacaaccatatcctaacaaattggaaaacctagaggaaagggataaaktcccagacatacacagcctaccaagattgaactaggaaggaacagaaaacctgaactgacccaaaatgaatagcaggtttgaatcagtaacaaaaagtctcccaaaagagaaaagccctagactaggcttttatgctgatttctacccaatttataaagaaaaacaaacaccaattcttctcaaactattcccaaaaattgaagaggagggaattcttcctaactcattgtataaggccagcattaccctcatatccaatcaagacaaggacacaacaaaaagagaaaactacaggccaatattcctaatgaacacagatggaaacattctcagcataatactaccaagccaaatctaatgatgaatgaaaaagataatataccatgatcaagtgggatttatcccaggaatgcaaagatggcttaacatacacaaatcaatacatgtgatacatcacatcaacaagatgaaaggcaaaa

SEQ ID NO: 383121 - DNA, 576 bp, Homo sapiens
ctactactgttaccaaggaaataaaaaggatgattagaggctattatgaacaaccatatcctaacaaattggaaaacctagaggaaagggataaagtcccagacatacacagcctaccaagattgaactaggaaggaacagaaaacctgaactgacccaaaatgaatagcaggtttgaatcagtaacaaaaagtctcccaaaagagaaaagccctagactaggcttttatgctgatttctacccaatttataaagaaaaacaaacaccaattcttctcaaactattcccaaaaattgaagaggagggaattcttcctaactcattgtataaggccagcattaccctcatatccaatcaagacaaggacacaacaaaaagagaaaactacaggccaatattcctaatgaacacagatggaaacattctcagcataatactaccaagccaaatctaatgatgaatgaaaaasataatataccatgatcaagtgggatttatcccaggaatgcaaagatggcttaacatacacaaatcaatacatgtgatacatcacatcaacaagatgaaaggcaaaa

SEQ ID NO: 383122 - DNA, 552 bp, Homo sapiens
cagaaagaaaatcattgcctgttctcacttatatgagcggtttatgctcctggaaatcaaagtgggggccatgtttcaggtcagtagggtcagggatagagaccgcagttatggacttgtgtgccctggagctatataaaattgacatcatggagataaagagtagaatgatagttaccagaggctgggaataggaggggtttgaaaagaggttgattaatgggtataaaaatatataacagaaggaataagatctagtgttcattatcacagaaagtgactacaacaatttgttgtatatttctttttttttttaatttcaatagtttttagggaacaggtggtatttagttacatgtataagttccttagtggtgatctctgaaattttggcatactcatcaccaaagcagtttacccaatgtatagtcttttatctctcaccctctcccaccttccccctgagcccccaacgtccattgtttcattcttgtgcctttgcatcatcatagcttagctcccacttacaartgagaacatgcaatgtttggt

SEQ ID NO: 383123 - DNA, 541 bp, Homo sapiens
gtcttactgtctgcttgatggcttttcacttctctgtggccctgggagttgttaaatcctcatatttgagttctgggatatcactggtgatactmttggtgctctatatttgtttttggttttctgtaggggaaactgaagccagcttgcttcaacaccaccattttggaatcagatcatccccagagcttatcattttctttttttacagtagtccttacgctggatttatttatcttgaattaacaggcaagcagagctgcagaccttaatctatagtatatattaaacaattcaactttttcttggaatgtcatgattttatttgcttcttgggagcacttccagcatcactagtggcactttgtatggatcccatggtgttattcaagatttatgggattgcaccaaacacagtgaaaaatacactagaaccacaagagatcacttttactgtaacatacaatttactggagagatgaactactgaactcatgcagagatgattagtgtcacatggtattataagctgatactagca

SEQ ID NO: 383124 - DNA, 541 bp, Homo sapiens
gtcttactgtctgcttgatggcttttcacttctctgtggccctgggagttgttaaatcctcatatttgagttctgggatatcactggtgatactcttggtgctctatatttgtttttggttttctgtaggggaaactgaagccagcttgcttcaacaccaccattttggaatcagatcatccccagagcttatcattttctttttttacagtagtccttacgctggatttatttatcttgaattaacaggcaagcagagctgcagaccttaatctatagtatatattaaacaattcaactttttcttggaatgtcatgattttatttgcttcttgggagcacttccagcatcactagtggcactttgtatggatcccatggtgttattcaagatttatgggattgcaccaaacacagtgaaaaatacactagaaccacaagagatcacktttactgtaacatacaatttactggagagatgaactactgaactcatgcagagatgattagtgtcacatggtattataagctgatactagca

SEQ ID NO: 383125 - DNA, 620 bp, Homo sapiens
ggtgaacgggaatggggtctctcacttgttgcaggtgtcaactcttatgacccaactgagtttcatttatccgtttcttttttcagcaaaagctaataatgataatgacagttatcatcatcatcatcatactgtaacgagagctaccatttattaagcattttatgttatacagtattcagagcaatccttcatcctcaccacctccattctcatccaagccagcatcatccctcacttggaaaactagcttcctaactagtttcctggcctctccacttccctgtttaaaatctatttcctcacaakagcaaatgatgatgcaactccccttcctgaaacctcctcctgctccaaattgacctgagaacatatcagtattcctcaccacaacccacaaggtcctgcatgatccagctgctgcctctctcccaactcaccttgttcatgtctctccctagaacactatgctccagtcacatggaccttttttcctgcattaaattttgtcctttccctccttggatactgcatttgctgctctctgtgcctgcactttttatcctctgctttttgttatgctagtcttaggtcaagatttttctgctccaacaacctcc

SEQ ID NO: 383126 - DNA, 593 bp, Homo sapiens
atcatcatcatcatactgtaacgagagctaccatttattaagcattttatgttatacagtattcagagcaatccttcatcctcaccacctccattctcatccaagccagcatcatccctcacttggaaaactagcttcctaactagtttcctggcctctccacttccctgtttaaaatctatttcctcacaatrgcaaatgatgatgcaactccccttcctgaaacctcctcctgctccaaattgacctgagaacatatcagtattcctcaccacaacccacaaggtcctgcatgatccagctgctgcctctctcccaactcaccttgttcatgtctctccctagaacactatgctccagtcacatggaccttttttcctgcattaaattttgtcctttccctccttggatactgcatttgctgctctctgtgcctgcactttttatcctctgctttttgttatgctagtcttaggtcaagatttttctgctccaacaacctcccttgacaactctatctaaaggaggaccctctgcttgactagttattctcagtcatacccctgctttttttcatgttgcttctcacaatt

SEQ ID NO: 383127 - DNA, 620 bp, Homo sapiens
ggtgaacgggaatggggtctctcacttgttgcaggtgtcaactcttatgacccaactgagtttcatttatccgtttcttttttcagcaaaagctaataatgataatgacagttatcatcatcatcatcatactgtaacgagagctaccatttattaagcattttatgttatacagtattcagagcaatccttcatcctcaccacctccattctcatccaagccagcatcatccctcacttggaaaactagcttcctaactagtttcctggcctctccacttccctgtttaaaatctatttcctcacaatagcaaatgatgatgcaactccccttcctgaaacctcctcctgctccaaattgacctgagaacatatcagtattcctcaccacaacccacaaggtcytgcatgatccagctgctgcctctctcccaactcaccttgttcatgtctctccctagaacactatgctccagtcacatggaccttttttcctgcattaaattttgtcctttccctccttggatactgcatttgctgctctctgtgcctgcactttttatcctctgctttttgttatgctagtcttaggtcaagatttttctgctccaacaacctcc

SEQ ID NO: 383128 - DNA, 593 bp, Homo sapiens
atcatcatcatcatactgtaacgagagctaccatttattaagcattttatgttatacagtattcagagcaatccttcatcctcaccacctccattctcatccaagccagcatcatccctcacttggaaaactagcttcctaactagtttcctggcctctccacttccctgtttaaaatctatttcctcacaatagcaaatgatgatgcaactccccttcctgaaacctcctcctgctccaaattgacctgagaacatatcagtattcctcaccacaacccacaaggtcctgcatgatccagctgctgcctctctcccaactcaccttgttcaygtctctccctagaacactatgctccagtcacatggaccttttttcctgcattaaattttgtcctttccctccttggatactgcatttgctgctctctgtgcctgcactttttatcctctgctttttgttatgctagtcttaggtcaagatttttctgctccaacaacctcccttgacaactctatctaaaggaggaccctctgcttgactagttattctcagtcatacccctgctttttttcatgttgcttctcacaatt

SEQ ID NO: 383129 - DNA, 603 bp, Homo sapiens
ggatatctgaaagtattaaaattaattataactgtatttccagagggacagatatcaacattggactacaggatttgtgggacctcaacgggatctgccatccttccccatcccaggcaaggagaggacaagatacctcccccagtgggcgtggtcagggagccaggcatgggggctggcctctagcactgcattgcagtatctccatagtccatcaagggcttattgagtgtgggggagagcaggatactttgttaggttcagaagtataacatagggagagagaaaggtagatcttttcctagtacaaggctgaatggaaagatgtatagtaggaaatttggcagaagtggtaggtgccaatacccactggtgcccactgagcctccctcatttccctgaagggctccaaaaatcatgtrccaactcgttgaacaagtattgaatggctactgagtgttggagttatacaaggccctagggtccatgtcagtgaataaaataggcagggctccatccttctggagctgtcagtcaaatgaattaatgagtcccatgcattcactgaatgccttgggtcactttggcccatggcgggcaggg

SEQ ID NO: 383130 - DNA, 588 bp, Homo sapiens
atacattatatatgtcctaggactatccagtcacgtttggtaggagaaaggtagctgaagctgggaaaaggactctcagagttgcaagatctgagagctgaacttctcctattcatttcattggtgagaaacagaagcccaaactgacgggacctgctagtaagctggcagggctggtctcagactttttttttggctcctacatcctcactttttcagtggcaatgggtggttctcctctcatctgagcactcccaggccctttgttcccattgtgaggtaacmctgaggtctgcccaccctacagatgggctttgggggtttgctccagagctcttcatccgcctgggcccaaccctggaactattcctttcaatggtgtcttttcttgccttgtttcagaaggatctactagttggccctatcttgtgccaagactgacagcaaggaagctgctggctgagtaagagtttaggggaggctctgagttgggtggaagccatgaacacaatttaggtagaaaggggctacagctttggagaacctgagcccaataagctcttgaagttgtcccctaacacaatctta

SEQ ID NO: 383131 - DNA, 621 bp, Homo sapiens
tacaatatcctaccccattgcatgcccaaactctgatttctgcctcatctgtcaattttgatttgctatattttattttttcaaaaaagctgrtgatgggtgtttgtggaatataaagctttctgaacaacacataagagctgtgagactgaaagttttcattgtctggcatctcccttgctgtactatagccctttatgcacaaaagtaacttctgatgatcttagaaccattataaagacaaagttggtagttaacagccccagctgtgccaagtaactgttgcccaaaagaacatattgaatgcacttttcatatctgttggtatctgaatatcatttttgggccgcatatttttcgtattttagcttcttggttaatcagacagcgtggctatgagactaatactacttaagttctttgaaaattcaatttaaaatgtagtatctaatccatttagttagaagaagaaggtgagagcaaaaatttgaaagaaatgaaagtcatttatatttaagattgtgttttgtcttgctgggtttttttgagaacataataccttgtcattggctttcttgacaagatgcagaggaaaggttcatatagtgcttatatagagtt

SEQ ID NO: 383132 - DNA, 621 bp, Homo sapiens
tacaatatcctaccccattgcatgcccaaactctgatttctgcctcatctgtcaattttgatttgctatattttattttttcaaaaaagctggtgatgggtgtttgtggaatataaagctttctgaacaacacataagagctgtgagactgaaagttttcattgtctggcatctcccttgctgtactatagcccttwatgcacaaaagtaacttctgatgatcttagaaccattataaagacaaagttggtagttaacagccccagctgtgccaagtaactgttgcccaaaagaacatattgaatgcacttttcatatctgttggtatctgaatatcatttttgggccgcatatttttcgtattttagcttcttggttaatcagacagcgtggctatgagactaatactacttaagttctttgaaaattcaatttaaaatgtagtatctaatccatttagttagaagaagaaggtgagagcaaaaatttgaaagaaatgaaagtcatttatatttaagattgtgttttgtcttgctgggtttttttgagaacataataccttgtcattggctttcttgacaagatgcagaggaaaggttcatatagtgcttatatagagtt

SEQ ID NO: 383133 - DNA, 621 bp, Homo sapiens
tacaatatcctaccccattgcatgcccaaactctgatttctgcctcatctgtcaattttgatttgctatattttattttttcaaaaaagctggtgatgggtgtttgtggaatataaagctttctgaacaacacataagagctgtgagactgaaagttttcattgtctggcatctcccttgctgtactatagccctttatgcacaaaagtaacttctgatgatcttagaaccattataaagacaaagttggtagttaacagccccagctgtgccaagtaactgttgcccraaagaacatattgaatgcacttttcatatctgttggtatctgaatatcatttttgggccgcatatttttcgtattttagcttcttggttaatcagacagcgtggctatgagactaatactacttaagttctttgaaaattcaatttaaaatgtagtatctaatccatttagttagaagaagaaggtgagagcaaaaatttgaaagaaatgaaagtcatttatatttaagattgtgttttgtcttgctgggtttttttgagaacataataccttgtcattggctttcttgacaagatgcagaggaaaggttcatatagtgcttatatagagtt

SEQ ID NO: 383134 - DNA, 621 bp, Homo sapiens
tacaatatcctaccccattgcatgcccaaactctgatttctgcctcatctgtcaattttgatttgctatattttattttttcaaaaaagctggtgatgggtgtttgtggaatataaagctttctgaacaacacataagagctgtgagactgaaagttttcattgtctggcatctcccttgctgtactatagccctttatgcacaaaagtaacttctgatgatcttagaaccattataaagacaaagttggtagttaacagccccagctgtgccaagtaactgttgcccaaargaacatattgaatgcacttttcatatctgttggtatctgaatatcatttttgggccgcatatttttcgtattttagcttcttggttaatcagacagcgtggctatgagactaatactacttaagttctttgaaaattcaatttaaaatgtagtatctaatccatttagttagaagaagaaggtgagagcaaaaatttgaaagaaatgaaagtcatttatatttaagattgtgttttgtcttgctgggtttttttgagaacataataccttgtcattggctttcttgacaagatgcagaggaaaggttcatatagtgcttatatagagtt

SEQ ID NO: 383135 - DNA, 584 bp, Homo sapiens
gttatggtttgcctctgtgtccccacccaaatcacatgttgaactgtaattcccgaaggtgggtgggacacctggtgggaggtgattgaatcatgggggcagatttccctcttgctgttcttgtgataatgagttgagttcttatgctatctggctgtttaaaagcatgtagcacttccccctttactttctctctctcctgctgctatgtgaagatgtgcttgcttcctcttcaccttccaccatgattgtaagtttcctgaggcttccccaggcatgcttcctgtacaacctgcagaactgtgagccaattaaacctcttttctttataaatcacccagtctcaggtagttatttacagcagtgtgagaacagactaatacaagaaaattggtaccagaaagggggcattgctataaagatacctgaaaatgtcaaagcaactttggaactggataatgagcagaggttggaagactttggagggctcagaagaagacaggaagatgaggaaaggttcggaatttcctagagacttgttgaatrgttttgaccaaaatgctgatggtgatatggacaaagat

SEQ ID NO: 383136 - DNA, 587 bp, Homo sapiens
gtcccagaaggttgtctgaccactgctattgccatcgctcatgccactcctgctgcccaggggcacaagagcccacctacctgcccaacctacttctgttgccatttctggcacccaagcaagccacctggaggcccaagaatgggcctgcctggactaacatcaaatccagtgaacatcattgtgggacccaaggacaggcatactcagccaaatgataccacctcaggtccccaaagtatggcccacttggcatcccagtccctcaaaaaatcttcaccatagcctcccctaacaaccataccccaagccaccaagaaaatcatagacaccactgacactgtttacagctaataaatcacatacagactacagtattgaacacacccagaatcaaagccaaagtacgctacccaatgaacagcatagatgcatcttcaggaaacagttgtcccctatgaaagcaaattcaaaacattggaagaagtgactgtgacaccatgwcaccatatctgcagatatcaacataagggcacaagaaacatgaaaaagaaaggaaacacaatactgccaaaagaaccaccaca

SEQ ID NO: 383137 - DNA, 457 bp, Homo sapiens
acaggtgttttaaaataatccagtcaaacaaaaattttaaaagaaaaagaattttaaaagaatgaggaacaaagtgtttgtgacacataaaacatcataaagtgaccaaatattcatagttttggtgtcccagaaggtgaaaagaaaacaaaagagttataaaatttgttaaataaagcaaaagatgaaaatatctcaagtctagccagagatttagtcatccagatacaggaagttcagatttccctaaaataaacaaaattcaaaaaggtttttaccatggcatattttagtgaaactgttgaaaatcaaagacagagaaattytaaaaaaaaaaaagagaaaggcatctagtcatctatcaatgaacccctatcagactaacagaagatttctcagaagaaaccttacaggccaggagagaatgatataatatattcaaagtgctaaaagaaag

SEQ ID NO: 383138 - DNA, 544 bp, Homo sapiens
aggtttccacaggtgtgcacttttcagctgtttcagtctctacagcaatgacctgctggtgtgagagctgaatggactgacagtgaggtgcaagtttgtgtaactgrgaccagcagagaaacagacatatatccatctggtgaaatgcctctttactcaaaaactacatgcaaggtgttctcactcataggtgggaattgaacaatgagaacgcttggacacaggaagaggaacatcacacaccagggcctgtcgtggggtggggggagaggggagggatagtattaggagatatacctaatgtaaatgacgagttaatgggtgcagcaaaccaacatggcacatgtatacatatgtaacaaacctgcacgttgtgcacatgtaccctaaaacttaaagtataataaaaaaaaaaaagaaagaaaaaaaaaaagaaaactccatgcaaggactgatggctacaagcccccggtggcaatgctttgcaataagaaaataaacacacaaatattctacttagtaactaaacctacttagttagtag

SEQ ID NO: 383139 - DNA, 580 bp, Homo sapiens
accacattattcatctgctctccaagctgttcctttgaaatgtctcatccatcagcatcagagccgtgaaggcccttagaagcgcctccatctacctcattactttaacctactttttaatcaatcaaaaccacacccaaagacacagttcccagcatgaaaagctgtaatgaggccagaagaagtatccttgacaactcaaacacagcaaaagtgatgagtgagatattgagccccaagggggttggccaagggaggggggagtatgtagaaatacaaatgtttttttttttcttagatatgttatggcagggacagacaggaatagactcctcttcccaaggtcattgctatgtgctgacgtcccccaaatttttaaagttctacaaggcttctggggaggcagccccatcctgggcaagcctgggartgcgaaggccagaactgaggctgctcctcctgcatgccagctccttatacaggatcaggccaaaggtggcaccaagaaacactggctggataaaatgaacaagagaaggaaggaaggaaggaaataaggaagggaggaaggaagaacaag

SEQ ID NO: 383140 - DNA, 515 bp, Homo sapiens
cagggctgtggcaatgggctgagggatgagttggtatttagaaataaagacaaaatcctaagcccccgaaccaactgaatgagtcacactcttggccaagacgaccccagagaagccttaaaatagtgagttcctggccatgacgagaagggaggtcagacacacctcgttatatcccctccttcactcactgccattagactttctttcctaagagttaaatagaatccagcccagctgcactcccctctacttttgctgttttgacacagcaactgwgcagcattccttcctgataagagaccaccgaccacagactggttctgctggtttacggacgctgcgcacaggatgcctctatgtcctccatttcactttatgatgtacagagcctaattttaatgcatttaaatgttaatactccaccccaaagtgaaaatgggatgtatataacatgcatgtttgcttactacacatgtgtgtgtgtccctctttatgaatattcatagttcctc

SEQ ID NO: 383141 - DNA, 545 bp, Homo sapiens
aaagcattcccaatccccaacctggatgggactgccttacagccccccatctggaatcctcgcatccgtaactcatttgaagtattctctcagcctgctggcaagggcctctctggcctgcagacatcctgccgagcctctggcccrcagcccccgcagccctgcaaccccggcacagagcaggcactcagcaagggctcaacttggtgtttatagaggattttgcttaccagaataaaataaaccccccatttcaggccaaggatggcaacttggataatcatgtttttcatcccaatccaaatggatttccacatgtgttagtggctttttttcctccacaggataaacaaatttagtctctttgtgatagctcaaatacatgtttaaagaactgcccccaaatgtttcatcttcaaagacaaaaactcaggaaaaacttgtacaatacttctgttagtccagctgaaacagtagctacaagaacattaattctccggcctctgccttcttccttggacactggaccgtcagccacgacacca

SEQ ID NO: 383142 - DNA, 593 bp, Homo sapiens
cctaccccttgccttgcagaccaaattcaaagaaaatacccaaaaatccttttgggtgggggccaagtgtcaaatgagctgggaaaggagctccaagctcctcagggcttccagtttgggggctaagaatgacaggggaattccaagttaaatctcactcgtctaagagctgaaaaccactctattaaccaaacaagtttctgagaccttgcaggggaagaaagcagggtaaaggatgcagtgatacctaaaaaggacagagccctcagtaaataggcttgctcttttcctggctaaacttttccacatatagagaaaaactatagctaggcaagtgygagaaaggctttacggagccttgtagaaacgtgcaggggcctcaggagatcagcacacaatccaatcaccctctactaaacctctaacccaccccctagggcctcccactccatccctgagggctgggggctcctctccccctccacaatcctaaaactctccaaatcagatgaggggccagcacttttgcaaagcaggttttcagccacaaaggctgaacaaaagcaaattttccagcttaccctgagtcaccc

SEQ ID NO: 383143 - DNA, 618 bp, Homo sapiens
caggcattcgagggtgttgagtgcagtggtatccctagtggcaatggtggctgcagctgaaagaactgtgtagggtctccacgatggacaatagtaacaagagcagaggcgctacgctgccttgggcaggtccttgagtgccacccgctttatggggaagtgctacgctgacgtataaagaacactgaattgcttaatgatagggatttaaaaagaacactgaaggccagaggtagtggctcacgcctgtaatcccagcactttgggaggccaaggcaggcagatcacctgaggtcaggagttcgagaccaccctggccaaygcaaatccccatctctattaaaaatacacaaaattagctgagtgtggtggtgcacacctgtaatcccagctactcgggaggctgaggcaagaaaatcgcttgaacccaggtggtagaggctgcaatgagcagagatcgtgctgctgcactttagcctgggcaacagaacaagaatctgtctcaaaaaaaatcaaacaaaaaaaaaaggacactgaagcctcaattttaattcaagcattgccgcactgccttttaggcctccgtgtccttttaggcctgagagtctcattcatacc

SEQ ID NO: 383144 - DNA, 618 bp, Homo sapiens
caggcattcgagggtgttgagtgcagtggtatccctagtggcaatggtggctgcagctgaaagaactgtgtagggtctccacgatggacaatagtaacaagagcagaggcgctacgctgccttgggcaggtccttgagtgccacccgctttatggggaagtgctacgctgacgtataaagaacactgaattgcttaatgatagggatttaaaaagaacactgaaggccagaggtagtggctcacgcctgtaatcccagcactttgggaggccaaggcaggcagatcacctgaggtcaggagttcgagaccaccctggccaacgcaaatccccatctctattaaaaatacacaaaattagctgagtgtggtggtgcacacctgtaatcccagctactcgggaggctgaggcaagaaaatcgcttgaacccaggtggtagaggctgcaatgagcagagatcgygctgctgcactttagcctgggcaacagaacaagaatctgtctcaaaaaaaatcaaacaaaaaaaaaaggacactgaagcctcaattttaattcaagcattgccgcactgccttttaggcctccgtgtccttttaggcctgagagtctcattcatacc

SEQ ID NO: 383145 - DNA, 545 bp, Homo sapiens
gcatgggatgcagcagggagcataagtgttactttttttctgcttcttctcttttcctttggattaattgagcttaatgtttccatttttctccagtattgacttactacctatacttctctgtttcattgatatttttagtggttgttctaaggcagggatggcaaatttttctgtaaagggccagatagtaaatattttagctctgtgggtcctgcaaatatgaaaacaaatgagcttggctgtgttccagtaaaactttatttacaaaacatgggcaggccaaatttggctggcaggctgtagtttgccaactccttctctagggtttacaatacacatcttgaagttwtcacggtatacctttaaaaaatattttaccactttatattttaagaactatgctacagtatacttccattttcttcctctcctactttgtgctgttgttgtcatattgccataattttacttctacacgttataaactctacaataaataccctgctatttttacttaagcaatgatctcttttaaaagattt

SEQ ID NO: 383146 - DNA, 545 bp, Homo sapiens
gcatgggatgcagcagggagcataagtgttactttttttctgcttcttctcttttcctttggattaattgagcttaatgtttccatttttctccagtattgacttactacctatacttctctgtttcattgatatttttagtggttgttctaaggcagggatggcaaatttttctgtaaagggccagatagtaaatattttagctctgtgggtcctgcaaatatgaaaacaaatgagcttggctgtgttccagtaaaactttatttacaaaacatgggcaggccaaatttggctggcaggctgtagtttgccaactccttctctagggtttacaatacacatcttgaagttttcacggtatacctttaaaaaatattttaccactttatattttaagaactatgctacagtatacttccattttcttcctctcctactttgtgctgttgttgtcatattgccataattttacttctacacgttataaactctacaataaatamcctgctatttttacttaagcaatgatctcttttaaaagattt

SEQ ID NO: 383147 - DNA, 416 bp, Homo sapiens
ttgttcatggcaacagctatgtgtgcctaaacattttgtgtcacacaaactcctgcatttgacatttctatcagagagaacaaataaaaatcatcctagagctttcaaacactcaagccatgttggggctttgaaagatcttgtcatttcagaagtgaagaaayggggatgctctcaagagcaagggcagcttaatggattcccccaaagccccaaaagcaccttctcatgacttaattactctaaaaatttctattttttacattgcctaaaattttcatcaataagaaatcatttgatttattaataccaaaacctcatatgaagatagtaaacacctttgggatggttaaggtaatctcaccattcacaaatgtatgtatattatcaggtgagattgatttaataaatctttg

SEQ ID NO: 383148 - DNA, 416 bp, Homo sapiens
ttgttcatggcaacagctatgtgtgcctaaacattttgtgtcacacaaactcctgcatttgacatttctatcagagagaacaaataaaaatcatcctagagctttcaaacactcaagccatgttggggctttgaaagatcttgtcatttcagaagtgaagaaatggggatgctctcaagagcaagggcagcttaatggattcccccaaagccccaaaagcaccttctcatgacttaattactctaaaartttctattttttacattgcctaaaattttcatcaataagaaatcatttgatttattaataccaaaacctcatatgaagatagtaaacacctttgggatggttaaggtaatctcaccattcacaaatgtatgtatattatcaggtgagattgatttaataaatctttg

SEQ ID NO: 383149 - DNA, 547 bp, Homo sapiens
atgtagtaagggctgactgatagagtgcatagaaattacctggcactctgttcacaacatcctggaaaaaatgaagaaataacactgaccagtctacattcccgtgccaggtgaggggctctctttaggatagagaacctgccataggtggcaaaagggatcttctgagtggattctaggcctgatgagcccagctggccttcttgtctctaaagctccttgttctttcttttttcctgacccttgatctccctctgtgcactgggtgctctgtttctgcccaggatgctgagcacagttctcccagcttgtgcccaatgcagaatctcatttattcccttacttcatcaacagttacctgctctgcctccctttgattagggcctkgctgggcatccaactaattaatctggtgaagcaattcagggcagggcattaatggctgataatgctgcattccttctagggactctgctgtgctttagtaaaagtctccttaacttgatgcaaagaagtgactaatgggttaatttcaggacacttttaa

SEQ ID NO: 383150 - DNA, 574 bp, Homo sapiens
gagactactattctaagtgaagtaactcaggaatggaaaaccagacatcctatgttctcactgacatgtggagctaagctacggaacgcaaaggcataagaatgataccatggactttggggactttggggggaaggtgggagggggttgaggaagaaaagacttcaaatagggtgcagtgtatactgcttgggtgatgagtgcaccaaaatctcacaaatcaccactaaagaacttactcatgtcacataccacctgtaccccataacctatggaaaaattttaaaaaaaagattgtcctgcaaaaacaaacaaccccccccaaaaaaccaaaaccctttcacatatattacatcaactctcacaacattatgaaatagatatcactgcattttgttggtttgttgatagatatatctttctttttcttagtttaacatatttaaaattggaatggggttatacccaatggcaacttacaactgctattgacatkaaggcagttgtggtgtatttgttattgcctctatgagctcagtctgacatatttttcctggtagtgtgaatggaactc

SEQ ID NO: 383151 - DNA, 528 bp, Homo sapiens
taatttttgtacttttggtagagatggagttttgccatgttgcccatgctggtcttgaactcttgagcttaagcgatccacctgcctcagcctcccaaagtgctagaatttcaggcatgagccaccgcaccaggctgagactcttattttctttttaaaacattattactgaatcatcttttctgtcgcaggcactttcagtccctctcaactcttatctgttctctaccttgggaccagatcattctggaactactctaatcatgctgcttctttgcctaaaatttttcagtggctcaagtgcattttcttcagattggtttcagagcctggtggggacacctggtgttttttctacccaacaggcagttatttatttggtagggctttaagtttctttacaggtacccattccttcatcccagtttgtctggcaatgatccttcttcttggctctaggagtgaacacatgacgaatcctcctagacccaataattgggtcagggayaggcataaattagttaagtc

SEQ ID NO: 383152 - DNA, 545 bp, Homo sapiens
tgtgccactgcactccagcctaggcaataaagtgagaccctgcttcaaaaaaaaaaaaaaattcagtcatgacttcacttttgactgctttcaacacatcatctttaattaaatccccagggtatagttcagtaaacagtattactcatacagctttctgaggaacaaaacacattatatatgtatccaattccactccaaagacaaacccaaaaattactagawcatccaattaatatgaaaaatgtttaaactctcttctctatcagcaaagatagttgcattatttagaattccctgttctagtctctcactttgctatggaaatggttatttccacagacctaagttcaagaaagacaactattcaactgagattccatgcccaatattgagcagtgtcaagtatcttgctcaggaaagctagcccactgtagtcctagctactcaagaggctgaggcagaaggatcacttgagcctaggaggtcaagcctgcaatgagctgtgatcacatcactgtactcaagcatgggtaagagagcaa

SEQ ID NO: 383153 - DNA, 394 bp, Homo sapiens
tacatagttgaagtggcacaaaagcacttctcaagggatgggtgctaatctctaccgttgatttctgctacaagcagccacagggctgcttatggcttactaacatgggacaggtagtgtggggattctatacagagttttcttttttctttctttcttttttttttttttgagacagtctcgctctgtcacccagactggagtacagtgtcgtgatcttagctcactgcaacctccacctcctgggttcaagtgattctcctgcctcagcctcctgagtaactgggactacaggtgtgcaccaccacgccctgctatttttttttttttttgkattttcagtagagatggggtttcaccatgttggccaggctggtctcaaactcctgatctc

SEQ ID NO: 383154 - DNA, 575 bp, Homo sapiens
gtgtctatattttgtttcaaacaaatatgcatgtacatgtgtatgctcttayctctcaaaatcttaaagaagtgtaagattatataaacttactagattcttcatggtgttgcatgtgctagagcaaatcttcctcaatgcttgtatatttaatagcctgaaagaataaatgtttttctaatgggcatattttagctgaggtttttttttaagtcaaatatgtatataagtatgtgtaaagtttatgtgaaagaaacgagagccttgttttcagaagctcttctgtgtcttgaaggtgacatgtttttgctttcttaagtgactttacagacgaaaaaggagtcacacttttacagttgatttggtgtaaccctccttcatcagtatctagcatatagagtatgctgatgagtcatgtgcaatgtgttttgaaaatcagaacttttcagatgagctggaggcctggatgcctgaaatggcttaggacataaactgctcaaaaataattataataccctttttttgtaatttttttctacttttttttttaggtgctctgcaggttcagagaaact

SEQ ID NO: 383155 - DNA, 559 bp, Homo sapiens
tggtatggctcatatttacgaaatgccaaaaaagaaccaagagttctttttcctttctcctcgaaaattgcccttgtttggatacttacatgttatatgatgggcataacccctgggtcccatgttgatagatgagtgttagactcacccagaatattacctgtcttatatctttgaagcacatacgaaatagcctttgtgatttgagtgactgggccagtgttctccattatgtgcagcaggcttcactccacaataaagctgaaagaacttcactccccagtaaagctgaaagtaacagacaatacctcaagttttaggtgctttacagatacctggcagctcactgaagtatatccaatcctgtttctgggacaaaatcactggatggatctttccgagccatgatttttgcagtaatgtttctgaagctatagcactagatacaaaggataaatagaaaaatgattattttgaaaggggagagaaaggactctggcagtatctgatgccactctagrtgttaaatgtggttatgtttatcttttagccccaggca

SEQ ID NO: 383156 - DNA, 624 bp, Homo sapiens
acttggaagtctgagtggggaggactggtcaagcctaggagtttgaggctgcaatgagatatgataaggccactgcacactatcctgggtgacagaacaagatgctatctctaaaaaagggaaagaaaaaagaaaaataatatagaattatcctttattaagaatctacagggtgagcatttatgactgactactatttgtaaggctcaatgatacccaccgggggaacctgcagcatgttggggaagatacaaatgtcctcccagttgtaagctggggtggaatgagagccagatcataaaagaaatgattactttgtgagggataagacaggagatagaactaaaaataagccccttcaaaggacccctggcaacatctggacctgtcccctctgcacacaaaccccaacactcacctgtgctctgaatctaacacacacacacagcaagccagcacctgctcagtctccacagcgaacacaacacaaatgcacttcccacaccyagctcacacatgtgcatactgggtaactgatgacacgcagtacaggcactcatgttcctcgcagttacatacatgtacagacacttccatatctccccactccattcctgcacacac

SEQ ID NO: 383157 - DNA, 552 bp, Homo sapiens
tatgggaatgaaatgagatggtgcatataaaaaagctctgcaaaactttacactaattacctggccactttctgggtcaactgatgatytgctaataaatgaaatactccgggttcattaaagggacgctcttctccatccttcagcatagctacacaaggccatggagcaatttagttaagcggcccgggcagtatgaaggtgagacagccaccgtcttgtgagggagcatcaggccacatcctctgtactggcaggaaggttcaaaaccgatctatttcggtgaagggacagctatggaaaagcctatttacacttacaggaagtgttactaatggggcacttttacaaatccaatagaaaataatttcataagaggtgccaaaatgttgccagatgggacaaaaatgaatacgttgtcattccaccattgccaaaatatgctggaaaattttaaagagtaaaatcttttgtggattgggtgtagggataagttactaatgatggcgatcctgtctccaggagaaaagcatcttctagcaagacaagggc

SEQ ID NO: 383158 - DNA, 560 bp, Homo sapiens
ctcctgtgtctcaccttctgccttcctggcagtgctgggcagaggagagcgtgactccaggccctggcctggtgctctgggtgatgcagggggtcgactggagtagggaaggcagacattcgcacaggtctccatggcctatgtcaaccctctcaagtttttggggggcctgtgggtgaggttggcagagcgggctgggaggtccctctgtgggacaggtcctgtggtgtgtgcttgccaggcagagggcccygtctgccactgttcggaagtctggttactggagaacgtgttgctgaagtcagaaagcccagaggatctttccccaccccaccactttctagcgcagtgatccagagcctctgtcaaggatcttgaactgccttcacctcactgagacctcaggttatccctctgataaaatgggagtcgcagatcctgactcttttcaggactcacctgagagagcaaacacatacacaaagtcctgagcccactctaactgcttgataaataagattttgaaggaccccacagacacataccggccatgcctcaac

SEQ ID NO: 383159 - DNA, 565 bp, Homo sapiens
ctaccacatcaagcttctctgtaagtggtaggaaaacacatgttaaactcagacctatcattttaaatatttaatgccctaaaacctgctcttgtacttcactatattggtctaagaagcttctaagtggccggtgaaacataattgggttaatttccagtgtatatggtcagccaggattagtttttacaattgtcaattatcccaggaaatttaaactgcattgactaggatatccctgcacagtcatgtggggtgggcaggctcattcatgttcttctgcatcatagaaaatcagtaagtacacaatccactgatggcttcccagctgaattatgaacaaaatctaaaggccttgatccttaagcagtttgcactggctattgctcacctctgcaacctcagctatggccactctgtcttcgatcattttctgctgttacactagaatataacagactgagtaactttaaaagagtagaagtttatttggctcatygttctagaggctgagaaattcaagagcgtgtgctttggtgtctggtgaggatgattccatggcaaa

SEQ ID NO: 383160 - DNA, 551 bp, Homo sapiens
gggccatatgggctcagagcatcagcggagtcacagaagcacccagggtaacatgagctgcagcaggaacctgagtggggggatcccaagttgggaaggatttagggcagaactggggtcctgggcagcagggacatgtgtgtcctcctgagccaaaccttaatgtgctgggctctgtttgtccaggaggccagtcctcatgtgccacccgtgggctcagttgggctccctggggagtagacgcaggccttcctctggctctggcacagatgccacagaggccagctctgggcccctggcttgggtatgcaaccagtccccttctacccagctgggaggatactgaccatgtcatgttcctgctctgagccctcaggctcctcatctgtagagtgaggacaggaacacctagagtgggaatgaaatgagatgaagcttgggaaggagctggtgcagagtgaaggctcagtcttctgggaaccaccattactatcccaggagagagggtgggactctgtytgttctctgtgacagggaccatggtccttatt

SEQ ID NO: 383161 - DNA, 387 bp, Homo sapiens
gcataagtcacctcagctaaaatgtgattattcctaaacagaaattggaatactaatgcatgaatctgcaaacactccatctctattataaggtatttgctttgtagattacatatagagagaaagcagattttatatctggagtaactacaacttagctmttcctttactggttcttaaacgcttatctttaaaaatccttgtaattaaattcaaatttgaatttaaggaaatcaaagacaacagagagactacattagataggctcaatttctaatcaaaattcaaactccacctttcctgtctgcttaacccactcaggcagaacaaataagaccaaggtaacagacataagatgatttatcttgatactgactcatatgttgt

SEQ ID NO: 383162 - DNA, 581 bp, Homo sapiens
tgatttagctatctgtttgaatgctgttactttctcttcttatctcatcatctcgtctattgtagacttcagttcccttttaacaagtcttactccattctttctagtttaaatatcagtctcttagatcaatggtttggaatcatttttggaatatggtcccttttgaaaacagcaacccagccaacatcttgatttggatccttgcttcagaaagatatagacctattggcattgttatgggtggaaatccccctcaccccccaacacacccaaaaaaagatattttgcagtctgaactcccaggacctaagaatgcaaccttatttggatgtagggtatttacagaggtaataaagttaaaatgaggtcattagggtgrgccctaatccaatatgactggtacccttataaaaagggtaatttgaacagagataggtatagaaggaagaaaatttgatgtaacagggagaagctggttgcctataagccaaggagagaggcctggttaataaatcattccctcaaagccctcagaagaaattaaccctgccaacatctcaatttcaggatcctagcct

SEQ ID NO: 383163 - DNA, 626 bp, Homo sapiens
ttttcctctaacagctgagtaattctttttctcttttagcctttccctgttgtgagagtgaatagctatgatcaaaggaccaatttgctttcttagtgtgcagaactgtcattgacttcagggcaatttgaggtcaagctgagccatgcacatataagggtataagggagcatgatctgcagcaggaccargtgatcttggaagatgtatttgaactttgattccaaatgttaaccaaggtgttctctttatccttctctaacataagaaataaatttgtcaactagatgtgtaaaaattatgctgtgccccaaataatacagaattctagatagaaatggtgtagacatactttgttgcatcacgatattttcaattacatatactctttttaaacagattggctggtttattattaacatattttttcatggaataactttttactttatagccttagaaatatctatggtttaattctattttagtctgggaatctttatggacactaccaaattatcgttgttttaacttttttcaaaatcatttcagcaaaatggaactcaaatgttacaggtttatttatgattagagttttcaataataaaaaattggcttcgtccagc

SEQ ID NO: 383164 - DNA, 552 bp, Homo sapiens
ttaaacagattggctggtttattattaacatattttttcatggaataactttttactttatagccttagaaatatctatggtttaattctattttagtctgggaatctttatggacactaccaaattatcgttgttttaacttttttcaaaatcatttcagcaaaatggaactcaaatgttacaggtttatttatgattagagttttcaataataaaaaattggcttcgtccagccagaattcttaataaatgggagtttaaaaatgtaaccatctgsccgggcacggtggctcatgcctataataccagcactttgggaggctgaggtgggcggatcacctgaggccaggagtttgagaccagcctgaccaacatggagaaaccctgtctctactaaaaatacaaaattagccacgtgtggtggcacatgtctgtaatcccagctactcgggaggctgaggcaggagaatcacctgaacccgggagtcagaggttgcagtgagccgagatcacgccattgcactgcagcctgggcaacaagagccaagctc

SEQ ID NO: 383165 - DNA, 516 bp, Homo sapiens
tcaattaatatttgattgattaatgtatctcaattatacaatacaagattctcacagagcagtgtattttcaaaagaatactagtcttctgtaatgccaacaattttaagctttatttctgggttaaaattacattgttagtgtcaaacccaagtccagttgtttcactgagccaatagaaatgaagtatgcaaatatattttggatgaggtttgaaaaggcccagaatcaatgaagagaaaggaaaggattttctgttgacattttaaactgactcatttaatttaattctccctgagcttgtgaaaggaagacaaatgaggtgtttgaagatagaatatgaaagaaagcaaagggcactgagaaagctaaataaataaataaataaataaaaacatttggcttatttgcgatatttctacttacatataagtagaaaaaagagacagtttgcacttaatcttgtagggtttaaatataggcaaaatctctaygccacagaaaaatataatagga

SEQ ID NO: 383166 - DNA, 540 bp, Homo sapiens
agaaaaccagcagtaagaaatctgaagaccactgcttcaataaggtggtattataacaatctgcattttctcttattattattattttatttaaataggtttttggagaacaggtggtgtttgrttacatgaataagttctttagtggtgatttctgagattttggtgcaccatcacccaggccgtatacactgtacctagtgggtagtcttttatcgctcacccccttcccaccttttccttgagttcccagtccattgtgtcattcttatgcctttgcatcttcatagcttaattcccatttatgagtgagaccatatgatgtttggttttccattcctgagttacttctcttagaataatggtctgcaattcatccaggtcgctgcaaatgccattattttgttcctttttatggctaagtagtatttcattatgtacataccacatttcctttatctactcatcatagatgggcatttaagctggttaatatttttcaatttgcaaattgtgctgctataaatatgcatgtgcaag

SEQ ID NO: 383167 - DNA, 574 bp, Homo sapiens
cccattccctctagggatggggcttcctgagggccaaactgcagagattgttatttcttttctggatctggccactcagtggagctatggggctccagactggtactgggcagtgtctgcaagatgtcctgtgatatgattcatcttcaggtctctcagtcatggataccagcccctgcttcaatgaaggtagcaggggagtgaagcagactctgtgagggtccttggttgcatttttgttaagtgtgctgattttgtgttggttggcctccagctaggaggtggcattttcaagagtacatcagctgtggtagtatagggagaatcaggtggtgggtggggccatagagcccccaagagattatgtcccttgtcttcagctaccagggcaggtagagaaagaccatgaggtgtgagcagggttaggtgagctcagactcgccttgggtataggctctcctgcagctgctgtggggaatggaggtgtggttaccaggctaactgagtcatgttctcagggggatcatggctgcctctgttgtrtcacacgggtttccaaggaagtgggggaaag

SEQ ID NO: 383168 - DNA, 633 bp, Homo sapiens
gtgctaatacttcattcattttgatcaatcctttgagatatggaaaagcagacattattacctagggttgcttaggagatatctctttctatatatctcacctacagggacagggaccttcctgatcaatctttttctacaaattgaggwttgtcagcttgtcttcaggcattgggcaagttggaattttggggagaaacaaaatggttggcttgagtgtcttgatttcatttcactggccaaataatgtctttttgctaactgctgaaaataacttttgatatgtatactcatttatgttttggcaaaccatgattaagatcttgaaataccctcactttaatatattatgccactatgttttctgaattagaattctaagggtgaattactctcagatgttgtactgaaagagttagagtttctttggttatatcttccattcatggaggtttacgatcaaaggattttggaggagagagaaccttagatatcttctatgcaataaacttttgcccatatagttatccctttcgctgtctcatgtgtatacagtctcccaatttttgagaaaacatgacagtctcattgcttagcctatgaaatccacttctccatgtacaacacaatatt

SEQ ID NO: 383169 - DNA, 597 bp, Homo sapiens
tgtacctccctgggacagggctccaggaggaaggggggcaagctgacatctttgctgttctgcagccttcactagtgatacctccaggtactggaaaatccaaggtgactagagactggagtggacagccagcaaattgccacagcccwactgaaaagtggccagactgttaaaagaaaaataaaataaaaaggtcagaaacataaacaattgaaggtatataagtctacaaagatgagaaagaatcagtgcaagaatgccaaaaactcaaattgccagagtgccctctctcctccaaataactggattacctcttcagcaagggttcagaagtgggctgaggcagagatggttgaaatgacagaagtagaattcagaaggtaaataaaaatgaacttcaattagctaaaggagcccattgtagcccaatgcaaggaagctaaaaattatgataaaacattgcaggagctgaaagacaaaataacaagtatagaaaagaatgtaactgaactgatagagctgaaaaatgcaatacaaacttttcataattttaatacagaatttcatgacacaatcacaagtactaatagcagaata

SEQ ID NO: 383170 - DNA, 597 bp, Homo sapiens
tgtacctccctgggacagggctccaggaggaaggggggcaagctgacatctttgctgttctgcagccttcactagtgatacctccaggtactggaaaatccaaggtgactagagactggagtggacagccagcaaattgccacagccctactgaaaagtggccagactgttaaaagaaaaataaaataaaaaggtcagaaacataaacaattgaaggtatataagtctacaaagatgagaaagaatcagtgcaagaatgccaaaaactcaaattgccagagtgccctctctcctccaaataactggattacctcttcagcaagggttcagaagtgggctgaggcagagatggttgaaatgacrgaagtagaattcagaaggtaaataaaaatgaacttcaattagctaaaggagcccattgtagcccaatgcaaggaagctaaaaattatgataaaacattgcaggagctgaaagacaaaataacaagtatagaaaagaatgtaactgaactgatagagctgaaaaatgcaatacaaacttttcataattttaatacagaatttcatgacacaatcacaagtactaatagcagaata

SEQ ID NO: 383171 - DNA, 551 bp, Homo sapiens
cattatgatttttcttcataaacatttgtaagaaactgaccttatatggacattataaatttatttgtttgttcatagtctatttgaaatctctagtatctagaacagtagctggtgcatagtaggtgctcaataaattattaataaattaatattctataatttaaaaagtattccacaagaatgttaattaaaatcagctttaaaaatacccttttgrtttggagatctgatccaacatgcttttctcatggtagaaattaattgaataaagttttatttgtttgtttttgagatagggtcttgttgccacccaggctggagtacagtggcatgattatagctcactgcagccctgaactcctgggctcaagcagtcctcctacctcagctcctaagtagctaggactacaagtgtgtgccaccacacccagctatttttaatttttttgtgggggcacagtctcgctgttttacccagactgatctggaactcttggccttaagtgatcctcctgcctcaacctccaaaagtattgctattacagtta

SEQ ID NO: 383172 - DNA, 522 bp, Homo sapiens
agctcactgcagccctgaactcctgggctcaagcagtcctcctacctcagctcctaagtagctaggactacaagtgtgtgccaccacacccagctatttttaatttttttgtgggggcacagtctcgctgttttacccagactgatctggaactcttggccttaagtgatcctcctgcctcaacctccaaaagtattgctattacagttatgaaccacagcacctggccaagtaaaatttttagacatgtttctaaaacttttgtgttatacatttcaattaggattgcatattgttctttaaactgcttgaactcaagaaggcacaaacacaacacattgtagttttttcccccaatctttttctttcatcatgatctgttgggtttcctttcttatcttaggcagatctcatagttttctygtaattttcaataattaagatatgccagtgtagtcagtttaaacctgcattcctctatttttcctccctacttgagcaggtcaggactggcttccacaa

SEQ ID NO: 383173 - DNA, 594 bp, Homo sapiens
tttgtagcaatttgaaaatctgtaatccaaaaacatgctttaaaggaaaacttctacttaagttgctcagcttgaacgaagaacactttgtattaaatttaacaaaattggtcatcccaaataaagaactgtgtcacatttgatgagttactggaaaatatgggggttaagttcatggggtaatcattacagatcacacactacattaagcttcatttcgaagtatttgccaagcaatastctggatagtaatgcacagaacagacaaaaataatctataagtaacaggataggaggggaataagaagaaaggtaggatatcagcttaagtcatcagaaagcagagcaggagatgagggcttatatgaaggaagcttatttggggagatgatctggggaagtaggcatgtaggacagggaataatgaaacagggaaaaaaaagccaattcaaaatggtgtagttgttagtttatcaatgccgtggtcaactaggcttgatcctcagcggatgctctgaggatcatatggactatatcacatgattttctccttgttccttggcttcttcttctgccagggacaagaaatggaag

SEQ ID NO: 383174 - DNA, 594 bp, Homo sapiens
tttgtagcaatttgaaaatctgtaatccaaaaacatgctttaaaggaaaacttctacttaagttgctcagcttgaacgaagaacactttgtattaaatttaacaaaattggtcatcccaaataaagaactgtgtcacatttgatgagttactggaaaatatgggggttaagttcatggggtaatcattacagatcacacactacattaagcttcatttcgaagtatttgccaagcaatagtctggatagtaatgcacagaacagacaaaaataatctataagtaacaggataggaggggaataagaagaaaggtaggatatcagcttaagtcatcagaaagcagagcaggagatgagggcttatatgaaggaagcttatttggggagatgatctggggaagtaggcatgtaggacagggaataatgaaacagggaaaaaaaagccaattcaaaatggtgtagttgttagtttatcaatgccgtggtcaactaggcttgatcctcarcggatgctctgaggatcatatggactatatcacatgattttctccttgttccttggcttcttcttctgccagggacaagaaatggaag

SEQ ID NO: 383175 - DNA, 593 bp, Homo sapiens
ggaggagtgaagagaaagaacattttcttctttcttccctgaaatttgggcatattgtctccagttttcatttagtgatttcattattactatcaacattttaagcacctggagatacttgggaatgggacaacaaaaggaatgaacaatgtaatgcaatatgaccttaagaagttcattttcaacagcatgaacaaggataacgaggtcaatttagtttttcaagtgggttggtataattcagtgagcttgaaaagtggaatgacattctcaagagaacaaggaatgtatagtttgtaaagtaaaagcaaatctttgagtttttttctgacaaaaaaaakttacccaatgtactactaacacagtcagaagataattcattaagaatagttttagcggtggctcgctcctgtaatttatcactgtgggaggccaaagtgcgaggatcacttgaggccaggagttcaagaccagccctgcgcaacaaaatgagacagtatctcttacaaaaagaaagaaagaaagtacttttaggccaggcatggtggctcatgcctgtaatccctacactttgggaggctaaggtaggaaat

SEQ ID NO: 383176 - DNA, 593 bp, Homo sapiens
ggaggagtgaagagaaagaacattttcttctttcttccctgaaatttgggcatattgtctccagttttcatttagtgatttcattattactatcaacattttaagcacctggagatacttgggaatgggacaacaaaaggaatgaacaatgtaatgcaatatgaccttaagaagttcattttcaacagcatgaacaaggataacgaggtcaatttagtttttcaagtgggttggtataattcagtgagcttgaaaagtggaatgacattctcaagagaacaaggaatgtatagtttgtaaagtaaaagcaaatctttgagtttttttctgacaaaaaaaatttacccaatgtactactaacacagtcagaagataattcattaagaatagttttagyggtggctcgctcctgtaatttatcactgtgggaggccaaagtgcgaggatcacttgaggccaggagttcaagaccagccctgcgcaacaaaatgagacagtatctcttacaaaaagaaagaaagaaagtacttttaggccaggcatggtggctcatgcctgtaatccctacactttgggaggctaaggtaggaaat

SEQ ID NO: 383177 - DNA, 590 bp, Homo sapiens
ctcctgatgattagtgatgtcaagcacttcttcatgtatttattgactgtttgccttcttttgagaaatgtctgttcagatcatttgccaagtttttaatcggattttttttttttttggctattgagatgtttgagttccttgtgtattttggatgttaagcccctttctcatttgtttatttttgtttatgttgcttatgcttttgaggtcttatacataaaatctttttacagaccagtgtcctgaagcatttcccctgttttcgtctagtagttttatagttttgggtcttacattcaggtcttggatccacttgagttgatttttttaataggtgacaggtagttccattyttctgcatatggatatctagttttcccagcaccatttattgaagagattgtcctttaccctatgagtattctgggtgccttgtgaaaaatcatttggctgtaaatgtgtagattaatttctgagttcactattctgttccattggtctatgtatctgtttttatgacagcactgtgctggttttgctactacagctttgtagtatattttgaagtctggtagtgtgatgtcagc

SEQ ID NO: 383178 - DNA, 590 bp, Homo sapiens
ctcctgatgattagtgatgtcaagcacttcttcatgtatttattgactgtttgccttcttttgagaaatgtctgttcagatcatttgccaagtttttaatcggattttttttttttttggctattgagatgtttgagttccttgtgtattttggatgttaagcccctttctcatttgtttatttttgtttatgttgcttatgcttttgaggtcttatacataaaatctttttacagaccagtgtcctgaagcatttcccctgttttcgtctagtagttttatagttttgggtcttacattcaggtcttggatccacttgagttgatttttttaataggtgacaggtagttccattcttctgcatatggatatctagttttcccagcaccatttattgaagagattgtcctttaccctatgagtattctgggtgccttgtgaaaaatcatttggctgtaaatgtgtagattaatttctgagttcactattctgttccattggtctatgtatctgtttttatgacagcactgtgctggttttgytactacagctttgtagtatattttgaagtctggtagtgtgatgtcagc

SEQ ID NO: 383179 - DNA, 555 bp, Homo sapiens
ctaatggtttgtcaattttatcttttcaaaaaaaccagcttcttatttcactgatcttttgtattttttgtctcaattttgtctattttgatctttattatttctttccttttactacttttgggttttttttttttttggttttctatttctttgagatgcatcattaagtagtttatttaaaatctttttattttttgatgtaggtatttactacaaacttgcctctcaatactgcttttgctgtatccagtaggttttgatatgttgtgtctctatttgtttcaagaagttacaacattttattcttaatctctttcttcatccgttggccattcaggagcatgttgttgaatttccatgtatttgtatactattttttgtttgtttttctttttgttttttgtttgagagacacagtcttactcttgcccaggctgaagtgcagtagcatgatcatagctcaagcaatcctcttgcctcagcctcctgagtamatgggactacaggtatgtgccaccatccccagctaatttttgaaattttttgtacaga

SEQ ID NO: 383180 - DNA, 560 bp, Homo sapiens
ccctagcgaccacccaccggcggcccggatatctctgcgcggcagcccccgcggtcgatcaatctcagtcccgcactgccgtcccgccccgccctgtgcccgccaatccacgacgccataatcccccgccgtgtccctcccttcctccccattggttgtgaccgcacgtcagcccgactcagcctgccaatcgcaggacccagagggccctctcccccgcccgctcagtgtaattcgagttccctgtccatcgactscaagtcctctctcctgcgccgcatgctgcctcgcgctccctttccttccccctctacccccttccgcgatttactgtttcctcgcgcccaacagaaatgggcgaccgcaagtcttactctcgccggcgttacaaaggtaccggcctttgacctctccttgaattaatgtgatccgattcatcttccctccaagttttttttttaatttaattacccctccctgccctggccctgccagcttcagctccacctccttggaggaagcaggcgcttttacagagcgccgcgcggcaggtccccttt

SEQ ID NO: 383181 - DNA, 586 bp, Homo sapiens
gtttttactgtaacttttcattacttacttgttacatactatgatgacttaaggggtaaacacacctttcactatccacaatataatccaagcctgtgtatatccataataygcttaataatagcttcacagttgcctggagaaatgacttttggggaggaagttatatgacatttttagataatgctgcggactaagtattattagagcaaaaatttactatcttgcaattacttcatataattagatacagttcatgacatactaagaagcatcttaaaaaagtaatcaaacataatactgattttcaaagtatttggctaacaaagactacatttttttctcttaacccaagatttaattcgacccctataaaagcagcatctcactttattgatcatacttcaaagcatatactcaatagttaaggatcaataatttctgtttggtttgggtctttccactcgtgactttctatgattttttactcccctccccctatatcctgttccataagtacacgggtgctctagattttcctatcaatagagggcgtcctcgagtcattgcaaatcctggtgtcgtt

SEQ ID NO: 383182 - DNA, 550 bp, Homo sapiens
aggacgagtgggaatccacagaggaaggtctagtcctgactttctgggtctgggctttaggcaactgatttaacgtctttggaccttggggtcactatcaagaaaggatgtgtaagaggcawtaattagtaaaatttacatatccttctctttcttaaattcgatgacaatgaacgcccttcctccaaacctctgcaggttcctccttagtatttttttcaccttgctttatcttctccaagtgccagtcaaatggaaaaaaacatactgagattgtttcaaggtaaatgtaagacacattgaaacatacccttttgcatctgagaatttaaaaagaagaaaaaaaaaaccccaactcagctcctggtttacaaaagcaaggaattttaatgtccccacttgttttgcttttgaaaagccactccagcagtcagcaaagcacagctttgatttagaaactaaaggctagtctcttgtgtttttcttttcccttccaccaacacaaagacaagctgcagcataaaataatgatgaacaagagttcaaagca

SEQ ID NO: 383183 - DNA, 257 bp, Homo sapiens
tggcaaaatattctgagcttgtcyaattctgttgctttcatttttttttaagttatattttaggctcagtatgatggctcacacctgtaatcccagtgctttgggaggccaaggctggaggatcacttgagtccaggagttagagatgaacctggggaacatagcaagaccttgttactacaaaattttaaaaaattaggagacgtggtggcacacgcctgtaatcctagctacttgggaagctgaagtaggaagat

SEQ ID NO: 383184 - DNA, 257 bp, Homo sapiens
tggcaaaatattctgagcttgtctaattctgttgctttcatttttttttaagttatattttaggctcagtatgatggctcacacctgtaatcccagtgcttygggaggccaaggctggaggatcacttgagtccaggagttagagatgaacctggggaacatagcaagaccttgttactacaaaattttaaaaaattaggagacgtggtggcacacgcctgtaatcctagctacttgggaagctgaagtaggaagat

SEQ ID NO: 383185 - DNA, 609 bp, Homo sapiens
cccttccagctgcttgcgcgggcttccaagttgcaacacagtcctcggaactttgctttctagtgccgtcaaggcaaagcacgtaactccagagccacacccttgccctgagtggttttccccttctttcgggttatttcatcagggtaaattcccagcaatcagagtcttgagctagagaacatggtatttgtatggttctcgctgcttattgccaaattattttcccacaggcttgtgtgcttttgctatgaataaatgaatagattgaatagatgagtttgactataccattactgccattgagcttttttttttttttcttttttttagacagaatctcactccatcacccaggctggagtacagtgacgtgatctcagctcacggcaacctccacctcctgggttcaagcaatcctcctgcctcagcctcccgagtagctgggattrcaggtgtgcggccaccatgcctggctaatttttatatttttagtagagacagggtttcacaatgttgacagggtggtctcgaactcctgacctcaaatgatcatccctcctcagtttttcaaagtcctggggttacagacatgaatgagccacttca

SEQ ID NO: 383186 - DNA, 309 bp, Homo sapiens
ggagaagctcccaagagcctccttcctgctgccttgtgctctagaccctgggctctggaagggccagggcaaggccaactaaccagataaagctgaaaagcaaaggagaawagagagcccaggccctcagcacatcgccgggcagctaagcagccctgatactgaaatcctgttccgctcactgctgctgtttggcatgtagggtgggcattctgttcctcacagccaaactgccctgcggagaagcagtgcaaactgaaaccctgccagcaacatgccagcgagccgcctcctgcagcctttcctgga

SEQ ID NO: 383187 - DNA, 309 bp, Homo sapiens
ggagaagctcccaagagcctccttcctgctgccttgtgctctagaccctgggctctggaagggccagggcaaggccaactaaccagataaagctgaaaagcaaaggagaatagagagcccaggycctcagcacatcgccgggcagctaagcagccctgatactgaaatcctgttccgctcactgctgctgtttggcatgtagggtgggcattctgttcctcacagccaaactgccctgcggagaagcagtgcaaactgaaaccctgccagcaacatgccagcgagccgcctcctgcagcctttcctgga

SEQ ID NO: 383188 - DNA, 309 bp, Homo sapiens
ggagaagctcccaagagcctccttcctgctgccttgtgctctagaccctgggctctggaagggccagggcaaggccaactaaccagataaagctgaaaagcaaaggagaatagagagcccaggccctcagcacatcgccgggcagctaagcagccctgatactgaaatcctgttccgctcactgctgctgtttggcatgtagggtgggcattctgttcctcacagccaaactgccctgcggagaagcagtgcaaactgaaaccctgccagcaacaygccagcgagccgcctcctgcagcctttcctgga

SEQ ID NO: 383189 - DNA, 572 bp, Homo sapiens
aatatgagttatcttgggactttgcaagtttgataaagccaaaccttatccaaaactgaaacggtgagaagaggtggctccaaatagactgcaaggggaggagatagaactgtgtgatcctattttgctaagtcttctcacatayggaattttctgccaaaaaatgagagaccagaataaggggatttacttcccgcaaagactatgttactgaaactcccaagggagacaccattaactcgagaggacttttggcagtacccagaggccaggaaataaagaagcgaaatcttcaggtttaaatgacagttgcctgctaagtttttgaggaaattgtgttgccaaagaagccaccagacaagcttgattggtgactcagaccaccctgctgggcgtgagtcaggccaccctgctgggggtgagtggcaaaggctgtgtgccccagctgaaccagagcaatgcactctgatatggcttggatctgtgtccccattcaaatcgcatctagaattgtaatccccatgggttgagggagggacgtggtgggacgtgttggctcatgggggcagttt

SEQ ID NO: 383190 - DNA, 572 bp, Homo sapiens
aatatgagttatcttgggactttgcaagtttgataaagccaaaccttatccaaaactgaaacggtgagaagaggtggctccaaatagactgcaaggggaggagatagaactgtgtgatcctattttgctaagtcttctcacatacggaattttctgccaaaaaatgagagaccagaataaggggatttacttcccgcaaagactatgttmctgaaactcccaagggagacaccattaactcgagaggacttttggcagtacccagaggccaggaaataaagaagcgaaatcttcaggtttaaatgacagttgcctgctaagtttttgaggaaattgtgttgccaaagaagccaccagacaagcttgattggtgactcagaccaccctgctgggcgtgagtcaggccaccctgctgggggtgagtggcaaaggctgtgtgccccagctgaaccagagcaatgcactctgatatggcttggatctgtgtccccattcaaatcgcatctagaattgtaatccccatgggttgagggagggacgtggtgggacgtgttggctcatgggggcagttt

SEQ ID NO: 383191 - DNA, 572 bp, Homo sapiens
aatatgagttatcttgggactttgcaagtttgataaagccaaaccttatccaaaactgaaacggtgagaagaggtggctccaaatagactgcaaggggaggagatagaactgtgtgatcctattttgctaagtcttctcacatacggaattttctgccaaaaaatgagagaccagaataaggggatttacttcccgcaaagactatgttactgaaactcccaagggagacaccattaactcgagaggacttttggcagtacccagaggccaggaaataaagaagcgaaatcttcaggtttaaatgacagttgcctgctaagtttttgaggaaattgtgttgccaaagaagccaccagacaagcttgattggtgactcagrccaccctgctgggcgtgagtcaggccaccctgctgggggtgagtggcaaaggctgtgtgccccagctgaaccagagcaatgcactctgatatggcttggatctgtgtccccattcaaatcgcatctagaattgtaatccccatgggttgagggagggacgtggtgggacgtgttggctcatgggggcagttt

SEQ ID NO: 383192 - DNA, 581 bp, Homo sapiens
tatatctaggtgtgtccagtcagcctgatcctaatctttttttaagaactggttttgccgggactggtaatgccttctgtaaaatcccataacctacgacttcttttttacctcatctctaaggaacagtatcttgacaaacaagagctgcttcttatgtaggatcataacttggggcaggctacatttaatgtgacttgggaaaaactcagggctatcttaaggtgtatattctctttaaatgcgtgaactgggaaaaatgacttactataccatacaaacaarttgcctatattaggtaatgtcattctctgaggtagagcaatttactccaatcctgagtattttcatcacattttaaaattaatgggaacgacctaacatagcattacagtcattcatttgagtttcattccacgagcaaccatttttgagtacctaggacacagaagccaccatctcagacactgtgaataccaagaagataaaaaatggtctttgtccagagactgcgagacaaaggagtctctaagtcatcatgacttagaggaatggtaagattttacattaacgttgatttg

SEQ ID NO: 383193 - DNA, 567 bp, Homo sapiens
ttcttactatccatggagttatctcaaccaacatataaacatgcttccaatgacccactgtggaatataaccctctgtgcacaggtccagctgctaccagtttctttgtttctcttcaggacaaaactgctctaatgagtttccacctcctgtctgcactttcttacttcctatgaaccctctctattgaattatgaaatcttctgrgcatacagaaaaggataataatctaatgaaccaccaaagcatatctgtctgatcttaacatctttcattatttgctgcgtatttttttttcattttagtggaaaacagaatcaaagataaagttggtggcctttgatgatctttgcacaatcccccttttccctcccttgacatattactgaatttattttttatcatttctgtgctattttactactgtgatgtatccatacaatatagatctgattttttggtttacgtactttatataaactggcggtatactacatgtcccttctgcaaccttgtctactgcactgcagggaatgtacattttagacattgcaagagtggccaaaa

SEQ ID NO: 383194 - DNA, 567 bp, Homo sapiens
ttcttactatccatggagttatctcaaccaacatataaacatgcttccaatgacccactgtggaatataaccctctgtgcacaggtccagctgctaccagtttctttgtttctcttcaggacaaaactgctctaatgagtttccacctcctgtctgcactttcttacttcctatgaaccctctctattgaattatgaaatcttctgagcatacagaaaaggataataatctaatgaaccaccaaagcatatctgtctgatcttaacatctttcattatttgctgcgtatttttttttcattttagtggaaaacagaatcaaagataaagttggtggcctttgatgatctttgcacaatcccccttttccctcccttgacatattactgaatttattwtttatcatttctgtgctattttactactgtgatgtatccatacaatatagatctgattttttggtttacgtactttatataaactggcggtatactacatgtcccttctgcaaccttgtctactgcactgcagggaatgtacattttagacattgcaagagtggccaaaa

SEQ ID NO: 383195 - DNA, 567 bp, Homo sapiens
ttcttactatccatggagttatctcaaccaacatataaacatgcttccaatgacccactgtggaatataaccctctgtgcacaggtccagctgctaccagtttctttgtttctcttcaggacaaaactgctctaatgagtttccacctcctgtctgcactttcttacttcctatgaaccctctctattgaattatgaaatcttctgagcatacagaaaaggataataatctaatgaaccaccaaagcatatctgtctgatcttaacatctttcattatttgctgcgtatttttttttcattttagtggaaaacagaatcaaagataaagttggtggcctttgatgatctttgcacaatcccccttttccctcccttgacatattactgaatttattttttatcatttctgtgctattttactactgtgatgtatccatamaatatagatctgattttttggtttacgtactttatataaactggcggtatactacatgtcccttctgcaaccttgtctactgcactgcagggaatgtacattttagacattgcaagagtggccaaaa

SEQ ID NO: 383196 - DNA, 548 bp, Homo sapiens
gttgcaggctttgaagctcagtcctgccccttggtagctgtgaggacctgaggaacatgctcaatctctccatgccccactttgtccaattctaaaatgatagcaatagttcctacctcataggggttttgccaacattagaaattgttaatgcatgtaaattgcctgttccatagtgagcactccataatgttagcaagtattactttgtgatgattcaagaaatagaaattcttgttacaagctgaagtgtggtttaatgtctttgttcacttraaagcactttgcaaaatgcagttgaatcgccacctctgtttggtcacctgcacaggaacacccacacagagagcgagaaggaagatgagaggaaaaattggaatttgctaaaaataaaaccagggcttggaattgttgcttgactttgcataagagcaaacatctcttgatggtaggaaaaaagaaagagaagtatgctgggcatcttctgcttatccttccagatcctctggagcctcctccaggctctggactgcattgaagtcttgcta

SEQ ID NO: 383197 - DNA, 454 bp, Homo sapiens
acagcagacctttcagcagaagccttacaagccagaagagattagaggcctacattcagcattcttaaaggagaataatttcaaccaagaattttatatctggccaaattaagattcataagaaaaggagaaataagatccttttcagatatggaaatgttatgggaatttgttaccactagacctgccttactagaggtccttaagcaagtgctaaatatggaaagcaaagaccattactagctagcacaaaagcacacttaagtacawagaccatcagcactattaaaaaaaaaaccacacaatcaagtctgcataataaccagctaacaacatgatgacaggatcaaacttgcacatatcaatattaaccttgaatttaaatgggctaaacacctcaattaaaaggcagagtgacaagttgtataaagaagcaagacccaactatatgctg

SEQ ID NO: 383198 - DNA, 577 bp, Homo sapiens
aagttttctcaataaacctcagcaagttagagacctacaaaatgagcatgtgaaagattctgcacccactgtgtcctgccaagattacccaagtcactggaccttccacatctgcccttggcatgcagcttggcacatgggggatgccagtgcatgctggccagggtggccatggaaggagacagaaatactccaagaggcagagcagaggccagagacttgggggckgcttacagcagacagagatggctcatagccataagcatgggtgtttcagagagcgatgttacttactgcaagtcctccctggaggtgtggtaagattggcaacataccttgtgtgtaatatggtttgggctctgtcctcagctcatcgcaaagattaattgaatgaatttccaaacagcatggagggcatccttattttcatcctcaggttccagataagaagacagggttactggaaggtataatttgcctgcaatcactcagccatcaggattctggctcaggtgatcagattgcacagtccctgccctgagggcttgtcgttgctgggctgggcatagggaaacag

SEQ ID NO: 383199 - DNA, 577 bp, Homo sapiens
aagttttctcaataaacctcagcaagttagagacctacaaaatgagcatgtgaaagattctgcacccactgtgtcctgccaagattacccaagtcactggaccttccacatctgcccttggcatgcagcttggcacatgggggatgccagtgcatgctggccagggtggccatggaaggagacagaaatactccaagaggcagagcagaggccagagacttgggggcggcttacagcagacagagatggctcatagccrtaagcatgggtgtttcagagagcgatgttacttactgcaagtcctccctggaggtgtggtaagattggcaacataccttgtgtgtaatatggtttgggctctgtcctcagctcatcgcaaagattaattgaatgaatttccaaacagcatggagggcatccttattttcatcctcaggttccagataagaagacagggttactggaaggtataatttgcctgcaatcactcagccatcaggattctggctcaggtgatcagattgcacagtccctgccctgagggcttgtcgttgctgggctgggcatagggaaacag

SEQ ID NO: 383200 - DNA, 482 bp, Homo sapiens
agggcaacgtgatagggtcatgttgacattgctaattaacttttgtcagctattgctcttaattaaggaggcaggtacttgataaaaacaggtattgattgtcctatagaatcagaaataagcctaacacttattcctgttaacttaagcaataagtaatagattttcatattctctttattcaggaactgcactctgctgtccacatactcaatttaatgtatgtggcaccaacattaactgaacagaaaaactggaagggggaaaaagcaggcactggataatcaataggattcagacctcacaaagcccccgagtcctttaactaagggcacaactctgcattgtatgcttgaaaagtgctaacagagtagatcttaaattttttcaccatacacaggcaaaaaamaaaaggcaactatgtgaggtgatggatatgctgattagcttgattatagtgatcataccacaatgtactcaca

SEQ ID NO: 383201 - DNA, 604 bp, Homo sapiens
aaactcttccatttgtacagatgaagaatgggaggagccacacacggctgtcacatcagtccttctgggcaaaaattgtcaaatctccctatgctctggtcaaaatgtttgttctttaatcctttcctggacttactaatattaactacatggtggaattctattatcactcttctcaatactgttggaatgcagatgagttcttcggggagtgttacaactattttttcaaactcttaattagactttgggatgtttccacggtagcrgctgggtatagactgctgaagattttcttcttttgctaatgttgtgactgatacggaagcccaaagattgacatattatgcaaagcgtaattatctagttatgtaaccttgaattcccaaggtgaaaactcacaagcattttcaagcaaagattcatgatttttgccatttattttaatatatttcagtctccaaggttgaaacaataaatctctgatgtgcctccatttccattttgtgtaataattgagattcagccacatcccacatccagagtggggggcaagctggggaaaagtgatggggcaacatttgaattctagaatcgagaccat

SEQ ID NO: 383202 - DNA, 604 bp, Homo sapiens
aaactcttccatttgtacagatgaagaatgggaggagccacacacggctgtcacatcagtccttctgggcaaaaattgtcaaatctccctatgctctggtcaaaatgtttgttctttaatcctttcctggacttactaatattaactacatggtggaattctattatcactcttctcaatactgttggaatgcagatgagttcttcggggagtgttacaactattttttcaaactcttaattagactttgggatgtttccacggtagcagctgggtatagactgctgaagattttcttcttttgctaatgttgtgactgatacggaagcccaaagattgacatattatgcaaagcrtaattatctagttatgtaaccttgaattcccaaggtgaaaactcacaagcattttcaagcaaagattcatgatttttgccatttattttaatatatttcagtctccaaggttgaaacaataaatctctgatgtgcctccatttccattttgtgtaataattgagattcagccacatcccacatccagagtggggggcaagctggggaaaagtgatggggcaacatttgaattctagaatcgagaccat

SEQ ID NO: 383203 - DNA, 620 bp, Homo sapiens
gttggggaattttttccagggaaccctcacattaaggctgatttattggaccctaagtttccccaaccatacatttatttgctatattattgggcactaaatatgggcttgkcatggttttcagtacaaaaaagacaaaaatccctgtccttatggtgttaacttagtagtgagaggagatcaacaataatcacaataaaataaagtatgcattttgttagaaggtgatacatgctctggaaaaaaaatatagatcagtaatgggcatgtgaggagagggggcgacatcttaaatcagataatcaagtaggtgtcattgagacagcggtttatgaacaaagacttgaaggatgcaagtgtgtcatcaagaatctgtctctatttttgatgtttgacctctgacagctttcaacttacaccttccctctctttctgcctcacaggcgggcaagatgatggtgccagggagaagttcaaaccacacaagtgcaaacacctgctagaaggagaccatgcatcctgtgcagtcagacggggtcttgggttcacatggtctccacatttggtttaatgtctggctgttaacatcttgaaattcttcatcatttttgaaccagggg

SEQ ID NO: 383204 - DNA, 620 bp, Homo sapiens
gttggggaattttttccagggaaccctcacattaaggctgatttattggaccctaagtttccccaaccatacatttatttgctatattattgggcactaaatatgggcttgtcatggttttcagtacaaaaaagacaaaaatccctgtccttatggtgttaacttagtagtgagaggagatcaacaataatcacaataaaataaagtatgcattttgttagaaggtgatacatgctctggaaaaaaaatatagatcagtaatgggcatgtgaggagagggggcgacatcttaaatcagataatcaagtaggtgtcattgagacagcggtttatgaacaaagacttgaaggatgcaagtgtgtcatcaagaatctgtctctatttttgatgtttgacctctgacagctttcaacttacaccttccctctctttctgcctcacaggcgggcaagatgatggtgccagggagaagttcaaaccacacaagtgcaaacacctgctagaaggagaccatgcatcctgtgcagtcagacggggtcttgggttcacatggtctccacatttggtttaatgtctggctgttaacatcttgaaatkcttcatcatttttgaaccagggg

SEQ ID NO: 383205 - DNA, 609 bp, Homo sapiens
tttcttctactccaacatgaaatatgtattttaaaattggatttctayttttacattatttccagtcatctgtagtttcaacattttgaattaaattttatttaaaaatatctcacaaatccaatcaatttattaaattttgtgagagttatctatttttttcttttcttgcttattcctttaaattgaatccaggaggaaactgttcttttttatatatatgaagcttatttcaatgtcaatactctaacctgatcctccaagttgatagcttagattagtgagaaagcaatattcgaaaaatactgaagtaaaaatcaaccaattcctgctcatgtgaaagtattgctcagggtccttgtagctctgcctggcaccactacccatgtggggcaaccagttaaccagaatttctaatcagaaaaatgaaatgttttccactttgatgggataacttaggtatcatagaaataggttaaatgagatcaaagtgctattatttacgttttttttttaacttccatagaaaacacttttctctggtttaacccaatatgcgtaggcaactcggtatggggagtgagtgatgaaattgctaaccagcagaat

SEQ ID NO: 383206 - DNA, 647 bp, Homo sapiens
ttttttgttttttgtttttttttggttggtaggctatttattactgactcaattttggagcttgttattggtctgttcagggaatttatttcatcctgattcagtcttgggaaagtatatgtgtccaggaatttatccatctcttctaggttttccagtttgtatgcaaaggtgtgtttgtagtagtttctgatggtaatttttatttctgtgaggggcagtggtaacatcccctttgtcatttctaattgtgtttatttggatcttttttcttctttattaatctaactagcggcctatatatcttattaattttttcaaaaaaccaactccatctttcgaatggttttttgtgtcttgatatctttcagttcagctgggattttggttrtttcttgtcttctgctagctttggggttcctttgttcttgcttctctaatatttgagtcgtgatgtttgactattaatttgagatctatctaactttttgatgtgggcatttagtgctatgaatttccctcttaacactaccttacctgtgtctcagagtttctggcattttgtatctttgttctcgttagttttgaagaacttcttgatttctctgttaatttcatttttttacccaaaaatcatttaggagcat

SEQ ID NO: 383207 - DNA, 517 bp, Homo sapiens
tttaaaaagtggaagatttttatagattcaattgatgtcattttttaaaaatcctaaagagatgcaaaaatatatttacaaatttgaaagtaatagatagatatatttttagatacagctagaatgtgtgtrtgtgcatgtatgtgtgtgtgtgagagaggagaacaccataattaatgttagaaatatacagaaaataaaaaaacagaatgatccagtaataactaaattggatccataatccaaaatgtcttggcccagaagaaatcaagaagattggaagaatactgcagaacattgctactgtctttctgcaccacatagagcaatgattcataaagtctagggtacataaaaagcatcctggtaacttattacaaatgcagattttcaggcctcatcatggaagagtcttattctaaaactcttgaaaagcatttttttgttgttttgtttagagatggggtggtcgctatgttgctcaggctgtagtgcagtgattattcacaagcaccat

SEQ ID NO: 383208 - DNA, 550 bp, Homo sapiens
attttctgtacttaactttgtaaatacaacatcgtgaggaaattgggagaaaaataataccaccaagggaaagacagtaggctaggccccgtatagaattcaagtcatatcttacttgctggtaagtgaaactgacaacctaatgccattttacattatagctcttcaaaaatatcatttgtgacagttgttattgacattctagaaataatacaaaaatgaggttagataaaatattttcctttagcaattcaaagttccaacaataagttaactgactttaaataactgctcttaggatccaaagcattgatttgtgtctgtttctgatatggaaagatttgctttaaattcctactgaaatttgaaaacatataaaaaggccttaagagaaaaagtaaactctcatttacatattagcaactgggaatgaataagcttgaaagtaytcaaacttaaacatatttcaaatgaaatgacattcaacgaaaatacttcttttatttgaattgtgtacaggtagcacaagaactaacttgtactcaaagtc

SEQ ID NO: 383209 - DNA, 574 bp, Homo sapiens
gtataagtcttaaggtaagaaaaagtggttaaaggtgttctggctaaaatgatcatccataccagattaaaggagacaacaatcacaaaggtgaatgcacaaaaagcccactgctactttccttactacttactaattatggtgtacctgtgtaacagacatagatgctagttgccagtacatttattccctgttcttctggtaacagcagtttagaatttcctttgaaatycatgtgatttcatcataactgacctcatcttccctgcttttgctctagccatgggcatatgacctggataatcaatgttatctgctctcctagccacaatgataagttcaggcgtggatattgaatccatgcagccaacaggactcctatttagaacttctgttggaactgttgaaaagagaaactatctttcttctggactggtaggctgaaaggatgagaacctgaagccaccagccattatgttgccaccctgagggaggcatcttacagtgatgaaatgaccgatttctataacaccggctcaacacctagatggtgaaagtcagaatgctgtgacat

SEQ ID NO: 383210 - DNA, 574 bp, Homo sapiens
gtataagtcttaaggtaagaaaaagtggttaaaggtgttctggctaaaatgatcatccataccagattaaaggagacaacaatcacaaaggtgaatgcacaaaaagcccactgctactttccttactacttactaattatggtgtacctgtgtaacagacatagatgctagttgccagtacatttattccctgttcttctggtaacagcagtttagaatttcctttgaaattcatgtgatttcatcataactgacctcatcttccctgcttttgctctagccatgggcatatgacctggataatcaatgttatctgctctcctagccacaatgataagttcaggsgtggatattgaatccatgcagccaacaggactcctatttagaacttctgttggaactgttgaaaagagaaactatctttcttctggactggtaggctgaaaggatgagaacctgaagccaccagccattatgttgccaccctgagggaggcatcttacagtgatgaaatgaccgatttctataacaccggctcaacacctagatggtgaaagtcagaatgctgtgacat

SEQ ID NO: 383211 - DNA, 574 bp, Homo sapiens
gtataagtcttaaggtaagaaaaagtggttaaaggtgttctggctaaaatgatcatccataccagattaaaggagacaacaatcacaaaggtgaatgcacaaaaagcccactgctactttccttactacttactaattatggtgtacctgtgtaacagacatagatgctagttgccagtacatttattccctgttcttctggtaacagcagtttagaatttcctttgaaattcatgtgatttcatcataactgacctcatcttccctgcttttgctctagccatgggcatatgacctggataatcaatgttatctgctctcctagccacaatgataagttcaggcgtggatattgaatccatrcagccaacaggactcctatttagaacttctgttggaactgttgaaaagagaaactatctttcttctggactggtaggctgaaaggatgagaacctgaagccaccagccattatgttgccaccctgagggaggcatcttacagtgatgaaatgaccgatttctataacaccggctcaacacctagatggtgaaagtcagaatgctgtgacat

SEQ ID NO: 383212 - DNA, 574 bp, Homo sapiens
gtataagtcttaaggtaagaaaaagtggttaaaggtgttctggctaaaatgatcatccataccagattaaaggagacaacaatcacaaaggtgaatgcacaaaaagcccactgctactttccttactacttactaattatggtgtacctgtgtaacagacatagatgctagttgccagtacatttattccctgttcttctggtaacagcagtttagaatttcctttgaaattcatgtgatttcatcataactgacctcatcttccctgcttttgctctagccatgggcatatgacctggataatcaatgttatctgctctcctagccacaatgataagttcaggcgtggatattgaatccatgcagccaacaggactcctatttagaacttctgttggaactrttgaaaagagaaactatctttcttctggactggtaggctgaaaggatgagaacctgaagccaccagccattatgttgccaccctgagggaggcatcttacagtgatgaaatgaccgatttctataacaccggctcaacacctagatggtgaaagtcagaatgctgtgacat

SEQ ID NO: 383213 - DNA, 570 bp, Homo sapiens
ctgacctcagggacaaagcattgatggaaccaatacagaaaaaggattttcatcatccaggccttcttctacagctgaaagactggcagctggtatacaactgttccctgcaaggattgggagttagcagctttatggataagggcaatgctagtgcttgcttctgttccttactaataaatatcgtttgtgacactttttttcagaatagggcatttttgtctgtattaaaaacctgttgaggcaggtatcctttgtcctcaattattttcttaatgatacctgggaacctatctcctgcctttggtcagcagaaactgcttctcctattaccttgatatttttaaggccaaacctcttgctaaaattatcaaaccatcctttgctggcrttaaatttttcagctttagatccttcaccttcctatttgtttgtttatttatttaagacagaatctcgctctgtctcccaggctggagtgcagtggtgcaatcttggctaactgcaacttccacctcccaggttcaagtgattcttgtgctgcatcctcctgaatacctgggattacag

SEQ ID NO: 383214 - DNA, 570 bp, Homo sapiens
ctgacctcagggacaaagcattgatggaaccaatacagaaaaaggattttcatcatccaggccttcttctacagctgaaagactggcagctggtatacaactgttccctgcaaggattgggagttagcagctttatggataagggcaatgctagtgcttgcttctgttccttactaataaatatcgtttgtgacactttttttcagaatagggcatttttgtctgtattaaaaacctgttgaggcaggtatcctttgtcctcaattattttcttaatgatacctgggaacctatctcctgcctttggtcagcagaaactgcttctcctattaccttgatatttttaaggccaaacctcttgctaaaattatcaaaccatcctttgctggcgttaaatttttcagctttagmtccttcaccttcctatttgtttgtttatttatttaagacagaatctcgctctgtctcccaggctggagtgcagtggtgcaatcttggctaactgcaacttccacctcccaggttcaagtgattcttgtgctgcatcctcctgaatacctgggattacag

SEQ ID NO: 383215 - DNA, 668 bp, Homo sapiens
acacctcaccagtccttccaggcttagcctagaacacccttgtccactggcccttgtatcgtcttccccttggtggcaccatgtgtgagtccatgtactcagggagagcagggccaggagtgggctgaatcctgggtcccagcaccagaccaggagagtttgggagggaatctaccaggaagctcctcaagaacctgcttaggcttcctactgcaataccaatgagccaaggccctcctacccgagaagcaggcaaactagaggcccagtgcaaggcccaggtcaggctctacccagaggcagttcctgggagaggcagaaggagtgcctggtaggagaccctgcccaaggctgctgcagagctaagtggctgactgscaggggagacaccttctctgggccatgtgaggtcaaataagccacaagtctggcttctacttccaagatgcctgtcctctgccccctactttccgcagtggaacgtctcctatcctgctcacctctacttcttctgactgcatcaggaggttgcatggcggctgcaaggcctttggccggtgagtgaaccagtaggcaaggatgcagccaggggcacccatactcacgagggtggtggccgagaggctgcggaaaaactgtcccaagtcacctagctcaggcagtcgcag

SEQ ID NO: 383216 - DNA, 573 bp, Homo sapiens
tttcccacagtttcaacttactgatacaaattagaagattttaaagtcactggttaagtcatcttgcttttcttgctctttgactttgtcctttgtaacctgtatttctcattcaatttggatgtaataactataatccaaaggaagtttggcagttttgtaactgtctcttagaattatagctcctcataatttctgaatatctgtttatatgrttttaatattgtagtctaatgactcaacttcaaaacatcactcctgctatgtgacttatttcactgtcactgaaacagtcagtgaagtcatttcccattcaataattaagcaagatcctttcaagagcctttacctgatcatctgtttagttttgatcatattcttttgattgtgaggaagtgatacgtactttggttgcataaagtactaggcataatgcaaagaaacatgtttctgctcccacagttgatgttcacttgtctctgcttcttagtttcctcttctaaaagagaatctcattggcccacctcatcgctgtcattctggttctgcagagctttccagtggaggtcacgt

SEQ ID NO: 383217 - DNA, 601 bp, Homo sapiens
atccaacttcattctgttgcacgtggataatcagtagtcccagcattatttgttaaaaagaattttctttccccattgaattgtcttggaaactttgtcacaaatcaattgatataaatgtgagagggtttatttctggactctcaattttatccattactctatgtgtctgttcttatgtcgataccatgctgtctagatttctattgtttaatacttttatattgggaaatatgagtccttcaactttgttttwtttttcaggattgtttgcttattcaaagtcctttgcatttctatatgaatttcaagatcactttgtcaattcaaaaatgccagctggaattttgacagggcttgcatttaatatgtaggccaatttggagagtattttcatcttaacattattaagtcttctgatccataaacatcgggtgtttttacatttagttagatactctttgttttctttcaaaaatattttctagtataagaatataagttttacacttctttttgaatttgtttctgataattttattctttttgatgttattataaatggaatttacttcttaatttcatttttagattgttcatt

SEQ ID NO: 383218 - DNA, 565 bp, Homo sapiens
tttaattagctcaattatcagttttgactaaggcttgtatttccccaaaaattatgttaaccatttcaaacattatttggcataaattacatgcagcattctttcatcttaaggcattatttcaaaccacattcccctatgccacacctttgacatgtaagttccagaaaatcaggtgctgggtaacctagaatgccttattcactgtgaccttgctggcttccagaacagagtcaggcacacagtaggttcttaagcagagcacctggtacaatgtgtggaccctgrgacccaacagcccaagttagactcctggcttccacacttacaggctgtgtggccaagagcagttcattgacatctctgtgtctccttctccccagtgcccagttcacagggttgggggccactaagtgagtttatctgtgtgtttgcttgggtggtgcctagcacacagaacacattgcataagaattttctattattattttactgctactgtttagcatgcagatggtaagtcctattcaagttttgtctaaaatcaacaagctccctgcttcta

SEQ ID NO: 383219 - DNA, 495 bp, Homo sapiens
ttttcatcacctagggattatgtccaatacccagtagttatcttttctgctcttctccctcctcccaccctccagtctcaagtcacccccaccgtatgttgttcccttctttgtgtttataagttctcatcacttagctcccacttagaagtgagaacatgtgatacttgaccttctcttgctgtgttagtttgctgagattaatagcctctagctccatccatgttctcacaaaagacatgatctcattcttttttataagcgtacacttttcaactgtatcttgaggaatgagcaagtatttgcmaaacatagaagaaaatgagggcatgtgaggaagggaggttggcttgaccaaagtattagagaccatggcttgtggacatgtagggttcagtatcatttaaaagggtggtgcattgtgttggagtcagtgattcatcctatctgtcccagcccatctcttccatagaggcagaaatgctcaaagctcct

SEQ ID NO: 383220 - DNA, 624 bp, Homo sapiens
gcaagccacaacccttggtggcttccatgagtcaggcctgccagtgcacagaaggcaagacttgaggtttgtaaacctccacctagatttcacaggatgtatggaaacctcgggatgtccaagcagaaatatgttggaagggtggagactttatggagaatctctactagggcagtgcagaagggaactgtggggttggagtccccacaaagagtcctcattgggacactatgacatggacctgtgaggatagggctactatcctccagtacccagaatagtagatccactgacagcttgcactgtacacctggaaaagccacaggcactcaatgccagcctgtaaaatcagccatgggggctgcaccctgaagagccaagggcatagctgccaaaggccttgggagcccatcccagcataacatgggtataagacatggaatcaacaaagattattttggagctttaagatttaatgactgccctgctgsgtttcagaattgcgtgggacctgtggcccctttgtttaggccaatttcttccatttggaatgggaacattcacccaatgcctgtactccctttgtacgtttaaagaaactaacttgcttttctattttacagc

SEQ ID NO: 383221 - DNA, 647 bp, Homo sapiens
tacatctgatgttcaattaccagtttttttttttacaaatacaaactctatatgtttaaggcatacaacttgatgttttgatatataatatatacattgtgaaatgatcaccataatcaagctgattaacgtatctctcaactcagatacgattttcttttcttctctctttttctatgtgctaacaacacttaaggtttatcctctcagaaaattgtaagtacacaacacaatattgttaactatagtcaccatcctgcatattagagctacataactcactcatcttatgtaactgtagaatcactattagcaaaaagacaaagagaagtgctggtaatgatgtggaggaaagaaaaatttgtacactgttgatggaaatgtaaattsgtatagccattatggaaaatagcctgaagatttcctcaaatgtaaaaaatagaaataacatatgatccagcaatccctcctctgggtatatatacaaaggaaataaaatcttcatttcaaagagatatctccacccccatgttcattgcaatattattcacaatagccaagttatgaaaacaacctgaatgttcattgacagatgaatggatataaacacacatgcacacacacacacacacacacacacacacaca

SEQ ID NO: 383222 - DNA, 456 bp, Homo sapiens
gatttgcatcctaggcaaatgacacacctggtggtctaaccagtttttcatgcyctatgcaaatcagacactgcctcctcaccagcttatctataagaccccctgcatttcaccaaggattcagcaacccatttttctgagtcccctctctgcagcagagagctattctctttctttcacgtattaaacttccactctcaacctcactctttatgtgttcacgtccttgttctccgtggccgtgaaacaacaaacctcaggtgttactccagacaatgaggccatttcagtacccacatgaatgaatctgaaaatatgatactagttaaataagttagacacagccacatattgcatgattttgtctatatgaaacatccaagtaggtgactctatggagataatcagcagattagtggtggtaggggctgggtggaggagaaaatagggaatagc

SEQ ID NO: 383223 - DNA, 586 bp, Homo sapiens
atcaaaacttctaagatacagcaaaagcggtgctaagaagaaagttcatagtattaaatgcctacatcaaaaagtctgaaagagcacaaatggacatctaaggtcacacctcaaggaactagagaaacaagaacaaaccaaatccaaacccagtgtaagaaaagaaaaaacaaataccagagcagaagtaaatgaaactgaaaccaggaaatacaaaagataaatgaaacaaagagccggttctttgaaaagataaataaacttgatagaccattagtgagattaatcaagaatagaagagacaagatccaaataagctcaattagaaacaaaacaggagatgatagtataactgatatcacagaaatactaaagatcattcaaggctactatgaacacctttacatgcacaaactagaaaacctagaggasatggataaatttctggaaatatacaagcctcctatattaatccaggaagaaatagaaattctgaacagaccaataacaagcagcatgattgaaatggtaatttaaaaagtgccaacaaaaaaaagtccaggaccaggtggatttacagctggat

SEQ ID NO: 383224 - DNA, 515 bp, Homo sapiens
ctaatgtattacaccttacaaatgtataaccaaaattacacgaaagttcattatgggaattacagcaatatttaatcatatatataataaatgtaagtttaattgttcaacatataatccaaattaaacattttgttagttacaataaaattttcatttcaatttttaatggattctgttggtgactgtatgaggtaaagattattctcaggtaacaagcatttcctttatgtsatttatctttaccatttcattcaaaacctctttttgattattttttctttttgtttgagggcaggtaaggcacaatcagttgctttgtctgcctacatatgtttatttaatacaaatcatggcaagtctcttggtaagttagggcttcaattcatcaaaatgtcatgtaaattcaggctgactacagaaacagtggcaaaactagcttaaatctctctgtgtgttactccttagacattaatttactttaaatatgtggaatttttgtggtggttaatgtg

SEQ ID NO: 383225 - DNA, 577 bp, Homo sapiens
cctcattatgtgtttattaacatactaaatgataggcgcaacagttccaagaacactcgtatttggtgtaaaaatgtgtggcaccacagttccaaggaatcttcagctttttcaggaattttcaaaaatattccatctcttggttaaagaaacccatcaatatagaaatcccaaaactcactgagcaactctctctctcgaatacacccacactctcctttcttgagtgtatagttttgctttgtaataaatctccatactttcactatttttcaactcatccttgaattccttttcacaacactgacaagagyctggacatcggtggggtcaaggtcccactgatttttgggaacctcctccagcccattggtggcactatggaaacatattcaggccaataaggttgtaaagttgccatcagtagttaatctttactctccttggcagaaggggtgtcaaggaacctcttatcttcgtatatctatatcctgcttttagacaaattgagagaggactgagagcttttctgtatctacttcttgtcttcagctcaacaagcatctttggggtggca

SEQ ID NO: 383226 - DNA, 577 bp, Homo sapiens
cctcattatgtgtttattaacatactaaatgataggcgcaacagttccaagaacactcgtatttggtgtaaaaatgtgtggcaccacagttccaaggaatcttcagctttttcaggaattttcaaaaatattccatctcttggttaaagaaacccatcaatatagaaatcccaaaactcactgagcaactctctctctcgaatacacccacactctcctttcttgagtgtatagttttgctttgtaataaatctccatactttcactatttttcaactcatccttgaattccttttcacaacactgacaagagtctggacatcggtggggtcaaggtcccactgatttttgggaacstcctccagcccattggtggcactatggaaacatattcaggccaataaggttgtaaagttgccatcagtagttaatctttactctccttggcagaaggggtgtcaaggaacctcttatcttcgtatatctatatcctgcttttagacaaattgagagaggactgagagcttttctgtatctacttcttgtcttcagctcaacaagcatctttggggtggca

SEQ ID NO: 383227 - DNA, 498 bp, Homo sapiens
  misc_feature (1)...(498): n = A,T,C or G
ttggtgacctacagatagcgttttggcattctcacctgtcttattcaatatagtactggaagttcttgccagagcaatcaggcaagaagaagaaacaaaagacatccaaataggaagaaaataattcaaactatgtctcttcacagatgatatgattctatacctagaaaatcctaaacattctgcccaaaggctcctagaactgataaacaacttcagtaaagtcttaggatacaaagtcagtgcacaaaaatctgtagcatttctatgcatcaatactattcaagctgaaaacaaaatcaagaatataatcccacttgcaatagccacaacaaaataaaatacctaggaatacatctcaccaaggaggcaaaagatctatacaaggagcactacaaaacactgctaaaagaaatcatagatgacaaacaaatgaaaaagcmtttcatgacaatggnatggagagaatcagtatcattaaaacattcatactaccca

SEQ ID NO: 383228 - DNA, 586 bp, Homo sapiens
taatcatttgtagctaatttgtcagtgttgttatggcttatgtgtcacaagaatagcagaattaggaagaatgagcccttcagattcatgtttcacttatgggcattggttgtggcagacactcagattttattaaaataaactcttagccagtagacagaaagaggtataataagaatgcatagttattctccctttataataaagacaggacaggggaaaatgtcattaattgaaaataagttaagaaaggracacttattaggatctaaataaaaatgtactgatgctcctaagaacaatgttgcagagaagtataagatacggtaagctctataaggatgtggtgtctgctctagtccccacaaaatatgtctcttgtatttttgttcattctttcaaattttgtaaaattgaatcacatttagttagtcttgcatgttttcactcactaataaccaagctacttttcctagctccctagatgagcattttcacaagtatcatgctctggcattagggacccgcaaccaggtgaaaaattcaaacacctgaagatgaagtgtttgaattaaattattaagga

SEQ ID NO: 383229 - DNA, 604 bp, Homo sapiens
gaacaggtttttaataatgcagtcttggtagggatgaaagaaagtgaatgaatatgttctctgtccttcattcattgtggaagacagagataatacttgtgtaagggagttgatagtagaattgggcattccactatgactacgcttctacaggaagtcattatgattaaatctatggccttttgtgcctgtggtctggggagagagttaagaccaaatcctcagtgcctctttgaatagtattgcacaaaacagcctttccacattttctctccgaggcattaaagctactcatgacctcrggaaccactaacatctcaaatccaaggtatcataatttctccctattttcccagacgaaacctgagtttggtaccactcctctgtgtgtgttacaattaaaggctattggatttactatttcaattctttattaatatttattttatagtgactctgctagactaccacttatttgaggataagaaagaaggctggctttttaaatattgccatcacttattacaatgactggcacatggagtgtccctcacatacctaagtggagtgaaaaatgtttcattatttgactttttagcatata

SEQ ID NO: 383230 - DNA, 606 bp, Homo sapiens
cttcctgcaccgcttattgtttatctaatgtcaatcttccaaaatgaaatatttggatatggttttctgagtcatagattgcctaggaaaaatgatttcatagtttctttgtggaaggcacaattcctatttgcttcctgtgtagtttaccaatggaaacttctagaattattttggtatatgacaaatgtcgaaacttgaatggacttaataaaagacataggatcataactataaaaataytttcgttttcaccagaggatgccgtaatcataggatttttaaaaataatttagtttaagcccattagctggctagaaatagaagttagtgctctaaaagataatacatagttggtatttgaatttttataacttgagttggaaaaatgattcctttactccttagctggataaacatgagctaagcaactggattctctgagttttagcactgtcatttataaggtgggaataataatcacctcctcacctcccttttgtgtatctttgaatattactatgtggataaaagcatccaatgatgattcttcataaagccattccttatgttcctggtattgtttgcatttgtgtacacttattt

SEQ ID NO: 383231 - DNA, 586 bp, Homo sapiens
tgtagtaactcagcttcaaggtagggaacacaagaactggggcttccacttagcaaaagagacaagtaaacattctctttagagtttcagaggtagaatgcctctgctgacaccttgatttcaaagtgctmgtttccagaatggcaagaaaataaatttctgttgttttaaggcacccagtttacggtactttgtcactgcagtgttaggaaattaataaagatgctggcactggaatgacagggactgatgtaacgataactaaaatataaacagtggctttgaagtaagtaattggtaggatcttggaagcattttgaggcatttggtagtaaaaaccctagattgccctgaagaaattgttggtaggaatgtggacattacaagtgaatcctgtgagtgctcagaaagaagtgaggaaagcggtaaagaaagcttctatgattttaaagaatacgtacatccgcaaaggcataagaatgatatacattggacttcggggactcgggggaaagggtggggggtggggaggcacaaaagactgcatattgggtacagggtacactgttcaggtgttgggtgcacc

SEQ ID NO: 383232 - DNA, 586 bp, Homo sapiens
tgtagtaactcagcttcaaggtagggaacacaagaactggggcttccacttagcaaaagagacaagtaaacattctctttagagtttcagaggtagaatgcctctgctgacaccttgatttcaaagtgctcgtttccagaatggcaagaaaataaatttctgttgttttawggcacccagtttacggtactttgtcactgcagtgttaggaaattaataaagatgctggcactggaatgacagggactgatgtaacgataactaaaatataaacagtggctttgaagtaagtaattggtaggatcttggaagcattttgaggcatttggtagtaaaaaccctagattgccctgaagaaattgttggtaggaatgtggacattacaagtgaatcctgtgagtgctcagaaagaagtgaggaaagcggtaaagaaagcttctatgattttaaagaatacgtacatccgcaaaggcataagaatgatatacattggacttcggggactcgggggaaagggtggggggtggggaggcacaaaagactgcatattgggtacagggtacactgttcaggtgttgggtgcacc

SEQ ID NO: 383233 - DNA, 568 bp, Homo sapiens
atccaaattttgtgtacaagacttttctaaaaataattggaaatctctagattttacacatctatatattttaaagttttattttaatatgacggcaaaaatgcctaattrgcttcactttcttagataaatcaaacttgaaacaatacatctgcagtgtctcctaaagttccttgggagacatatttctcattcatgattttcaaatcaagaatacaaagcatgcatacggttacatcaaaatggcaattaattttaaatcctgtctgatgccataaatatatatatagttgagaaacattagttttctttttccagtgaggaaggtatatgtcgtaggttaaaaaacaacaaaatcacgcaatttcggaactttaagcatcactcttctctgtgcagaaggtaaaaacttgaactatcaattgtttgggaaaatctaagtgataaaaaaaaagagtttggctggggtgcaggcagatctgcagcaatctgggccatgtgttctttgcagaaacgtttcttgtataacatttttcctccctatacgtgtacattagtgtttgttttc

SEQ ID NO: 383234 - DNA, 545 bp, Homo sapiens
tcacccattctagtttgcaatagtttcatgaaggggtcttatcttttatktggccaaagggtcaagaagatctggtggaatcctgggccatctggtttctttaagcagttgtgcctgtagataaagggactaaagaaaaacagtaagaaaatgtaacttttccagttatttcatcaggactgtcctggtgacaatattacttaatattttactccctacaatgtacatatgttagtgtggttggttccttatattcaagtacataaaagatgagactcaaatgtgatacttccaattcttaaagacatgccttccagcaacattctgggcctcagttcctttatttcaatatttactggggtcttgtcaagtccaaaattctacaattctgagtgttatgattgaattacagctaggaattcatggtaacaatattttataattaactctaagtcaaactcaataaaaactataaagacttcatttacagaaagaaaaataagatgtgaaatgtaagacatttatgatagaatattgtacagcat

SEQ ID NO: 383235 - DNA, 545 bp, Homo sapiens
tcacccattctagtttgcaatagtttcatgaaggggtcttatcttttatttggccaaagggtcaagaagatctggtggaatcctgggccatcyggtttctttaagcagttgtgcctgtagataaagggactaaagaaaaacagtaagaaaatgtaacttttccagttatttcatcaggactgtcctggtgacaatattacttaatattttactccctacaatgtacatatgttagtgtggttggttccttatattcaagtacataaaagatgagactcaaatgtgatacttccaattcttaaagacatgccttccagcaacattctgggcctcagttcctttatttcaatatttactggggtcttgtcaagtccaaaattctacaattctgagtgttatgattgaattacagctaggaattcatggtaacaatattttataattaactctaagtcaaactcaataaaaactataaagacttcatttacagaaagaaaaataagatgtgaaatgtaagacatttatgatagaatattgtacagcat

SEQ ID NO: 383236 - DNA, 545 bp, Homo sapiens
tcacccattctagtttgcaatagtttcatgaaggggtcttatcttttatttggccaaagggtcaagaagatctggtggaatcctgggccatctggtttctttaagcagttgtgcctgtagataaagggactaaagaaaaacagtaagaaaatgtaacttttccagttatttcatcaggactgtcctggtgacaatattacttaatattttactccctacaatgtacatatgttagtgtggttggttccttatattcaagtacataaaagatgagactcaaatgtgatacttccaattcttaaagacatgccttccagcaacattctgggcctcagttcctttatttcaatatttactggggtcttgtcaagtccaaaattctacaattctgagtgttatgattgaattacagctaggaattcatggtaacwatattttataattaactctaagtcaaactcaataaaaactataaagacttcatttacagaaagaaaaataagatgtgaaatgtaagacatttatgatagaatattgtacagcat

SEQ ID NO: 383237 - DNA, 581 bp, Homo sapiens
tgcagtagttttctattaatactataaaatgtgttttataaaaatgtgtcagaacagagtaatgctgatttcattaaaattacaaacctatagttcaaggtcaccctaaagattatgttaatagaatgagctgtagatttgttgaagttcagcaaaaaatttgtaactgcaatttgaaaaagacttttggcaataaatactcactcctaaaccctgcaamtgaaaatattattttccttaaacgtttactactccttgccaaaggccattagattgacctaataacatttaaaacttgtgatttctgtaccatctcttttgttccaggataagaatatattttcatacagtgttcaaaccactaggctgcagactgtattttatttggtttgggcacatgttctgtctcttttacgttctgtttttctctgttccttacacatatgaatacctatatgtttgaaatagaagaacaacttcttgtgatggttagagagctcttctctctcctttaggatgttttggactgtttcatggtaggttgtgagataattatgaaccacgataacatttaagttcat

SEQ ID NO: 383238 - DNA, 584 bp, Homo sapiens
acatatgaatacctatatgtttgaaatagaagaacaacttcttgtgatggttagagagctcttctctctcctttaggatgttttggactgtttcatggtaggttgtgagataattatgaaccacrataacatttaagttcatgggtagaggtaaattcagtttggtaagataaaaggaaagataattagtaaaaggaaaagtctcttttaatcttacaatggggccaaagaattctgcagttttacttgaggacaatgtttatggataaaaataaaaagtgaatttaaattcgtttttgcttgtttttacttaagtgttactggcatctattaaattcttatgtactcatctgacattcataagcattagttgtactggaatcaggcagcagaagagtgagcctgacattgtttttgtaatatctggatgaacatggtagcctattttggctacttctttcatcttctactttccattaaagatcaactttgcagacagattttctaatatttataagctaaagtagtttttgctttgcctgacaaacttgcattgattctatacacttcctccatttctagaa

SEQ ID NO: 383239 - DNA, 588 bp, Homo sapiens
aatgctccattaatattggccagtgcacagtaagacatgaaaaacaatggaatgctaaacactttgtcagaaatctcacaaccaaaaccaaaaatgatgcaggcataaaagaatattctcctggataaacaataaatgggtggttacaataaaaataattagatgataactaatataacacctaatgtacaaagaaaaattwgcattataaaatcttgaagcagaggttaaggatactgaaacaaatggggttattttgtttgtatcttttagtttaggttaccatgctctaaatctttttgtacttactatagtgctatctgcactcagtaaatacttatgggaagaagggaaaggaaggaggaaggaaaggaaggaaacaaggaaggaaggaagggagaaaaaaacagaaggaaggaaagaaggattggagaaataaataatcttcatgccaatatagtagagagaaagaacacaattgaatattgagtaagtgttatcaaatttatgtgcatgcaagatgacataaaagtgactacaaaatctggacagaattgtacacatatttgtgcagtaaagtagtagaga

SEQ ID NO: 383240 - DNA, 557 bp, Homo sapiens
gtttctcaatcagtcccatctggttactaattctttgcttgttcgtttagtcacataagaaacacttttgcactgtacaatttccctcaaataaacttctgacatttggacatgacagccaagttgggatcaatcagtgcccattaaattcgatgcttttgtttcccttgaataaagggcgttctgattacatatttacaacaaaattttcagaaagttgtttggctagagccaaagagaaagagttcatgtttaatgcaatragcaataaaaacgggctgctggccagatggccaaataagaacagctcaggcctgcagctcccagcgagaccaacgcagaagacgggttatttctgcatttccaacagaggtaccctgttcatctcattgggactggttaggcagtgggtgcagcccacatagggcgagcagaagcaggttggggcatcacctcaccggggaagtgcaaggaataggggagccccctcacccaactccacgtacctcagccaagggaagccgggaaggactgtgctatcgggcccagatactatg

SEQ ID NO: 383241 - DNA, 541 bp, Homo sapiens
aatatgaacagatgtttcccaaaaggagacatataagcagcaaacatatgaaaaaaaaatactcaacattactaattatcagagatgcaaatcaaaccacaatgagatacatctcacaccagtcagacatgcaatttatctatataacaaacctgcacatgttcccctgaacytaaaagttaaaaaataaataaatagaattgcaaacactgcccctgccacccccaccaaaaaagtaaaaaaataacagatactggtgacgttgcagataaaagggaacacttaaacactgttggtgggaacacacattattccagcccctgtggaaaactgtttggaggtttctcaaataactaaaatagaattactacttgacccagcaatctcaatactgggcaaaaggaaaataaactgttctaccaaaaagccacctgcatttgaatatttatcatagcacaattcacaattgtaaagacatggaatccacccaggtgcccataaacagtagactgaataaacagaatgtggtacatataaacca

SEQ ID NO: 383242 - DNA, 585 bp, Homo sapiens
cttcaacattccactgacagcattagacagatcatgaaggtaaacactaacaaattctggacttaaaattgacscttgagcgattagacctaacagatgtctatagaatacaccacctaaccatagaatatacattcttctcatatgcacatggaagatactccaagattgaccacataatcagccataaagcaaatctcaataaattcaaaataactgaagtcataccaagcatcttcttggatcacagtaaaatcaacagaaatcaataccaggaggaactctcaaagccacacaaatgcatggaaactaaacaacttactcctggaatgacttttgagtgaacaacaaaattaaggcagaagtcaaaatgttctttgaaacaaatgaaaatagagacacaacataccaaaacctctaagatacagcaaaagcattgttaaaggaaaagcttatagcactaaacacctacctcaagaagatagaaaggtctcaaattaacaatctaaccttacatttaatggaactaggaaaacaagaacaaagtaaacccaaaactagcagaagaaaagaaacaacaaaaat

SEQ ID NO: 383243 - DNA, 585 bp, Homo sapiens
cttcaacattccactgacagcattagacagatcatgaaggtaaacactaacaaattctggacttaaaattgacgcttgagcgattagacctaacagatgtctatagaatacaccacctaamcatagaatatacattcttctcatatgcacatggaagatactccaagattgaccacataatcagccataaagcaaatctcaataaattcaaaataactgaagtcataccaagcatcttcttggatcacagtaaaatcaacagaaatcaataccaggaggaactctcaaagccacacaaatgcatggaaactaaacaacttactcctggaatgacttttgagtgaacaacaaaattaaggcagaagtcaaaatgttctttgaaacaaatgaaaatagagacacaacataccaaaacctctaagatacagcaaaagcattgttaaaggaaaagcttatagcactaaacacctacctcaagaagatagaaaggtctcaaattaacaatctaaccttacatttaatggaactaggaaaacaagaacaaagtaaacccaaaactagcagaagaaaagaaacaacaaaaat

SEQ ID NO: 383244 - DNA, 604 bp, Homo sapiens
tcacgcctttaataacaagaaactgtacgtcaagaccgattcatgtgaggaggtattcacttaaatctttagacttactattgtaagagtggggtcagttatttgaaagaygtgggtatttacaatgctaaggacagagtaaaggcaaaattaaaaaggtcagaaatcacttttctggtgaggctgagacatcatgcagccaaagtcttcaatctttagaatcctagaggtgtagcatctcttcctctctatgcagataagccctcatccaattcaccagaaagcctcaattacctttttccttcaaatgatctacagcaaacatgtgagctacagctgaaagaatgtcaacagatagaagaaccagctcctttccagaggcctgcagcatttcctaaaggacctggtgtgagggctgttgctggtgcctaggcatgtatcataccacaagcatttcatatggagtaagcacttagggatacatgctgaaacccaggttcctgttccccagaccatgaaggatcaaagccttcaataccactgactggcaaaggaaatgtcgagacagttcctaggagaagaatacaaacaaaaatggcatctc

SEQ ID NO: 383245 - DNA, 569 bp, Homo sapiens
ccgcgcctggccaacttattttaaggccattccatgtcataaaaatatcatgcccagccccaagagctaatcccttctgagaatgccacatttccaaaataagagccccaacatgagaagcagagagagcatttcaggagacaagcagtggctcttctgaggggccatgtggggtcaaggtgtgtgtagcctttccaacagttctgaactgtaaataaacagacattggcccatcaggaagcagtggagagttcatcatttccaagacctcagggcacacttacccatgcctgagccctgagaaatcagttggagtgagctggctctggaggtrcacagacaggccttcctgcagcatgctgtgcccagagatcagcccaggcagacacagtccacagtccatttggaccaaggaaagaaaagcaggcgctgttctgctgcccctgcaggcagcagccctagacctgtccacacacccattgaactcacagtgctttccctgaacagcagaaaggcccatgactgcttggtgcgggcactgctttttgggaaaggacatgcaggcgact

SEQ ID NO: 383246 - DNA, 642 bp, Homo sapiens
tggaggttgatgttagaagtactgaaaaatactgaattaatgaatcagtcaagagttttttctgtgttattaaatacagaaacactttttgtgtttaagcagctagttatgggggataagagaggatactgatggcattctacccagaaggctattgacaggtggagggcattatttctgggcaacagtaggagattgtgaggggagctggaacgtgggtagggttagtgtccttggtcccgagtggtcatttcctcctaaaccagcatcattccggcaacaccatcacttccaggcatgtctgctttatgctgtgtagggtagcactgttctttctttctcttttctagtctgctacgactgtggcagccttgatcattttttaaaagcagcacaaaacaaggactcatttctgcactactttgacagtgggagtaatttggcttcccaagttaatgtgaaattatcatgcagagctttgccaacccttccttagggccagaggrtggaagcgaaggcacctaccaactcctcagcccagacacaccctttggtttattttagtcaaatacaacctggaattcagctattttatcccagaaacaccagagagcactgctgcactgtagggaagctagcagc

SEQ ID NO: 383247 - DNA, 575 bp, Homo sapiens
acagacttaaacattgctgcctgctggttctgaagagagcagtggatctcccagcacagccatagagctctgctaagggayagactgcatcctcaagtgggtccccaaaccccatgcttcctgactgggagacacctcccagtaagggtcaacagacacctcatacaggagagctccgcctggcctctggcgggtgcccctcagggacgaagcttccagaggaaggaacatgcagcattctctgtagcctctgctggtgatacccaggcaaacagggtctggagtggacttccagcaaactacaacagacctgcagcagagggacctgagtgttagaaggaaaactaacaaacagaaagaaatgacgtcaacatcaacacaaaggacgtccacacagaaaccccatccaaaggtcaccaacatcaaagaccaaggtagataaatccatgaagatgaggaataccagcgcaaaaaggctgaaaattccaaaatccagaatgtctcttctcctccagaggatcacaactcctcaccagcaagggaactaaactggatggagaatgagtttgacaaat

SEQ ID NO: 383248 - DNA, 575 bp, Homo sapiens
acagacttaaacattgctgcctgctggttctgaagagagcagtggatctcccagcacagccatagagctctgctaagggacagactgcatcctcaagtgggtccccaaaccccatgcttcctgactgggagacacctcccagtaagggtcaacagacacctcatacaggrgagctccgcctggcctctggcgggtgcccctcagggacgaagcttccagaggaaggaacatgcagcattctctgtagcctctgctggtgatacccaggcaaacagggtctggagtggacttccagcaaactacaacagacctgcagcagagggacctgagtgttagaaggaaaactaacaaacagaaagaaatgacgtcaacatcaacacaaaggacgtccacacagaaaccccatccaaaggtcaccaacatcaaagaccaaggtagataaatccatgaagatgaggaataccagcgcaaaaaggctgaaaattccaaaatccagaatgtctcttctcctccagaggatcacaactcctcaccagcaagggaactaaactggatggagaatgagtttgacaaat

SEQ ID NO: 383249 - DNA, 626 bp, Homo sapiens
ctgaacagcagtaggacttactgattccccacccayaacccagaggcgagccaggttatgtggcgaaggataaggcctcttcccctgctaacggggaacttctgggaggcactgagagcagcaagcaagggaataatgaaacagactaaccctcacatgcggctgccactatgtgggacttcacatagcgagtctctcaagggatgcacctcccctggggtctgggtaggacccgacaaaaggggaaaaccttccgtgataggcaggtttgtaggagtttctatcaggcctgcagagctgccctgtggacattagctcacgggtgtggagactgtcaagataagcctgaatattaaccaagttgatcatccaagtccatactcagactgccctctggcagattccaaaggggataaggtgtgggggcctctggctccagccagcccggcgagacttctatttccagtcaatgcttcagaaagtagatcttgccagagagcacatagaggagactcaggggcttccccttgctctggcctgaatgtgcttccctgtttgtttatcagctgcctcaccccaaactgtttgcctctctgctgtgttcctctgacaacagccaccaggat

SEQ ID NO: 383250 - DNA, 626 bp, Homo sapiens
ctgaacagcagtaggacttactgattccccacccataacccagaggcgagccaggttatgtggcgaaggataaggcctcttcccctgctaacrgggaacttctgggaggcactgagagcagcaagcaagggaataatgaaacagactaaccctcacatgcggctgccactatgtgggacttcacatagcgagtctctcaagggatgcacctcccctggggtctgggtaggacccgacaaaaggggaaaaccttccgtgataggcaggtttgtaggagtttctatcaggcctgcagagctgccctgtggacattagctcacgggtgtggagactgtcaagataagcctgaatattaaccaagttgatcatccaagtccatactcagactgccctctggcagattccaaaggggataaggtgtgggggcctctggctccagccagcccggcgagacttctatttccagtcaatgcttcagaaagtagatcttgccagagagcacatagaggagactcaggggcttccccttgctctggcctgaatgtgcttccctgtttgtttatcagctgcctcaccccaaactgtttgcctctctgctgtgttcctctgacaacagccaccaggat

SEQ ID NO: 383251 - DNA, 607 bp, Homo sapiens
atgtagcatagtaagttcacatagtgaatgccaaatttgacatttagccaagttcttataaatatcctccatatgtagagatgtttgtgtgtgaatgaatttcacacaggaatgagcctgcgtatggatgtgtgtgttattgaaatgggatataatgaagtttttcaacatggtgagaagtctttgtcttatctggacagaagcttcatttttcttcctatcccaacattctttttattgcctcttgaaaaattatgagttccactgcttttaaaactgtatcattaggcattagcagtctaaagaatargaaaaatttaagagagaaggaattatgcttactctttaggcattttcatttctctaaagcaagaagcatgatgccccaaatctctaaaacactgatacattaattggcctgcttaataatgaaaattaaatgttcataggatccactttagtgcttaagtcacctggttaaaatctactgcattcccaccttctattgtaaagtaaaacaaccagcttgatcacttctaagataatgtatgaggaattattaacacaaagctctccaaacagggccagagtcacaaataccaggagg

SEQ ID NO: 383252 - DNA, 532 bp, Homo sapiens
tgcaccttcaaactggaaaccaagtggggggtctcaaaagggggtcattctccttatctttagaaaagggcaattaagaaatccctttagaatgtacctctaaactagaaattaggatcttacacaacaacttccttggggaaaataaaacccagctcagaataaaccaaggaccatcaaccagagagaggtccagggctcaggaggaygtacctgttccactggagaagattaaagtcaggacttcgaatgaaatttgctttcttctttgcacatttctgaatgattttattctgtgtacaaatcattttacaggggcaaaatatattttctataaatgtttacctctatttaaatccttttaaaatggcaggaatatgtctttttgtgcctttctaatgccctctgacctcttacctagtatttaggcttacctaagcaggccaagcttttcaggtgagaaagtagaatcaatttgacaaaaaaaagtgcttctgaagacgtttgtgctaagacagtagtctaatagttt

SEQ ID NO: 383253 - DNA, 532 bp, Homo sapiens
tgcaccttcaaactggaaaccaagtggggggtctcaaaagggggtcattctccttatctttagaaaagggcaattaagaaatccctttagaatgtacctctaaactagaaattaggatcttacacaacaacttccttggggaaaataaaacccagctcagaataaaccaaggaccatcaaccagagagaggtccagggctcaggaggatgtacctgttccactggagaagattaaagtcaggamttcgaatgaaatttgctttcttctttgcacatttctgaatgattttattctgtgtacaaatcattttacaggggcaaaatatattttctataaatgtttacctctatttaaatccttttaaaatggcaggaatatgtctttttgtgcctttctaatgccctctgacctcttacctagtatttaggcttacctaagcaggccaagcttttcaggtgagaaagtagaatcaatttgacaaaaaaaagtgcttctgaagacgtttgtgctaagacagtagtctaatagttt

SEQ ID NO: 383254 - DNA, 532 bp, Homo sapiens
tgcaccttcaaactggaaaccaagtggggggtctcaaaagggggtcattctccttatctttagaaaagggcaattaagaaatccctttagaatgtacctctaaactagaaattaggatcttacacaacaacttccttggggaaaataaaacccagctcagaataaaccaaggaccatcaaccagagagaggtccagggctcaggaggatgtacctgttccactggagaagattaaagtcaggacttcgaatgaaatttgctttcttctttgcacatttctgaatgattttattctgtgtacaaatcattttacaggggcaaaatatattttctataaatgtttacctctatttaaatcctttwaaaatggcaggaatatgtctttttgtgcctttctaatgccctctgacctcttacctagtatttaggcttacctaagcaggccaagcttttcaggtgagaaagtagaatcaatttgacaaaaaaaagtgcttctgaagacgtttgtgctaagacagtagtctaatagttt

SEQ ID NO: 383255 - DNA, 650 bp, Homo sapiens
aatgtcatatgtaaccaaaaaagagcccaaatagcccaagcaattctaagcaaaaagaacaatctggagaaatcaaattgcctgacttcaaattatactaaaaggctgtagtaactaaaacagcatggtactggaacaaaaatagacatggatcagaatagagaaccccagaaataaagctacatacctacrcacctcaaccaagtcaacaaaaataagcaatgggggaaagaacactctattcaataaatggtgctgtgaaaattggctagccatacacagaagaatgaaactagatccctatctcttatgacataaaaaaaattaacttaacatgaattagacttaaatgtaagacgtgaaactattaaaaattgagaagaaaatctaggaaaactcttctggacattggcctagacaaagaatttatgatgaagcccccaaaagcaaatgcaacaaaaacaaaaatagacaaatgggacttacttaaactaaaaagcttctgcacagcaaaagaaataatcaacagagtaaaagatgacctacagaatgggagaaaatatttgcaaattatcactctgacaaaggactagtatccagaatcgacaaggaactcaaaaacaagatatcatcttacaccagtcggaata

SEQ ID NO: 383256 - DNA, 650 bp, Homo sapiens
aatgtcatatgtaaccaaaaaagagcccaaatagcccaagcaattctaagcaaaaagaacaatctggagaaatcaaattgcctgacttcaaattatactaaaaggctgtagtaactaaaacagcatggtactggaacaaaaatagacatggatcagaatagagaaccccagaaataaagctacatacctacgcacctcaaccaagtcaacaaaaataagcaatgggggaaagaacactctattcaataaatggtgctgtgaaaattggctagccatacacagaagaatgaaactagatccctatctcttatgacataaaaaaaawtaacttaacatgaattagacttaaatgtaagacgtgaaactattaaaaattgagaagaaaatctaggaaaactcttctggacattggcctagacaaagaatttatgatgaagcccccaaaagcaaatgcaacaaaaacaaaaatagacaaatgggacttacttaaactaaaaagcttctgcacagcaaaagaaataatcaacagagtaaaagatgacctacagaatgggagaaaatatttgcaaattatcactctgacaaaggactagtatccagaatcgacaaggaactcaaaaacaagatatcatcttacaccagtcggaata

SEQ ID NO: 383257 - DNA, 536 bp, Homo sapiens
tggtgtgagtagctctgtttaataaaattctggtgctcagaagcctcagagaaccacatgtgaaggaacagcagtaaacatgatggttactaccaagcctgtgacttgggcaggggaaaaattgatatgcagaaagataggaaaggcaacatttaaaccaaaagaaaaaaaaatccccacagcctcaagatgtaagacrttggagtgttttccaggagtgaatgttgttcacagcattgtaaaagagaaaatacccccggcctccaaaggtcttctaagtgctgatactactcaaatcagattttattttcagtggagcattaattttatgagttacttgccgaaaacctgagcctcttaggacagggaagaaggctgatttcatttctgagcattttaagacctctggcataattccagacaaggagtgcatccttctttggtcatccctcttccatagaaagggagttgataatttagaagtattttcccagacatgatctcattttgtctctcaacaatgacctgagggacac

SEQ ID NO: 383258 - DNA, 523 bp, Homo sapiens
acaaggagtgcatccttctttggtcatccctcttccatagaaagggagttgataatttagaagtattttcccagacatgatctcattttgtctctcaacaatgacctgagggacacaaggacatataatacatttttatcctcatttcccacatgatagaattaaaaatcagaaacattaagtgaccagcccaaatcatactgctactaagtagaggggtcaggatgaaatctgcatctttttcccaagtctaagactcttctgcagtatcctcagcacatgatttcttcaacttaagagctccgataaggctcagggtttccttaaacattgtgttcctttttataatttrtttgtgtttgacatacaactaactgctatttgacatagccttgggcttgaatatatatgtggacaaaaaaaaccccacttggattcaaatagtaacatctctattaaaaatcaacagtcctctagaaataaatagctctattaaaaaaaaaccttaattcagtgactcagc

SEQ ID NO: 383259 - DNA, 613 bp, Homo sapiens
atcaaaacaagcattgtagtggagaaaaaaggcttctgttgtttgttattgctatgttgaacagctgatgtagatattctggtgattatattctgtagatattctgtgctgcttagctacccagaacayactattattttttttactatattaatggtatgtcatgttttttactgttaggtactgatgtgtgaataaacataagaaaatgattgcttataggtagcatataaattcagagtcaggaatgatgatgatgacaaacaaccacagattctctacatgggtggctgaggtagtgacatctttactttctgattggttcaacgtatacaagctttgtttcatgcacaaaattatttaaaacgttgcataaaattatctataggctacatgtaaagatatatgtgaaacaaatgaattttgtgtttagacttgggtcctatccctaagatatctcattctgtatatacaagtattccaaaatctgaaatcttaaacactttgatcccaagcattttggataagggatactcaacctgtattagaatattctaaatttgactatatacttacttttaccagtgagttgtatactctcatattttaatta

SEQ ID NO: 383260 - DNA, 575 bp, Homo sapiens
ctgcatttttcaggcttccatggcaactagctgtctgacactgatgtgaggctctggtgggagattgaargatagaaagcaagaaaaagtcagggtattcttcctgccctgatccacccagtgcttcagaggagtcttctgcaaaagcagtgcttcttccataggaagaacagacagatagattctcagtggttccaagttctactggatagctccagatccattttgttcttttgtactaagagcagtaagggtttcctgttactgctaatctatgagtgagttgttttgcaagtggtaggccagatggttttctgaaaggatctagcattttgcatgccaggactcatgaaacatgctcactgtctttgtagcacagcactatttgcatagatgtcagtatagtgggattattggttatcagcttcatgaaatctgcctcgtatcatgcttctagattttcagagatctattaatccagataagtgccttggccagattgttggtaagcagtatgttctatcctaaggctttgagcaactgggtcctagatctggatctgtccctactgcctg

SEQ ID NO: 383261 - DNA, 575 bp, Homo sapiens
ctgcatttttcaggcttccatggcaactagctgtctgacactgatgtgaggctctggtgggagattgaaagatagaaagcaagaaaaagtcagggtattcttcctgccctgatccacycagtgcttcagaggagtcttctgcaaaagcagtgcttcttccataggaagaacagacagatagattctcagtggttccaagttctactggatagctccagatccattttgttcttttgtactaagagcagtaagggtttcctgttactgctaatctatgagtgagttgttttgcaagtggtaggccagatggttttctgaaaggatctagcattttgcatgccaggactcatgaaacatgctcactgtctttgtagcacagcactatttgcatagatgtcagtatagtgggattattggttatcagcttcatgaaatctgcctcgtatcatgcttctagattttcagagatctattaatccagataagtgccttggccagattgttggtaagcagtatgttctatcctaaggctttgagcaactgggtcctagatctggatctgtccctactgcctg

SEQ ID NO: 383262 - DNA, 575 bp, Homo sapiens
ctgcatttttcaggcttccatggcaactagctgtctgacactgatgtgaggctctggtgggagattgaaagatagaaagcaagaaaaagtcagggtattcttcctgccctgatccacccagtgcttcagaggagtcttctgcaaaagcagtgcttcttccataggaagaacasacagatagattctcagtggttccaagttctactggatagctccagatccattttgttcttttgtactaagagcagtaagggtttcctgttactgctaatctatgagtgagttgttttgcaagtggtaggccagatggttttctgaaaggatctagcattttgcatgccaggactcatgaaacatgctcactgtctttgtagcacagcactatttgcatagatgtcagtatagtgggattattggttatcagcttcatgaaatctgcctcgtatcatgcttctagattttcagagatctattaatccagataagtgccttggccagattgttggtaagcagtatgttctatcctaaggctttgagcaactgggtcctagatctggatctgtccctactgcctg

SEQ ID NO: 383263 - DNA, 443 bp, Homo sapiens
atgatgcaggccatgagccaaggaatgcaggcagcctttagaagctggaaaaagccaggaaacagatattcccctagagctgtcagaaagaacaccrcgctaccaccccaccttatatttcttatctctagatctatacatatattttcattttaagccattaagtttgtcgtaattcattatagcagtaataggaaacaaatataccaagagtctgcagggaaaatacaacttgggtaactgaaaatttggagattccttcagcctctcatacagtctaagtttttctaagaggattacatggagccattctccccatccacttgcttagttgaggctggtttgtcattctcaattcaatcacacctactgttctttggaataatagtttctataataataatacatgctaggtgattttttcctccttccttacacatcag

SEQ ID NO: 383264 - DNA, 499 bp, Homo sapiens
agggttttgccatgttgtccaggctggtctcgaactcctgggctcaagcaatccacccacctcagcctcccaaagtgctgggactgtgagccaccgtgcccagccaatatgagctttattgtatatctcctccatcaggtctgaagtttcgctgttctttatgaacggaaagaaccgtttcttgtaagcatcttcatctgcttccattaggtaatgcatgtaatctgcatcattctgacccatgatgtgtttcccatgcrcttctgcattaaattccttgctttcagaatcacaagcagggaatcatctggtactgtgagggacagaacagcctttatcaacagctcccttcaaggccccaaaaactttattgccagtgatggttctggcaaggcctacatccaaatagcaggtgaaggcaccaggctgaccatcaatgctttccacatcacattaatctccagtcatctccacttggccttcatagatcctgtccatg

SEQ ID NO: 383265 - DNA, 540 bp, Homo sapiens
ttctcttttcaaaatgtgctcacctttctggaacttccccaactaataaactgaaaaactccttagccaagtgtgctgtgatttataagaaacctctggaaattcttggtatctcactctatgtccaaattacactgagatgattaccactaaattgtacagcaatttttcagtacctttagagcaccactttagggaagctataatcagaactacttaaggcggttctcatctgaataactaaaaaccaaggtgttagagagtgtgctattttatttgcttgtttgttacattgagactgctgatattggkaatagcagggatatcaggagtcactgctaggcctcagcacattgaggggaccttgcttctttctcaaaaaaataataataataaaataaggaaaacccaagggggggacaaggaaacaaatctagaaggaagactagatatagagaaaggttctcgatcttggctacacatttcagtaggttgggaagcttttaaaaatcctagtgaccaagctgcatcccaagccaa

SEQ ID NO: 383266 - DNA, 540 bp, Homo sapiens
ttctcttttcaaaatgtgctcacctttctggaacttccccaactaataaactgaaaaactccttagccaagtgtgctgtgatttataagaaacctctggaaattcttggtatctcactctatgtccaaattacactgagatgattaccactaaattgtacagcaatttttcagtacctttagagcaccactttagggaagctataatcagaactacttaaggcggttctcatctgaataactaaaaaccaaggtgttagagagtgtgctattttatttgcttgtttgttacattgagactgctgatattggtaatagcagggatatcaggagtcactgctaggcctcagcacattgaggggaccttgcttmtttctcaaaaaaataataataataaaataaggaaaacccaagggggggacaaggaaacaaatctagaaggaagactagatatagagaaaggttctcgatcttggctacacatttcagtaggttgggaagcttttaaaaatcctagtgaccaagctgcatcccaagccaa

SEQ ID NO: 383267 - DNA, 540 bp, Homo sapiens
ttctcttttcaaaatgtgctcacctttctggaacttccccaactaataaactgaaaaactccttagccaagtgtgctgtgatttataagaaacctctggaaattcttggtatctcactctatgtccaaattacactgagatgattaccactaaattgtacagcaatttttcagtacctttagagcaccactttagggaagctataatcagaactacttaaggcggttctcatctgaataactaaaaaccaaggtgttagagagtgtgctattttatttgcttgtttgttacattgagactgctgatattggtaatagcagggatatcaggagtcactgctaggcctcagcacattgaggggaccttgcttctttctcaaaaaaataataataataaaataaggaaaacccaaggsggggacaaggaaacaaatctagaaggaagactagatatagagaaaggttctcgatcttggctacacatttcagtaggttgggaagcttttaaaaatcctagtgaccaagctgcatcccaagccaa

SEQ ID NO: 383268 - DNA, 565 bp, Homo sapiens
ttacaagtcacagaactaggtcacacacattagtaagtcaaaagttggaaattaggggagagagcatttggaatgctttaagcatttccatgttatttctcaccttcctagttgaagatccactaatcagtagtacatttctactttggtgccctacaaagcaaaccttagcatagtaaagacaagaaaacattaatgttttattagtttttaatggggcaaccaacttcaaaatcacaggaattacagtgacgggagagaaagaagcaggaggcataaaaacagatttgtttgtagcagtagtctgtttgtacaatgttataatatttctgtaacttgggccagaatgtggccatgttaaatgatatagctattaagctcacttttacaatctaaaaggaactaataaagccaggaaacccttctcatcctccttcacagycctcatcccacacatagatgtaaaaagcttagaaagaatattctgatggctttttcagaaggaaggaccttgatgtgtgtattgtggtaaaatgaaaagcaaaatgagacagtatttaaaagt

SEQ ID NO: 383269 - DNA, 403 bp, Homo sapiens
ggccctgcgtgatatggtgtgccctctcctcttggaactgtaacaaactatctttccttttttctttttttgagacggagtctcactcttgttgcccaggctggagtgcaatggtgtgatctcggctcactgcaacctctgcctcctgggttcaagcgattctcttgccttagcctcctgagtagctggaattacaggcacccaccaccacgcccagctaatttttgtacttttagtagagatgggtttcaccatgttagccaggctggtctcaaactcctgacctcargtgatctgcccacctcagcctcccaaagtgccaggattacaggtgtgagccaccgcacctggccacgaattatcttttcaatggcatttgtctcctgatctgctggcctcacca

SEQ ID NO: 383270 - DNA, 602 bp, Homo sapiens
ggtaatcaaggtaaaatgaagtcattagggtggaccctaattcaatctgattggtgtccttataaaaagtggaagcatgaggccgggcacggtggctcacgtctgtaatcctaacattttgggaggccgaggcaggtagattgctgagctcaggagatcgagaccagcctggacaacacggtgaaaccccatctctagtaaaatacaaaataaattagctgggcgtggtggcatgcgcctgtaatcccagctactcaggaggctgtggcatgagaatcacttgaacccaggaggcagaggttgcagtgagccgagatcgtgccactgcaccccagcctgggygacggagcaagactctgtctctaaaaaaaaaaaaaaaagtggaaacatggatacagagacagacagacacagagggaagacaacttgaagacacaccagcagaagacagcatatgattagaaagatgcatctacaagccaagaaactccaagcatcaccagcaagcaccagaagctggaagaggcaggaaggtctctcctaggccaccagagagagcatggtcctgacaaccccctgcctccataaccgtaagacaataa

SEQ ID NO: 383271 - DNA, 575 bp, Homo sapiens
atttcaatgtgggggtatctgtgctagcaacagccaacgcaaaactttttgttgtatttgaattgtcctgttttatttacaaagtatttcatataccccttctcaattgatttaattctatctgcaattgtcttcattttagagacaaatcagagataactgagcaatrgcaacattattggaagaaatgtatgctttctatcaggctgcacgtaaagcactacagatagaatacacagtgcaggatctgtagtgttggtttcaaggaagtctcaaaatacataccaataaaaacagtaatcgcagcctctaatacttcctgagccaggcaccaacgtaggtaattttcatacattaattcatttaatcctcatgtcaatgctcaggtagatgcccaaggtagtggtcattagtttccctgtttcacagacaatctgaaattaacgggctgaaaattatctgttatacaatattagagctgcaaataactttaaagatcaaccctcccccttttacagatgaagtaaatgttcatgcgttctaggccacttaaaggtttgttatttttgagcaca

SEQ ID NO: 383272 - DNA, 589 bp, Homo sapiens
tcaatgctcaggtagatgcccaaggtagtggtcattagtttccctgtttcacagacaatctgaaattaacgggctgaaaattatctgttatacaatattagagctgcaaataactttaaagatcaaccctcccccttttacagatgaagtaaatgttyatgcgttctaggccacttaaaggtttgttatttttgagcacaatccccaaattagtcatatataacctgattttgctagtagtgagttccgattcctgtgacctccagcccagctatgtcgtataagggaagtgacacctactataataatctcaaaccccgtaatccatcatacatactttgaaagcactaaaggaaaatgtgttacaataaccaaacacacctagtgtatatcacaaggcttgcctaaatatttccaatttatgctattttgagaactggcgtctagcccagttccaacaacagtgtccaagattaagtgaaagaccatgtgagtatggtaattgaaaatacaattttccccctaaagggctattagttatgaatttactcactcgtgtgtgtgaaatctccttttgaacaactatgaa

SEQ ID NO: 383273 - DNA, 589 bp, Homo sapiens
tcaatgctcaggtagatgcccaaggtagtggtcattagtttccctgtttcacagacaatctgaaattaacgggctgaaaattatctgttatacaatattagagctgcaaataactttaaagatcaaccctcccccttttacagatgaagtaaatgttcatgcgttctaggccacttaaaggtttgttatttttgagcacaatccccaaattagtcatatataacctgattttgctagtagtgagttccgattcctgtgacctccagcccagctatgtcgtataagggaagtgacacctactataataatctcaaaccccgtaatccatcatacatactttgaaagcactaaaggaaaatgtgttacaataaccaaacacacctagtgtatatcacaaggcttgcctaaatatttccaatttatgctattttgagaactggcgtctagcccagttccaacaacagtgtccaagattaagtgaaagaccatgtgagtatggtaattgaaaatayaattttccccctaaagggctattagttatgaatttactcactcgtgtgtgtgaaatctccttttgaacaactatgaa

SEQ ID NO: 383274 - DNA, 551 bp, Homo sapiens
tctccagtctcagttgggccaacctagctgacactatatgatgagcagagacaagctttcctcaccaagctcaacccagacaatagacttatgagtaaaaataagtgattgttgttttaagtcaccaagtcctgtggtagtttgatatatagcaacacataaccataatatatgtgtgaaatcmactttggctaccctcacacatttatacacaaaccactaactatcccgaaatttctgctaatgtgcttattctgggtggatgtgcttgcatgcgtgcatgtgtgtgtgtgtgtgtgtgtgtgcatggtgccataggttgccactgtatatcaggtaagatcagcaagccctttgcagacttccctaaagagcccatatgtcgcagtctcaagattcactgtatgccaatttattaatcagataacaatcagtgcctcagtgtgacacctaaatgtcttattcctgttaaaaagctatgcttcttttaaaaagtgaagccaatgagagcttcagtcatgatggcaatctttagaaaagatatgtttatt

SEQ ID NO: 383275 - DNA, 243 bp, Homo sapiens
gaaggaagtaaacactgacctggaggtagatttagackaggattagcagctgtcccttctcctttgatgaaagggcttaactaacggcaagaggaattgaggatacatcttggggaaaacttcctgactcgcataaggcctggcaatgtttcaccaaaggggattgcccagtgtacctctctgaggatttttattttttaatgtgatgtttttgtaaatttgctttttgttgttgctgttgtt

SEQ ID NO: 383276 - DNA, 577 bp, Homo sapiens
gttttgttccaatgttataatgacaacattttaaaatgtgactattaaatattaacaatgaaaccataataataaacacttgcatagaatttcagatttattcatatactccagcagttctttcaatgattgtaatctctggytatagcctctgcttcggcagaatgctgaactttaatcttcagttttaatcctaaaccatttgctttttagccagaattgaatcagcgtgttcccaatgtatatgtattacatgtcaagacagagaaatgtgtatctgttaggatgctttcaattgcatgaaacagacatccctaccgaaattggcctttgaaaagtgggaaggagaagagcatttattggttcatatactgaagagtctgagatggtacagaatatttgcttcagacaaggctttatgagggctcaacggtgtaaagaggtttctctctcattgttttccagcactaccacttagcaccattagcttcattctcaggctctcttcttatgaatatgtctgccaatggttttgaaaccaactgctcccacattaacattcataaaacaagcaaga

SEQ ID NO: 383277 - DNA, 600 bp, Homo sapiens
  misc_feature (1)...(600): n = A,T,C or G
tgaaaccagaacatatcanaatttgtgggatatagctgaagcagtacttagaggaaaagtgatagctttaaatgcatataccaggaaagaagaattatgtaaaaccaagaataaaaggtatcaagattgatgagggagaaataatagtagctttttgcaacagtataactatataygttgaaaatctaaaggaaacgacaaactactgggactaccaggattactgagtgaatttagccaggtcatgggatacgatggcaatatacgaaaatcaactggacatttttctgtagagatgggatctagttgtgttgcccagtctgatctcaaactcctgcctcaaatgatcctccctcctcagcctcccaaagcatgggaatcacaggtgtgaaccaccacacctgccccattgtacttcttttgtaccctagcaacaaaaataaattggaaaatgagaaagtttttaagtcatttataatagctcaaaatgattcaaacatctaagaataaaattttaaaaatatatgcaagtcctctatgcttgtaaactacaaaattattgctgagagaaattttaaaagacctaaataagtggagaaa

SEQ ID NO: 383278 - DNA, 600 bp, Homo sapiens
  misc_feature (1)...(600): n = A,T,C or G
tgaaaccagaacatatcanaatttgtgggatatagctgaagcagtacttagaggaaaagtgatagctttaaatgcatataccaggaaagaagaattatgtaaaaccaagaataaaaggtatcaagattgatgagggagaaataatagtagctttttgcaacagtataactatatacgttgaaaatctaaaggaaacgacaaactactgggactaccaggattactgagtgaatttagccaggtcatgggatacgatggcaatatacgaaaatcaactggacatttttctgtagagatgggatctagttgtgttgcccagtctgatctcaaactcctgcctcaaatgatcctccctcctcagcctcccaaagcatgggaatcacaggtgtgaaccaccacacctgccccattgtacttcttttgtaccctagcaacaaaaataaattggaaaatgagaaagtttttaagtcatttataatagctcraaatgattcaaacatctaagaataaaattttaaaaatatatgcaagtcctctatgcttgtaaactacaaaattattgctgagagaaattttaaaagacctaaataagtggagaaa

SEQ ID NO: 383279 - DNA, 600 bp, Homo sapiens
  misc_feature (1)...(600): n = A,T,C or G
tgaaaccagaacatatcanaatttgtgggatatagctgaagcagtacttagaggaaaagtgatagctttaaatgcatataccaggaaagaagaattatgtaaaaccaagaataaaaggtatcaagattgatgagggagaaataatagtagctttttgcaacagtataactatatacgttgaaaatctaaaggaaacgacaaactactgggactaccaggattactgagtgaatttagccaggtcatgggatacgatggcaatatacgaaaatcaactggacatttttctgtagagatgggatctagttgtgttgcccagtctgatctcaaactcctgcctcaaatgatcctccctcctcagcctcccaaagcatgggaatcacaggtgtgaaccaccacacctgccccattgtacttcttttgtaccctagcaacaaaaataaattggaaaatgagaaagtttttaagtcatttataatagctcaaaatgattcaaacatctaagaataaaattttaaaaatataygcaagtcctctatgcttgtaaactacaaaattattgctgagagaaattttaaaagacctaaataagtggagaaa

SEQ ID NO: 383280 - DNA, 417 bp, Homo sapiens
atttttcagaggtcgggagaccactgtgtagggccacacagcctccccacactaaaactccagcagttccaatagggaaaccttgaaacaagctcttcayaatgaggcagtgcctagcatagcacgtgctcaagaaatttctttgatgggttcatgactttcatctggacctacagagtgaacttgaacctctggtctctgggcttaggaagtgtggaaatcatttttaatctcctgttactaaagaaagatgtcactccatacttcaatttgaagaatgacagtataaatcatttaactagcactgaaaaattacaactttctgaaatggttattttttaaattgtcaatcaatttgaagtctaaactttctctgattttagttccagggtggtactgccattaacactgagaaaa

SEQ ID NO: 383281 - DNA, 561 bp, Homo sapiens
ccatgatccagcaaaacagcaacagaacacaaaagctttcccttgggttagaatatgaaaacttttttcaagagtaaattcaattgagctgaaattgtaaaacctgcaatggcaaagtgtattttttaaccaaatttgttggaagccagtcatacacagaaaataaacccaaactcaaactagtactgaagtccagtttccttttagcatttttttaaaaagaagaaagaaaaataaacttcctagacttgaaaatgcagcctttagaacaaggttccaagagttactcggatgttggctgatgcttacaaaccaatgctaacaagtggagtgtaaatgaatcaaaaccagatagattccatttcccttcaagtaaatggaggttggagacsgggaggtggtgggaatgcttcccaaaatgtgaattttaccaaaaccacagtgttctgtataaaaactagagaaatatcatctgagcttcaactagggctgggtttcaaagaggtgacatgaagagggagaaatgacacccaggagcacccttctgtgccaggccatgag

SEQ ID NO: 383282 - DNA, 450 bp, Homo sapiens
cacatacattctggtgtccttcctcagcatctgaaatattctctgtgatgctgaggaataggaagcttcatcaagtagacactgggctaatcctgcttggaagtgggactcagaaaagctgcttcaacctccactctcccaggtgcctgargttccacccagtgtctcttcactggagtgttagtttccagcaatgcaaagcctcacgaattcccttatggtgatgaggacgaggtaagtcattctctaggaaataaacagaggaggaatcaggttcatggtccggggagatcctgcctgctctgagtgccgtttcccaagctggaccagaaataactgcaatagtgtagaattctctgcctgctcacaggttgtgatttttgtgctggcagtcacacagcctgaagcgccaggcatcacaaaacaaaacttacagctttttctcttggc

SEQ ID NO: 383283 - DNA, 450 bp, Homo sapiens
cacatacattctggtgtccttcctcagcatctgaaatattctctgtgatgctgaggaataggaagcttcatcaagtagacactgggctaatcctgcttggaagtgggactcagaaaagctgcttcaacctccactctcccaggtgcctgaggttccacccagtgtctcttcactggagtgttagtttccagcaatgcaaagcctcacgaattcccttatggtgatgaggacgaggtaagtcattctctargaaataaacagaggaggaatcaggttcatggtccggggagatcctgcctgctctgagtgccgtttcccaagctggaccagaaataactgcaatagtgtagaattctctgcctgctcacaggttgtgatttttgtgctggcagtcacacagcctgaagcgccaggcatcacaaaacaaaacttacagctttttctcttggc

SEQ ID NO: 383284 - DNA, 450 bp, Homo sapiens
cacatacattctggtgtccttcctcagcatctgaaatattctctgtgatgctgaggaataggaagcttcatcaagtagacactgggctaatcctgcttggaagtgggactcagaaaagctgcttcaacctccactctcccaggtgcctgaggttccacccagtgtctcttcactggagtgttagtttccagcaatgcaaagcctcacgaattcccttatggtgatgaggacgaggtaagtcattctctaggaaataaacagaggaggaatcargttcatggtccggggagatcctgcctgctctgagtgccgtttcccaagctggaccagaaataactgcaatagtgtagaattctctgcctgctcacaggttgtgatttttgtgctggcagtcacacagcctgaagcgccaggcatcacaaaacaaaacttacagctttttctcttggc

SEQ ID NO: 383285 - DNA, 617 bp, Homo sapiens
ctctcccaggtgcctgaggttccacccagtgtctcttcactggagtgttagtttccagcaatgcaaagcctcacgaattcccttatggtgatgaggacgaggtaagtcattctctaggaaataaacagaggaggaatcaggttcatggtccrgggagatcctgcctgctctgagtgccgtttcccaagctggaccagaaataactgcaatagtgtagaattctctgcctgctcacaggttgtgatttttgtgctggcagtcacacagcctgaagcgccaggcatcacaaaacaaaacttacagctttttctcttggctgatatcacatcagtgatatgaaatctctcccactgccatcattagaaccagttggctggttgtcactctcaagaatggcttaaaatcatcccggttttgagaaattccatttaccaggaagacttccatgttggatgcaaaattaaaatcatgtaagatgacatatgtttgaaatacacttcagataaagatttgtcttttgagttacattttcctcaatattttatcataaaaattgtcaaacagaaaagttgaaagaattgtacagtgagcaagaacattttcctatattgctttac

SEQ ID NO: 383286 - DNA, 421 bp, Homo sapiens
aaaacaaaacttacagctttttctcttggctgatatcacatcagtgatatgaaatctctcccactgccatcattagaaccagttggctggttgtcactctcaagaatggcttaaaatcatcccggttttkagaaattccatttaccaggaagacttccatgttggatgcaaaattaaaatcatgtaagatgacatatgtttgaaatacacttcagataaagatttgtcttttgagttacattttcctcaatattttatcataaaaattgtcaaacagaaaagttgaaagaattgtacagtgagcaagaacattttcctatattgctttaccatatatctgtccaactacccagctctatccacgctgtagtccatttaatttctttgatatattcaaagttgcaaacatcagtatacttca

SEQ ID NO: 383287 - DNA, 617 bp, Homo sapiens
ctctcccaggtgcctgaggttccacccagtgtctcttcactggagtgttagtttccagcaatgcaaagcctcacgaattcccttatggtgatgaggacgaggtaagtcattctctaggaaataaacagaggaggaatcaggttcatggtccggggagatcctgcctgctctgagtgccgtttcccaagctggaccagaaataactgcaatagtgtagaattctctgcctgctcacaggttgtgatttttgtgctggcagtcacacagcctgaagcgccaggcatcacaaaacaaaacttacagctttttctcttggctgatatcacatcagtgatatgaaatctctcccactgccatcattagaaccagttggctggttgtcactctcaagaatggcttaaaatcatcccggttttgagaaattccatttaccaggaagacttycatgttggatgcaaaattaaaatcatgtaagatgacatatgtttgaaatacacttcagataaagatttgtcttttgagttacattttcctcaatattttatcataaaaattgtcaaacagaaaagttgaaagaattgtacagtgagcaagaacattttcctatattgctttac

SEQ ID NO: 383288 - DNA, 652 bp, Homo sapiens
cattttcctcaatattttatcataaaaattgtcaaacagaaaagttgaaagaattgtacagtgagcaagaacattttcctatattgctttaccatatatctgtccaactacccagctctatccacgctgtagtccatttaatttctttgatatattcaaagttgcaaacatcagtatacttcacccctaaacacatcaatatgcatatttaaactagagttcaatattgttccttttttaggttaaatttacactgaataaaatgtgcaaatcttaagtgtaccattctatgagtttccagtcaccttaggcttatatttatattttaataaaactcacattaattaattggcatgtcctaagtgtgtgtctcgccgcagtgtttttatcagctgtttaacaagaaataagcagacacagtgggacrtgttaaaaacatcttatcgttttcacataataaaacatggatactttttcatctgatgttcatgagataataaatattgtctggtgttagaagccaacagcaattaaaacgttaattgaaaatgtcctcccatccttcttgtaatgtctggaaaggtttaactggtgggtttctttaaataacaggatgacctgtttaaaaaagaaaaactttatttgcaaatag

SEQ ID NO: 383289 - DNA, 652 bp, Homo sapiens
cattttcctcaatattttatcataaaaattgtcaaacagaaaagttgaaagaattgtacagtgagcaagaacattttcctatattgctttaccatatatctgtccaactacccagctctatccacgctgtagtccatttaatttctttgatatattcaaagttgcaaacatcagtatacttcacccctaaacacatcaatatgcatatttaaactagagttcaatattgttccttttttaggttaaatttacactgaataaaatgtgcaaatcttaagtgtaccattctatgagtttccagtcaccttaggcttatatttatattttaataaaactcacattaattaattggcatgtcctaagtgtgtgtctcgccgcagtgtttttatcagctgtttaacaagaaataagcagacacagtgggacgtgttaaaaacatcttatcgttttcacataataaaacatggatactttttcatctgatgttcatgagataataaatattgtctggtgttagaagccaayagcaattaaaacgttaattgaaaatgtcctcccatccttcttgtaatgtctggaaaggtttaactggtgggtttctttaaataacaggatgacctgtttaaaaaagaaaaactttatttgcaaatag

SEQ ID NO: 383290 - DNA, 652 bp, Homo sapiens
cattttcctcaatattttatcataaaaattgtcaaacagaaaagttgaaagaattgtacagtgagcaagaacattttcctatattgctttaccatatatctgtccaactacccagctctatccacgctgtagtccatttaatttctttgatatattcaaagttgcaaacatcagtatacttcacccctaaacacatcaatatgcatatttaaactagagttcaatattgttccttttttaggttaaatttacactgaataaaatgtgcaaatcttaagtgtaccattctatgagtttccagtcaccttaggcttatatttatattttaataaaactcacattaattaattggcatgtcctaagtgtgtgtctcgccgcagtgtttttatcagctgtttaacaagaaataagcagacacagtgggacgtgttaaaaacatcttatcgttttcacataataaaacatggatactttttcatctgatgttcatgagataataaatattgtctggtgttagaagccaacagcaattaaaacgttaattgaaaatgtcctcccatccttcttgtaatgtctggaaaggtttaactggtgggtttcttkaaataacaggatgacctgtttaaaaaagaaaaactttatttgcaaatag

SEQ ID NO: 383291 - DNA, 596 bp, Homo sapiens
aacctaaaccaaacacatcaggtgctgaggctgatgtaagacaccagctgccaccataacctctgatttccaatgttttgtttataaagaaagcctctttacacacactgattgactaatcggttaccaggataaatgtaaactttcaaaagagaacatttaaaataaatgcttgcctaccggtgctttagataaaataagacttctcttgaaaaaaaattccaaggttaaaaaaaaaagtttgaaaaccactgaatcttatccatctccctcagcctattggtgagaaaactgaagcatgaggaccagaactcttggctcttttggttctagtycctttccactatatactatagtgattaaattaatcagtaaggatttattgtacataattatgtgcccagcagtgtgtttgattctgtgggatttagaaaagtaggctaaaatatggtgcccgtctcattccagacaactagccccagagacgagtttctgatcctgatgaagaagagagacatgggtaaaacaatgcagggatggcatgagttctaaactgcacagattacagaagcatgacttgaatccagaggaggagg

SEQ ID NO: 383292 - DNA, 633 bp, Homo sapiens
agactgtagctgaagtaatcttgaacagtggtgaagagcaaggaatctgtagcaaaaaggcctggattcaaaatctggctcagccactcagtaaytgtgtgaccccagcagagtcgtttaacccctggagccttggtttcctcctgaaaaatgaggatgaaaataccccttccccactgtcctgcaaatgaagccagtagcacaaagtaagttggataaatatcatctattactctttccttgggagatgtcagtctttcatcccatgtggagctatttggtacaatttttctattggagagctagctggcaggacggtgcaggatgagacacacataagtaagtcttggtgcaggaggggtagcacaccagggcagccctaagtggaaccaatagaagagggactccaaggtaggagtgggggctgtggggtggcggagaggttccaccaggctggagaaagctctgaagtaagaagtgggtggaggctggtggttctttcatagatgtgactaggtctttggtcctatgggtaaatgaagaagttttttttttatagatttccatgaagtggacatagatgcccctctttctacaagtcactctatagtacacgtaattgaataaatgcaa

SEQ ID NO: 383293 - DNA, 402 bp, Homo sapiens
taaggcattaggccatatgatgagtgatgacaggagtgaaaatagtacctgaagctcccaacaaaaatgtaggaacattgatggttatttstgatttaactgtgcattgacaaatcttaatatcacgctgcctaatacctaacctagccttatatatggcatcagaatttccctctttgaaggcatcactatcagttctggctttttctggggatatgtcatctctaggacccagactgaaggccaagtagacagaaaggagaataaacccacaaggtatttacacccttcccttaatcccaaagcaatatatatgaatattatacctataaaaacagactttcatatacaccacacaaatatatcatgcccttattcttggcaagcacccaactagcccca

SEQ ID NO: 383294 - DNA, 633 bp, Homo sapiens
agactgtagctgaagtaatcttgaacagtggtgaagagcaaggaatctgtagcaaaaaggcctggattcaaaatctggctcagccactcagtaattgtgtgaccccagcagagtcgtttaacccctggagccttggtttcctcctgaaaaatgaggatgaaaataccccttccccactgtcctgcaaatgaagccagtagcacaaagtaagttggataaatatcatctattactcttyccttgggagatgtcagtctttcatcccatgtggagctatttggtacaatttttctattggagagctagctggcaggacggtgcaggatgagacacacataagtaagtcttggtgcaggaggggtagcacaccagggcagccctaagtggaaccaatagaagagggactccaaggtaggagtgggggctgtggggtggcggagaggttccaccaggctggagaaagctctgaagtaagaagtgggtggaggctggtggttctttcatagatgtgactaggtctttggtcctatgggtaaatgaagaagttttttttttatagatttccatgaagtggacatagatgcccctctttctacaagtcactctatagtacacgtaattgaataaatgcaa

SEQ ID NO: 383295 - DNA, 633 bp, Homo sapiens
agactgtagctgaagtaatcttgaacagtggtgaagagcaaggaatctgtagcaaaaaggcctggattcaaaatctggctcagccactcagtaattgtgtgaccccagcagagtcgtttaacccctggagccttggtttcctcctgaaaaatgaggatgaaaataccccttccccactgtcctgcaaatgaagccagtagcacaaagtaagttggataaatatcatctattactctttccttgggagatgtcagtctttcatcccatgtggagctatttggtacaatttttctattggagagctagctggcaggacggtgcaggatgagacacacataagtaagtcttggtgcagraggggtagcacaccagggcagccctaagtggaaccaatagaagagggactccaaggtaggagtgggggctgtggggtggcggagaggttccaccaggctggagaaagctctgaagtaagaagtgggtggaggctggtggttctttcatagatgtgactaggtctttggtcctatgggtaaatgaagaagttttttttttatagatttccatgaagtggacatagatgcccctctttctacaagtcactctatagtacacgtaattgaataaatgcaa

SEQ ID NO: 383296 - DNA, 617 bp, Homo sapiens
caagaaactgtgatatatatatatatatatatataaaatggaatactactcagccataaaaaggaatgaattaacagcacttccagtgacctagactgagattagagactattactctaagtgaagtaactcaggaatggaaaactaaacaccmtatgttctcactgatatgtgggagctaagctatgagcgatacaaaggcaaaagaatgatacaatggggcaagggataaaaggctacagatatagtgcagtatatactgctcaggtgatgggggcaccaggatctcataaatcaccactaaagaacttactcatgtaaccaaataccacctgtaccccaataactaatggaaaaataaaataaaaaagcttccttctgtggctatcaaaaagtagttaacccagccaaatgacaatatacctttatttctccttggccaataaatgaacaacaaatatttgttcttaacaccaaaaatttaaacaaatgaattcttgatttaaccttatatcatcttttcacttgtgctctgaaacatcaacttcctccttcccaagtctccctgaaaaggctgatttccaggtcctctttctcttcctttctactaaatgttc

SEQ ID NO: 383297 - DNA, 626 bp, Homo sapiens
cttcttggatcaaaataaagtcataaatagaaggtagtataatagtttagatcaggaattggcaaacctttttccataaacagccagagagtaaacagtttatactttgcaggccatttggtctctgtcgccagtatttaactctcattgtagccacagacaagatataaacgaataagtgtggctgtgttccaataaaactttattcatggactctgaaatgtgaatttcatatagttttcacatgtcacagagtattattcttttttttgatttttcccctaaacatttaaaattttaataaaccattactagctcacaggccacagaaaaacacagatggytggatttggcccatgtacggaagtttgtcaaccccagtttaaaagaaaacttgttccacaaaacttatgcagaactgaatatgcaggttctttgagaaatgcttagcacatagttctctgaagagctcagccaatgcagtcactccctgagcattagcatctgggtttccttttattgaagtcttagagggccagcaaaaccccactgggggaaaaaatcatgtctctgttatggaacccaactgagggtctgtggcttgccatgaagacaaaaaggtgagg

SEQ ID NO: 383298 - DNA, 626 bp, Homo sapiens
cttcttggatcaaaataaagtcataaatagaaggtagtataatagtttagatcaggaattggcaaacctttttccataaacagccagagagtaaacagtttatactttgcaggccatttggtctctgtcgccagtatttaactctcattgtagccacagacaagatataaacgaataagtgtggctgtgttccaataaaactttattcatggactctgaaatgtgaatttcatatagttttcacatgtcacagagtattattcttttttttgatttttcccctaaacatttaaaattttaataaaccattactagctcacaggccacagaaaaacacagatggctggatttggcccatgkacggaagtttgtcaaccccagtttaaaagaaaacttgttccacaaaacttatgcagaactgaatatgcaggttctttgagaaatgcttagcacatagttctctgaagagctcagccaatgcagtcactccctgagcattagcatctgggtttccttttattgaagtcttagagggccagcaaaaccccactgggggaaaaaatcatgtctctgttatggaacccaactgagggtctgtggcttgccatgaagacaaaaaggtgagg

SEQ ID NO: 383299 - DNA, 626 bp, Homo sapiens
cttcttggatcaaaataaagtcataaatagaaggtagtataatagtttagatcaggaattggcaaacctttttccataaacagccagagagtaaacagtttatactttgcaggccatttggtctctgtcgccagtatttaactctcattgtagccacagacaagatataaacgaataagtgtggctgtgttccaataaaactttattcatggactctgaaatgtgaatttcatatagttttcacatgtcacagagtattattcttttttttgatttttcccctaaacatttaaaattttaataaaccattactagctcacaggccacagaaaaacacagatggctggatttggcccatgtacggaagtttgtcaaccccagtttaaaagaaaacttgttccacaaaacttatgcagaactgaatatgcaggttctttgagaaatgcttagcacatagttctctgaagagctcagccaatgcagtcactccctgagcattagcatctgggtttccttttattgaagtcttagagggccagcaaaaccccactggggraaaaaatcatgtctctgttatggaacccaactgagggtctgtggcttgccatgaagacaaaaaggtgagg

SEQ ID NO: 383300 - DNA, 626 bp, Homo sapiens
cttcttggatcaaaataaagtcataaatagaaggtagtataatagtttagatcaggaattggcaaacctttttccataaacagccagagagtaaacagtttatactttgcaggccatttggtctctgtcgccagtatttaactctcattgtagccacagacaagatataaacgaataagtgtggctgtgttccaataaaactttattcatggactctgaaatgtgaatttcatatagttttcacatgtcacagagtattattcttttttttgatttttcccctaaacatttaaaattttaataaaccattactagctcacaggccacagaaaaacacagatggctggatttggcccatgtacggaagtttgtcaaccccagtttaaaagaaaacttgttccacaaaacttatgcagaactgaatatgcaggttctttgagaaatgcttagcacatagttctctgaagagctcagccaatgcagtcactccctgagcattagcatctgggtttccttttattgaagtcttagagggccagcaaaaccccactgggggaaaaaatcatgtctctgttawggaacccaactgagggtctgtggcttgccatgaagacaaaaaggtgagg

SEQ ID NO: 383301 - DNA, 606 bp, Homo sapiens
acccactcagaccacagagcagctgtcctcattcatgtgctgctttctgctcttcctgtgctagtgagaacttaaccattttccaaacagctctccaaacttaatctatttcaagattattacaggcttcccctaatttctctccaaatttcctttctcgcttgaaaaagttgacagttatattcacagataaaatggacatgttacaaatgttactacccatttgtcagattctttggtggaccaccagggattgtacctgtggaatcagtgttcacagctggagggctttcccctaaagaaggcaggatatggcacaaagacaatgccagccctacaggtaaaactaaaacgtaactaaactcacactactaccccrggaacagaaacagttggaaatgacttgattggcatttgtccatttgaatttaaaacagattcctttcgttatgaacaaaaaacattgggatactagttaatttccgtggacatttactgagccatgtgccaagtactgcactgagttctgggaatttctcagggaataagttccactccctgccctctggaagcccacagttaatgagaaagactactacaacacag

SEQ ID NO: 383302 - DNA, 660 bp, Homo sapiens
cacacctcaccagtccttccaggcttagcctagaacacccttgtccactggcccttgtatcgtcttccccttggtggcaccatgtgtgagtccatgtactcagggagagcagggccaggagtgggctgaatcctgggtcccagcaccagaccaggagagttgggagggaatctaccaggaagctcctcaagaacctgcttaggcttcctactgcaataccaatgagccaaggccctcctacccgagaagcaggcaaactagaggcccagtgcaaggcccaggtcaggctctacccagaggcagttcctgggagaggcagaaggagtgcckggtaggagaccctgcccaaggctgctgcagagctaagtggctgactgccaggggagacaccttctctgggccatgtgaggtcaaataagccacaagtctggcttctacttccaagatgcctgtcctctgccccctactttccgcagtggaacgtctcctatcctgctcacctctacttcttctgactgcatcaggaggttgcatggcggctgcaaggcctttggccggtgagtgaaccagtaggcaaggatggcagccagggcacccatactcacgagggtggtggccgagaggctgcggaaaaactgtcccaagtcacctagctcaggc

SEQ ID NO: 383303 - DNA, 573 bp, Homo sapiens
tataaatttcataatggaatgtaggctccatgagaacaggggttttatcttctttgttcactgctgtttcctagtacatagtaggtactcaataaatatttgttggaagaatggattttgtaacccattttaatttaatgcagtgcagccatcttctggcattatttcccattctcatatgccattatttttactggctacatagtatttgtcctatgggtatgcaataatttatttctctaatccaccattgttagatattaaagttgcttcaaacgtgttatattatcagtaacatcgtggtgaacatcttcatatatagctattttttgtacatatttccttaagataaattcctagaggsggacttgctgggtttaccatgtttactaaaattttctacgtattttgccaaattgccttccctccccaaaagggtgatttaaacccctgtccttaaccctttccaatagaatctattatcatgctttaaactctgataactgacaggaaagatgtacattatttttatttttattggctttttctttgattacttttgggattgacaga

SEQ ID NO: 383304 - DNA, 573 bp, Homo sapiens
tataaatttcataatggaatgtaggctccatgagaacaggggttttatcttctttgttcactgctgtttcctagtacatagtaggtactcaataaatatttgttggaagaatggattttgtaacccattttaatttaatgcagtgcagccatcttctggcattatttcccattctcatatgccattatttttactggctacatagtatttgtcctatgggtatgcaataatttatttctctaatccaccattgttagatattaaagttgcttcaaacgtgttatattatcagtaacatcgtggtgaacatcttcatatatagctattttttgtacatatttccttaagataaattcctagagggggacttgctgggtttaccatgtttactaaaattttctaygtattttgccaaattgccttccctccccaaaagggtgatttaaacccctgtccttaaccctttccaatagaatctattatcatgctttaaactctgataactgacaggaaagatgtacattatttttatttttattggctttttctttgattacttttgggattgacaga

SEQ ID NO: 383305 - DNA, 573 bp, Homo sapiens
tataaatttcataatggaatgtaggctccatgagaacaggggttttatcttctttgttcactgctgtttcctagtacatagtaggtactcaataaatatttgttggaagaatggattttgtaacccattttaatttaatgcagtgcagccatcttctggcattatttcccattctcatatgccattatttttactggctacatagtatttgtcctatgggtatgcaataatttatttctctaatccaccattgttagatattaaagttgcttcaaacgtgttatattatcagtaacatcgtggtgaacatcttcatatatagctattttttgtacatatttccttaagataaattcctagagggggacttgctgggtttaccatgtttactaaaattttctacgtattttgccaaattgccttccctccccaaaagggtgatttaaacccctgtccttaaccctttccaatagaatctattatcatgctttaaactctgataactgacaggaaagatgtacattatttttatttttattggctytttctttgattacttttgggattgacaga

SEQ ID NO: 383306 - DNA, 603 bp, Homo sapiens
ggcacaaaaagtactgccccagggtgaattattttctgactctccaccagaacaggccctactggtgtttacacctgctcaaggacttctctttcattctgaaattctayagcacaaaattttagtgaatgcctttattgagtgtctctggattgccagaaggctgagcgagataccatgtgcatgctgagtgtaggaggtgacgtagtgtcaggaaagggtggccctgtgggtttcgatctgacttttcacaggtgtttgtggccaagtcacctcccttactcctcacctcacagtttcggggaattcactttgtgaaactgtcctttcttcattgcacacttggctcagtgtgtctgtcctaagtgtcttacatgccattacgttttccttgtttgggagttttcattgtacagatttcaccttttctttttggaaattattttgagagaggttggagtgtaggatgtgctggtattttgggtggattccctgctgttgtgtcatcactgagagctcatggcttggctctggtatttctacaaaagcaggagatcttctgtttctttccctctggggtttgcccctacacaaccacagcaa

SEQ ID NO: 383307 - DNA, 574 bp, Homo sapiens
aatggcttcttcttataatagatttttccttgttacaaaaatgtttattcattgtagaaaatttggaaaatacagataaatttaaagaagaaaaaagccttattatctcatcactcactgataactactattaacctttcttctattttttccrtgaatatataactgcttctaaacatcatttgaataatgctgactatactgttttataacctgcatttttcaattggccgcatgccatgaacatctctctgtgtcattgtgcagtctcctgcatcatcgtttttgtgggtagcaaagcatatgccatcctatagatatccaaaaatgtttccaaccttgtgattgggcattagggtagcttccaacttggcactaccgtaaataatattgcaatgacaatccttttgaacaaataattcctgattcccacccccctcaccacatacacacactttgtattaattcctgagcaacccaccattgatagtccaaaggtaagaattttttgaggtttatattactccttaccaaacacccccaccccccagaaagggctctcaggatgtcagac

SEQ ID NO: 383308 - DNA, 574 bp, Homo sapiens
aatggcttcttcttataatagatttttccttgttacaaaaatgtttattcattgtagaaaatttggaaaatacagataaatttaaagaagaaaaaagccttattatctcatcactcactgataactactattaacctttcttctattttttccgtgaatatataactgcttctaaacatcatttgaataatgctgactatactgttttataacctgcatttttcaattggccgcatgccatgaacatctctctgtgtcattgtgcagtctcctgcatcatcgtttttgtgggtagcaaagcatatgccatcctatagatatccaaaaatgtttccaaccttgtgattgggcattagggtagcttccaacttggcactacygtaaataatattgcaatgacaatccttttgaacaaataattcctgattcccacccccctcaccacatacacacactttgtattaattcctgagcaacccaccattgatagtccaaaggtaagaattttttgaggtttatattactccttaccaaacacccccaccccccagaaagggctctcaggatgtcagac

SEQ ID NO: 383309 - DNA, 634 bp, Homo sapiens
aaagttggaacaaaatagtacttagtattaatacttaataagtacttagaaaacaaattttaaaattaggtaataaatagctcaaaggaaaagaaattgtagcaaaaaggtgatgaatgtggcccacagtatagggcttggctacgagtatatttgaatagtcataataatagaaacattgaatttatttaatttagaaatgtaaaggaggtgcctatcaaaagaaatcattaatagagttgaaagtagttgtctctagcgagtagaaaattatgatggggagatatgatacaagagattgcagtttttgctataagccttgtagaactatttgtcattttaacaatgaacaatttgataaaaatatkttttttaattgcatttacatttctaacttgtgacaccaggacagcctcccactgatacagcattaacatttattattttttctactcaactacccagatggtgggctttccttatttctgagcctggcttgagttctggggcttggtgttaaggatagctcagctatgaggggtattcatgaaattttgagaaatggaaggcaagacagatacaatatgtggatgggaaggatgaagacagtgtgagaaggataaaagttagcaag

SEQ ID NO: 383310 - DNA, 621 bp, Homo sapiens
ggttggccctcattaaattagccatgatatcttaaaggggatatttaattacagagtgttttgtaaccaagttcaagggagagttctagggggaattgttagcattcaggcattaacaccaaacacacraagtctggcgaaatgttgtctatcatttggttcacacctgtcttttctgtgatctagttagaagcaatctttccttggcaagggagtaggttacacatacattacattgaaataacaccattctgccaagcacaaagtatttcatctagatgaagggagttggattaagaaatgccttgtggcagatggcaagatgtgcaggtctctctctccatttttacagccctcaagggaagagaggattaggtgttcaacactgggactctaattccttactacaaaagaaaggttggctgtcacctgagtagacctgtgccattctatcttgttgctgcacagaattacagagcacacaaagcttacatttcacaaccaccagaaatcataagatgaactatcaagcaaaattcaggtaatccaaatcccagaaatgccaggtgctctcctctgctctgcatacctgctctccccttaacacccctgtgggtttct

SEQ ID NO: 383311 - DNA, 621 bp, Homo sapiens
ggttggccctcattaaattagccatgatatcttaaaggggatatttaattacagagtgttttgtaaccaagttcaagggagagttctagggggaattgttagcattcaggcattaacaccaaacacacaaagtctggcgaaatgttgtctatcatttggttcacacctgtcttttctgtgatctagttagaagcaatctttccttggcaagggagtaggttacacatacattacattgaaataacaccattctgccaagcacaaagtatttcatctagatgaagggagttggattaagaaatgccttgtggcagatggcaagatgtgcaggtctctctctccatttttacagccctcaagggaagagaggattaggtgttcaacactgggactctaattccttactacaaaagaaaggttggctgtcacctgagtagacctgtgccattctatcttgttgctgcacagaattacagagcacacaaagcttacatttcacaaccaccagaaatcataagatgaactatsaagcaaaattcaggtaatccaaatcccagaaatgccaggtgctctcctctgctctgcatacctgctctccccttaacacccctgtgggtttct

SEQ ID NO: 383312 - DNA, 599 bp, Homo sapiens
tgcctggttatctggggttaaagagaaacttcatgtctacaggcctttttaaagacttccaaccaagttttctgttttcatccttgtctccaagccctgtcggcaaaggtgcccccaattcctgtctttggaggtgtgtattgaatcagcttgcttctttttcatgttctcactcataagcacatcaatttcagtttccgttgctcttttaaattcgttatacacatacatctgctttctggcttcaaatattttgttgatatctctgttcagctgtcattgccttccccactgtccttgtgtatttatgaccttaaaaatgtctttattgtccctatagtggagttttaatagcaaatcaagataaataaatctgtttaattcacatgtttaactgggaactyccatcctttttaaaaatggcagtattagtaactttgaggtaattaatgattaaatttattgacattatcaatttctgttccttgtatacaaggctttctctgtgggttcatttttttttcctgcttgaatacatagctcttcaggaagagttacctgatgtgtaacaaggtggtaaaatggaacatttcccagcc

SEQ ID NO: 383313 - DNA, 550 bp, Homo sapiens
acaattgggagaaattctggatagagttgcctcccaggtatagatactgtatgtgggttattcartgacacaactattcattaagcaccttaagaacagagccatgccctgttgtaggcactggggatactaaggtgggtaagtttgctttagctagggtagcaccagttgctataacaaagagagctcaaaacagagacactgaataatacatcagagtttgtaatggttctcaggagagcccttcaggttcatgagtgactctgctccatgtggtcactcagggactttggatgacaatggctttgcagttgttgctttcaaggtcaccctagatattggcactccagtcagcaggaaggggagaaagaatgttggaggtgagccacttgcaaggtttcaggaacccaacctggaggaggtactcatcccttctgctctcattccttccttccagaaagttcctggctgttttctgaggatatgcctggtttaatggaaaagaccagcatgtgaacaacaggcagaggagaaactggttttaagcaat

SEQ ID NO: 383314 - DNA, 550 bp, Homo sapiens
acaattgggagaaattctggatagagttgcctcccaggtatagatactgtatgtgggttattcaatgacacaactattcattaagcaccttaagaacagagccatgccctgttgtaggcactggggatactaaggtgggtaagtttgctttagctagggtagcaccagttgctataacaaagagagctcaaaacagagacactgartaatacatcagagtttgtaatggttctcaggagagcccttcaggttcatgagtgactctgctccatgtggtcactcagggactttggatgacaatggctttgcagttgttgctttcaaggtcaccctagatattggcactccagtcagcaggaaggggagaaagaatgttggaggtgagccacttgcaaggtttcaggaacccaacctggaggaggtactcatcccttctgctctcattccttccttccagaaagttcctggctgttttctgaggatatgcctggtttaatggaaaagaccagcatgtgaacaacaggcagaggagaaactggttttaagcaat

SEQ ID NO: 383315 - DNA, 505 bp, Homo sapiens
ctggggcttccaaaagttgaacctctgggtggctgatgagatgtgaacaaaagacatttgattacatggatgtgtgtgggaagcaatgcttagcctcttagctttgtttctagttgttctatggaaaggcattttaaatcacggtaattaytgaatttccttgattctaaactagcacactgattgtaaaatgcattatcaatttaataagagtatttttggcagggaaacaaagaaatactaccatatataacaaatacaacttgactgcaaaacataatacaaatgttagaaatgataaaatgtggtgaaatggtaaaatgttttagctcaaggaaatatgttagaaaagaagattttctgctctagactagagcgaggccacctccttggttagctggcgaagctttttttttttttttttttgcaggttagttatcccttttttggcagtggttttgggtctgcaattacaggagcgggcagaagccagcagctccagcag

SEQ ID NO: 383316 - DNA, 506 bp, Homo sapiens
ctctacaaataatataaaattagctgagcatggtggcataggcctatagtcccaactactcaggaggctgaggtgggaggatagtttcagtctgggaggttgaggctgtggtaaactgtgatagtgccactgcattcctgcctgggtaacagtaagacccygtctcaaaaaaaaaaaaaaaaaaaaaagaggaacttccaggggacttctagaaatcgtccttgacctgcagttcaaggacactgcagcaaatgttcaggtgcatccttcacttgtggaagggatcttgaactcagctcacaactgaggttcaaacgtcaatactctggtctggtgcactggggtgccaggggcaggagttggaagtcagagataaaggatcccctgagagaacatcatcatgagcgaagacagtaggcccagttgttcagatagaacaatgtgatgatggtccggatgttggagagagtagtggtttcagttttggtgtgaaactacacttgacc

SEQ ID NO: 383317 - DNA, 528 bp, Homo sapiens
attttggaattcttagaaagtaaagaggctgggcacggtggctcatgccttcaatcccagcactttgggaggctgaggcgggtggatcacaaggtcaggagatcgagaccatcctggccaacacggtgaagccccgtctctactaaaaaaaatacaaaaaaaaaattagccaggcatgatggcgggcacctgtagtcccagctacttggggggctgaggcaggagagtggcatgaacctgggaggcagagcttgcagtgagccgagatcgcaccactgcactccagcctgggcaacagaacgagactctgtctcaaaaaaaaaamaaaaaaaaacaagagaaagcaaagaaattaactagatggtctctacaaggaaattggaccgttagcagcaggaactacaaatttggtggtccaggaataagacgatgatattggtttgtcattttaatttcatccagatggctataggacctttaaggaatgtaatgacattaacagcaagaaaataaaatcaccagccgtga

SEQ ID NO: 383318 - DNA, 588 bp, Homo sapiens
ttttcttctcttcagttcttgtccatccttgctagtctaggcaggtccatcttatggcatggcagagggaaagagcaataagcagagccatgcttatagtatcrtgtctgctcatattctcttggacaaagcaaatcacatggccaggttaagagggaatgacaaggttacatggcaaagggcttggagaggtgaaaaattgagccattaatccaatcaacctaccataatggtggagttcataccccttctcacttctctgtctcccactaattagtgaaaattatctaatattttttccaattattctttacttaccttcttccaagagaagattaattattgactagaaaatttgtggctgaaaggtctatccacctcccctttctcgtggagattctccccacactgacaatttcagaaaagcagttttcttctttgtaatgtgtgtattcatatcctggaattgtgataactcatcagactccaagtgaaagaattttctttggtgcagtggttatcaagattccagaggatgaagactctttttcaacaacaaagcactcacagagccttacatgatattag

SEQ ID NO: 383319 - DNA, 506 bp, Homo sapiens
tacaatagtgaatgtttgtttttgtgcatgagtttgtgggggttcagctaatgtaatctggacttggtttatctcagcccgtccccctcttgtgtccagctctgggatggctcagtggctttgctgatcttggctggacttgctcctagggtttgactggttactgactgattgaggatgacctcaactgggatcactaggagtttttcttctcttcagttcttgtccatccttgctagtctaggcaggtccatcttatggcatggcagagggaaagagcaataagcagagccatgcttatagtatcatgtctgctcrtattctcttggacaaagcaaatcacatggccaggttaagagggaatgacaaggttacatggcaaagggcttggagaggtgaaaaattgagccattaatccaatcaacctaccataatggtggagttcataccccttctcacttctctgtctcccactaattagtgaaaattatctaatattttttcca

SEQ ID NO: 383320 - DNA, 598 bp, Homo sapiens
ttgctatatctcataaatctcttttaattaattacagtttctctttcctaactttttaaaagagttttctaaaaactcaaaatttagacagaaaaacaattcagactgcatttatcataaagaagtcactttcttatgtattaaatgagatgtctataactcttaatcatgagataactaaaattaacatgctgatttctcatcagttcagcataaagcaaagaaatttgacattttagttaacttatgcatctttatttcaaggcttatttccatttgtctttttaaaataaaaatagtktgggaagtttactcctaaaatgtaaagttggggccaactgacgtttattatagcaagacagttcttacatttaaatacctaatattaagtatttttctcagcaggaagagtccttttatgtctgcactccctctctccaaccccaccagttatcactgatgctgtctggtgaggctttcctgttctccaggtctcagtctttgcctttgacctattcattggctattctcaaccccaatgactttgtcttccccatgagactggacaacagaggggatgaggaaagcattttacctc

SEQ ID NO: 383321 - DNA, 546 bp, Homo sapiens
tgccagttcctggccggcattcctcccccattgagcatgagctgtaacccggagccctgtgaggcgtggcaggtggagccttggagccaggtaggtcccccacaaagggagagatgtcctcacacaacctggcaagccatgaatctctgtgttactgcataagtgtagaaatcagggaagaccacacctgtgtcctgccaatgactggcctctgttcagtgaccccaccctgtatgtgagaagctgaatgggtctaacactttcaggaggtgaaaaaattccayggtggagacaatgtgttatagttttaatcacagcagttcagtgttgtgttgcaacctggtctcccaatggatatactggggaattggtgtccttgcagggaaaatgaacgcaatgggatgatttgaacaaggacgaatctgatgagagccacttacagacagagcctaacatgctctctgaggcttctgcagtcaggctgggagaaacagccctatcttttccacacagtataatattagagtttcatctcttacagctctc

SEQ ID NO: 383322 - DNA, 638 bp, Homo sapiens
aagttatatgacttcaacctacatttwagttatgtttgtcatgtcttagacttccctctagactgtgagttatttgaaaaatgagggtgaagcttgatcacttttaccacttaagagtgatgccacacaatgctttgccctaagtgggcaattgaagattcctagaaaaaggttcattttgtctgggtcatttgaaagacaatctccaaccatgcctttccttcttgaatgtttggaagcatcacccattcactgtgaacatagtacttgtgtccagttgtatgctggaccagaaataagctagagttaaaagtcagaatatttcattcaaacatccctattcccaaattcccttgaaatactaaaaaactgaatgacgctggactttgcctcatagcgaccatcagaaagggcaaatgtacagctatcatctatggatgggcatgccttccacagcctccacagtcctctgggcctgcctctgtgactcatgtctcccactgagccctccaggtgtttgaattttgcgagccctggtctaaatcatgtttggcctttgccattttaaaagaatctagcacttgatgttgctcagaacagaaatcctacatgtaaaactttgcaagtcattaaaaaaa

SEQ ID NO: 383323 - DNA, 638 bp, Homo sapiens
aagttatatgacttcaacctacatttaagttatgtttgtcatgtcttagacttccctctagactgtgagttatttgaaaaatgagggtgaagcttgatcacttttaccacttmagagtgatgccacacaatgctttgccctaagtgggcaattgaagattcctagaaaaaggttcattttgtctgggtcatttgaaagacaatctccaaccatgcctttccttcttgaatgtttggaagcatcacccattcactgtgaacatagtacttgtgtccagttgtatgctggaccagaaataagctagagttaaaagtcagaatatttcattcaaacatccctattcccaaattcccttgaaatactaaaaaactgaatgacgctggactttgcctcatagcgaccatcagaaagggcaaatgtacagctatcatctatggatgggcatgccttccacagcctccacagtcctctgggcctgcctctgtgactcatgtctcccactgagccctccaggtgtttgaattttgcgagccctggtctaaatcatgtttggcctttgccattttaaaagaatctagcacttgatgttgctcagaacagaaatcctacatgtaaaactttgcaagtcattaaaaaaa

SEQ ID NO: 383324 - DNA, 614 bp, Homo sapiens
ctcctccacaggtgttaacaaagcccacccaggaagttcaaactgggctcagctccacaaagccactgtagccagactgccttcctagattcctcctctctgggcagggcacttctgaaagaaaggcagcagccccagtcaggggcttatagataaaattcccatctccctgggacagagcacctgggggaaggggtgcctgtaggcgctgcttcagcagacaaacattcctgcctgctggctctgaagagagcagtggatctcccagygcagtgcttgagctctgctaagggacacaatgcttcctcaaatgggtccctcacccccgtgcctcctgactgggagatacttcccagcaggggtcgacagacacctcatacaggagagatccagctggcatctggtgggtgcccctctgggaaaaaccttccagaggaaagaacaggcagcaatctttgctgttctacagcctctgctggtgatacccaggcaaagagggtctggagtggacatccagcaaactccagcagacctgcagcagagaggcctgactgttagaaggaaaagctaacaaacagaaaggagtagcatcaacgtcaacaaaaaggatgtcc

SEQ ID NO: 383325 - DNA, 640 bp, Homo sapiens
ctagatcaaattgacctaacagacattttcagaacattttaccccatagctgaagaatgcacatttttctcaacagcacatggaacattctctaggatagaccatatgttaggtaacaaaacaagttttaaaaagtcaaaaaagtcaaaatcatatcctgtatattttctgaccacaattgaataaaactataaagcaataagagaaggaacatkggaaactgtacaaatccatggaaagaaaacaacatgctactgaaaaacaaatggtcaatgaataaattaaaaaggaaatttaaaaaattttcttaggacagatgaaaatggaaatacagcatacaaaaacctagaggatataccaaaagcagttctaggatggaaatttgtagcaatcaacacctacatcaaaaagtagaaagacttcaaacaaacaacctaacattgtacttcaaggaactaaaaaagcaagaacaatcaaactcaaaattagtagaaggaaagaaataataaagatcaaagcataaataaataaaatttgaactacaaaaatacaaaagatcaacaaaatgtagttggttttttgaaaaaaaaatcaagaaacttttagctacaccaaccagaagtctaaaaaataaagtcag

SEQ ID NO: 383326 - DNA, 617 bp, Homo sapiens
aaaacccttcctgagtatgattaaaaacagttgaaataaatagtgtgctaaactttgagycttcttgattttgttctgagttttttgttttgttttgtttcttgcatttgatctgctgacttcatatgctaagagattactattctgcaagcagtgactgaaaccaaaataatgaaaagtgaaacaacatcttcagagttaaataataacatccccataaggattatttataaattacaaaatcttactcttttccttttcagtgttagcactgttattataaaattgtctatccatatttataaagatataaatgaaagtaatatctccagaaaatgtaatctctacttttaccttgtctcctggggaagagaagatgaaataaacttaaaagctgctaaaagtatttctacataaagctcttttatgggatggaactgagagttgtttaaaaaatcataaaagttagaatatccccataatcatgtacaagtttaccattaaaatacaataaaaagacagctcatactgccaatctcttgttgccctataacattttgagaaaaaattaaaaggcagtattgtcactcatacgagagataccgtatgaaagcatc

SEQ ID NO: 383327 - DNA, 597 bp, Homo sapiens
ttctgaacttattcttaataaaaggttattaggttatacagttttaagagtatgacttaatcactgggtcaattcagccttgccatttgggcataggatattctctatttgagtatctgaggtgacatagtaaatttgtctatactttaagactgataccttgcttgctcccaaagttatatcaaatccacagttattagaacaataaggtaatattagagatcagttagtaacaactctcctgtctgttatttatttactcattcaatatatcctgtgtgtgtgtgcatgtgtgtgagtgttaaatccggtgctgtgatggacattagaaaatccaataatayacaaatcagaaaggatctctccttttaagtttacagaatcttcagacccagaaggaactagatatttacctgctcctgtaggctaacggggataaaaagagactggaaaactcttaatcaacagttgcagtgtcactgggtgtgaagtgagattacttaatctcaaaaataggatttcttacttagctctgaatctatctccagcacccagtatctgatgaatgtctgttaccctcatctaaactgaaatttt

SEQ ID NO: 383328 - DNA, 527 bp, Homo sapiens
tgtctctcatgtaaataatgattaagaaaccatggcttcttccatcttgtgrctctaccatcttcaacacatggtgaggggctacagaggggaagagaaatagggggttgtactcacaaaatttttatgtggcaggcctgaaagtggcacatacacagacccatacacatttccttaacttataatcaatgagcatgtaatgtaacactcactgacatctctatagctacctgtaagggagtctggagatgtggtctcactgcatgccaagaaagaaacattctttcctgcaatgcctatatatgtatatgtataaatatatatatgtatatacatgtttacatatgtatgtatatatatatgtgtgtatacatatactgtatgtgtgtatatgtatatatacacacacacacacatcttaaggggattttcttatagaaattttatttctcccccctctctatatatatatgaaataaatatcagagactgtgagattattaagaaccacagaaatttatttaacc

SEQ ID NO: 383329 - DNA, 392 bp, Homo sapiens
tcagtatgatattggctgtgggtttgtcagaagtagctcttattactttgggaaatgttccatcaatatctagtttattgagagttttatcatgaaaggatgttgaattttktcgaaggtcttttctgcatctatcgagataccaattaccaaattctaagattacatggtgttctgcagtgaatagatctatgcaaacctacccccaaagttcaaggaagctgagaggctgaagaggctgacatatccagcttctcaggaaaaatgaaaaaacaaaaaacatttaatagccaggtcccaggtggctgcaagaggagatggtggttcactgcagtgttagccccagacctaggaattatttgctgtagtgaaggaacatgtaggacagttga

SEQ ID NO: 383330 - DNA, 392 bp, Homo sapiens
tcagtatgatattggctgtgggtttgtcagaagtagctcttattactttgggaaatgttccatcaatatctagtttattgagagttttatcatgaaaggatgttgaattttttcgaaggycttttctgcatctatcgagataccaattaccaaattctaagattacatggtgttctgcagtgaatagatctatgcaaacctacccccaaagttcaaggaagctgagaggctgaagaggctgacatatccagcttctcaggaaaaatgaaaaaacaaaaaacatttaatagccaggtcccaggtggctgcaagaggagatggtggttcactgcagtgttagccccagacctaggaattatttgctgtagtgaaggaacatgtaggacagttga

SEQ ID NO: 383331 - DNA, 556 bp, Homo sapiens
tagctaggttggggaagttctcatggatgatattctgaaatatgtttyccaagtttcttccattctctccatctctttcagggatgccaatgagtcatagatttggtctctttacataatatcttatttcttggaggttttgtttgttcctttttattattttttctttattcttgtctgactattttatttcagaaagccagtcttcaagctctgagattctttcctcaggttggtctattctgctgttaatacttacaattaaattatgaaatttttgtactgtgttttttcagctctatcaggttggttacactcttttctatactgagtgttttgtttgtcagcttctgtactattttattgtgattcctagcttcctcagattggtttcaacattcttctgaatcttgatgatcttcatttctatatatattttgaattttatttctgtcatatcagccacctcagcccagttaagaactcttactggagaactagtatgatcatttggaggaaagaagacactcaggctttttgagttcttagagttccc

SEQ ID NO: 383332 - DNA, 645 bp, Homo sapiens
acacaaattggggctaatgactctattttgaaaaacaaacaaacaaacaaaaaaactaaaaaacttctcaggtgttttatgatgaaagtctacttctctatcttccatactgtttgccatcttccttgatgattacatctgatgaccaagctcaggctttcccatacaaatttattktgccaagtttgctttgaaagaatattagattttgtagagttttacattattaaaatcgtgagtggcttcttttgcttttcactgttgagtgtttttgctacagcctaacctatctttttcttattgcttgttttctttgtatttgctactcaatatagcttgtcaaatgtgtaattcatgtcatatacagtgctgtctaatataattcatgggtataaagtgagagagaaatgtaattctaaagttacttgaggtggaccactaaaaggtcctgagttcatttatttattcagcaaatatatattgtccaattgcaagctaggcatcaagtatattcaaggtggtaaataaaatgagcctgatcacttcttttagggcatttacagtgaagtggaggggacggacatgactcaatcaggtgaacacatcagccatataattacaaatgaacatgagagctgcaaaata

SEQ ID NO: 383333 - DNA, 598 bp, Homo sapiens
gtgcacaagtatgcaaacacatacacacacaaacatgagctctaatttgatattattatgactctctacctccaggtagaactatagctattttattcaagatcagtgtttatgtaacctaaaaatttatttggatgacacatttaatatcttactaggaaacctattccaayacctatcaacagaaacttaaaggaattttcccacatatataaacaatgtttttgaattggtttttaaatcctacattaaggcaaataaaagtctgagttcttctattggctcaggtatataatttcatgcccacttatatttgatgaaactaaagtctctacacagaataaattagaaactagagatatttagatgatgaaagtaaaactacatcaatcaggattatcaatgaagatgctaagtaaatgaaaataaagatcagtaaccaacacagcaagtaatcacagttgtgaaatttgagaagcaacaatatacaaatgttaggatgtatttatctttacatgcagccttctaggtcatctgcaataaggtatttgaaggtacatatgcctggaattcagtcatgaaaaaataaaaagagtaa

SEQ ID NO: 383334 - DNA, 573 bp, Homo sapiens
gaggcccatccacattatggagggtactctattttactcatttactgattaatctcatctaaaaaatagtttcacggcaatatagatatgtttgaccaaatatccaagtaccatgggctagccagctgacatataaagttaatcatcatactctctgtgtagtgtctcatcatttagcccaaagaagcttgggcttctttacagcatagcagctggcttcccagggagagcaagtgggtctgtcagacctgrgctcaggagtcccgggatatcattactgttgcattctattggtgaaagaaagtcacaggtctagctcatagctaaggggaagaaaactacaacctacttcatggtgtgaggaatagcatatgtgggcagggatgaggggaatagttggagactagctatcacaatcttccctctggccacagcacttcttgtcccttttcagaaagtctcatcacattacagtgctgggcccagcttcaaggtccaaaatcacataatctaaattgggtatatttaaagttgatgttccctctttatctagatacttgtacctaaaatgat

SEQ ID NO: 383335 - DNA, 595 bp, Homo sapiens
aattagcaagaaatgtgaataatatgaaagccacatggggaagctgaagtaattcttccatggttcattcaaataaaaaaggtggtttcaatcatggtcactttcctatctgaaagccacacataccagtacagtaacgcccatttggagccaagacaaatcctggtttgcagatgcacttgaagctgccatcttcattgatgcacattccattcaaacacatgttggtagttgtacattcatcatgatctgcagaagaggattgagtgactttgaacactggccttgagggaaccaattccttcttcttccataaacaacccccagtcaaattccactacctaaatgagccatgtgctcatggcttttagttttttttaaaaaaagaaygccaactgaatgagaaaaaatagtgcggagagtggaaaggaccttcagtatatggatataaaggaaaataatcaaattttgtgcttagctcctgttaaaaccacataaaccatgagtagtgttactttgtgtaccaaaaagataatataatttcaatgagtgtttattttataagaaaataaggcaatggcagacctcactgcaa

SEQ ID NO: 383336 - DNA, 509 bp, Homo sapiens
ttgtgcttagctcctgttaaaaccacataaaccatgagtagtgttactttgtgtaccaaaaagataatataatttcaatgagtgtttattttataagaaaataaggcaatggcagacctcactgcaaatgaaatgatctggactttcattagtagatgaatatgatgtgttacyttgtaaacaatatttctgtggtgtgttggtatccattgcactgctagatatcacaagccacagttttagagatttgtgtactgcatatgtcaaacatttttatattcctccagtttgtggaggaagggaagaccttttctattttgtcagtgttgtaaccccaacacctgaaatacagtagcggtcagtaattgtttaaacttatgaagaataactgcgacttacaatttaacttgtaacacacaggaaatttttagaagcagtaaattattcactgttataacatctcctcccctccaccaccaaaaaaaaaaaccaaaaaacaaacaaaaaac

SEQ ID NO: 383337 - DNA, 609 bp, Homo sapiens
taaaaacctggctagttggtagagggcataatgatttgccatttcatatatgtgtagaagccattaacatataccatttcagctaaattggagaacataacaataaaatcagttcacaggtttaccattttaataagcagattcctactttcacagatgttcttaaaagaggaactgtactgtatcaaacccaccaacttcatttatgtaaacactcagactgaatgcaattaagccccttctggtaaaggaaataaacttcatagcaaataaaataaaaacaacaaagaataacaggactaaatccttttccatccatccaaggaccccttcagcccataaagactcacttacatttaaagttttagttgataccatcaattctactgagccaaaggaacgaagcaaaatgagaaaagagagagagcattagcaagcatataaagtataataaatagactttccaataygaaatacgaccttcagttcgcagtgttgaagatcacttcaattttgtgttacataattgaaatgcaacaattaaaaatgtgttgtagctgttatctttacagcagcctcaacataaagctctgtttgaagaacatgaga

SEQ ID NO: 383338 - DNA, 609 bp, Homo sapiens
taaaaacctggctagttggtagagggcataatgatttgccatttcatatatgtgtagaagccattaacatataccatttcagctaaattggagaacataacaataaaatcagttcacaggtttaccattttaataagcagattcctactttcacagatgttcttaaaagaggaactgtactgtatcaaacccaccaacttcatttatgtaaacactcagactgaatgcaattaagccccttctggtaaaggaaataaacttcatagcaaataaaataaaaacaacaaagaataacaggactaaatccttttccatccatccaaggaccccttcagcccataaagactcacttacatttaaagttttagttgataccatcaattctactgagccaaaggaacgaagcaaaatgagaaaagagagagagcattagcaagcatataaagtataataaatagactttccaatacgaaatacsaccttcagttcgcagtgttgaagatcacttcaattttgtgttacataattgaaatgcaacaattaaaaatgtgttgtagctgttatctttacagcagcctcaacataaagctctgtttgaagaacatgaga

SEQ ID NO: 383339 - DNA, 496 bp, Homo sapiens
accacgcatccactcccctctctttaggtaaagtttcaggaaagccacttctgcaggactgttttctcccctggagagtctgctcctaaggctccttgttactatggcagctctgtcagctattttgccactacaaccayaattcacttctgtctcctgagcccctcagggactcatcaagggtctagtacacagagaagatgtaatcgttcacttaattttggtcaaaacaatcaccaaaaaagcaattagtgactttacaattccatatgactttaaaacccatttgttgtttttcgtttgttttctgggattttcagttttagactaatcacaaacgaccactgccaacttctacatgaacacttctgtctcctctttattctgagtctcacagtcctggacctccaagagaccatgttcgttttgtcttgtttacaggaacagaaagtacttaaatactacgttctgtacattttgacttcttagtatgttt

SEQ ID NO: 383340 - DNA, 507 bp, Homo sapiens
acttttacatctatgttcgtcaaggatattggcctaaagttttctccttttttattgtatctctgccaggtgttggtataagaataattcaggcttcatagaatgagttaggaaggagttcctcctcttcaaatttttggaatagtttcaataggaatgaaaccagctcttctttatacatctggyggaatttgtctgtgaatccttctggtcccatgctttttctggttggtaggcttttcattacagattcaatttcataactcatttttggtctgttcaggaattcaatttcttcctggctcaatcttgggagatgttatgtttccaggaatttatgatttcttctaagttttctagtttgtgtgcacagaggtatttttaaggttttctagtttgtgtgcatagaggtgtctcaggatttctgtatttctttggggttgttggtaatgtctcctttatcatttcagtttgtgtttatttccgtcttctctcttttattcttta

SEQ ID NO: 383341 - DNA, 507 bp, Homo sapiens
acttttacatctatgttcgtcaaggatattggcctaaagttttctccttttttattgtatctctgccaggtgttggtataagaataattcaggcttcatagaatgagttaggaaggagttcctcctcttcaaatttttggaatagtttcaataggaatgaaaccagctcttctttatacatctggtggaatttgtctgtgaatccttctggtcccatgctttttctggttggtaggcttttcattacagattcaatttcakaactcatttttggtctgttcaggaattcaatttcttcctggctcaatcttgggagatgttatgtttccaggaatttatgatttcttctaagttttctagtttgtgtgcacagaggtatttttaaggttttctagtttgtgtgcatagaggtgtctcaggatttctgtatttctttggggttgttggtaatgtctcctttatcatttcagtttgtgtttatttccgtcttctctcttttattcttta

SEQ ID NO: 383342 - DNA, 507 bp, Homo sapiens
acttttacatctatgttcgtcaaggatattggcctaaagttttctccttttttattgtatctctgccaggtgttggtataagaataattcaggcttcatagaatgagttaggaaggagttcctcctcttcaaatttttggaatagtttcaataggaatgaaaccagctcttctttatacatctggtggaatttgtctgtgaatccttctggtcccatgctttttctggttggtaggcttttcattacagattcaatttcataactcatttttggtctgttcaggrattcaatttcttcctggctcaatcttgggagatgttatgtttccaggaatttatgatttcttctaagttttctagtttgtgtgcacagaggtatttttaaggttttctagtttgtgtgcatagaggtgtctcaggatttctgtatttctttggggttgttggtaatgtctcctttatcatttcagtttgtgtttatttccgtcttctctcttttattcttta

SEQ ID NO: 383343 - DNA, 578 bp, Homo sapiens
ctaaatgtcttgatgataaaatgggtgatttgtacccaggtttataacttgggaaagagaatgaataattgtgccaatcactgtcatgatgaacgtgagaaatgatgataaggtatacgtggggtgggtgtagtggagctgaagactcrgtctgtgtatgttgagtttgagataattgtgggatgtttaaagtatacgtgcctggcaggcagctccagacaaaggtagggaactcagaagagagagctgtattgtagttttgggagccaactgcttatagatgattgttccgcagggatgtttcagtaagataaaaaatgcaaaaggtccatctggtgacatcgatgaaattagtttcacttgactggtgagaataatccctagattagaaggtgttcgggagttaatcagaagaaagaaaacagagaatgattagggataattccaaagtttgatgtgaacaagaaggaaaagcgagggcagttacccaaggagaagatagaaagggaaggatattttttagaatgatggaaaacaacaagggttatgcagaggatgaaagcctgtggtctgtcaca

SEQ ID NO: 383344 - DNA, 539 bp, Homo sapiens
ctctttctggtctagacttttatagaaacctatgcatgcaactttccatgtaaacagttttgtttaggttgaaattaaaggagtgacgtcacttcagtaattccccatgaaatatggctgttagttaactaacaccgtcaaggtgctgtccaagttgcttaacacatgtgttttactagtgcacgccatttgtgggaagaaactcaaatagtttagattggcaacttctgataaatatgctaggaggtgctaagtgctcattttgcctcgtatgtcagctctgagctgctgtttggctgcccctctggagttcctatcactcttccccgctggtctcactttcttggatgtgacrtttccatttatgaaacacagcatgggcttctaaaaatcagactaaaaatatcactgtctagtatgcccttcccaatagtttataaaagcatacatacttcaatttccatttcacattttaactgttaatatatattctccaatgactctgcactaaatttccaaactactctatgctctgcctc

SEQ ID NO: 383345 - DNA, 543 bp, Homo sapiens
gataatcaattactataaaacctggcttttggaaatacagtaaaaaaatccgttgatttttataataaacactgtatataaaaataaactgtgaatttacacaaatttgttacactctcttcaaacttacaagcttacataatagatttattaatgctatatacttaattacaaaataacatatctcattgcaacaaatgttaaagatacagaaaatagaaaattaaagaaataaccatcaatataaatttgcttctgtctttttagacttttattcacacacatattcargatgatggtctgtttatttaacgagaataaaaccatagtatatgtgtttttctgcatcttgtttttcttcattataaaatatttcatgaacacatctctgtgtcagtacatatcaatttgccctattattttttggtaagctcaaaagttctgtatatctcagtgtgtaaattagtgaattcaagcctacagattatttcttcctcctattagctatatctattgaactaattacaaaagtccaaagtattt

SEQ ID NO: 383346 - DNA, 601 bp, Homo sapiens
gggctgtgtctgggatacagatgtgccttcttggcctgaataatgcttttacagaatttaaattagtagccaacattgtaaacttgggaaattccacatgaaatttgtatttctggcttctcttgaaaaattggaagttctggtcatgctagacctgccatgtcacacagcactggtgggatgaagtgtgttttctccaggacaccactaaatccsagctcagtacattcactgatgtttccttcctgggccctgaaggcatcagcattaatgactcctctttacttagcagagattttcttttctgactaggtgaacaagagtttagaaaattaaaacaaatcaataaagatatgctccttccatatcacacatatatttgggcaatctaaactgcctgtaaatattcagttctaagaatctgatttctgtttctgtgtcagtcagtttagttctatgggtagcctagttaggaagatctcattaataaggcacatagtcatgaattccttacacgtaagttagtattatatgatcgctcctctctagcaagtgactgtacattgtccagctctgttatggtgataacaaaagccttagt

SEQ ID NO: 383347 - DNA, 607 bp, Homo sapiens
tacaattgtctttaaggaactacatgccctgttgtctcctcagcccacaacctacattgttgaccatctccttttaacatcctctatctggcttattgaatacctctaatctctttacttcaaaagttctgctggatgttcatagggctggcttggttcctttttccagctgattgtttaaatgtcacatttgtcagtgaatctttccctgatagtgccacctcctctgtggcattttattatcttatttttctccataatatttattttttttgtggcccactatatattttacttatttacttttttgtctgtctctaccaccagaatataagctcctcaatggcaataatttttgtctgtttgtttactgctgttattttcactacttttggtctttgggagatagtagagtgtcagtaaatatttgttgaatgaatgcatgtgcaatattccatccttacaaactgtgctatttttaagttcactttattcggtttccttatgaagagggatattttwtttattgacagagaaaggacaataaaaggaggaggctatgaactgcattttgtatttcctaatattcttttgtgttttcattttt

SEQ ID NO: 383348 - DNA, 631 bp, Homo sapiens
tgtatatacatagatacagatatatttttttgccattacttttagtggcaaaaaccagaattacttttgcaccaacctaatatagctatatctacatcatctctrtctctatttatatagagatagagaaagagtaaaagtaatggcaaaacctgcaattacttttgcaccaacctaatggatttagactctagcttccctcctgagagacagtagcagcagtaacacctagttatggactgaatgtatcccccaacaattcatatgttgaagctctaacccccaaggtaatagtatttggaggtgaggactttgggaggtatttaggtttagatgaggtcttaaggttggagcccacatgatgtgataagtgcccttacaagaagaggaagagacaccagagcattctctcaccctccgtgtgcatgcaccaaaaatggcatgtgaacacagagagaggaggcggctgcctacaagccaggaggagtgctctcaccaggaaccgaagctgtcggcaccttgatactggaccttccagcctccagaactgtgagaaataaatgtctactgcttaaaccacccagtctatggtatattgttatggcagctcaaactaagacaaccctaataa

SEQ ID NO: 383349 - DNA, 548 bp, Homo sapiens
atagctgcagagcacacagtaatcatcatacctgataacaccatattgaaatgatcaagacaataatgataatagatagcatttattgaccaattaatatgtgccaggtattgttctgtgggcttttatgtttttttctcattggagctttgcaattaataagcagtgagttacttcttttattggcccagagggctgaaaataatttgcagcttaataaagtagctactttgcttctatagtgattggtttgccacctgttttaagtgtgggccatggcttctctaataaaccctattctttatcttgctcttaaacattttgttttgatagccatraaaccctcctcagggtaggtgatttatttccatttgccaaatgtgaagagtgagagaatgaccttgataaagggttgggttgagaattgttcctgtttttttcctggtggggctttacgggtgatggagcacttagaatactagagaattagagaatttaggggcataaaatagaatccatactggattttattagagcttagccactca

SEQ ID NO: 383350 - DNA, 616 bp, Homo sapiens
attgttcacaagtctgtaggtgggcaaggcagttggctggctgggcttggctgatccaaggctgacttgctcatgtttcagcagtttgccgggtctagtttgggatgattttaatcagwgggatgagtggactttatgtcggttatcatttagcaggttaccctgggctgttcacttggttcagagacatgcagaaaagatgtaggataggtctttggagatctggtacagaacaggcacaccgttattttcatcatattctgttggccaaaggaatttgaaagaataggccagatttaaggaatagggaagtagattctaattgttgatggaacatgctgcaaagtcacacttcaaaggttatgtttatagtgagaggtgaagaattggagtcatttttgcaatttaccaaaatatatgtgtttaattttaaagtagttgtacagtttatactcccaccagcagtgtatataagttgtgattgttctacatcatgtccagaactgctagtaacagtctttttagttttagctattttggtgggtgtctagtggtattttattgtggttttaatagtctcaattgctaagatggctttcctttacttttttttttt

SEQ ID NO: 383351 - DNA, 616 bp, Homo sapiens
attgttcacaagtctgtaggtgggcaaggcagttggctggctgggcttggctgatccaaggctgacttgctcatgtttcagcagtttgccgggtctagtttgggatgattttaatcagtrggatgagtggactttatgtcggttatcatttagcaggttaccctgggctgttcacttggttcagagacatgcagaaaagatgtaggataggtctttggagatctggtacagaacaggcacaccgttattttcatcatattctgttggccaaaggaatttgaaagaataggccagatttaaggaatagggaagtagattctaattgttgatggaacatgctgcaaagtcacacttcaaaggttatgtttatagtgagaggtgaagaattggagtcatttttgcaatttaccaaaatatatgtgtttaattttaaagtagttgtacagtttatactcccaccagcagtgtatataagttgtgattgttctacatcatgtccagaactgctagtaacagtctttttagttttagctattttggtgggtgtctagtggtattttattgtggttttaatagtctcaattgctaagatggctttcctttacttttttttttt

SEQ ID NO: 383352 - DNA, 616 bp, Homo sapiens
attgttcacaagtctgtaggtgggcaaggcagttggctggctgggcttggctgatccaaggctgacttgctcatgtttcagcagtttgccgggtctagtttgggatgattttaatcagtgggatgagtggactttatgtcggttatcatttagcaggttaccctgggctgttcacttggttcagagacatgcagaaaagatgtaggataggtctttggagatctggtacagaacaggcacaccgttattttcatcatattctgttggccaaaggaatttgaaagaataggccagatttaaggaatagggaagtagattctaattgttgatggaacatgctgcaaagtcacacttcaaaggttatgtttatagtgagaggtgaagaattggagtcatttttgcaatttaccaaaatatatgtgtttaattttaaagtagttgtacagtttatactcccaccagcagtgtatataagttgtgattgttctacatcatgtccagaactgctagtaacagtctttttagttttagctattttggtgggtgtctagtggtattttattgtggttttaatagtctcarttgctaagatggctttcctttacttttttttttt

SEQ ID NO: 383353 - DNA, 630 bp, Homo sapiens
acgtgttacagaattgttacaacttttgctgcaggttactgttttgaggacaaactatgagtttttaaaaaatataaatttactctgaaaatttagctcaaattcatttgttaatgaatttgttcctgcatttggcaatgagctaaatccattgtattctgaccttctcatagtaacttagcatcctaatatcagrtgctgtattaaaatgtgaagaagacaagatgctctttttaattaaatgtgattgataaagctagaaagacaggaatgcaactgaagttggatgagtctcttaggtacaaggtaatagatttatactctttaacagctggtttgattgcatcagatctaaagattttatttgaagaaaaagcctaaggaagaactgctatctgtgaaagtacaaagtaatgcctgtattgaaaatgaacaatctgctgatactagaaacttctttatttttaaagcctgtataattttcttggtcatcagaaccttggcatataaaaatttcagaaatctcatggctttaattaaggcaacatgcattctctgtaatgaaagtaggaagaggatgtaggagaatgtttcaggttctgttttctgcctctctgttacgggaagcag

SEQ ID NO: 383354 - DNA, 630 bp, Homo sapiens
acgtgttacagaattgttacaacttttgctgcaggttactgttttgaggacaaactatgagtttttaaaaaatataaatttactctgaaaatttagctcaaattcatttgttaatgaatttgttcctgcatttggcaatgagctaaatccattgtattctgaccttctcatagtaacttagcatcctaatatcaggtgctgtattaaaatgtgaagaagacaagatgctctttttaattaaatgtgattgataaagctagaaagacaggaatgcaactgaagttggatgagtctcttaggtacaaggtaatagatttatactctttaacagctggtttgattgcatcagatctaaagattttatttgaagaaaaagcctaaggaagaactgctatctgtgaaagtacaaagtaatgcctgtattgaaaatgaacaatctgctgatactagaaacttctttatttttaaagcctgtataattttcttggtcatcagaaccttggcatataaaaatttcagaaatctcatggctttaattaaggcaacatgcrttctctgtaatgaaagtaggaagaggatgtaggagaatgtttcaggttctgttttctgcctctctgttacgggaagcag

SEQ ID NO: 383355 - DNA, 612 bp, Homo sapiens
gggtcaccaacatttagagaacatcagaagatattaatcttctctccaaaaagcacgcataaatacaacattttwaaatacacgttcagggggctttagtcagcagttctgaaatggatcctctatgaactactgttttttaaggggcataatttatatatttatttattcccttagaaattgtattgatttgagacttgtgacatgtattccaactacctcattttaaaagacaattgtttttaagaagagctttttagatttagataatagatttgtgtaacacatataagtatttaacttccttagtgttaataggattctctattaaaagatgaagctaaactagttcatacatgtttttacttagatttgtgacataggaattaataggggccatacacttgaccttcatctgctatataaaatatagctttattttgcaaaatgctttccacccttgattaacatcttattgccttgtaggtatggaacacaatcattgattaatctaatatatacaatagggagaaccgtaactacagatttacagattgtggaggtaagtactttaaatattatgaaatacaatgataatttggaaaccacttt

SEQ ID NO: 383356 - DNA, 574 bp, Homo sapiens
tgctgggctatttctgggttctctaggctgttacattgatctatgcatctattcatctgacaataccacatagtctttgtgatggcagatatataatacagttggccgttgaacagtgcacaggttaggggtaccaatgcatattttgtatgttatatatttacagagtgtattcttacaataaagtaagctaaagaaaagaaaatgttaagaaaatcttcatgaaggggaaatatatttactattcattaagtggaagtggatcatcataaagatcttcatccttgtcatcttcacattgagtaggctgagaaggaggatgragagaaggggttggttttgctgtctcagggacggctgaagcagaagaaaatctgtgtatatgtggacccagacagttcaaatctgttgttcaatggccaactgcaaattttaaaattaggtaaaataattctccccattttgtttttcttttaaacatcgttttaactactacagttcatttacttttccacatacattttagattaatcttgtctatatccataaaaaaatcttgctagcattttaatag

SEQ ID NO: 383357 - DNA, 574 bp, Homo sapiens
tgctgggctatttctgggttctctaggctgttacattgatctatgcatctattcatctgacaataccacatagtctttgtgatggcagatatataatacagttggccgttgaacagtgcacaggttaggggtaccaatgcatattttgtatgttatatatttacagagtgtattcttacaataaagtaagctaaagaaaagaaaatgttaagaaaatcttcatgaaggggaaatatatttactattcattaagtggaagtggatcatcataaagatcttcatccttgtcatcttcacattgagtaggctgagaaggaggatggagagaaggggttggttttgctgtctcagggacggctgaagcagaagaaaatctgtgtatatgtggacccagacagttcaaatctgttgttcaatggccaactgcaarttttaaaattaggtaaaataattctccccattttgtttttcttttaaacatcgttttaactactacagttcatttacttttccacatacattttagattaatcttgtctatatccataaaaaaatcttgctagcattttaatag

SEQ ID NO: 383358 - DNA, 467 bp, Homo sapiens
gttttagaaggctgttcgtagatttaaaaaaaaatctttgtaattttttttggaattttctatgtagatggaatttgtcatctgcaaatagggacagttttatttcttcctttctaatgtrtacgcattttctgtccatttctttcattattactctggcaagacctcccattactctcatagcagtggtgagaacaagcagccttaccttgttcttgatcttggggatctcatttaaaacattttttgctactttcttctagcttccaatgtttctgaagagaaacctgtcctttgaattttttttttcccagaagtaatgctttaaaaaatttgcttttcagctttcagaggttgagttatgatgtgtgttggtgagtatgtgttccgttgttggggtacctcattacagcctggccagggtggaagtccaggttccctattcagcctttgctggtgggagtgag

SEQ ID NO: 383359 - DNA, 651 bp, Homo sapiens
aacaatcctgggtacacagcaaacataacttgataaatgatggctatcgttacgtattcagagcatccacagtgccctgtaktcagatgaatcatgacactttttcacttcactgttgttttgtggcctcatactgatgtgtaagttccttagaagcttaggagaagggattgtgttttttaagcgcaagatccctagcacagagcttggcacaaggtagatattcaataaatgcatgctggataatggtaagagacaacctggattacatgttaagcgcatatgaaagtaaagtaaaataggtgtggttacaaaaggtcctctaggtttcctaaatagtagcataaattatttacattaaaatatttgattattaacaggcatggaggtgcatgcctgtaatcccagctactggggaggcttaggcaggcagactccctgagcttaggagtttgagatcagcctgggcaacatagtcaggccccatctcaaccatatcatcttggttatcatttttactttttcaaatactgactccttgtataaatagaatttgagagtctgtcagacaaaatcttttcctttcctttgttgtcctatgaccaccaccaccagcatcctcatcgccaacataattgtcttcaagtgctt

SEQ ID NO: 383360 - DNA, 595 bp, Homo sapiens
tttaaaataaataaactttatcttctacaactgttttagaaacagaaaaattgtgaagactgtaaaagtggccatatactccacacccaatttcccgtattactgacaaatgagtacggcatatttgttaaaatgaaggaaccaataataagaaattattgttaaccaaagtccatgctttatccatatttcttacttattgcccagtgtcctttttgtgttccaggatcccactgaaaataccacattacatttagtcatcgtgtctctttaggctcttctggactgtgatagtttcttgggcttttcttgtttttgatgaccttgacagttttgaggagtcctagtcaagtattttgtagaatgtccccttggaatttgtctgacatttttctcataatgaaaccagagttatgggtttctggaagaagacacaaagaccaattgccattttcatgacaccataccaagagtacttactagcaacatgattcatcactgataatgttggccttgatcayctggttgaggtggtgtttgtcaggattcttcactgtaaagtgactctacccctaccacccttacaaactgcact

SEQ ID NO: 383361 - DNA, 656 bp, Homo sapiens
tttatggggcactgttgtatttctttaagagaatgtttgattcatagcatttgctttgaaagataaagaaataagtactcttaaaactttattccacccaattttgtccatttaaaaatcagttgtctaagctatatgatgattctatattatcaaacattataacatttctacttaatttcataaattaactaaattttagttttatatggatttaatgttcactacatgccacmgcatctctgctactgagttctgtattttcattaatctcttggttggcttgttctcaactattagttttaacaaaaagagcccatgaaaactatgaatgcagccacgcttagtaagatctgacttttgctttaatattgaatagcatgttcgcttttctcgaccctttgtagacattgctatgaagaagtctgaaagttgttgattattttactcttgtaagtgacatgcttttttcaccatgtcgcttgaataaatttttctttatccttggaatttgataattttaccagaatctgtcccataatcatcatattctatcagtttttccaaaaaataatttgctctttcattagactgtatattcagtttttctgacattacagagaaatggtcttctattaaatatttgttttgatcat

SEQ ID NO: 383362 - DNA, 546 bp, Homo sapiens
tgtcagccaacatcaaaaatggagtcagactccttattatcatatttgaaagtatttttgtgtctatttgttgggttctttgccttggagacagtaatctttaggttggtttttgttattagtatctactttgtgtttgtctcattctttgcattcactctgaatagcccctctgccctgtccataattcaatttaaaattgtgtgcagtcttttccttgcagtttctaatttacatcatwagaaatggtgtttttaatcctttctttgatttccgtgttttacatctaattttgatattttgtcaagttgtcttttagctcgtttcactgaattaatttccttcttaagttctatctcaagaaggattcaagtggaatttttgttttttgcatactctataccttttatgtattttcctgtaaaattattacacaactgtcatggcatttcttcctatcctacttgtgtttagcatgaacagctctgcccagacctctattttctctggtatgtcttcttggttctttttaatgtgagattgatt

SEQ ID NO: 383363 - DNA, 609 bp, Homo sapiens
ctttctcacagcttcaagagttcctgccccgaaaaaaagcactttgattggtcctacttgggtcagatgtaccaatcactgtgtccagggaagatggaatactctaattggtctaaccagggtcctgtggccacactaggagacagccccacccaagtcactggcactgggaaggggaaggggtagttctggaaggaaaaagggctgtaaccagaaagtaaacaaagcaggcaaaagcaaatgtctacaaaaagatacattcacacaaagtaaaacaagaatacaatataaatacaacctctacacacccagtagcataggtaaaattagaaagatttatggtaccaaatggtggcaaagatagggagcaactggaactcttttatcctactgggaggaatgtaacatggcacragcacatcagaaaacaggcagttttttgaaatgttaactggaaaccatctaaatgcccacccataggtaaaagaataaggaaaagtaatatatccacataatggaatactatactgaaatttttaaaatttgtgtagcaacatggatgaatatcaaggtgattatgtttagtaaaagaaagcagtcacattctgg

SEQ ID NO: 383364 - DNA, 578 bp, Homo sapiens
tgggtgaggatccctggtgtcttcagagttcctttagggttgggggaagacttctgggagaaaaacaccccagatcttggctttacmtcactgggtgtcaaaaatataaatcacgcctgatggggggagggcgagtgtacagtggcgctgtaggtagaggccactaaggagcccttccaaacaggacaaagctcacactcagagggaagttttagcttccaggatacagggagggctgacaccagaacttactccaagttgtgccatgatgtactctgggcaaactaggtgaatgtgaattgaaaaagctgcacagtaaagactgaagcagttagggcctaagcacctcttgttttgagactccactaaaggctagaactgtctccaagttatgcccctccccaggtaagttcagccccacttgtttccaaggcttcagcatgttgctctactttcctgacaaaatggcccctggaaactctgacagttgccatggtttaaagctcctgtcactcactgccacccttggcagggcagagggagggggataaggaaggggctatgggcagggactgaac

SEQ ID NO: 383365 - DNA, 444 bp, Homo sapiens
atgctgctgtatttctgggaaagatgtcacttcatgttgggttataatcccacagaatttactttaaatgtcacgtaaaaacaaattcacytaagatagtcttgcttattttgttgcgaaggccagtggaatataaaaatcaatggcattaatgaggagcacattctttgctgagggaaataacagtttttccaggccctagggtttatttagttcaacattgaagattgaaaagactaatgagaagataacatgacaatataaaaagacagaaactcaaaaagtatattcactagaagacagtggagccaaagaaaagcaagttgaaaaagaaagaggagacaatttaacgagccctaaaggcaagaagtgtgtcttctcctgcccatttctctctcccacagtacatcctgcattgaaccacgtgttgctggttactaaact

SEQ ID NO: 383366 - DNA, 444 bp, Homo sapiens
atgctgctgtatttctgggaaagatgtcacttcatgttgggttataatcccacagaatttactttaaatgtcacgtaaaaacaaattcacctaagatagtcttgcttattttgttgcgaaggccagtggaatataaaartcaatggcattaatgaggagcacattctttgctgagggaaataacagtttttccaggccctagggtttatttagttcaacattgaagattgaaaagactaatgagaagataacatgacaatataaaaagacagaaactcaaaaagtatattcactagaagacagtggagccaaagaaaagcaagttgaaaaagaaagaggagacaatttaacgagccctaaaggcaagaagtgtgtcttctcctgcccatttctctctcccacagtacatcctgcattgaaccacgtgttgctggttactaaact

SEQ ID NO: 383367 - DNA, 529 bp, Homo sapiens
ttttacctatgtaacaaacctgcgcgtcctgcacgttgcacatgtatcccagaatttaaaataaaatagactttttaaaaaaagaaaataaatatgttctagtattcttcttcatgtgtgtttaaatgtatatgtgcatgtacataatataaacaaaatgagaatattatataacccgctttttttagcaattgtttctgaaaagcaaagcctgaagaacaagctgagatgctactattttattaagcactatgataccagagaagcagggcaaagaaggagagaggcagggaagaagtctctagagggtgcactgccattatggccacctctggtatgaggtgcagcggatgcctgaactcatggaaccaccctctgaactgagctgccttgtctcagtctagtccacccaggcaggcaaaggggaatgtttacactagcttctgtctctcattggtcagyttttaccctgaagggcatttactgtcccatctccacttctgaattatgtgtgggcactaggaagacc

SEQ ID NO: 383368 - DNA, 405 bp, Homo sapiens
tttccccccattgggttacaatgtgctcatttagctcagtgaacttcattagtatccacattctgaagcctgtttctgtcatttgagccatctcagtttcagcctggttctgaacccttgctagagagaggctgcagtcatttggacaaaagagggcactctggttttttgagttttcagcattcttgtgctgattttttcacatcattgtgggcttatctatcttcaatctttgaggttgctgacctttggatggttttatttttattttatttgaacagtctggccacttttccattgggctcctgtggtttgcttggggtctgctcyagtccctagttacctcagattttccagtacctggaagtatcacaagcaaaggctgctgtgaaacagcaaagatgg

SEQ ID NO: 383369 - DNA, 441 bp, Homo sapiens
tgtgtttgttgagtgagtgagtgagtgaatgaataaatgaataaatatctctctctctagatgctaaatggtggggattctggaatctatygaattggttgttaacatggccatcccatgtgctgttgactgaccccatatgggactgctttgatttcctacaacactgctaatattcaggatattactgtatcaactgtcttccaatagagttgcttttgtagtttgatttggaaacagtgctgtattacttcaaatgattgtgaaataataaaacaaacaataacctgaaatgccagaaaacattattttcatggcaacttttcaaaaaacagttctacaagatccatttacaaaatatacatggatggggctgggcgcggtggctcacgcctgtaatcccagcactttgggaagcccaggtaggtggatcacgaggtc

SEQ ID NO: 383370 - DNA, 574 bp, Homo sapiens
ctagtgtatcccctgatgtactgaacagtgctgggcagatagtaagtgttcattaaatatgtgttggctgctgattgttaatctgggcaagatgttcacagacatctgaatatttagaagacatttggatacgcagctgaagtttacagttttcacgtggatgttcttttaaaaagctgaagaagggagatgattgccaaatgtattatctctatctcgagttgctaaggctcacaaagtctcctatttccagcagagagaaaaatgcttaaaactagattcatcagcaacctgaagaaagccaaaagaagcaatcttaaagatctttttagtatcttgatcattcagtagaatactacagtgctaaagactccagatgccacacagcttgtttctttgccsatatgtaatgtacatttacaatcacatgtacaaaggcatattatgccaagagaaaaagcaatccactgcatatacatgctatatcataagtatgattgtgttaaccacttcctccctaatttccttatgtgaagtactgttttcttggtcaataagccccataatttacaaa

SEQ ID NO: 383371 - DNA, 582 bp, Homo sapiens
gcaacctgaagaaagccaaaagaagcaatcttaaagatctttttagtatcttgatcattcagtagaatactacagtgctaaagactccagatgccacacagcttgtttctttgcccatatgtaatgtacatttacaatcacatgtacaaaggcatattatgccaagagaaaaagcaatccactgcatatacatgctatatcataagtatgattgtgttaaccacttcctccctaatttccttatgtgaagtactgttttcttggtcaataagccccataatttacaaaatatacagatcctattcagttgaaagaaacatgcatatgtgttcaccaaacaaaatattttctcaatattctatttcttattgtatataaacaaaaataaactaagcaaaaaataaaactctcctaatactttaagaatttgtttttttaattttgtatgtcttgcaaattaaaagatgattaatttatacattatatgtctaagaagtaggagaattaatgagattagcamaatactggataaatattattcataaaaaatgtattaaatacataaaacataataattattta

SEQ ID NO: 383372 - DNA, 601 bp, Homo sapiens
gacttctcttggcctcagcttcctcttttgagaattgatggtgttaggctacctgacctctaaaattcttgtttcccatagaagatgaggcagagcggrcattggatgtaacttgaagatcggcttttgcaaatgcaattttagggggacacagggagtaaattcagaatacagagaattgaggcagtaggaaatgaaagcaagagttttagctttcaaattttccaaatttttcatgacaatccaatttgaaatactctatctccccagaagcacttacttagcaggtggcacactctgatgttttcagtaatgggtaatatttgttgagttaatagcttaaacactttacatgcattaactcatttgcacctcatcacaatattatgaagtggctgctattatcatgcttattttttaaaagaagaaactgagtaagaaagaggttaatttgcctaaggtccctatattgaagggatggatgttagtctaatgtcagagccacatattctattgcctattacaatacataattgtgctttcatggccaatagttccaatggcctaggtcgcaatttaggctgaccctagaaaatgtccc

SEQ ID NO: 383373 - DNA, 601 bp, Homo sapiens
gacttctcttggcctcagcttcctcttttgagaattgatggtgttaggctacctgacctctaaaattcttgtttcccatagaagatgaggcagagcgggcattggatgtaacttgaagatcggcttttgcaaatgcaattttagggggayacagggagtaaattcagaatacagagaattgaggcagtaggaaatgaaagcaagagttttagctttcaaattttccaaatttttcatgacaatccaatttgaaatactctatctccccagaagcacttacttagcaggtggcacactctgatgttttcagtaatgggtaatatttgttgagttaatagcttaaacactttacatgcattaactcatttgcacctcatcacaatattatgaagtggctgctattatcatgcttattttttaaaagaagaaactgagtaagaaagaggttaatttgcctaaggtccctatattgaagggatggatgttagtctaatgtcagagccacatattctattgcctattacaatacataattgtgctttcatggccaatagttccaatggcctaggtcgcaatttaggctgaccctagaaaatgtccc

SEQ ID NO: 383374 - DNA, 598 bp, Homo sapiens
gtgcttcactagccataaagtgttataggaaattaaataatatcactaagttgaattttaaattttgtcaagtggatttaactcacgagaagcggattcccaaattggggaaagagattattgacaaaagactggagagaggtcttggagttttttstgttttgttttttttttcttaaaacaaactattgctaaatatcattttaaatggctggggtataaagaactgcaaaatatgtagatcaaatttcctctacaggacacttgggtgtaaaaagtaggcagatcggtggttggaaaaatattaagctttatgaaattcaaaatatttacaaaatagctcaatggtggcttcccacaaatgtactccccagtatcctgtgggaatagtttgccccaagcctctctctcagcaaaattttgaagagggccaaacctgggagtgctcccttctcaccagccatccacacatctcctccctcaatattctggcccctttattagttgccatgtcaaatataaaaggaaattgataaaaaatgtcctgtacaaacttattttcagcattttaacttaccagaagcaaaactctcaccag

SEQ ID NO: 383375 - DNA, 598 bp, Homo sapiens
gtgcttcactagccataaagtgttataggaaattaaataatatcactaagttgaattttaaattttgtcaagtggatttaactcacgagaagcggattcccaaattggggaaagagattattgacaaaagactggagagaggtcttggagttttttgtgttttgttttttttttcttaaaacaaactattgctaaatatcattttaaatggctggggtataaagaactgcaaaatatgtagatcaaatttcctctacaggacacttgggtgtaaaaagtaggcagatcggtggttggaaaaatattaagctttatgaaattcaaaatatttacaaaatagctcaatggtggcttcccacaaatgtactccccagtatcctgtgggaatagtttgscccaagcctctctctcagcaaaattttgaagagggccaaacctgggagtgctcccttctcaccagccatccacacatctcctccctcaatattctggcccctttattagttgccatgtcaaatataaaaggaaattgataaaaaatgtcctgtacaaacttattttcagcattttaacttaccagaagcaaaactctcaccag

SEQ ID NO: 383376 - DNA, 553 bp, Homo sapiens
tccatggccatcaaggtaatttgatgggcttgataatttgagccaactctctcacgtcttcaaggcctctctactcattgtactatagatctgttccaaattaggctccctggagtctcagcttaatgaacatttggatgttctgtggttggtgactgacctcaagagtctatcagaagatgtgggtaatgttcctggacaaacaggtggaaattatgcctgaatgtttcaaactatattcctatctctgcattgagatttcacttcctttataaataagactcctcagatgttctagagcagggccaggcacagtagctcacacctgtaatcccagcactttgggagtccaaggtgggaggatctcctgaggtcaggagttcaagaccggcctggagaaaccccatctctattaaaaatacaaaaattagctgggcgtggtggtgcgygcctgtaatctcagtgactggggaggctgaggcaggagaatcacatgaacccaggaggtggaggttgcagtgagctgagattgcactactgcactccagcctgg

SEQ ID NO: 383377 - DNA, 520 bp, Homo sapiens
attagcccggcatggtggcacacacccgtaacctcagctgcttgggaggctgaggcgtgagaatcrcttgaacctgggggcggaggctgcaatgagcagcgagcgcgccactgcagtccagcctgggtgacagggcaagactgtctcaaaaaacaagcaaacaaacaaacaaacatacaatggattatcatttagcctttaaaataaggaggaaatcctgcaatattgttcatcatgaataaacttgaggattttatgctaagtgaaattaagtcagtcacagaaggacaaatactgcatgattccactgcagtggtatttttaaatagtcaaattcataaatcaaagagtggaatggtggttgccaggggctgggaaagggaagtaaggagttgctaatcaacaaacagaaagtttcagttaagcaaggtgaataagttctacagaacctgccacacaatcttttccttatagttaactgtattgtacacttaacaatttgttaaagagagtagatctc

SEQ ID NO: 383378 - DNA, 509 bp, Homo sapiens
tcatccttcaaactcctttaacatctagggcctacaccattaatctgacaatcaccacatactgcttaatattgttgtagtctgctatttaccttcagtctgcaatttaacttccttaagtttatttcttgttccccattgtagagaatatctcccttaaatagctgccagtcttgccatctggcctttcctgtagtgttttgcatgtgtgtgcacacatgtgtttttaattgacttgaagacaaagagactccccttaggaagctttatttyctgtttgccacttccctaggacccaagataccctgatccccctcaattcattctctgcctttccctgctcttcttcccaaggaaacgaacaccttccaactttatcaccagggctcctttgccttctggcttgcatttgggttcaaccaatagaaggcacagataggtaatagatgggtgggaggacagagtggtagggaatgtcttcccttgcttggcccattctgtagtgtttg

SEQ ID NO: 383379 - DNA, 252 bp, Homo sapiens
aagaccagccatgcacaaagacccaaaggacgggacttacagatatgaagtgctatatcaatagcaaatactgccactaattgataataacaatatacatgcaaggcccaaagcatgtcgggaackacattcagagagctaggcaaaatgaatcaggccgggagaaactggaaagctggagttctgagctctgtctacacagcaggactacacaccaaaagcactgatttcatcttccgtgtgatatcatga

SEQ ID NO: 383380 - DNA, 368 bp, Homo sapiens
aaaaacaaaattctgccttaccagatactctgttacactcttattttaaagtctttgctttgcttgataattgcttttgtggattatcagtagtgagggaatgttctgagagctgtcgacaaagtgtcaagtagaatgactgaatagcacatattatttccttgtgacctttatttgattgtgcatttgaacaactctactttctcaagagaaggtaaagaggaaaaatatttttcaggaagaggaaacatctttatcttctacaaatatttattgaacactactacagaattttgagtctatttaaagatagttaaaatattttaaatrtttctcggtataggaaaattaacacagagaaaaacaga

SEQ ID NO: 383381 - DNA, 600 bp, Homo sapiens
taggcagcagaatcaataggagcattgaggtatttatggaacttccaagtcaagagactaaaagagcaatgcagctctggagagaggttcaaagctggagagttgagtcaccatcatgttgatggaactggaagctatgagaggataagattrcccaggagagtgggaggatagggggctaagagcaaaccctgggaacagcctttctcagggcccagccctgccttccctgggaggggtgtcctcattcctctgcttagggataatgtatactgacttccatttaacatgtgtttgcaaaggacatgtgctaaccaaagtacagtatttttaatgtaaagcttcctaaccaagggttatagcactggggccagacccagtcaactattctcttcctaatgaatactgtcatcttcttgaccttggttttcctaggtgactgctctgttcccttcctcatccccttttctgcttggcccaaaatatagtctagaaaatacctcatgattaaaaacaaatactgcactgaaaagtaaaggatctcagaagaaattaaaatacagttctcctcttccctcttaactttggatactagatatg

SEQ ID NO: 383382 - DNA, 509 bp, Homo sapiens
acgtttctcacaaaattaagataatgtttcctctaatactcaccagttaaaatatagataagtctagtcccaaaagtaggttttctgaaaacttacataatatctgagtaccgaagccaggattgcctgttcagtagctgtgagcctttgaggtccagagttaacataaaagaagacaaaaagaagtctgttttactaaatcttagaagattttattgataccctgatatccatctggaaatcaaagcaactggcatatgaactttccaagcagtttcacmaaaaacattcagaataaggactctatatgaaagagggaaactggctgggtgcagtggcttacacctggaatcccagcaccttgggaggccaaggcaggaggattgcttgaggccaggagtttgagaccagcctaggcaacatggcaagactccatctctaaaaaaaaaaaaaaaaaaaaaaaaaaaaattagttggacatgatggtgcatgcctgtgatcccagctac

SEQ ID NO: 383383 - DNA, 640 bp, Homo sapiens
gccggaactatgtatgacatagctaccaataaaatgtctggaaaataaaagaactactaaatgaaaatactttgaagaacaatcagggaaatttgtacacatacggagtattagatatattaaggaattagttttattatgtatgatactgatattgtggttctgttttcttttttaactgattaattttttttcttgtttttaagatggggtctcactatgttgcccagactggtcttgaactcctgagttcaagttatcttcccacctcagcctcccgagtggctgggattacaggcatgtgccactgcacctggcattctgttttttgtgaaagcccccccaccctcttttgtttttgagatggagttttgcacttgttgcctaggctggagtgcaatggcacaatttcagctcactgcaacttctgcctcccgggctcaagcgattctcctgcctcmgtctcctaagtagctggaattacaggcatgcaccaccacacccggctaattttttgtatttttagtagagacggggtttcgccatgttggtcaggctggtctcaaactcctgacctcaggtgactcaccggcctcagcctccaaatgtgctgggattacaggcgtgagcaccacgccca

SEQ ID NO: 383384 - DNA, 255 bp, Homo sapiens
tagtggaggcaactcactgacccaaccagtgagagcacaggtagtttccactgtgagaaactcaactacagaaccagagtagaattagaaagaaacaaaagtggaggtaacagctgaactrgtgagaagcggaagcacagagaggtgaaggagagaagtggaattgtgagtatggcaccgtcaggagtcaggggccaaaggtccctcttctcaagggggtgctaccattactgactcaaaggggagcccttactg

SEQ ID NO: 383385 - DNA, 494 bp, Homo sapiens
aggacagtcatgcatttaggtctcagaaaggactcaaaaccaagattcaaaagctatcagactcactgtgactcttctctcaaaaaaaaaaaaaaaaaaaaaaaaacctgcatactctcactagttctctccactccatatgatgagaaaaaaaaaatgcaacacagtattattttctagggctgctataacaacacactaaaaacgagttgtcttaaaacaacagaaatctattgtcttacaattctggaggttagaagtccaagctcaaggagttggcagggcacrcccactcagaggactgtcggggagaatcctttctggcctctcccagcttcccatgtttgcgggcaatccttgacagccagtggcttttagatgcgtcactccagtcacatcaccatctcctccctgtatctcttcgcatggtcttccttctgtgtgtgtctgtctctgagtctaaatttcccttttttattatataaggacatcag

SEQ ID NO: 383386 - DNA, 598 bp, Homo sapiens
gcactacacatatttttaaaattctgtcacccacctagagagtaagtggtattagccttkgcttacaaataatgcaactaaagcttatacagattaactaactaaatccctgccacctaactagtaaatggcagagtcaggatttgtaatgccagtatttatgctctttgtagaaccacttatcatgctgaggtatacaataaggcttgtatattatatattaatatataattcatatattaattaggcttagaggcataatatctagtctgaattatctagtctaactgaggagtaagggatatgcttagaagaagcagaagatgggagtagaaaggccagagacaaacagaattcaattccctcaaccagagtgaagtcaaagtaaagaggattaacctatctaaagtacatacaataaacctaaccagagagatggatcagaaagctacagtgagagcccagaagagagtagtagtaaattacaaaggcaggggtcaaaagatctgatcacctttgattaagcacagtacattatttaaaggttgcaagctagggcctttctgagcgggagaagaaagccagagatgtatgaaaa

SEQ ID NO: 383387 - DNA, 614 bp, Homo sapiens
ttatgtggtgactcatctccagtctggctttagcattcgcctttccaccaaaactgcttttatgaaggtccctgatggcctccacgttgcaaaatccaatggtccgtccttcctcagttgacttgtacaatcagcagcatttggtcactctcctccttgaaacactttcttcattgggcctccagggcaccaggctttcctgatttccatycagccttcctggctaagcttcttagtctccattgatgatgacttctaattcctcctaacctctaaatgttagagcagggattctcaaagtatagtctggacatcactgataacttttcagggagtaatgtggtaaaaactattttcacaataattctaaaatatcatttgcttttttatgctcattttctcccgggtgtacagtagagtattccacaggctaaatgatgtatgatgtggcatcacatgcaatgtgaaagcacatatgagaatccagctatcttttattaagtcagatagagatttgtaaaaatgcaaaacaacaacagttctccctgaatttttcttttgttttagaaaacatggttatttttcttttcaaaaatgttatttattgataagat

SEQ ID NO: 383388 - DNA, 614 bp, Homo sapiens
ttatgtggtgactcatctccagtctggctttagcattcgcctttccaccaaaactgcttttatgaaggtccctgatggcctccacgttgcaaaatccaatggtccgtccttcctcagttgacttgtacaatcagcagcatttggtcactctcctccttgaaacactttcttcattgggcctccagggcaccaggctttcctgatttccatccagccttcctggctaagcttcttagtctccattgatgatgacttctaattcctcctaacctctaaatgttagagcagggattctcaaagtatagtctggacatcactgataacttttcagggagtaatgtggtaaaaactattttcacaataattctaaaatatcatttgcttttttatgctcattttctccygggtgtacagtagagtattccacaggctaaatgatgtatgatgtggcatcacatgcaatgtgaaagcacatatgagaatccagctatcttttattaagtcagatagagatttgtaaaaatgcaaaacaacaacagttctccctgaatttttcttttgttttagaaaacatggttatttttcttttcaaaaatgttatttattgataagat

SEQ ID NO: 383389 - DNA, 547 bp, Homo sapiens
ggcctttcctgaccacacctcaaacaccccagtctctctctaccacatcactgcatttttgttctttatagcacttgttctgctctagaattgtcttgtttgcctgctggtttattttctgcctcctccattaggaggagctccataaggacaagaacttgtctcattttttgayttctttgctcccataatttaacacagggcctgaaacataaaatgcactttaaaaatatttgctgaaagaatatgggctatagacgtaggagaaaaatcaagtgtcattaaagccaaggacttggtcactgatttcaattgatggcatttgggttgaaactttagatttcaacttactttaggttgccgaacataatgcccatacccaccaaatttaaggctgtgccaagaatattaaggaaaaaacaaaacaaaaaccctatcaaagatcattttagagattctctacatcatgaggactttgttattatttacctacctgtcataattgtttcattatcatgctggtaaatagcttcacagtttaaaaagc

SEQ ID NO: 383390 - DNA, 531 bp, Homo sapiens
acccaatagaagcaaaaaagtaaaaacctatttttaagtaaataagttaatgttgctaaaacaaccacttcacttaaaacttctgctacatctttttttgcattccttcaagtgggcctagaacaagctttcagatactaccatgtatttaagagtgccaatatttcaaccaaaatacccaaccccaagctctgactgcaaataataatccaaacatgtaattaatagaaaaattagttccttttcatagttctcagagctgtataatcaaattctaggtgattatatgcagaatcttctaataatccaaccattcaaaaatctttaagggctaacaatgtacataatgtagagatctaacactttttcaragagaagacaccctgcccccaaatgaaaaacactcagcttgaaatgacacctgttcagtataatttgaggggtttttttttaactatttttaattcagcaatccttcattcaacatttgtataatttaaatgaaatagtcacagaaaattgtaggccatt

SEQ ID NO: 383391 - DNA, 531 bp, Homo sapiens
acccaatagaagcaaaaaagtaaaaacctatttttaagtaaataagttaatgttgctaaaacaaccacttcacttaaaacttctgctacatctttttttgcattccttcaagtgggcctagaacaagctttcagatactaccatgtatttaagagtgccaatatttcaaccaaaatacccaaccccaagctctgactgcaaataataatccaaacatgtaattaatagaaaaattagttccttttcatagttctcagagctgtataatcaaattctaggtgattatatgcagaatcttctaataatccaaccattcaaaaatctttaagggctaacaatgtacataatgtagagatctaacactttttcagagagaagacaccctgcccccaaatgaaaaacactcagcttgaaatgacacctgttcagtataatttgaggggwttttttttaactatttttaattcagcaatccttcattcaacatttgtataatttaaatgaaatagtcacagaaaattgtaggccatt

SEQ ID NO: 383392 - DNA, 505 bp, Homo sapiens
ccccaaatgtagagagataatcctctgaaaacaaaaccattattaaggaaatggttgagaacagtcatttataataatgagtatgtgacagactagggagttttagaacatccaaattcagtcaagatttggttatgatgagatgataatcagatttagtgatcttctcaattcattagcatttctaaaagaaaaatactgtaaagagagttctcatcagcctaggaattcccctgaagtgaggaaaggtaaggggaagggataagcaggaactgagacagccggagagaagtgggaatggatgacctcacagacctacccaatgctgagcggtagaatcttcccctgagggtaatctgggaatttgtgagggtgtttttgattgtttcaaagatagggaatctaaatttagtcaactttgtttaatatataaacactaagtgtttctggcatgccttaaakgtacactaattttctaagaaggcaactactgaataaactgaag

SEQ ID NO: 383393 - DNA, 277 bp, Homo sapiens
ctaccagttgttcgactttatagtgtcttctgtcacatgaaaggcacaaattgtgtgtctaagttatcagttttatccttgggtttttttttttgtttcctttattttttcttggtttgatatcatgcttacacataaaagcacgagcaggtcctctcccgacacataagttgcttatacggaaacaatgtggtgtagagaaaasaaagtggatcaagcccctaatagacttgagtttaaatgtggtacagccaagttgtggcgcccaacttccata

SEQ ID NO: 383394 - DNA, 558 bp, Homo sapiens
aataagctcacccccaacacacacgtagagagaggaactataagaaaatgtgtaaaatgtgaaggcaagtgggagttcattgcatttgcctaacagcttttccaaaaatgtttgacatgtttccagataaaatagggtaagagagaaaagggaattattatagactaaaaatacttaacaaacatatcaaacaaatgtaatatgtgggccatatgtgaatcctaattrcaataaaccaactattaaaaaccaatatttttgaggcaatctgagaaaactgaacatgcattaggtattagataaatattaggaattaacaagttgttaattctgttgagtgtgataatggtacattgtggttatggaaagaaggctttatctgttaaagatgcataccgaagtattggcaagtaaaacaatatgtcatctgggatttgcacatgattcagaaaagaaatgttttaaaatgagagaaatgaaacaggaatgacagaatgttcactgttgaagctgggtaacagatatattggagttatttacactattagcatctcaact

SEQ ID NO: 383395 - DNA, 558 bp, Homo sapiens
ttagctggcatttgtattgtcacgggagagagttgggataaggacaacataaataggaaagcttgatcaagaattcccttacttcacagttactgcctaaatgcagatattaacacttaaagtcagcggatgtgaaactaaacagcaagctgagcccagccmctctcacagtttgctgctgtctcaggtctcctgacatgacagtgctcacgtcatttgcagccagagaagccccagcctcacccagcaccctcctcaacccagtgcttctcccatccactcatttccccaccaccggggacccaagcagcctacttcctctgaattaccatgcttatcctcactcatattttggctttgtttcactgttcccctggattttatggttgcattcatactgcagtataaccagtataaatcaatacttaatgatttcgtattttttcgcacactttttgtggacaaagcccagtgacaggtctctctcatctctttctttttcagttcacaccagcacctggcctcattgtcacagatatatccacaagggcttaaatt

SEQ ID NO: 383396 - DNA, 550 bp, Homo sapiens
gtaggagggcttactcttagcagaggccaacacttcccaagctaagatgacttaaaaacgacgattgtgcaagtacagttacactgtaccagcccaaatgatctcaggtcctgaccaaaagaccagagcagataagaaaacagcccagtagaacatatgggaaaagagaaaaaaacttaaagaagcccacgtctaggtrgaaatcccagaagtcctaatcaccaaggaacttggcttccctagagtaatgagtcacctctgagtctcctctggaagattagttcacgttatcagtgagtcctgagaacagggatttaaaatgtttatttgcccaaggaaagacctgcatgtatttagaaatacaactactaataaaagtatgtgtgtgtgtgtgtatgtgcactcacatgcaagcgtgatctcatgccagtcactgtgccaagagagagcttaatgtgcattaacgcgtccaatcccgcaactgccctatgagaagggtgccattattttcttctttttatggaggaggaaactgaggcttaaagagatt

SEQ ID NO: 383397 - DNA, 550 bp, Homo sapiens
gtaggagggcttactcttagcagaggccaacacttcccaagctaagatgacttaaaaacgacgattgtgcaagtacagttacactgtaccagcccaaatgatctcaggtcctgaccaaaagaccagagcagataagaaaacagcccagtagaacatatgggaaaagagaaaaaaacttaaagaagcccacgtctaggtagaaatcccagaagtcctaatcaccaaggaacttggcttccctagagtaatgagtcacctctgagtctcctctggaagattagttcacgttatcagtgagtcctgagaacagggatttaaaatgtttatttgcccaaggaaagacctgcatgtatttagaaatacaactactaataaaagtatgtgtgtgtgtgtgtatgtgcactcacatgcaagcrtgatctcatgccagtcactgtgccaagagagagcttaatgtgcattaacgcgtccaatcccgcaactgccctatgagaagggtgccattattttcttctttttatggaggaggaaactgaggcttaaagagatt

SEQ ID NO: 383398 - DNA, 618 bp, Homo sapiens
ggtggtggtgtgtggctgtggagcttgtggcctatgggggygagtgagggctgccatccatccaatcatctgtcaacccaagggactgtgtcatcccagagctggcccttactctaatatacacaaaggcaccaacaggatggaagggctctactgcttccagttctcccataaactgcctcctaatcccctactctactccgattctggacttagaagctgcctccaaccaaagagaggagtgactgcagagcaagagacattgagatgttgactcaagtttggtagacctgagccacatgtggcatccagcacttggaacacgactaatccaagctgacatgtgctgaaagtgcaaaccacacagtggatttcaaagacttagtttaaaaagagttttaaaatgtgaaatatctcattatttttacactttatgtgttgaaatgataatatttagaatatattgagctagagaaaatgcattattaaaattaatttcatacatttcagtttactttttttaaatgtggctatgagataatttaaaattatatatgtatctcacattatattcctttaggctaatgccactctaaagctagaccacatgggctcaag

SEQ ID NO: 383399 - DNA, 507 bp, Homo sapiens
gggtagttgcaatttagcaagggacaaattcttaagccaaagccatgagtttccaggtgtggaatgtaggcaataggagagggtcagagcccttcctagagctcctgagcttgtacatgcctgtcagtcagctatgcttcttataggatgagaagcatatatgccttcttataggatgcttctatgtgtgattttattatttctgagagaggtgacttcttacccaggcacccttaccaatccgtggacactaaatccaccactttggagcacagcagtcttatttcttcaaggaaatatcccctggaagtttcatgcctttcttttaaactttactagataggtgtttttgagagcagagactacttcttytatacatttagctccccaatgtctagcacggagcctggcacatagtaggtgctcagtaaatgttcagtgaattagattgaagtgactctaaccacaccagtataaccagcccttgctattctgtttagatacatg

SEQ ID NO: 383400 - DNA, 591 bp, Homo sapiens
taaccttgactctgttgttgacctaacctgagccctgcatactttctgctaagtcatgaaaaggttaagaatttataaagaaaagacaaacaagcctctaagattggttactgaaatggttactttcctgttaggaattttgcatctcaaacaaaatgagaagagtgggcttatgtatgccaggaggtttataggtctacaacacgtgcaagacacagaagaaaatcygcagaaatgggaccagctctcagtattcagagggccagtgtgattctctcaatagcacaaatatttctggacacatatcctaaaatgaattaaacatataatgacagggtattaagttccttagatacaagcaatttcgagaggaatgggaaaggggaggcatggagaatgtatccataaacacagttctaaaaaatacaaaagatctctttcgtttctaagaggtaattatttaatggaaatattcatgagaacacagcccaaggactgttgtaaaaatataaaacttacattaattatcataaagaatctattcagtgccatgaatgcaaaatggctgttttcatgaacaaagccaaaagc

SEQ ID NO: 383401 - DNA, 465 bp, Homo sapiens
ggttttttttcatctttcttaaatgtttgaatagctcacatttattttaatgtttaatactagaaacattttaggtctttatttataagtttagggatgtttttgtgaccagaaatgaccagaacttaactcttgcttatatcaacgaggctatggtaaaattggtttcattatacctaagttctcctaaagtcacagtttccaagaacatattgataacrttaagtgaggacttactgtatatattgaattcatatagtcaatatatttcagagaatcttgccctcatatatacctatacacaagcatccacttctaatcagttgccttaaggcaggaatgggatatctatggagctgctttcaatagaaaatatttgcaaaataactttgccttggaagtagtagaaagagaaataatcattttcttttatttaatagatattggggtacctattatgaaaca

SEQ ID NO: 383402 - DNA, 465 bp, Homo sapiens
ggttttttttcatctttcttaaatgtttgaatagctcacatttattttaatgtttaatactagaaacattttaggtctttatttataagtttagggatgtttttgtgaccagaaatgaccagaacttaactcttgcttatatcaacgaggctatggtaaaattggtttcattatacctaagttctcctaaagtcacagtttccaagaacatattgataacattaagtgaggacttactgtatatattgaattcatatagtcaatatatttcagagaatcttgccctcatatatacctatacacaagcatccacttctaatcagttgccttaaggcaggaatgggatatctatggagctgctttcaatrgaaaatatttgcaaaataactttgccttggaagtagtagaaagagaaataatcattttcttttatttaatagatattggggtacctattatgaaaca

SEQ ID NO: 383403 - DNA, 512 bp, Homo sapiens
gctggaagccattatccttatcaactaatgcaggaacagaaaaccaaataccgcatgttctcacttgtaagtagttgctgaataatgagaactcatggacacaaagaaggaaacaacagacactgggacctacttgagggtggaggatgggaggaaggagaggggcagaaaaaataactattgggtactagcctttgtagctgggtgataaaataatctgtacaamaaacccccatgacacaagcttatttacattacaaaccttcacatgtaccatcaaacctaaaataaaagttaaatagaaaatgtgatatatatacacaatggaatactgttcagccacaaaaaaaatgtaattctgtcatttgcagcaacacagaggacatgatgttaaataaaataagagaagcacagaatgataaataccacatgttctcatgcatgagagagctaagaaaaagtagagtacaatcgtgggtattagaggcggggaagggtggcggggcagggag

SEQ ID NO: 383404 - DNA, 471 bp, Homo sapiens
ggaatgagttcaggcgttctgcagcatcacaggggggatgtggttaaccagaatttattgtacattttcaaaaagctagaagagaggatttttaatgttcacaacacaaagaaatgatccaagtttgaggtgatggatgtgctaattcccctgaattattatacatggtatacacatatggaaatactactctgcatcccataaatatgtacaattattacgtgtcaactaaaaattaaagaaaaaagtggaaacaactcaaatgtctatcaactgatgaaaggatagataaaatgtgttatatccacactattattgggtaatatgataaaggactgatgcatgctactatatggatgaaatttgaaaacattatcytaagcaaaagacagacccaaaagaccacagctgtatgattccatctatataaaaagtccacaataggcaaatatatagaaacagaaagtagat

SEQ ID NO: 383405 - DNA, 567 bp, Homo sapiens
gaagccaggcacaagaataggctatctgccgtgggtcacacactaagtgtgagggaggtctggagttagaacatgttatgtccttggctcctcatttatttttcaggctgaaaggcaagatgttcatattaatcatctcattccaaaatcacttgaggaagcatgcaattttctgaaggagaggggaaatcatatcctgaaagttacaagtataaaggaatacatcaggagttttgatttcactgtacttacgttataattcactataatttaagttttaaaaactattcacatatctcattactgcagtaccatgaatcacaagctctatkgcctgagactctatttgcctagaattagtctcatgcttttataggagagatacaagctaagaaataaaattaaatgaggaagataaacattggttccatgttaaaatgtatttgatggcatggaatttgcaagacatcaattttcagcctagcagattacagaataggatccattaatcctagtcaacattgaacacttcagaggaacaagaacatgacacctgaaggcgagtaa

SEQ ID NO: 383406 - DNA, 567 bp, Homo sapiens
gaagccaggcacaagaataggctatctgccgtgggtcacacactaagtgtgagggaggtctggagttagaacatgttatgtccttggctcctcatttatttttcaggctgaaaggcaagatgttcatattaatcatctcattccaaaatcacttgaggaagcatgcaattttctgaaggagaggggaaatcatatcctgaaagttacaagtataaaggaatacatcaggagttttgatttcactgtacttacgttataattcactataatttaagttttaaaaactattcacatatctcattactgcagtaccatgaatcacaagctctatggsctgagactctatttgcctagaattagtctcatgcttttataggagagatacaagctaagaaataaaattaaatgaggaagataaacattggttccatgttaaaatgtatttgatggcatggaatttgcaagacatcaattttcagcctagcagattacagaataggatccattaatcctagtcaacattgaacacttcagaggaacaagaacatgacacctgaaggcgagtaa

SEQ ID NO: 383407 - DNA, 434 bp, Homo sapiens
cgtgacagctctgaagagagcagtggttctcccagcatggtgttcaagctccaataatggacagactgcctcctcaagtgggtccctgaaccccatgtagcytgactgggagacacctcccagtagaggctgacagacacctcatacaggcaggtgccctcctgggacgaagcttccagagcaaggatcaggcagcaatatttgctgttctgcagcctccgctggtgatacccaggcaagcagggtctggagtggacctccggcaaactccaacagacccacagctgaggggcctgtctgttagaaggaaaactaacagaaaggaatagcatcaacatcaacaaaaaggacatccacaccaaaaccccatccatagatcatcaacatcaaagaccaaaggtagataaaaccacaaagatggagagaaaccagag

SEQ ID NO: 383408 - DNA, 426 bp, Homo sapiens
ttgaattcttcggccagaattcaataggtaataaaaaagggagatcccattgttcaagaatatttactatatatacagtttgagtgcttcaggagaattcaataggcaataaaaatgaaaaatctcattgttccaagataacacaactataagaagctattgatcctacctaggtgttatgaatgtaaatcatgaaatttttttttggctaattctatattttcacaaaaatrttcatgattatgaaaaacaatatattttcatcattataaaatatatctaatgactaaatatgaatgcaaaataccagccaacattcccagaaaaagaactaaatactgaatcattaatcttgtactaagacttctctgtgatatttcagttttctgggaaagacttttactaatatactctcacagtaaaata

SEQ ID NO: 383409 - DNA, 579 bp, Homo sapiens
cattagtaatcaagaaataccacttcatacccactaggctgtctaaaatgaaaaagacagaaaataacaaatgctgggaaagttgtggagaaattgaaactcttacatgtagctggtgaacttttagaatggtgcagccattttggaaagcattcttggtagyacttcagaatgttaaatatagagttaccacatgacctagcaattccactcttaagactatacccaaagtaaatggaaatttatatgcatccaaatccttggacatgaaagatcacagtggcatgattcataatgagcaaaagatggaagaaattaaaagtgctcatcaactgatgcaatgagtaaataaaatatagtatatccatacaattcaataatatttggcaatacaaagaaataaaatagtgatgcatgttacaataggattgaacctggaaaagtattatgctagaaaaaaatttaaaaagaaaattagaaatgaaggagaaataaaaaaaaacacttaaaatagtgttaattctaggtgaaagaggcaagtcacaaaacaccacatatagtatgatttcatttatatga

SEQ ID NO: 383410 - DNA, 548 bp, Homo sapiens
ttcctccctctacaacttttaggattaagggttctcttttaaaagggaagaggaaaatatgttaatggtgtttgaaccagagtgagtccatcttgaatagcrgctgaataaaataaggctgagaactaccagcagcattcccagatagttaggcattctacaacacaggatgagacaggaggttggcacaagatataggtcataaagaccttgctgataaaacacgttgcagaaaagaagctggctaaaacccagcaaaagcaaggtggcgatgacagtgacctctggttgtcctcactgctgcactcccaccagcgccatgacagtttgcaaatgcgatgacaaggtcaggaagttaccctatatggtctaaaagggggaggaaccctcatttctgggaattgcccatgcttttccagaaaattcataaataatccatcccttatttagcatataatcaagaaataaccataaaaatgggcaaccagcagccccgagggaatagccattctttattcctttactttcttaaaaaacttgctttcact

SEQ ID NO: 383411 - DNA, 594 bp, Homo sapiens
ttatatccacaatcctgtctcctaggctatagtaatatcctcctaattacactccttgtaattgctcttgcatgacttctagtccattttttatacatcaaggtaatcattttataaagggaacatgatcatgtgatcatgcttaaagcatattacaacccttaaggaaaaagaaaacccaaatctgtttattagcccctcctcatttcttggctaacagttactcacctttcaggtctcacatttcctctgggaaaccyttcctctctggcagttaaattcctaccaggcattcccaaagcaggctgctttctccattgaaggtggttcttgttaacactgatgattacttattcaatgtttgccttcctgaccagactgtaagctccaagaaggcaggggcttctttagtcttgtcactgctctgttttcagcccttccggcaattcttggtgctcaataaatatttgttgatttgattcattgaattatgtatatacttacagtttatagaaatctgagaattcagaaattctcagatttctgaaacatattctgaaacaataattcagaaaatataaaactggagaattc

SEQ ID NO: 383412 - DNA, 621 bp, Homo sapiens
atttgcttaccccgaattaacatggtattcaaagtattttatctgggattttagctgtggcagcacttacactgcaaagttaactttcattgctcatcctgcaaagggaaaccagtgattttgataactgttttgacagattctcttttttccttctcctcttcttagtcaatggctcatattttgaaagcaagaaaggtgttgacagagccagaagttcgatactacctcaggcagatgtgtctggactgaaataccttcatgaacaagaaatcttgcacagagatctcaaactaggtaagtcattgacgccaaaagctgagtttgtgttagagttcttttttctctctctgtttttttttacatattaatgttcttaattgggatctggtgtctgcaatcttgcttttgaatgggcgactttcatataacaattggctgcctggctccaaagtggatgtgtgtgtacttggttagaacgcattttcaaagggattcacatttgtttgtttatyatctagggaacttttttattaatgaagccatggaactaaaagttggggacttcggtctggcagccaggctagaacccttggaacacagaaggaggtaagagtcaga

SEQ ID NO: 383413 - DNA, 621 bp, Homo sapiens
atttgcttaccccgaattaacatggtattcaaagtattttatctgggattttagctgtggcagcacttacactgcaaagttaactttcattgctcatcctgcaaagggaaaccagtgattttgataactgttttgacagattctcttttttccttctcctcttcttagtcaatggctcatattttgaaagcaagaaaggtgttgacagagccagaagttcgatactacctcaggcagatgtgtctggactgaaataccttcatgaacaagaaatcttgcacagagatctcaaactaggtaagtcattgacgccaaaagctgagtttgtgttagagttcttttttctctctctgtttttttttacatattaatgttcttaattgggatctggtgtctgcaatcttgcttttgaatgggcgactttcatataacaattggctgcctggctccaaagtggatgtgtgtgtacttggttagaacgcattttcaaagggattcacatttgtttgtttatcrtctagggaacttttttattaatgaagccatggaactaaaagttggggacttcggtctggcagccaggctagaacccttggaacacagaaggaggtaagagtcaga

SEQ ID NO: 383414 - DNA, 466 bp, Homo sapiens
cttttgtatgtcttttcatcgaatggtatttcaaagactactgctatttgcatgcaagtaactgtatgcaattattgtcagattgcaaacgtggttacctgggtttggcacaagaaggtgcagatacagtgtgatctaccatgttaggaaatgtcacattttactcttctgatgtttagtttttaattacttgaagaagtttaaacaattaatttgttgataaaaataaggctgcttaggtactgccattttgactaagaaaacaaactatctgccaactagaaactcaaagccccacccaagagtaatcatcactttgtagcttgacacagtgttttactggaaagatgattgtctacttcagggaatagyctctttggaatgtgaattccatatggttttgtgaatagaagttcaaccatttcagcagcacatgattcagaagaagtcaggtaagcctattaaa

SEQ ID NO: 383415 - DNA, 585 bp, Homo sapiens
ccttgttaataaactttttatttattacagcccaagagcagtatttattatcaaatgtctttttttttatgttgaccattttaaaccgttggcaataaagagtatgaaaacgcagaaataatggtctcctgtctttagtagaactcttcaccacatcrttacattttttgataagatcgtgccaagcaggccaagaagccactgagtatagaagcatactagagagttagatctttaattttttctaactacagtttctaggaagtctaatacctgaagtacaatcataaactttcagagtagatctagcttaagaacaccattcttcttacaaccaaaatataagcctcctacaaaatccaaacccaatttctctctgtagtatttcttcaaaacttgtttagcttggaggtgaagccagattaaatagatctctgttattcagtgtcaataggtacaggaagtttatcttaatatgggcaaaactctgaattagaatacatgcaccacctaaacatattactcagcataaacctgcctaaacacttccagtgccactggcagtactagcacataattccagta

SEQ ID NO: 383416 - DNA, 569 bp, Homo sapiens
aaactccaaatatcctcaatatagattagtcatagggaagggccagtgactgacaataggcacaagagaagcactaggctttttggttttaaataaataatatactctgagttgaagcaattaaatcttcctccaaatacaactttctacctagatattaaagaaacagaataacagttgagtttgtagaatctgatatatttctctcagattttttctccttcagaggtacacacacatatgcttattttaagtcaatcatcctacaattgctcaagttaaaaccatatagcagaaaacatttggaatttcaattagatatgtcaagattgaagcaactgggtcaattgcttgctgaacaatcatgaacatgacactgatcctattttttatrttataaaacaaatataataataaaaagtgtcttagaattcattagatagaacaatataatattgagagtatttgaccattttgacctacaacaaaaaccatttcttattcgaaaatatagcaagaggagaaattagaaagtaagcttcctcccctctctaattattttaatatta

SEQ ID NO: 383417 - DNA, 573 bp, Homo sapiens
ttaaaataattaaaaatgtaaacattttaatattaaaacactcttaaattatgtatatttaaatttaagatgatatttagaaagaattcctaatatggaagagtgcttgtaaaacaaatttcttcttttggcatttcagtgagtcttaaggacaatttttatcatacmactttttactactgtttgaaagccagtactttccccttatctatcattcttagcttcagtctctacccctatggtttatggcagttaaaatctttggatgaccttgccaaaggactgcaggtttgcttcagggtttaggagaggctggagactgttttgctgttttgttgtccaaagagccattttgatcagaacattttttattagaactgtgggggtagactgaaattaaggtgaacgagcctgacctttttattaacttcctcagaaacaaggcaagaggtatccctatgggtgtcacagcagtacgaagtacaagtccctatggttgctgacattagagtccttctgtgcagaccaggggtcggtacactatggcctgataaaacaaatccaagcccatgt

SEQ ID NO: 383418 - DNA, 592 bp, Homo sapiens
ctagtatcccagctcttgatcactgtactaaagtgactcccatttttcaatgtctgataatcctcattatgagaaatgtttttttaaatctttctccaaccttatgctatttaggctgtttccctgtgaacatattttcatctttttctctctctggtttaataattggattcagtcttttagtcagtgcacatgtactaagccctaccctgtgcacaggcttttaataggcacaatactgttccatttccatatgaaccaggagcaagcttgcactcatgccacacatttatatatttggcaagtatagtaaaaatcgtattgtatcactggtatggacttacttccagtatgtagtttttctcctttttttaacttcyatcttttaaaaactcctatattatagttccttattctttttccccagctttgccccacccccacccctgagttattttattttaactcctgggtgtttactgaatgcttacctcatgttatggactgttatttttcaggtagaataattataacaacttcaattagaagtcctttttccaacttttctcctaataagtctctaaatcttaaa

SEQ ID NO: 383419 - DNA, 549 bp, Homo sapiens
tacattattatcatatccaccatgttgattgctgcagacagtttgatagttgcatctgatgggggcagggmgttgtgttactgacatctcatgggtagaggtgaaggatgctgctgagtattctccaatgcacaggtacaaaaaaaagttattcaacccaaaatgtcaatcatgctgatgttgagaaatcctaatttagaattcctgttacaataagtaaggtgagttcatttcaaatgttttaggaagaaaataagtacctattcccctaaaaactgtatttttttccaattttgtaatgatattataacttttttaagagaaattctcaattactagagcaggtctacttaggttaaagctttaaatgtagaatacaatcacaataaacccaagttgcaattttttttaaatcagcattttagaatagcatgcttatttcaattccagatatatatcttgaaactttgattacagcatctaattttttttccaagaaaaagaaatgttagattccaagaggaatacatctgaaatcaacacatttct

SEQ ID NO: 383420 - DNA, 557 bp, Homo sapiens
tggcatgtgtctgctgaagattaatttttaaaaattctttagtttacttagatattatgtatgaatagagtcatcatataattcattattcaatcagggaagcttttgtctgagaaaatgccaaaatagaatagacacctggaaacagacacattctgggactgcccctagaaaattgagactgtasatttccccatgtatgagcaaatgggctgggagacatacgtcagtcattcagatatgcattttaaatgggaggggtggcagaggatcacatattctcctccacaaaggcataaattatttttttaaaaaacaaaatctatgcctatgaattgttctagttgtttggtcaaagactcaggacaacagaagaatgggacatgtaggatgcccttattttcttctgcttacttaaccaaaccctgggccatcactgaaactctatgaaggatctttactggaatttgagatcagttagctcaaactgagatgtatgttgaaagatgaaatatggagtagaagaagtatattgtcattcctgcccctaaagaata

SEQ ID NO: 383421 - DNA, 616 bp, Homo sapiens
catgtgaaaatgctatcattattttcattttggagatgagaaaaattgaggtacagattgtaaatcccagtgctatctgatattgcttccattaagcactccttatttttattatttaatcacatataatcccttctgaaacaggttctgactttaggaatgcactctctttaggacagtcatttggtagtatcttaacccttagtgtcttttatgaataacaccaacattaagaagattgccaatatcgtcttmtatgggggatatgaaaaccccaccataatttcccactgtaaagttcttgtgaacagacatgactcttgggattgggcattgtttgttgctgtcattgacctgcctgttcatctgttatgatacactttatgtaggctatcacaacattgtccataccagtagaacttgtctgtatgctcatgggattggcctccaactacttctcttcagaactggaagttgaaccagctcttttccagctagaactccaaccagtcctgcatgcaatgtgatgcattagtatctgagatgagtctgttaaattccactgtgacctttcaaaggctataatttggaaaagcgtaccgagtcttttgaatat

SEQ ID NO: 383422 - DNA, 616 bp, Homo sapiens
catgtgaaaatgctatcattattttcattttggagatgagaaaaattgaggtacagattgtaaatcccagtgctatctgatattgcttccattaagcactccttatttttattatttaatcacatataatcccttctgaaacaggttctgactttaggaatgcactctctttaggacagtcatttggtagtatcttaacccttagtgtcttttatgaataacaccaacattaagaagattgccaatatcgtcttctatgggggatatgaaaaccccaccataatttcccactgtaaagttcttgtgaacagacatgactcttgggattgggcattgtttgttgctgtcattgacctgcctgttcatctgttatgatacacyttatgtaggctatcacaacattgtccataccagtagaacttgtctgtatgctcatgggattggcctccaactacttctcttcagaactggaagttgaaccagctcttttccagctagaactccaaccagtcctgcatgcaatgtgatgcattagtatctgagatgagtctgttaaattccactgtgacctttcaaaggctataatttggaaaagcgtaccgagtcttttgaatat

SEQ ID NO: 383423 - DNA, 614 bp, Homo sapiens
tttaatttagggaaaggaacaaataaaggaagggaggaaacagaaaaaatatagtcagagagtcctaaactacaaaagcactctcattcagatggcagcaataaagtaatgttctgggagctaataaaacacttctggccttggtcatttttaatctgccataaatctctaaagatcaactagaaaggwtttttcccttcaaattcctatagacttagatatcacagtttaccaaatcttggaagtgtgaggtctgtgaaggccccaaaggtgtaggcaaggccaaaggaagcaaagtcaggtcttggattctaattgccacatggtagttccacagtttttaattggctgatcgctagatggctgtcagtatcttcatctgtaaaaatggaagtggcaaatgcattctatgggtgtgaagaggcgatacaatttgttgcagcataaacaagaattatgtaaataatgcatttgaataggtgcacatccagacaatgaaaggcagctctggcgagtcctgtaaaaatgtcctgattgcttttccaactgtgagaacttttagcatctaaagttcaggaggataatgaactagactgctcacagctgggatgtgt

SEQ ID NO: 383424 - DNA, 614 bp, Homo sapiens
tttaatttagggaaaggaacaaataaaggaagggaggaaacagaaaaaatatagtcagagagtcctaaactacaaaagcactctcattcagatggcagcaataaagtaatgttctgggagctaataaaacacttctggccttggtcatttttaatctgccataaatctctaaagatcaactagaaaggatttttcccttcaaattcctatagacttagatatcacagtttaccaaatcttggaagtgtgaggtctgtgaaggccccaaaggtgtaggcaaggccaaaggaagsaaagtcaggtcttggattctaattgccacatggtagttccacagtttttaattggctgatcgctagatggctgtcagtatcttcatctgtaaaaatggaagtggcaaatgcattctatgggtgtgaagaggcgatacaatttgttgcagcataaacaagaattatgtaaataatgcatttgaataggtgcacatccagacaatgaaaggcagctctggcgagtcctgtaaaaatgtcctgattgcttttccaactgtgagaacttttagcatctaaagttcaggaggataatgaactagactgctcacagctgggatgtgt

SEQ ID NO: 383425 - DNA, 614 bp, Homo sapiens
tttaatttagggaaaggaacaaataaaggaagggaggaaacagaaaaaatatagtcagagagtcctaaactacaaaagcactctcattcagatggcagcaataaagtaatgttctgggagctaataaaacacttctggccttggtcatttttaatctgccataaatctctaaagatcaactagaaaggatttttcccttcaaattcctatagacttagatatcacagtttaccaaatcttggaagtgtgaggtctgtgaaggccccaaaggtgtaggcaaggccaaaggaagcaaagtcaggtcttggattctaattgccacatggtagttccacagtttttaattggctgatcgctagatggctgtcrgtatcttcatctgtaaaaatggaagtggcaaatgcattctatgggtgtgaagaggcgatacaatttgttgcagcataaacaagaattatgtaaataatgcatttgaataggtgcacatccagacaatgaaaggcagctctggcgagtcctgtaaaaatgtcctgattgcttttccaactgtgagaacttttagcatctaaagttcaggaggataatgaactagactgctcacagctgggatgtgt

SEQ ID NO: 383426 - DNA, 614 bp, Homo sapiens
tttaatttagggaaaggaacaaataaaggaagggaggaaacagaaaaaatatagtcagagagtcctaaactacaaaagcactctcattcagatggcagcaataaagtaatgttctgggagctaataaaacacttctggccttggtcatttttaatctgccataaatctctaaagatcaactagaaaggatttttcccttcaaattcctatagacttagatatcacagtttaccaaatcttggaagtgtgaggtctgtgaaggccccaaaggtgtaggcaaggccaaaggaagcaaagtcaggtcttggattctaattgccacatggtagttccacagtttttaattggctgatcgctagatggctgtcagtatcttcatctgtaaaaatggaagtggcaaatgcattctatgggtgtgaagaggcratacaatttgttgcagcataaacaagaattatgtaaataatgcatttgaataggtgcacatccagacaatgaaaggcagctctggcgagtcctgtaaaaatgtcctgattgcttttccaactgtgagaacttttagcatctaaagttcaggaggataatgaactagactgctcacagctgggatgtgt

SEQ ID NO: 383427 - DNA, 661 bp, Homo sapiens
gcagcccaaatgccattctaaatttgtaaaaggctcaggtatacatcaggtggaggtgatcctgcaaaactcagmacataggctctgtaaacatgggatgggggaagctccagatgtaactaataaaaattggctgtgcagaatccctcaaggatgatgagaacctcattgatgtaatcatttgggagagagacagggtaatgatcctgagcagatttatccattctcttgaataatcagctcacaaggctgttatattcttcataatatccctagacccatgcatcactcctttttatctttcataaactgttagttgttactgtgttttaatacactgttttaaaaccgattcggctaccttatagagtcagatactaccaaccagtgtcacagacaagcttcttaaacattaatgtgtgcgtttacttaaaattattcagagttccataaagcgggatgaaaacaaccagagtatgtgtgaagagttgttttggtaacttgcttactctgtcactatgacaaattttgccatttggccattttaggggcttttattctctgtgcacaattaaccagccaactaccttactgtattttcttgatttatggggatattttgtcaatattttaataattttgaaatcagggctgggcgtgg

SEQ ID NO: 383428 - DNA, 661 bp, Homo sapiens
gcagcccaaatgccattctaaatttgtaaaaggctcaggtatacatcaggtggaggtgatcctgcaaaactcagaacataggctctgtaaacatgggatgggggaagctccagatgtaactaataaaaattggctgtgcagaatccctcaaggatgatgagaacctcattgatgtaatcatttgggagagagacagggtaatgatcctgagcagatttatccattctcttgawtaatcagctcacaaggctgttatattcttcataatatccctagacccatgcatcactcctttttatctttcataaactgttagttgttactgtgttttaatacactgttttaaaaccgattcggctaccttatagagtcagatactaccaaccagtgtcacagacaagcttcttaaacattaatgtgtgcgtttacttaaaattattcagagttccataaagcgggatgaaaacaaccagagtatgtgtgaagagttgttttggtaacttgcttactctgtcactatgacaaattttgccatttggccattttaggggcttttattctctgtgcacaattaaccagccaactaccttactgtattttcttgatttatggggatattttgtcaatattttaataattttgaaatcagggctgggcgtgg

SEQ ID NO: 383429 - DNA, 568 bp, Homo sapiens
gctatgcttcctagcctgtcagaatagccamcctgcaggttgcaacactttatgagaaatcaaggtctcctttcgaaatttataaactttgtcattcttcagctgatactttcacctgatcttttcatgctttgtcttcttttgcattgcagaatcccatcatagactcaaaagtgttctttttttttttcttcttcttcttctggttactcattcttgaataaggacaagcttatctgggcttagtagatgcccccaaataatctatgctgtttcttatggtttcttcctggttttcctgggctctgacaaggccttccttttcaaaattagtttggaatcctgaatgaaaattaagaaaaaaagtctttgtattaccaattcggaacttgggtgtctatagttggaggggaaatgagagtgaggatgtggtatagagtctcaggagggcaatttttgctctgcatgttttttaaaaaatcttggttaagacccctgcaccagggaccaactttctgtctctggctttcagtttggcccaatctgtactccagatacaaagtgtggc

SEQ ID NO: 383430 - DNA, 559 bp, Homo sapiens
ttgtcagggattgcaagcttccttctttaaaaaattccttcattcttctagcaacatgttctaagaagttaatcacaagagttctatgtgatatttaagagatttatttaattttagagctgaaaggctgttatataagtaatctaggttggaagcaagtactatgattgatttgctctcctcttatagatgagatatatgcagtctggacagtaaggtcaggtatagtgcttgtgaatactcaatactcaagctcaagcatccagatgctctctctggctcttcttgcctcacaacctttgactaagatcaaatatgtacacattttctgtggatcaaataagaaattatccattttgtcaatatcttatattcttgattgtatttgaaagattaaaataaaactatagtaaattcaaaatgatcattatatacctatgtctaataaaaatgatcaaataaaaaaggatagaatagtaagacctaaattgtctgattatgtttatgctttgctctctatggtgwttgcctgtggatcacacatcaccaaacatagatt

SEQ ID NO: 383431 - DNA, 562 bp, Homo sapiens
actatgtcaataatactgactctttacatccatgaatatgatatagctcttcctttacataggtatttgtttacattttttaaagcttaacattattcttaataagctcttgcatgttttattagatgtatttattcctaggtatataataaattttgggggcccagggcggtggctcatgtctrtaatccaagcactttgggaagccaaagcaggagagtcagggatttgaggtcagggatttgagaccagcttgggcaacatattgagaacctcatctctacaaaataaaaataaaaaattagctgggtgtgatggcgcatgcctgtagtcccacctgctcagcgaggctgagccaggaggatcttttgagcccgcgagtttagggcttcattgagcaatgattgcaccactgcactccagcctgggcaaccaagagagaggctatctatgaaaaaaatcaaatcaaataaaataatatttgtcactattgtagcaatcctttttatttattttctgtcactggtatataggaattcaattgtatatttatctatgtcta

SEQ ID NO: 383432 - DNA, 562 bp, Homo sapiens
actatgtcaataatactgactctttacatccatgaatatgatatagctcttcctttacataggtatttgtttacattttttaaagcttaacattattcttaataagctcttgcatgttttattagatgtatttattcctaggtatataataaattttgggggcccagggcggtggctcatgtctgtaatccaagcactttgggaagccaaagcaggagagtcagggatttgaggtcagggatttgagaccagcttgggcaacatattgagaacctcatctctacaaaataaaaataaaaaattagctgggtgtgatggcgcatgcctgtagtcccacctgctcagcgaggctgagccaggaggatcttttgagccygcgagtttagggcttcattgagcaatgattgcaccactgcactccagcctgggcaaccaagagagaggctatctatgaaaaaaatcaaatcaaataaaataatatttgtcactattgtagcaatcctttttatttattttctgtcactggtatataggaattcaattgtatatttatctatgtcta

SEQ ID NO: 383433 - DNA, 648 bp, Homo sapiens
attgagcaatgattgcaccactgcactccagcctgggcaaccaagagagaggctatctatgaaaaaaatcaaatcaaataaaataatatttgtcactattgtagcaatcctttttatttattttctgtcactggtatataggaattcaattgtatatttatctatgtctatacatctagtatttttagttctagtaatttcttcataggttcttttagattattccacaaaccgattgtctgtaaataatatctttccatggtaaataatgagggttgcctctataaccatttttgtgatccttatgatagctyctaattttgttcactaaagccagatattgaactaaattttctaaattcctttgtaagtaaaggagtcaagagtacaaagttctgattaatttgtcgtaaacagaaatcttctggtggtctgggggtgttttgagagggacaaatgcattgggcatctttccctttgccttttgccctttttttgttttctgcctggaatgtgtatgtgatgcctaggagtgcaacagccatcttgtgagcatgaagatgaaagccccacactgaggatgacagcatgggaagataagacgtgcctagtgacattccaaacctctgtaaaggcctgggactacct

SEQ ID NO: 383434 - DNA, 648 bp, Homo sapiens
attgagcaatgattgcaccactgcactccagcctgggcaaccaagagagaggctatctatgaaaaaaatcaaatcaaataaaataatatttgtcactattgtagcaatcctttttatttattttctgtcactggtatataggaattcaattgtatatttatctatgtctatacatctagtatttttagttctagtaatttcttcataggttcttttagattattccacaaaccgattgtctgtaaataatatctttccatggtaaataatgagggttgcctctataaccatttttgtgatccttatgatagcttctaattttgttcactaaagccagatattgaactaaattttctaaattcctttgtaagtaaaggagtcaagagtacaaagttctgattaatttgtcgtaaacagaaatcttctggtggtctgggggtgttttgagagggacaratgcattgggcatctttccctttgccttttgccctttttttgttttctgcctggaatgtgtatgtgatgcctaggagtgcaacagccatcttgtgagcatgaagatgaaagccccacactgaggatgacagcatgggaagataagacgtgcctagtgacattccaaacctctgtaaaggcctgggactacct

SEQ ID NO: 383435 - DNA, 460 bp, Homo sapiens
tttctttttttgaaacggagctttgctcttgttgcccaggctggagtgcaatggcgctatctcagctcaccgaaacctctgcctcccaggttccagtgattctcctgcctcagcctcctgagtagccaggattacaggcatgctgcatcattcctggctaattttgtatttttagtagcgataagtttctgcatgttggtcaggctggtctcaaactcctgacctcagatgatctgcccgcctcagcctcccaaagtgctgggattacaggcgtgagccactgcacccagccgctttaaaatttttataactctttgggccacagagtgaaaaacttttagttggaaggtagtgacacattctattaaaactctagytactttttggttaatcccataaaccgattagtgttaataaatttgttagctactaaatgcattacctttccgaggtaacataa

SEQ ID NO: 383436 - DNA, 556 bp, Homo sapiens
catacacaacatttgttcatttttaccgtcactaatgttactcagttcaagtatctgaaaaagggcatgggttaaaagaaatggatactaactgacacacaagaaattgctgggaacttaaatcacaattaagtaaagtggttgctatcaccaattaataggagaggaagatttacttagatgaaagatccagtccatattacactacagaacaataaactacytcctaagccctttactacccaaaccgtataactgtagaagaaaaagcaggaaaagaaaacctagacataattgctgtgattaaaaaggaactgaaaggagacaataaatatgtattttgcgaggccaaagattgggaagtaggaaaatatagaattcaagacataaaacataatccctacaaatgacaatgatccaataattctattttgaatatatacagcatttcttttataaacttgaagaataattatatccattacatcaaaaaaattctatttgaggaaagtgccagtcattttccctccattttattttccgttagaaaaactaa

SEQ ID NO: 383437 - DNA, 588 bp, Homo sapiens
tgttagtagaagtgcaaactcatagcttcatgagcaaagatgaggaaatctattgctgtctgaagagtaaaacatgtctacagaaagaaattcatgttgagctgagtttgggatacaacacaaaactttattaccttggaactttctggaaaaattaagtaaaagatacacatctttttttttttattttgacgcagtctcgctctgttgcccagactgsagtgcagtggcaccatcttggctcactgcagcctccgcctcctgggttcaagagatcctcctgcctcagcctaagatatacatcttttgatatgaaagataatatgagcatcggaactatggactcccatcaaggcatcatgagcaaagaaggagtatgataataaattctggttagctggagatcagagggagttttgaggtttggagaacactaaaagtgggaaagagattcaagaagaagatgtgggaagctggcaaaataaatgttaatgcaccttttttcttagtctttttgtagaagatgtacatgaaagtgaatataggcattttaaatacagggaatttgataaaggaattggttactaa

SEQ ID NO: 383438 - DNA, 588 bp, Homo sapiens
tgttagtagaagtgcaaactcatagcttcatgagcaaagatgaggaaatctattgctgtctgaagagtaaaacatgtctacagaaagaaattcatgttgagctgagtttgggatacaacacaaaactttattaccttggaactttctggaaaaattaagtaaaagatacacatctttttttttttattttgacgcagtctcgctctgttgcccagactggagtgcagtggcaccatcttggctcactgcagcctccgcctcctgggttcaagagatcctcctgcctcagcctaagatatacatcttttgatatgaaagataatatgagcatcggaactatggactcccatcaaggcatcatgagcaaagaaggagtatgataataaattctggttagctggagatcagagggagttttgaggtttggagaacactaaaagtgggaaagagattcaagaagaagatgtgggaagctggcaaaataaatgttaatgcaccttttttcttastctttttgtagaagatgtacatgaaagtgaatataggcattttaaatacagggaatttgataaaggaattggttactaa

SEQ ID NO: 383439 - DNA, 600 bp, Homo sapiens
tgctggtttgtagctcaagtgggcatcacagtcctaccaatatgtgatgtcacccccggtggcccagctgtaaaattcctctcttgtgctctttctctttatttctcagactggctgacacttatggaaaatagaaagaacctacattgaaatattgggggcgtgttcacccaataatatacttatatggttcaaaattcaaaaggtacaatagaatttatactgaagtttttcttttagccctgttccatattcccactttcagctcttgacaccagaaagaacataactcacacattaggggcaaatcacattagtagaagatgaagctcatagattgttactcttttaataaaaatatgaagagtttacattattacatgcacttgtgaactgtcacacaatttaatggactatgatatttcattttctgcctcatgtggataattaatgaaaaaaaatctctagagcactaagatgttacattgtgatgtggcataaacattatttctttagggagcaatgatcaattttttaaattttattttcccaaaattttgcacmttttaattatttaaaatttatttagaagatttattt

SEQ ID NO: 383440 - DNA, 583 bp, Homo sapiens
gactacaggcatgtgccaccatgcccagctagttttgtttgttttttagtggagatgaggttgtgccattttgcccaggctaatctcagactcccagcctcaagcgatctgcctcagcctttcaaaatgctgtgattacaggtgtggacactatagcctctggtccattttaagaagacttctttgtagttcccttgtgagggaataagccattttacttcttgttaaaccttactctkattgcaaaggtctttatagttccagctgtattgtggtggggaagtggggaaaggggatgatttattattataataattccttactttggatgaacactgagctttgacttctgtttcccaaatactacacaaggctttgaaaacctcagctggaattcttctggtacagcaaataccctccaggcagcagcagtttctttcagtcattttcctctcttggttctttaatttcacctacaaatggcctgattttccttactgtttttgatgcttttcaaagattttaaaaatattttattcagtatttttagttttttttccgcaggaaaaatgagtccgaatag

SEQ ID NO: 383441 - DNA, 583 bp, Homo sapiens
gactacaggcatgtgccaccatgcccagctagttttgtttgttttttagtggagatgaggttgtgccattttgcccaggctaatctcagactcccagcctcaagcgatctgcctcagcctttcaaaatgctgtgattacaggtgtggacactatagcctctggtccattttaagaagacttctttgtagttcccttgtgagggaataagccattttacttcttgttaaaccttactcttatkgcaaaggtctttatagttccagctgtattgtggtggggaagtggggaaaggggatgatttattattataataattccttactttggatgaacactgagctttgacttctgtttcccaaatactacacaaggctttgaaaacctcagctggaattcttctggtacagcaaataccctccaggcagcagcagtttctttcagtcattttcctctcttggttctttaatttcacctacaaatggcctgattttccttactgtttttgatgcttttcaaagattttaaaaatattttattcagtatttttagttttttttccgcaggaaaaatgagtccgaatag

SEQ ID NO: 383442 - DNA, 583 bp, Homo sapiens
gactacaggcatgtgccaccatgcccagctagttttgtttgttttttagtggagatgaggttgtgccattttgcccaggctaatctcagactcccagcctcaagcgatctgcctcagcctttcaaaatgctgtgattacaggtgtggacactatagcctctggtccattttaagaagacttctttgtagttcccttgtgagggaataagccattttacttcttgttaaaccttactcttattgcaaaggtctttatagttccagctgtattgtggtggggaagtggggaaaggggatgatttattattataataattccttactttggatgaacactgagctttgacttctgtttcccaaatactacacaaggctttgaaaacctcagctggaattcttctggtacagcaaataccctccaggcagcagcagtttcyttcagtcattttcctctcttggttctttaatttcacctacaaatggcctgattttccttactgtttttgatgcttttcaaagattttaaaaatattttattcagtatttttagttttttttccgcaggaaaaatgagtccgaatag

SEQ ID NO: 383443 - DNA, 583 bp, Homo sapiens
gactacaggcatgtgccaccatgcccagctagttttgtttgttttttagtggagatgaggttgtgccattttgcccaggctaatctcagactcccagcctcaagcgatctgcctcagcctttcaaaatgctgtgattacaggtgtggacactatagcctctggtccattttaagaagacttctttgtagttcccttgtgagggaataagccattttacttcttgttaaaccttactcttattgcaaaggtctttatagttccagctgtattgtggtggggaagtggggaaaggggatgatttattattataataattccttactttggatgaacactgagctttgacttctgtttcccaaatactacacaaggctttgaaaacctcagctggaattcttctggtacagcaaataccctccaggcagcagcagtttctttcagtcattttcctctcttggttctttaatttcacctacaaatggcctgattttccttactgtttttgatgcttttcaaakattttaaaaatattttattcagtatttttagttttttttccgcaggaaaaatgagtccgaatag

SEQ ID NO: 383444 - DNA, 596 bp, Homo sapiens
tctttagcccaggccggattgcagtggcacaatcttggctcactgcaagctccgcctcccaggttcackccattctcctgcctcagcctcccgagtagctgggactacaggtgcccgctgccacgcccggctaattttttgtatttttagtagagacggggtttcaccgtgttagccaagatggtcttgatctcctgaccttgtgatccgcccgcctcggcctcccaaagtgctgggattacaggcgtgagccaccgcgcccagcctattctatctacttttttcaaggctcaacaggtatagttaaaaagcatttgttcatctaatcttacagagacttccaaagttctggtgatcaataatatttactgagatcccacattttgcccaatacttctcagtgttctacagaataatcgttgtgctcaaggtgtttacagactgaaaagaaaaatacgacatatgttgaatcacaaaatgtcagagttgaaaggacctgagaagctatctaatcaaacatattactctatggaggtatcttctctgcaatatactgatgaatagtgactccaacatacttataagtggtgagtcag

SEQ ID NO: 383445 - DNA, 596 bp, Homo sapiens
tctttagcccaggccggattgcagtggcacaatcttggctcactgcaagctccgcctcccaggttcacgccattctcctgcctcagcctcccgagtagctgggactacaggygcccgctgccacgcccggctaattttttgtatttttagtagagacggggtttcaccgtgttagccaagatggtcttgatctcctgaccttgtgatccgcccgcctcggcctcccaaagtgctgggattacaggcgtgagccaccgcgcccagcctattctatctacttttttcaaggctcaacaggtatagttaaaaagcatttgttcatctaatcttacagagacttccaaagttctggtgatcaataatatttactgagatcccacattttgcccaatacttctcagtgttctacagaataatcgttgtgctcaaggtgtttacagactgaaaagaaaaatacgacatatgttgaatcacaaaatgtcagagttgaaaggacctgagaagctatctaatcaaacatattactctatggaggtatcttctctgcaatatactgatgaatagtgactccaacatacttataagtggtgagtcag

SEQ ID NO: 383446 - DNA, 552 bp, Homo sapiens
ttccttgtcccaaaggtgaatttttctccttctgyccattcccccagatcatattccttcagtagtcctcactcttcaacatattgaagtgctttttcttttttaagcagttataaccccaatgatcttgctggataatattctagatagaactcagttttcatcaccatcacttcccaactttttgaatgacctaaatagactgttcactctgtcccacctacagaaactgcattcacacagattagattaccctctaattatgttctacttgacctccctgcaatgttttacactttacttcctggagtctttcctgccatctcttctggttttcttttatgcctctgacattttctggttattttctgtcccttcctatcttctgactcataggactttacatgtttgtttactggactccctaataaaatacttttgaaaattatgtacctcttcacacacttttaagttgacatgtagattttatcataagattaaagagtgatatgatttggctgtgtccccacctaaatctcatcttgaattgta

SEQ ID NO: 383447 - DNA, 552 bp, Homo sapiens
ttccttgtcccaaaggtgaatttttctccttctgcccattcccccagatcatattccttcagtagtcctcactcttcaacatattgaagtgctttttcttttttaagcagttataaccccaatgatcttgctggataatattctagatagaactcagttttcatcaccatcacttcccaactttttgaatgacctaaatagactgttcactctgtcccacctacagaaactgcattcacacagattagattaccctctaattatgttctacttgacctccctgcaatgttttacactttacttcctggagtctttcctgccatctcttctggttttcttttatgcctctgacattttctggttattttctgtcccttcctatcttctgactcataggactttacatgtttgtttactggactccctaataaaatacttttgaaaattatgtacctcttcacacacttttaagttgacatgtagattttrtcataagattaaagagtgatatgatttggctgtgtccccacctaaatctcatcttgaattgta

SEQ ID NO: 383448 - DNA, 497 bp, Homo sapiens
attccttcagtagtcctcactcttcaacatattgaagtgctttttcttttttaagcagttataaccccaatgatcttgctggataatattctagatagaactcagttttcatcaccatcacttcccaactttttgaatgacctaaatagactgttcactctgtcccacctacagaaactgcattcacacagattagattaccctctaattatgttctacttgacctccctgcaatgttttacactttacttcctggagtctttcctgccatctcttctggttttcttttatgcctctgacattttctggttattttctgtcccttcctatcttctgactcataggactttacatgtttgtttactggactccctaataaaatacttttgaaaattatgtacctcttcacacacttttaagttgacatgtagattttatcataagattaaagagtgatatgrtttggctgtgtccccacctaaatctcatcttgaatt

SEQ ID NO: 383449 - DNA, 457 bp, Homo sapiens
gatatttctatttgaagatctcacacttaactgcagactttcaccccatagtcagcatgataataaaatctataatttttgtggaaaggtgtttttcaagtcccagtagtctgagataaaatttaactayagcaccaacaacctaattatctcttccttgaagttgcactggataacgcatagtctgactgtgtcccccagaagtcctctgttacagcttaattgtgaatgtgatagtatttataggtggggcctttaggaggtggttatgtcatgtgggtagtaccctcaagggattagggcccttataaaagcacttgagggagcaagtttgttttcttttgcctctccatcatgtaaggacacagcttccctcccctctggaagatgtagcaacacagtgccatcttggaagcatagagtggttctcaccagacactgaacctgctagcgcctt

SEQ ID NO: 383450 - DNA, 457 bp, Homo sapiens
gatatttctatttgaagatctcacacttaactgcagactttcaccccatagtcagcatgataataaaatctataatttttgtggaaaggtgtttttcaagtcccagtagtctgagataaaatttaactatagcaccaacaacctaattatctcttccttgaagttgcactggataacgcatagtctgactgtgtcccccagaagtcctctgttacakcttaattgtgaatgtgatagtatttataggtggggcctttaggaggtggttatgtcatgtgggtagtaccctcaagggattagggcccttataaaagcacttgagggagcaagtttgttttcttttgcctctccatcatgtaaggacacagcttccctcccctctggaagatgtagcaacacagtgccatcttggaagcatagagtggttctcaccagacactgaacctgctagcgcctt

SEQ ID NO: 383451 - DNA, 655 bp, Homo sapiens
acttactgtttaggagtgggggtggggacataaataggattaagtgaccagaaatgaaagccaggcttattggagtatacttttatgcaattttgacttgagtatgtaaatattttacawgttccaaaaaatccataaaattgaaaatattaaaagaagacactatatatcaaaatctaacataatcatatagaggaaataatcagatgaatctagaaaatagtattctttctgaaaactcttgtaaagctatatagtctaaggacagaaagggctttaaattcaatagttttattgttaataatgatattggtattgttattttgaaatcggtttgtgtatggtatatagataaagcaaataaatgatggtcactattattattcattttaagagatagtaaaaaaattcaaaagagttaaataaaattctataagccaaatttgaaccaataaataccaatttaaaccctgattttaaaaaatgtacctcctacagagctatagaaactaaaacagcatggtactggcataagaacagacacaatgaccaatggaacagaatagaacacccagaaacaaatccacacacctacagtgaactcattttaggcaaaggtgccaagaacatatattaggaaaaagacagtgtcttc

SEQ ID NO: 383452 - DNA, 655 bp, Homo sapiens
acttactgtttaggagtgggggtggggacataaataggattaagtgaccagaaatgaaagccaggcttattggagtatacttttatgcaattttgacttgagtatgtaaatattttacaagttccaaaaaatccataaaattgaaaatattaaaagaagacactatatatcaaaatctaacataatcatatagaggaaataatyagatgaatctagaaaatagtattctttctgaaaactcttgtaaagctatatagtctaaggacagaaagggctttaaattcaatagttttattgttaataatgatattggtattgttattttgaaatcggtttgtgtatggtatatagataaagcaaataaatgatggtcactattattattcattttaagagatagtaaaaaaattcaaaagagttaaataaaattctataagccaaatttgaaccaataaataccaatttaaaccctgattttaaaaaatgtacctcctacagagctatagaaactaaaacagcatggtactggcataagaacagacacaatgaccaatggaacagaatagaacacccagaaacaaatccacacacctacagtgaactcattttaggcaaaggtgccaagaacatatattaggaaaaagacagtgtcttc

SEQ ID NO: 383453 - DNA, 655 bp, Homo sapiens
acttactgtttaggagtgggggtggggacataaataggattaagtgaccagaaatgaaagccaggcttattggagtatacttttatgcaattttgacttgagtatgtaaatattttacaagttccaaaaaatccataaaattgaaaatattaaaagaagacactatatatcaaaatctaacataatcatatagaggaaataatcagatgaatctagaaaatagtattctttctgaaaactcttgtaaagctatatagtctaaggacagaaagggctttaaattcaatagttttattgttaataatgatattggtattgttattttgaaatcggtttgtgtatggtatatagataaagcaaataaatgatggtcactattattattcattttaagagatagtaaaaaaattcaaaagarttaaataaaattctataagccaaatttgaaccaataaataccaatttaaaccctgattttaaaaaatgtacctcctacagagctatagaaactaaaacagcatggtactggcataagaacagacacaatgaccaatggaacagaatagaacacccagaaacaaatccacacacctacagtgaactcattttaggcaaaggtgccaagaacatatattaggaaaaagacagtgtcttc

SEQ ID NO: 383454 - DNA, 618 bp, Homo sapiens
gttctttctccctgtcagttccgttcagttttgttgaattcctttcagtaaaccagatgctgggaacagtatctctccactctaccttgggttaaactccttcttgtccatctctcctgccyttggtagtttttcttcttgccccttcctttctcctgaatattaaataataactagcattatagatttcccaccatgtgacaggcactgttctaagcacattctatgcattggcttgtttaatcattataacaatgtcttagcccctctgggctgctataacaaaatatcacaaaactaggtggcttataaacaataaatttatttctcacagttctaggagctgggaaatccaagatcatgttgctagcagatttggtatctggtgagggccaacttcctcacagatggcaccttcttgctgtggtctcacatggtggaaggggcaaggagtatctcttcagtctctattatgaaggtattaatgccatttatgaaggctctaaccccatgagctaatcacctccaaagacccacctcttaataccatcacaatgtaggtgagaatttcaacaaatgaatgttgtgggaacaaaaacattcataccatagcaacaa

SEQ ID NO: 383455 - DNA, 595 bp, Homo sapiens
gcttcaaatctgatgctgagttgttttctatctctacactgtttatcaatggagttctagattctagaacaaaatgtatcaaratatttgaaagatatttgatttgacaaagtttgaaaataatattcttcagtaatcaaggaaagtatggggtaaatgggggtataaagtgaagaattgcagctggcctaaaaatgataaatattcatcacttgtgggtcctgtctttatttgtaattttaatattgtgttcatcatgaaatttcatattaattttgatttttttaaaattgcattgaaatattcatcctgattatgagtttttggcacctccttacatttgcttctgaggtgagtacctcatccatctcaccctagccactctatatttactgacttttcctgttcgaaatatttaataataacttgaatataagtgtacacattatgttgattaatttctaggttatccaagtatggaaagcgaaaggcttacaacattttaaaggctgaccaaaagtcaaatgatgaaatcaaacaagataaagtaaagcccttacttgcattcaaaaagttaatcggaaatacaaaaaaa

SEQ ID NO: 383456 - DNA, 613 bp, Homo sapiens
actgttttgacagattctcttttttccttctcctcttcttagtcaatggctcatattttgaaagcaagaaaggtgttgacagagccagaagttcgatactacctcaggcagattgtgtctggactgaaataccttcatgaacagaaatcttgcacagagatctcaaactaggtaagtcattgacgccaaagctgagttttgtgttagagttcttttttctctctctgtttttttttacatattaatgttcttaattgggatctggtgtctgcaatcttgcttttgaatgggcgactttcatataacattggctgcctggctccaaagtggatgtgtgtgtacttggttagaacgcattttcaaagggattcacattttgttttgtttatyatctagggaacttttttattaatgaagccatggaactaaaagttggggacttcggtctggcagccaggctagaacccttggaacacagaaggaggtaagagtcagaaagatgcatcctagtagacttttgtggagaccaaatatgccttcattattttgcatttaatgtttcagaggtccggtaataaaatctataaatcatagcaatgttaatttaaagaaa

SEQ ID NO: 383457 - DNA, 613 bp, Homo sapiens
actgttttgacagattctcttttttccttctcctcttcttagtcaatggctcatattttgaaagcaagaaaggtgttgacagagccagaagttcgatactacctcaggcagattgtgtctggactgaaataccttcatgaacagaaatcttgcacagagatctcaaactaggtaagtcattgacgccaaagctgagttttgtgttagagttcttttttctctctctgtttttttttacatattaatgttcttaattgggatctggtgtctgcaatcttgcttttgaatgggcgactttcatataacattggctgcctggctccaaagtggatgtgtgtgtacttggttagaacgcattttcaaagggattcacattttgttttgtttatcrtctagggaacttttttattaatgaagccatggaactaaaagttggggacttcggtctggcagccaggctagaacccttggaacacagaaggaggtaagagtcagaaagatgcatcctagtagacttttgtggagaccaaatatgccttcattattttgcatttaatgtttcagaggtccggtaataaaatctataaatcatagcaatgttaatttaaagaaa

SEQ ID NO: 383458 - DNA, 582 bp, Homo sapiens
tgggataaacgaaaatgtggagagaaaaagatatatctctaaggtgacagaagcggaataaattttccagaagagtaaggtttgaggaggtagaattctaagaggtgaggcttccaaatgtaaggtcttttaaagatgctctttcttgcagagaaaactaaaaatgatttttttatcctgtgcttaatattagtccaggatacctgtaatgtattaaatacattgttttcttaaggatgaaataattgagctacctaaaataaytaaaatcaattaatcagatagcaataatttaaatcattctagctgagtacaatattcataatttagtttaatcttcacaaaaatcatatgaggaagtatgtttttcccattttaaagatgaggaagtttctagataagtcaaataactagttcaaagtaatataatagtaaatagcgacagaacattcagcccaagccgagctcagatacttgtgtttaatttactgtattgcacttgattctgtcacactatgaaattcgtggttaaaaaaaagtggacagtcctttgaataatataatacagtataatatgtgctg

SEQ ID NO: 383459 - DNA, 489 bp, Homo sapiens
ggagaaatggacactgccccaatactcagaatgttcacaaactacaaaagaggtatgctatttacaggggttactgaagtacaataatggtacaataaggaagcacatggtgtaacaaaagaccaaagccagggtgtaggaaagctttcccatggaaagtgacacctaaactgatatctgaaggacaagtargagatagccaggtagaggctgagggaatggtcctccaataagggaggaaaacatgtgagggtccagagcatagggcgtgttcaagaatctgaaagaaagtaaacacttgagcatcatgtgtaaaagaagggtaagaggaaggcagtaagctgtgagaaaagctcaggtgattcagggctttaaataagaagttaaggaatttggactttatcctagtaattgtgacatttatgatatcagaatatgatctgagaaggcagaaatgctgctgatttttccaaaaaaaacccacaaggc

SEQ ID NO: 383460 - DNA, 569 bp, Homo sapiens
ctaaattcttgttagtgacggagacatggctacctgggtctgaggtgaactccccagcagcccagaggctgtcaaaagcgtaagactgagactcagtaaagggcagagtttagctgttgcctcaggctcacttycccagctccaccctagactaaactggactgacatagaagaggaatacaatgagctaggtttgatctgttaacaaatgagttttaaaatgtcatattaggagatatgaaactcatttaaaaacatacaaatttatgtttggtgtttttcttcctaggtatttccaagaagactgtagttcactttaaatgcctagcattggagtgccctctgtgcaacagcaccgtatttaggctttatgtgaagtatctgtcttaaatcaccaacaatttcatctcgcagatattgttaatactcccgttttacaggtgagatgatttgaacttaaagaagttaaaattggaccaaagatcttggagtgaataagaaatagaggcaatatttcaatccaggcattctgatgggattgacttactcgagttttttttttaatagta

SEQ ID NO: 383461 - DNA, 566 bp, Homo sapiens
  misc_feature (1)...(566): n = A,T,C or G
gaaagctttcctacaccctggctntggtctttgttacaccatgtgcttccttatgtaccattatgtacttcagtaacccctgtaaatagcatacctctttgtagttgtgaacattctgagtatggggcagtgtccatttctccaaccttcacccaacaaccccactcctgaatccccagtgcgctcctaggccttactacgtcataggcatttgataaatatttgttacatgactgaaagcacttttccctgctagatcatctaagccatttgctgtaagtctcctaatcttgatattctgcaacctcctttccatcccactatgggtgttcactagcatgtgcttttcattcaagatatatttgcagtcttcctattttttactgatatcttagrtattcactgatactcaaagtgaaaaaattccaaaattcttggtcattttctttttcatgacatattccattgaacgtcaatttttagcttctgtttaatacaactatcctaagaagatttaaaaacaagcagtaaatgaaagtgttgaattcaataaaataaatggcttt

SEQ ID NO: 383462 - DNA, 564 bp, Homo sapiens
gataggacttttcgaaagatgtgtcataatgggtccaccttgtgaacagattaatggtgttataaaaagggctgcaagagtgagttcactctgtcatgcccttctaccatgtgaggacacaggattcctatgctccagagaacagaggactgagcatttaaggcaccatctggaaacagggaatagcctttaccagayaccagtgacttgatgatcttggacttcccatcctccaaaaccgtgagaaataaatttctgtttttaaataaattacccaatatgtggtattctctaatacacacaaaatatttgtatggcataccttggagatattgcaggttcagttacagaccactgcaaaaaagtaaatattacaatgaaggaagtcacacaattttttgttttcctaatacatataaaattatgtttacactattctgtagtctattaagtagtgtacaatagcattacctctaaaaacatgtacatatcttacttctaaaatattttattgttaaaaatgccaatggtcattttagccttcagcaaatcataatcgattgc

SEQ ID NO: 383463 - DNA, 627 bp, Homo sapiens
ttctgtttagtttatgcaagtttattttataagaagaagatagggccaatttttctttcttctgaaccaaatgaatgactcaaattatatcaatagttgtctcattctttacaccaccaatttatgtcttcttggggaatcaaaagtaacagaggaaagaacgtgggttttccagacagagagatctggyggaaattttactctatcctagtgggaaagttatttagtcttaataagttcgagtgatcatgcctataattagggtaatagtgactgctaggatttttaaatatatttgtaaatactcttgtaaaatatatccatagatatgtatgattgttatatagtatatatacatataaaaattgttttatacatacacacaaatacaatgaaatctaagtcacagggctcagcacaggtaaagcactagataaactagaatttgttcaatgtggctcctgaatcaaatgacaatttgttaaccagagtcttgtcctcaagtcatgagaactgttatttctcatctcatttggccttcaggattcatgtatacactgaatgagaagatacaaatgaccatctcctgcattagaattctaagcctatcacttgggacacttacca

SEQ ID NO: 383464 - DNA, 627 bp, Homo sapiens
ttctgtttagtttatgcaagtttattttataagaagaagatagggccaatttttctttcttctgaaccaaatgaatgactcaaattatatcaatagttgtctcattctttacaccaccaatttatgtcttcttggggaatcaaaagtaacagaggaaagaacgtgggttttccagacagagagatctggcggaaattttactctatcctagtgggaaagttatttagtcttaataagttygagtgatcatgcctataattagggtaatagtgactgctaggatttttaaatatatttgtaaatactcttgtaaaatatatccatagatatgtatgattgttatatagtatatatacatataaaaattgttttatacatacacacaaatacaatgaaatctaagtcacagggctcagcacaggtaaagcactagataaactagaatttgttcaatgtggctcctgaatcaaatgacaatttgttaaccagagtcttgtcctcaagtcatgagaactgttatttctcatctcatttggccttcaggattcatgtatacactgaatgagaagatacaaatgaccatctcctgcattagaattctaagcctatcacttgggacacttacca

SEQ ID NO: 383465 - DNA, 588 bp, Homo sapiens
ttgcaattagtgagaatgtaatgcgatatcacctaggtaagtagtttttataactattcagaaaatacatttaagccaggtgtggtggagcgtgcctgcagttatagttaccctaaaggctgagttgggaggatcatttgaacctaraaattcgaggccagcctaggcaacatagtgagacacccccatctgaaaaaaaaaaaaaatagaaaaggcatatatttaaaaacataaacctcatagttgagagtagtgtgatgcttagagaagtttcgtgtaaattagctaataacaaaatggaaagttaaaagaaaatccaataccaatacgtatcacagtagcaacttattagaagtatgacttctgcaatttttaaaattaagatgtatctaaagatgcatctctttaaaaattgttttcaagagaaatgccaacaaaataatcctgacatttaaatgtatagaattgtttggcatttaataatatttgcttagctacttagagcctgcctttcttcagaacaacttcttatgtatattgtactatcatcactttctgaaattctcagaattcagtctgatatagaac

SEQ ID NO: 383466 - DNA, 588 bp, Homo sapiens
ttgcaattagtgagaatgtaatgcgatatcacctaggtaagtagtttttataactattcagaaaatacatttaagccaggtgtggtggagcgtgcctgcagttatagttaccctaaaggctgagttgggaggatcatttgaacctagaaattcgaggccagcctaggcaacatagtgagacacccccatctgaaaaaaaaaaaaaatagaaaaggcatatatttaaaaacataaacctcatagttgagagtagtgtgatgcttaragaagtttcgtgtaaattagctaataacaaaatggaaagttaaaagaaaatccaataccaatacgtatcacagtagcaacttattagaagtatgacttctgcaatttttaaaattaagatgtatctaaagatgcatctctttaaaaattgttttcaagagaaatgccaacaaaataatcctgacatttaaatgtatagaattgtttggcatttaataatatttgcttagctacttagagcctgcctttcttcagaacaacttcttatgtatattgtactatcatcactttctgaaattctcagaattcagtctgatatagaac

SEQ ID NO: 383467 - DNA, 605 bp, Homo sapiens
ttttaaaaaacattggggggaacttaattttgtcctgttcatagtgtcttagttgagaatttaaggtgtgcaaagaggaaaaaaaatctagtcaggagtcagataaaccaagaaaagtggactgaagatgactagctaaaatcagagcaggagcactgtagctttgcttgaaatcaggccaccatccatgaatttcattcctaaggtcattaaatggctgcttgagctccaactcttacatccacattccagctagcaggaaggacgaaaggtgaagggcatttcttcatcactttatgtacaccacagctcttatrttccagttcctagaacttaatcttatgaccataccttttacaaaggaggctgaaaaatgtcatctttattctgattggacatgtgcccagttgaaagtcacaaattctgttacaaacgggttttcactacttggccacgctggtctcaaactcctggccacaagtgatcctccctcctcagcctcccaaagtgccaggattacaggcatgagccacctcacgtggcccttccatagcattttaaaaagactagtacactaagaagggatcttacagataatgtagctc

SEQ ID NO: 383468 - DNA, 623 bp, Homo sapiens
tattctactcttttaagtatagacccaagagaaattaaaataatatgttcaaacaaaaacttgkatgtagtgtttatagcagcattattcataaggcaaaatgtggaaatataatctaaattgctgaataatattccactgtatggaaataccatgttatcaacccaactgatgaatggagaaacaaaaaatgatttgttcatgcgatggaatattacttggcaacaaaaaggaatgaagtactgatacatactacaacatggatgaactttaaaaatacaatgctgagtgaaagaagccagtcacaaaataccacatattgtatgattcagtttatgtggattctccagggtagacaaatccacagaaacagaaagtacattaatggtttcctagggtaagggagggggcagatagagagtgactgctaatgaaaagaggttcctttctggcgtactaaaaatattgtaatatttggcctggcacggtggctcatgcctataatcccagcactttgggaggctgaggcaggaggatcacttgagcccataagtttgagaccagcctgggcagcatggcaaaaccctgtctctacaaaaaatatgaaaattagccagatgtgg

SEQ ID NO: 383469 - DNA, 516 bp, Homo sapiens
gagaccagcctgggcagcatggcaaaaccctgtctctacaaaaaatatgaaaattagccagatgtggtggcgcatctcagctacttgggagtctgaggcaggagaatcacgtgagcccaggaggcagaagttgcagtgagccgaaatcatgccattgcacttccgcctgggcgatgggagtgaaaccctgtctccaaaaaaaaatttttttcgaaaaattagattgtggtgacagctgcacaattgtatgaatatactcaaaaatccttggactgtgcactttacatgggtatattgtatcatatttgaaatataagtatcggtaaagttgtaaaagacagaggaggaaacacattccatgtgacttaaggttaagttaaacacrttcttgaatgtaaactatctgggaaataacatcccccaacagacataaatctaacatgagtagccttttctagcagcaacaggtgacccagtttctcccactgtgggaattaaacctttgaatttgataga

SEQ ID NO: 383470 - DNA, 504 bp, Homo sapiens
gccttggcctgtgtggggtcgcagctggatggcagagtgtcatggctcaattgcagccccctattgcctccctctgcccctggcacactgcaggtcctatttcccctatgaggacactgatcccacaagcacatgggcatgtgaacatatgatactagaatgacaaggaaaggaaataccagagaaagatgttcaatgtgtccttccaaattctgacacgcaccatcataagccatgaaactgtgcctctcatggaagcaacagtaaaatccaaatgaagaatgaatgaatgagtgatgcataagaacaagcataggayagtggaaggaactttcctctctagatttcatgcatattggattttatttttctacagcaagccactgtctaagacttttgtttgtttgtttgtttgtttctggtactgcttatttgcaatgccagacaaacagaaaaacccaaaagagaaacttaacagaaaccttacaaatcatctcataacac

SEQ ID NO: 383471 - DNA, 504 bp, Homo sapiens
gccttggcctgtgtggggtcgcagctggatggcagagtgtcatggctcaattgcagccccctattgcctccctctgcccctggcacactgcaggtcctatttcccctatgaggacactgatcccacaagcacatgggcatgtgaacatatgatactagaatgacaaggaaaggaaataccagagaaagatgttcaatgtgtccttccaaattctgacacgcaccatcataagccatgaaactgtgcctctcatggaagcaacagtaaaatccaaatgaagaatgaatgaatgagtgatgcataagaacaagcataggacrgtggaaggaactttcctctctagatttcatgcatattggattttatttttctacagcaagccactgtctaagacttttgtttgtttgtttgtttgtttctggtactgcttatttgcaatgccagacaaacagaaaaacccaaaagagaaacttaacagaaaccttacaaatcatctcataacac

SEQ ID NO: 383472 - DNA, 562 bp, Homo sapiens
gacagtatgcctggggcaatgggagcacaaagaaggggcacccaatcggccaggtgcagttgttcatgcctgtaatcccagcactttgggaggccaaggtgggtggatcacttgaggycaggagttcgaaaacagcctggccaacatggtgaaatcctgtctttactaaaaatacaaaaaaattagccgggtgtggtggtgggcacctgtaattccagatactcagaaggctgaggtgggagaattgcttgaacccgggaggcagagattgcagtgagccaagatcgtgccactgcactccaggctggatggccagagcgagactccatcaaaaaaaaaaaaagccaggagatggttgggcatgcaatttctatcaggtggtcggaagtccttctccaccacaggactcctcagttgaagactagaaaatggtaggaattagccaggttgataggagaggtggggaagatcattcccagcagagggaagagcatgtgcaaaaatcgagacgtgagagggtgagaagctgagagatgttcatataattgtaaaaagtgactaa

SEQ ID NO: 383473 - DNA, 431 bp, Homo sapiens
atttcttcactcacaggccatgtctgagtggatcaagaagaacagagtgcccttttatgagattttgtctgcgtagaccattagcttggtaaaaaccatcctcgttctttaatagcagattattttggactttgcaagaagcagcatgggcattcagatgcttttaaggataaaatgttctttctcatcaccaggcctggtgctctggatggctgaggttttaatgtgactggrtgtcccttggagtggctcccaggctgagatctcgcggttgggtggcaaggggttgctttattcggtggtggctagaggatgttttagcaggtaaatcgggaccccaggagcccctgagtgccaagtcctgctgcagggcatgtgtttatggtggggaggtgggggggtggagggtggggggcattgatttcctgcca

SEQ ID NO: 383474 - DNA, 431 bp, Homo sapiens
atttcttcactcacaggccatgtctgagtggatcaagaagaacagagtgcccttttatgagattttgtctgcgtagaccattagcttggtaaaaaccatcctcgttctttaatagcagattattttggactttgcaagaagcagcatgggcattcagatgcttttaaggataaaatgttctttctcatcaccaggcctggtgctctggatggctgaggttttaatgtgactggatgtcccttggagtggctcccaggctgwgatctcgcggttgggtggcaaggggttgctttattcggtggtggctagaggatgttttagcaggtaaatcgggaccccaggagcccctgagtgccaagtcctgctgcagggcatgtgtttatggtggggaggtgggggggtggagggtggggggcattgatttcctgcca

SEQ ID NO: 383475 - DNA, 431 bp, Homo sapiens
atttcttcactcacaggccatgtctgagtggatcaagaagaacagagtgcccttttatgagattttgtctgcgtagaccattagcttggtaaaaaccatcctcgttctttaatagcagattattttggactttgcaagaagcagcatgggcattcagatgcttttaaggataaaatgttctttctcatcaccaggcctggtgctctggatggctgaggttttaatgtgactggatgtcccttggagtggctcccaggctgagatctcgyggttgggtggcaaggggttgctttattcggtggtggctagaggatgttttagcaggtaaatcgggaccccaggagcccctgagtgccaagtcctgctgcagggcatgtgtttatggtggggaggtgggggggtggagggtggggggcattgatttcctgcca

SEQ ID NO: 383476 - DNA, 431 bp, Homo sapiens
atttcttcactcacaggccatgtctgagtggatcaagaagaacagagtgcccttttatgagattttgtctgcgtagaccattagcttggtaaaaaccatcctcgttctttaatagcagattattttggactttgcaagaagcagcatgggcattcagatgcttttaaggataaaatgttctttctcatcaccaggcctggtgctctggatggctgaggttttaatgtgactggatgtcccttggagtggctcccaggctgagatctcgcggttgggtggcaaggggttgctttattcggtggtggctagaggatgttttagcaggtaaatcgggaccccaggagcccctgagtgccaagtcctgctgcagggcatgtgwttatggtggggaggtgggggggtggagggtggggggcattgatttcctgcca

SEQ ID NO: 383477 - DNA, 468 bp, Homo sapiens
aggtgcctgtaatcccagctacttgggaggctgaagcaggagaatcgcttgaaacccataggcggaggttgcagtgagccaagattgcatcactgcactccagcctgggcaacagagcgagactctgtctcaaaaaataaaaaataaaaaaattttaaaaaaacagatgtataattcagtaaagcttcaggacacaaagtcaacatacaaaaatcagtgatgtttctatataccagtaacaaactaactaaaaaagaaaccaaggaagaaattctatttacaatagctacaaaaataaaatacctaggaataaacttaaccaaggatggggaaaaaaaaaaaaacctctacaatgaaaaccacaaaacactgataaaataaattgagaagacacaaacaaatggaaargcatcttatgctcgtgggttggaattactaatactgttaaaatgaccatactacccaaag

SEQ ID NO: 383478 - DNA, 468 bp, Homo sapiens
aggtgcctgtaatcccagctacttgggaggctgaagcaggagaatcgcttgaaacccataggcggaggttgcagtgagccaagattgcatcactgcactccagcctgggcaacagagcgagactctgtctcaaaaaataaaaaataaaaaaattttaaaaaaacagatgtataattcagtaaagcttcaggacacaaagtcaacatacaaaaatcagtgatgtttctatataccagtaacaaactaactaaaaaagaaaccaaggaagaaattctatttacaatagctacaaaaataaaatacctaggaataaacttaaccaaggatggggaaaaaaaaaaaaacctctacaatgaaaaccacaaaacactgataaaataaattgagaagacacaaacaaatggaaaagcatcttatgctcgtgggttggarttactaatactgttaaaatgaccatactacccaaag

SEQ ID NO: 383479 - DNA, 468 bp, Homo sapiens
aggtgcctgtaatcccagctacttgggaggctgaagcaggagaatcgcttgaaacccataggcggaggttgcagtgagccaagattgcatcactgcactccagcctgggcaacagagcgagactctgtctcaaaaaataaaaaataaaaaaattttaaaaaaacagatgtataattcagtaaagcttcaggacacaaagtcaacatacaaaaatcagtgatgtttctatataccagtaacaaactaactaaaaaagaaaccaaggaagaaattctatttacaatagctacaaaaataaaatacctaggaataaacttaaccaaggatggggaaaaaaaaaaaaacctctacaatgaaaaccacaaaacactgataaaataaattgagaagacacaaacaaatggaaaagcatcttatgctcgtgggttggaatwactaatactgttaaaatgaccatactacccaaag

SEQ ID NO: 383480 - DNA, 337 bp, Homo sapiens
tactgcagcactatttacaatagccaagatatggamtcaatctaagtgtcaatcaatggatgaatggataaagaaaatgggaatatacgcacaatagaatagtattcagccataaagaagaatgaaatcctgtcattttcagctaaatggatggaattaaaggtcataaagttaggtgaactaggccatgcacagaaagaaaactattgcatgttctcacttatatgagcagtttatgctcctggaaatcaaagtgggggccatgtttcaggtcagcagggtcagggatagagaccgcagttatggacttgtgtgccctggagctatataaaattga

SEQ ID NO: 383481 - DNA, 462 bp, Homo sapiens
ggtatatagctggggtcacatgcttgacatgcctattgaaagcttctgggtaggaagagaacaatcatcacagcatcacagcctggcataactgtctcccaggacaggtctccctggggagactgagaccacacctctgaaatcagagctcaaatccaggttctacatttcgctcagtaatgtacatgatataggacagtttttatattagttatctattgctgtgcaacaatattactgcaaactttgtggcttgagacagcagacagttatcactgcatggtttctgtgggtcaggaatccaggcatgactcagctgggttcagtgcaaggctgcagccatagtgtcagccagtgctcarttctcatctggaggcttgactggtgattggtctgcttccaggctcatctggttgttggcagcattcagttccttgcaggctgctggactcagcgccccag

SEQ ID NO: 383482 - DNA, 462 bp, Homo sapiens
ggtatatagctggggtcacatgcttgacatgcctattgaaagcttctgggtaggaagagaacaatcatcacagcatcacagcctggcataactgtctcccaggacaggtctccctggggagactgagaccacacctctgaaatcagagctcaaatccaggttctacatttcgctcagtaatgtacatgatataggacagtttttatattagttatctattgctgtgcaacaatattactgcaaactttgtggcttgagacagcagacagttatcactgcatggtttctgtgggtcaggaatccaggcatgactcagctgggttcagtgcaaggctgcagccatagtgtcagccagtgctcagttctcatctggaggcttgactggtgwttggtctgcttccaggctcatctggttgttggcagcattcagttccttgcaggctgctggactcagcgccccag

SEQ ID NO: 383483 - DNA, 626 bp, Homo sapiens
tgatttgactcaaagccaagattgaggaatggcgacatggatctctacacagaacctgcctaaatagattctctagaagcagtttataaagatattccacgtggactgtggaagaggatatgaatttgatgtacagcatgtcctcacttaacatctttgaaagtctcttggaaacttcacctttaagcaaaattatgtatagtgaaaccacttatttttcatcaacagtataactacacatctttgaacaactgatggtgttggaggacctcytgtacattgtttccataaagtcagttttcagggaattccaaaaggaagtgaggacttcgtgtatataaaaagatggttgtgattccacctggatgacagggttattgctcagaaactaaaagaggccacctaggtatagaggattctgtcatgaggtttctgctaaacaaagggtcccagaatcctcacccattccagtgaaaggcatagcgaagaaagcaatattcacaaaggaaatgtggaaaggaataaaagccatcaagccacagaaagaatgtgactaaggggcaggatttgcagatgtagagatttaatgtggttgccctttctcacccacacaagagaaaggatgg

SEQ ID NO: 383484 - DNA, 626 bp, Homo sapiens
tgatttgactcaaagccaagattgaggaatggcgacatggatctctacacagaacctgcctaaatagattctctagaagcagtttataaagatattccacgtggactgtggaagaggatatgaatttgatgtacagcatgtcctcacttaacatctttgaaagtctcttggaaacttcacctttaagcaaaattatgtatagtgaaaccacttatttttcatcaacagtataactacacatctttgaacaactgatggtgttggaggacctcttgtacattgtttccataaastcagttttcagggaattccaaaaggaagtgaggacttcgtgtatataaaaagatggttgtgattccacctggatgacagggttattgctcagaaactaaaagaggccacctaggtatagaggattctgtcatgaggtttctgctaaacaaagggtcccagaatcctcacccattccagtgaaaggcatagcgaagaaagcaatattcacaaaggaaatgtggaaaggaataaaagccatcaagccacagaaagaatgtgactaaggggcaggatttgcagatgtagagatttaatgtggttgccctttctcacccacacaagagaaaggatgg

SEQ ID NO: 383485 - DNA, 566 bp, Homo sapiens
gtctctatgaccataatttttcctgcatgtaagattatagcagaaaaggcagtttcctatataggccagtggacagggtaattgcagtcaaatattacaaggtcacgatatggcacttctaacacaggactcattatttacaatcataatgagtccatctgcaatagtcatggtattatattttccaagttccattacaggcatgtgtattaaattccataggtacatcataatttagaaatctagtttgtaatatggcaatgtagaagaaaggcmgtttgtaagtcaaattgtatgaattattatgaaaatttatttaatctgtgactacagtattacaaaatgatacatgtcttggtaccatgcattttggcttttattcataagtgttagctatactagtagaaacaaagaaatcaggagttagtgtcaaatcatccatggattctttactattttgggatcacaaaactgtgtctctcataaaagctatctataatctttgaattaaaattcaggcatgcataagaaaagatagttttccccaggctggcataagcaatggt

SEQ ID NO: 383486 - DNA, 537 bp, Homo sapiens
cttttgcaacagaacacaattgaagaaagtggttgttttaccaaggctttgacaggaaggatatgcttttttttaaggagttaatctgaacttgcagagccagtaaaagccccacgggggaaactggcctcacaccctcatgtatgcagttcctgtacagggttcctgacctgtggttagtaaaaaatgtcactttctaacaggcttaagggatccaagtttatcttgggaccttaagaggagagaaggggagagtcacccaactcacaggtgtttgaggatagaaacccatggttgggcttggctttaaaaggtcttatttgagattccttgtgcaacagtcttccatcaaagccaatataaaaggcctayggagaaaaaattattcatggtgtactttatgcaaataatctggccaattataagactaaagtccattttgcaacccactcagtccaatgatgatttttttttttaacaaaactgagcactggggagagagaaattatgtttcaaaacttatcatatatctgtcat

SEQ ID NO: 383487 - DNA, 314 bp, Homo sapiens
atctaaaatataaaatattaatttcacagtaagaaagtggataagtatttatttttaaacttgcatagtccataacaactttgaaggatattttgttcttagtgtatttattgtgcatgtggtaacagcgtttggatataattttgttatcatataaattttactgtcatggggtgtttattttttcatttatacatgcaaacttaatttggagaaagctttagtgcagacctatgaatatkgcatgtgtatattagaagtaaaaatatgtagttgctgtatacattattgaagactattttagtaagaggttg

SEQ ID NO: 383488 - DNA, 314 bp, Homo sapiens
atctaaaatataaaatattaatttcacagtaagaaagtggataagtatttatttttaaacttgcatagtccataacaactttgaaggatattttgttcttagtgtatttattgtgcatgtggtaacagcgtttggatataattttgttatcatataaattttactgtcatggggtgtttattttttcatttatacatgcaaacttaatttggagaaagctttagtgcagacctatgaatatggcatgtgtatattagaagtaaaaatatgtagttgctgtatacrttattgaagactattttagtaagaggttg

SEQ ID NO: 383489 - DNA, 564 bp, Homo sapiens
ctatggtttctttttctatcccctaattcccacttttcatgcagaggagttaatggggttataatctagtaattaaagaagataattttaacttctctgatgactattataatagtcttgttaagattatggtgtttcatttgttgctacatgtgaacatttgggtttgtggaggcagcctgtgctattgaatcactaaataattaaaaaaacagaacactgtagccagcaaaggctagctgctaatgtaagatcaaagttagatctaactgtttgtaaatctagtaaatgaaccagattggacatatcacatatttaataaaagtcatcaaatggaagmtaatgcttcattaaacaaatatcaaatttcatcattaaaacagagttgtcctttctagattgtacagcagtacattactctccacagcaataaacacaaaagacaattcaattaatggatgatttgatgcagacaaaaatcaaaaataaaaatgcaactcattaatataccaaatacagcaatattagaaaattaaaatttctcaaatcctaagcaataatcca

SEQ ID NO: 383490 - DNA, 595 bp, Homo sapiens
agacacacccaggaacaatactttgcatccttcagtccaatcaagttgacactcratgttaaccatcacaaacatcttctatttgtagcaagatatttttcaaaataagcagttgggcaatttttataaagtgagctttatagttattaagaaacaagtcatagaaaactcaagcaatagtagtaactactaactgtctctttcttgtttgagaatatttgaatgaaccaacatttcattaagaaaggaaattaagtcacttctcctattaaaaaaaaagtattctgaatactgaacctatagttagcttggcaagttttgtagagtaaaataaaatagtatagagttatttgggaatatttaaagttacttgtgtataactataatccaaagttttcttgaaagattgattactatatccagtaaatgcatacattagtttcttctctctcacaaacctcttcaatgcctactctttctgactggcctagcctacttggaaactttagtattagtctcctcaaatactactatcatgtcaatcaaataatttggtaaaaaattaaaattatagcatgtttatgaaagcccaaga

SEQ ID NO: 383491 - DNA, 595 bp, Homo sapiens
agacacacccaggaacaatactttgcatccttcagtccaatcaagttgacactcaatgttaaccawcacaaacatcttctatttgtagcaagatatttttcaaaataagcagttgggcaatttttataaagtgagctttatagttattaagaaacaagtcatagaaaactcaagcaatagtagtaactactaactgtctctttcttgtttgagaatatttgaatgaaccaacatttcattaagaaaggaaattaagtcacttctcctattaaaaaaaaagtattctgaatactgaacctatagttagcttggcaagttttgtagagtaaaataaaatagtatagagttatttgggaatatttaaagttacttgtgtataactataatccaaagttttcttgaaagattgattactatatccagtaaatgcatacattagtttcttctctctcacaaacctcttcaatgcctactctttctgactggcctagcctacttggaaactttagtattagtctcctcaaatactactatcatgtcaatcaaataatttggtaaaaaattaaaattatagcatgtttatgaaagcccaaga

SEQ ID NO: 383492 - DNA, 521 bp, Homo sapiens
aggaatcattctttatcttcccattcttttaacagattgtctttaaaattatatttggtatttgttcctctctttattatacagtatcaatatttgtataagtgccaaagaaaatttgaaaagtggcacttattcaaaaatggtcatgtcatgtgtactatggagctatacttaatatgcagaagtttaaattcactatgccgtcaaaacatccagctcaaacagtaaaattctcttcaatatttgaaaattrtaagtgctttctactatccttcaacagaatattataatttaacatgaaataactgatttttgtatatatgccattaaaggttaatacatggataattgaattaaatgggaagttttcattggctatttaaattttttaatactgaataaggaggcagtgataatagtagtagtgtgaattgcatgcaagtacagtaatgagtaattcattcaaaggtcaaaagctaccaatggtcaaaagttttacatcatattattcattagggtat

SEQ ID NO: 383493 - DNA, 542 bp, Homo sapiens
gggtgcataagcccaagcctttccacaagtcaatcaatattgcaaaccatacataatagtacatttaattaatatgtaaatgttatagattattytacaaacaaacaaagttacatttaacatcaagggaagaacagacagaaagatgggttaacaaatcagaccagagagagtgatgaagagaaaaaaaaatgtcctggtctaggccaggcagtccctgggtcttgcatggaagagactttgatgtgggcagagccttcagtggcagatgttggtgctgttgaagccctattatctttatggtcacagagtcctctgatgaggactgatagtagaaaaatgtgcttgtttatgtccttatctggttggatgcactctttttaattattttattaagcaaaacactttattcttcttggcaaagtaccctatgaagtaaaagatggagtctctttctaaggtgggttacttatgtaacaggtgctctatatacccagactcgaatcaatcagtcagtctataaaaaactgcccccaaaatgg

SEQ ID NO: 383494 - DNA, 479 bp, Homo sapiens
atgtccttatctggttggatgcactctttttaattattttattaagcaaaacactttattcttcttggcaaagtaccctatgaagtaaaagatggagtctctttctaaggtgggttacttatgtaacaggtgctctatatacccagactcgaatcaatcagtcagtctataaaaaactgcccccaaaatggttaattgtttcctttaggaaacaaagatgttaaataagtaattataaacatgttaaaataaataaagggagtatatcataatgactggatagaatcttagcagataaatgggaagaacaggaaaagaaaaaatctgtgaccttaaataatggtgagtagacattttcctatatgtaaagcagaatggggtgaaaaaggttgargaaaaatgaatggaggtttaggaagctatgggccaattaaacagtctaaataaaggtaataagaggatgtatctgaaggaggaca

SEQ ID NO: 383495 - DNA, 482 bp, Homo sapiens
aaaataattacttgttgaggtaggagtgccataaaagagttttactttttgagtcaagttaagagtgattcaagaaggagggaattaatcaaatgtgttgaatactgcttgtaggtttattgggctgagacctaagaaatgactactagttttgtcattatagcaataattttactgaacggtatccagtctctgatctgatcttgcaaaacattcccaaacatctccaaaattgtcagtyctaggatactggatactggacttgtacttccttgctttttttcttttttttttttttttttttttttttgagtcagagtctcactttgttgctcaggctggagggcaatggtgcagtcatggctcactgcagcctcagcctcttgtgctcaagtgatcctcctacctcagcctcccaagtagctccctgcaaacatgagtatatgtattagtccattttcatactgctatgagactgggta

SEQ ID NO: 383496 - DNA, 582 bp, Homo sapiens
tgacaacatttaatttttgtgatggttatcaaaaaaggatatcacccaccaaacaatacaactagaaacaygagaaattctacaaagcagaagaaagaaatttcaaaacaacaaaaaagcagtctgaccactttctggattgtgcatcgagatagaaacattatgttataatttaattaagagcagttttttttccttcctgcattgtatgtaacctaatggtgcatcctataatctatgagctctacatatcaataaaatatagaatgtacataaagtaacaccccaaaaaaggaataaaagaatggttagtaaaattgcttcagttagaaatctctaaaggtatgacagtatgcattatattctagaatagtagttgtcactgagatgctagtcccagtattcatgaggcacatatcacaaaacactatttgctgtgactcagccttttggacataatgagggaaaaaaacagtagttgaaagcttgttgggccaaactgtcaagagaagatgagaaataatgctaaatcacatcttcaaaaattccacatgacaattaggaccaattcagattactaaa

SEQ ID NO: 383497 - DNA, 582 bp, Homo sapiens
tgacaacatttaatttttgtgatggttatcaaaaaaggatatcacccaccaaacaatacaactagaaacacgagaaattctacaaagcagaagaaagaaatttcaaaacaacaaaaaagcagtctgaccactttctggattgtgcatcgagatagaaacattatgttataatttaattaagagcagttttttttccttcctgcattgtatgtaacctaatggtgcatcctataatctatgagctctacatatcaataaaatatagaatgtacataaagtaacaccccaaaaaaggaataaaagaatggttagtaaaattgcttcagttagaaatctctaaaggtatgacagtatgcattatattctagaatagtagttgtcrctgagatgctagtcccagtattcatgaggcacatatcacaaaacactatttgctgtgactcagccttttggacataatgagggaaaaaaacagtagttgaaagcttgttgggccaaactgtcaagagaagatgagaaataatgctaaatcacatcttcaaaaattccacatgacaattaggaccaattcagattactaaa

SEQ ID NO: 383498 - DNA, 582 bp, Homo sapiens
tgacaacatttaatttttgtgatggttatcaaaaaaggatatcacccaccaaacaatacaactagaaacacgagaaattctacaaagcagaagaaagaaatttcaaaacaacaaaaaagcagtctgaccactttctggattgtgcatcgagatagaaacattatgttataatttaattaagagcagttttttttccttcctgcattgtatgtaacctaatggtgcatcctataatctatgagctctacatatcaataaaatatagaatgtacataaagtaacaccccaaaaaaggaataaaagaatggttagtaaaattgcttcagttagaaatctctaaaggtatgacagtatgcattatattctagaatagtagttgtcactgagatgctagtcccagtattcatgaggcacatatcacaaaacactrtttgctgtgactcagccttttggacataatgagggaaaaaaacagtagttgaaagcttgttgggccaaactgtcaagagaagatgagaaataatgctaaatcacatcttcaaaaattccacatgacaattaggaccaattcagattactaaa

SEQ ID NO: 383499 - DNA, 613 bp, Homo sapiens
ttgtgttttgtgatttttcatctcctctggaggacaaattatgataacagtaactgactttataggaaaccattcacaggagttctagtgatgggcawcagaaaactaaatcatcctggagttaaactgagatttttttaagataaaactttattgaaacaatctcctttcattacggtttgctttgttaggatgaggacacatttatttatttaggtcttcacccaaaaagataatagaaagggggtgctatgatcacaaagtaagccttatacaaaatgtgaggagtaagatgtatccacatcactgctaatgtcctatcaggctaataaccctggataatgggtacaaagtgcattttgagaagataaagttaggaagaaatctagattgtcttaataaatctagatcacagtaaaatattatggaggtaatatttctatagaaagatgaagtattagaattacagtggtaattagtcattaacatgagctcaatggactgtcattgagaactaattgagcaactctattagcaaggcttaatttgcatatatacacttatagtttatgaagaaggtagatgaaaataaattcattttgcccagtcccat

SEQ ID NO: 383500 - DNA, 587 bp, Homo sapiens
gaatagtagaagactgtgtcttacatcttggatactagctcagccacagtagaatagggcactgggcagagtcatgaggctcccatttcaggccctagctgatggatgacatttctggacataccttgagccaaaaaggaatccactgccttgaagaagaggacccagtcagaacaggatgcatcacctgctgactaaagagcctttggaccccaaataaccagcaacaatacccagtaaagttgtcatggcccctgggatctgagacgtgccggttgtgggacctagcatattcccatctgtggtggctatcatgaaagactccttctgtttgagaaaagcagaggaaaartaaagggaattctgtcctgcacattaggtaccagctcagccatagcaggctagagcaccaaccagactcttggagtccccaaatctagcctaggctcttagcatgtctggacctgctgtgctccagaggagagcccactgccctgaaggatgagtttcaggcctggcaacattcaccacaaactgactaaagaacccttgggctttaagggaacattgatggtctcctggcagaa

SEQ ID NO: 383501 - DNA, 587 bp, Homo sapiens
gaatagtagaagactgtgtcttacatcttggatactagctcagccacagtagaatagggcactgggcagagtcatgaggctcccatttcaggccctagctgatggatgacatttctggacataccttgagccaaaaaggaatccactgccttgaagaagaggacccagtcagaacaggatgcatcacctgctgactaaagagcctttggaccccaaataaccagcaacaatacccagtaaagttgtcatggcccctgggatctgagacgtgccggttgtgggacctagcatattcccatctgtggtggctatcatgaaagactccttctgtttgagaaaagcagaggaaaaataaagggaattctgtcctgcacattaggtaccagctcagccatagcaggctagagcaccaaccagactcttggagtccccaaatctagcctaggctcttagcatgtctggacctgcygtgctccagaggagagcccactgccctgaaggatgagtttcaggcctggcaacattcaccacaaactgactaaagaacccttgggctttaagggaacattgatggtctcctggcagaa

SEQ ID NO: 383502 - DNA, 455 bp, Homo sapiens
ctacttagctatttgttttaaaaaacaaaaataaatgaagtaaatgtctatctacttcatatcgttcatcaaatttcaataatttctttccattaytttttctcatttatgagcactgccttaaaatcaattaaaaagacttcctttattctcattttgcaatgctaagtgttcattgtgaatgctaacagtgtatgatattgacaaatatataagcaagctgtgcatttgtatatgctgatataatgaatttctagagttttaattatcttcatatcaaaattgacctgctagaatatgaaaaatattaacagctcactaaaagcaaatatgatattacttaaaataatactttattcctctaaaaggacatataaacatctagacatagacatggtcttcatcacattcgtctgctatgtagaaaaataatgtaaaaataacattaagtattc

SEQ ID NO: 383503 - DNA, 575 bp, Homo sapiens
attttcataggttaagagtaaaaaaaatcattaattttcatatataactctatattttgtactccctcaaaaacaaaaccaatctacttttctacttgctggggaaaagatgcttacctatataaaaggaaatgagatrttgcttcttaaaaagacttttaaacaactctcttgttttttaacatcatctcctctactatttcaacattcttgatgtttataattctcaggattttggaccattccataatttatataatactgattttgcccttcccaattgagctaccctatctgcctgtaatgagttaatactattctatttgcttatggctatgttccaaaatttgactcctgtctcttctttcttttctcttttttttggggggtgcggggggttgggcagggaggttcatgccatttgtcttttaccttcactgtgaagaaatagaaactctactatataactcatcatgtttttaaattgaaagcaaggtatagattttagcataagagtgtttcatgatgtcaccatattcacacctatagaaaccagatttttataagttcatgaa

SEQ ID NO: 383504 - DNA, 573 bp, Homo sapiens
aaaatcaaatgattatatcaatatatgcagaaaaagcatttgaccaaatttaacacccattcatggttaaaaaaaataaaaataaaaaaacaaaaaaaactctcagtatatagcaggaacagaggataaccccaaattgataaagaatatctacaaaacacctacaattaacatcattcttaatggtaggaaaggaagcattcacaccaaaacgaggaagaaggcatggattttctctattgccatgcattttaaacatcatactggaggtcctagctaatgcactaagaaaaggaagtagaaggtatayagtgtaggaaggaagaaataatactgtatttgatagcaggtgacaggatgatctgtatgagaagttaaaaaaaaaacccaaaaacttccaaaatttatgttattgtagtaattttatagaatacaaggttaatacagaaaagtcaatcattttcctgcatacaggcaatgaacaagtagaattttaatttaataacaaaataccatttatattagcaccaaaaatgaaatacttagatagaaatctaacgaaatatgaacaaa

SEQ ID NO: 383505 - DNA, 625 bp, Homo sapiens
taatatattctatagccaagacaatctgtctgggtagattgttggattgtcctctggtaggtatgcatatttcaacatggcagtttgcaggtaatctttgataaatgttcaggtctgaggatacaggacttgataggaactatgatggattagtgaggacaattttcctttgcattacagggctgtcatgtgagaaaagttttcgtatctctcacattataagggctttgggaaactccaatgcttcaatttaatctgataacacatagaccctgggaawacaatagtgaggcatgttagagatcttcacacccacagaaacaggtacagagaaagtcacactctgccgaatgagactgttcaccaggaaattacaacagggtcaggagtagtaactcataatgcagttagtagtcatagctaggaacactttgtgtagtagaaagctaagtttctgcacaggggaaaatacttttttccccaaaatatattagaaagtttgaatattgaatatggtagaaaactgagaagtgttacaaacacactacttcttcatgaggcttaatactcaatatataatatttgaattgaagtatgtctgagaatacagcctcacttcaattaa

SEQ ID NO: 383506 - DNA, 625 bp, Homo sapiens
taatatattctatagccaagacaatctgtctgggtagattgttggattgtcctctggtaggtatgcatatttcaacatggcagtttgcaggtaatctttgataaatgttcaggtctgaggatacaggacttgataggaactatgatggattagtgaggacaattttcctttgcattacagggctgtcatgtgagaaaagttttcgtatctctcacattataagggctttgggaaactccaatgcttcaatttaatctgataacacatagaccctgggaatmcaatagtgaggcatgttagagatcttcacacccacagaaacaggtacagagaaagtcacactctgccgaatgagactgttcaccaggaaattacaacagggtcaggagtagtaactcataatgcagttagtagtcatagctaggaacactttgtgtagtagaaagctaagtttctgcacaggggaaaatacttttttccccaaaatatattagaaagtttgaatattgaatatggtagaaaactgagaagtgttacaaacacactacttcttcatgaggcttaatactcaatatataatatttgaattgaagtatgtctgagaatacagcctcacttcaattaa

SEQ ID NO: 383507 - DNA, 545 bp, Homo sapiens
ggtgggccctacaagcaatgaagatgtccctataagatcgaatcagaggcagatttggacaagaagaaatacaacggaggaagctatgtgaagttggagactaagactgaagttatgcaactacaaaccaaggcatgccraaaagttcaagcagtcaccaggaactggggtagaggagtgggacatgttctttttcaaggactccagaagaaacagaccatgccaaaaacttggttttagactggaatacagaactgtgaaataattcatttctgttgtttaaagccatgtggtttgttgtaatttttgtggcagccaatgggaactaaaataggcattatttttgtttatggtattgtatctaccttttgccattgagagtgaacatattaatggtttcataatatttcaacttctatgctgtataataatatgaagccttagattaaaatttttatattaaagctaatattccagtaaatttctttctacataagtactatacgggtttctattcctttacgaagcatttgtaactattattt

SEQ ID NO: 383508 - DNA, 545 bp, Homo sapiens
ggtgggccctacaagcaatgaagatgtccctataagatcgaatcagaggcagatttggacaagaagaaatacaacggaggaagctatgtgaagttggagactaagactgaagttatgcaactacaaaccaaggcatgccaaaaagttcaagcagtcaccaggaactggggtagaggagtgggacatgttctttttcaaggactccagaagaaacagaccatgccaaaaacttggttttagactggaatacagaactgtgaaataattcatttctgttgtttaaagccatgtggtttgttgtaatttttgtggcagccaatgggaactaaaataggcattatttttgtttatggtattgtatctaccttttgccattgagagtgaacatattaatggtttcataatatttcaacttctatgctgtatrataatatgaagccttagattaaaatttttatattaaagctaatattccagtaaatttctttctacataagtactatacgggtttctattcctttacgaagcatttgtaactattattt

SEQ ID NO: 383509 - DNA, 545 bp, Homo sapiens
ggtgggccctacaagcaatgaagatgtccctataagatcgaatcagaggcagatttggacaagaagaaatacaacggaggaagctatgtgaagttggagactaagactgaagttatgcaactacaaaccaaggcatgccaaaaagttcaagcagtcaccaggaactggggtagaggagtgggacatgttctttttcaaggactccagaagaaacagaccatgccaaaaacttggttttagactggaatacagaactgtgaaataattcatttctgttgtttaaagccatgtggtttgttgtaatttttgtggcagccaatgggaactaaaataggcattatttttgtttatggtattgtatctaccttttgccattgagagtgaacatattaatggtttcataatatttcaacttctatgctgtataataatatgaagccttagattaaaatttttatattaaagctaatattccagwaaatttctttctacataagtactatacgggtttctattcctttacgaagcatttgtaactattattt

SEQ ID NO: 383510 - DNA, 539 bp, Homo sapiens
tgtacaagaaacacacttcacctataaagataagcatagactgaaaataatgggatagaaaaagatatttcataccaatggaactcaaaaaaagagcaggaatagctagctatagcaacaaaatacattttaggacaatattgaaataaaagactaaacaggtcattatataatgataaaggggttaatcattaaactcccagaggtcaaaacargaagataaataataatgaatatatatgtgctcatttctggagcacctggatgcaaaaaactaatattattagagctaaagagagagctagacctgaatacagtaatagctggagggtacaacaccccacctacagtattgaaatgatcttcgagacagaaaaccaacaaacaaatattggacttaatctgcactatttcaataaatagacctaatagatatatacagaacattttatccaacatctgaagaatacacattcttctcctcagcacatggattattctcaagaatagaccgtatgatagatcacaagagaagtctt

SEQ ID NO: 383511 - DNA, 542 bp, Homo sapiens
caaaccaaacacaaacccagcagagaaaataaatacaaaaatcagagcagaactaaataaaattgaaacaaaaaaatgcaacagataaatgaaacaaaaaggtggttatttgaaaacataaacaaaatagaacattaatgaggtttttcaataaaagaagagagagtttataaacaagagagagtttataaaataagagagagtttatttataaaataaactcaattttataaacaaaataggagatactacaaataatactggaaaaatagaaaagatcattcaaaggtactgtgagcctctttatgtgcacaaactaggaaacctagaggagatggataaatttctcaaagtatacagaaattcctggaaaccctctggattaaaccaggaagaaatagaaactctgaacagaccaataacacgtagtgggattgaaacagtacctaaaaaattgccaagaaaaaaatgtccagaacgatataaattcacagctgaattctrtcattcaaagaagaattggtagcaatcctgctgaaaat

SEQ ID NO: 383512 - DNA, 538 bp, Homo sapiens
agatctgtgtgtgagtctttgagtaggaaattcttataagtggcaaaattgtagtgacagaaggtaaattagtgcttgctagtggctgagcatgaaaattaataacaaataaaaattagtaagccctgcctgtatttgcatttttgcttttcttgctttacttcccttttctgggagtaatttttgtcctgtataataaatctttgtcttattcaaggccatgwtgatttttaaaatttgttttcttctagagttatttttatcttaattctttcagttacttttatacttttataatttaacttgtgcttatggctcttactcattttgaattgtcattgtatatagtgtgagaaagagatcaaagagttttttttactgttactttgtcatgtttttttttcttttttttttcttttaggttattgagtcatttcaacaccatttgttgaaaaataaaaaagattaacctccatattgagttaccttggcatcttttttcaaagtctattgatcatgtacatttaaatcaatttct

SEQ ID NO: 383513 - DNA, 397 bp, Homo sapiens
catcatcactaatgatcagggaaatgcaaattaaaaccacaataagatacaatcttactcctacatgaattgcagtagtaaaaaatttaaaaaatcatagatgtttgtgtggatgtggtgaaaagggaacttttacactgctggtggtaatgtaaatgagaacaagcactayggaaaacagtgtggagattccttaaataagtaaaagtggatctacaatttgatccagtattcccactacttggtatctacccagaggaaaagaagccattatataaaaaaatactagcacatgcatgtgtataacagtacaattttcaattgcaaaaatatgggtccaggctaaattcccatcgaccaatgagtgaatacataaatatacaacagaatactacct

SEQ ID NO: 383514 - DNA, 538 bp, Homo sapiens
agatctgtgtgtgagtctttgagtaggaaattcttataagtggcaaaattgtagtgacagaaggtaaattagtgcttgctagtggctgagcatgaaaattaataacaaataaaaattagtaagccctgcctgtatttgcatttttgcttttcttgctttacttcccttttctgggagtaatttttgtcctgtataataaatctttgtcttattcaaggccatgatgatttttaaaatttgttttcttctagagttatttttatcttaattctttcagttacttttatacttttataatttaacttgtgcttatggctcktactcattttgaattgtcattgtatatagtgtgagaaagagatcaaagagttttttttactgttactttgtcatgtttttttttcttttttttttcttttaggttattgagtcatttcaacaccatttgttgaaaaataaaaaagattaacctccatattgagttaccttggcatcttttttcaaagtctattgatcatgtacatttaaatcaatttct

SEQ ID NO: 383515 - DNA, 538 bp, Homo sapiens
agatctgtgtgtgagtctttgagtaggaaattcttataagtggcaaaattgtagtgacagaaggtaaattagtgcttgctagtggctgagcatgaaaattaataacaaataaaaattagtaagccctgcctgtatttgcatttttgcttttcttgctttacttcccttttctgggagtaatttttgtcctgtataataaatctttgtcttattcaaggccatgatgatttttaaaatttgttttcttctagagttatttttatcttaattctttcagttacttttatacttttataatttaacttgtgcttatggctcttactcattttgaattgwcattgtatatagtgtgagaaagagatcaaagagttttttttactgttactttgtcatgtttttttttcttttttttttcttttaggttattgagtcatttcaacaccatttgttgaaaaataaaaaagattaacctccatattgagttaccttggcatcttttttcaaagtctattgatcatgtacatttaaatcaatttct

SEQ ID NO: 383516 - DNA, 578 bp, Homo sapiens
ttagtgatataactataactaatacatatccttacacccagaattctaggttgtcttacattagagaactctgctttccttttttctattatgtcagaattttagaacataaagaatctttgactgagtcattgcatgaattccaaartgaagacaaaatattgtcagggagttgcccactccttagatgtctaataaatttcagaatttagagttaggacatggtttatgtatttattaagaccttttcttaagcaatatagaaaatctgacagtgtttgaaatacagaagttggcatttcatcactggaggaacattactcttgtttaaaaatgatttcagaaattttattcatgtaatatttcacacagtggttttttatgtcacagaaaaatttacccagaaaaacaagtctaataataaagagtaaattaatattacttagattttataatgtttgaaaaggtgaacatatcagtatctgtttgttagaggaacctataaaatctcttcatccagctaggttccctaaactgtttttcaactctaacaaattttgttttttatgtcagtaatc

SEQ ID NO: 383517 - DNA, 580 bp, Homo sapiens
tgtgttatgcagtacttgggttagcttaattccagtagaacaaaagagctcagaacaaggtgaccaatacagcataatgtaaaggaatgaacctggtcaccaggaagcctgcattytggtgctagctatttctgtaactagtaatcagagttccttttttttttttttttttttttttcaccatttgccacatgtacgtactttacatgaactaaattagaggtagtggactgagtgatgaagaacttgaactcgggtcagctgtctgccttgaatcctggttccatgactttctgtctgtgtaactatgtctttctaagcctcagtttctggattccaaaaaagggaataacaatagttcttaccccatagagttatttcgaaaattaagtgagttaatatttgtgaagaactttgaagagtgactggcatggtagatgtttgagttcattaacaacaacaataaaaatggaaataaaacctaacaactctatgaagtagtcagctttcactcctatttcaaagatgaggaaatagtggttcaaagcagtttctaagctactaagacatggagtctgga

SEQ ID NO: 383518 - DNA, 580 bp, Homo sapiens
tgtgttatgcagtacttgggttagcttaattccagtagaacaaaagagctcagaacaaggtgaccaatacagcataatgtaaaggaatgaacctggtcaccaggaagcctgcattttggtgctagctatttctgtaactagtaatcagagttccttttttttttttttttttttttttcaccatttgccacatgtacgtactttacatgaactaaattagaggtagtggactgagtgatgaaraacttgaactcgggtcagctgtctgccttgaatcctggttccatgactttctgtctgtgtaactatgtctttctaagcctcagtttctggattccaaaaaagggaataacaatagttcttaccccatagagttatttcgaaaattaagtgagttaatatttgtgaagaactttgaagagtgactggcatggtagatgtttgagttcattaacaacaacaataaaaatggaaataaaacctaacaactctatgaagtagtcagctttcactcctatttcaaagatgaggaaatagtggttcaaagcagtttctaagctactaagacatggagtctgga

SEQ ID NO: 383519 - DNA, 580 bp, Homo sapiens
tgtgttatgcagtacttgggttagcttaattccagtagaacaaaagagctcagaacaaggtgaccaatacagcataatgtaaaggaatgaacctggtcaccaggaagcctgcattttggtgctagctatttctgtaactagtaatcagagttccttttttttttttttttttttttttcaccatttgccacatgtacgtactttacatgaactaaattagaggtagtggactgagtgatgaagaacttgaactcgggtcagctgtctgccttgaatcctggttccatgactttctgtctgtgtaactatgtctttctaagcctcagtttctggattccaaaaaagggaataacaatagttcttaccccatagagttatttcgaaaattaagtgagttaatatttgtgaaraactttgaagagtgactggcatggtagatgtttgagttcattaacaacaacaataaaaatggaaataaaacctaacaactctatgaagtagtcagctttcactcctatttcaaagatgaggaaatagtggttcaaagcagtttctaagctactaagacatggagtctgga

SEQ ID NO: 383520 - DNA, 580 bp, Homo sapiens
tgtgttatgcagtacttgggttagcttaattccagtagaacaaaagagctcagaacaaggtgaccaatacagcataatgtaaaggaatgaacctggtcaccaggaagcctgcattttggtgctagctatttctgtaactagtaatcagagttccttttttttttttttttttttttttcaccatttgccacatgtacgtactttacatgaactaaattagaggtagtggactgagtgatgaagaacttgaactcgggtcagctgtctgccttgaatcctggttccatgactttctgtctgtgtaactatgtctttctaagcctcagtttctggattccaaaaaagggaataacaatagttcttaccccatagagttatttcgaaaattaagtgagttaatatttgtgaagaactttgaaragtgactggcatggtagatgtttgagttcattaacaacaacaataaaaatggaaataaaacctaacaactctatgaagtagtcagctttcactcctatttcaaagatgaggaaatagtggttcaaagcagtttctaagctactaagacatggagtctgga

SEQ ID NO: 383521 - DNA, 561 bp, Homo sapiens
aatatcagtagctatttcaggtgggtgctgatcaccaaatatggcgtgatcaattataagtttgtatactgcgtgctgagwcctttggttctctttccccagtatcccccagagctcaagattctctgaggcaggaagtgtctggggactctggctaacttaacagaaaagacctggagatgctgacatcagagacaatagcttggaaaaacggaggccatgcaggaagaagaaaactggggggaaaaaaactcaaccttctattaacattttcaaagatctaggagaatattttatacccatgaaacaagaatacagatgctatgttaaaaaaaagaacattcagaaatgtaaaagagctgctcttagaaattaaagataatataggagaaatttttaaaagctcaatagaaattttagaaaattctggaaaaaaaagaaaaagaagcaggagatggataataggaaacaacagcaattccagaaaagagagtaccagaaatagacaggaagaagttatcaaagaaataattttgaaaattgccagaactgagggacatg

SEQ ID NO: 383522 - DNA, 589 bp, Homo sapiens
tcacaaggaaatgacatattgtcacctgttccagcatcattttactgtttgctatagctctgaactgctttccagtagaactagttcaagataaagagatgacacaaagcagcaattcactaagggagtagactcctgttttgaatatagctagaatcatcaatttacagtgaacaatgatgacttcagttgaattatgaatatttcactttatgcagttaatgctctagagtaattaaatgaaattatctttcagtggtttttctgaaaaactgaattaattttcatgtgaacaaaaggaagtactggcttccatttgacattccaagtgacagtgcagactcagcttgctcctytatacatctctatgagaatttattttctttcttttttcccattggcctgaagtttgcctcttagctgtatcaatatcatgcttctctaatcaggtcctgattagatggagatcttcagaaacataccttgagccaaggagctgattaaaatgtatgctgaattggaggaaaaagaatagatgaaatacagaagagatgaaaacgcttagaagtgacttcctattaaatttatt

SEQ ID NO: 383523 - DNA, 458 bp, Homo sapiens
ccagcataaggagagaagctttccttcctgtgtggaaacattacctacctttttccatcagattgtgatttgatagctcttgccttagttttgatggatttcccagagtcatctacaatctctttccccataccttggtaagatgactgcctggagataaggaaaatgcctgggatgaacaaagacatctattttctgcaagtagcttaccagctaacaggaattcatgactgcagtagcactatgttctgagaagctacctagagaaaaccatgcaaacacttgaggaatagtaaatcttaaagtttaaacaacctaatatcrgataaatgagtttctttttttaatgagctgtgggtaatttcgtttggatgttttatattaagcaagtgacaaaggctaaggtgatattccttaggactggatggtggtagtctggagtcgggttggttaaattg

SEQ ID NO: 383524 - DNA, 627 bp, Homo sapiens
gtttcattggaccattggagatttttcaaatgagccaaacatgttagtgtctaacacttgtgcaggctgttctttttaaaaatttaattgaggtgaaattcatgtaatataaaattaaccattttaaagtggacttagtggcacttagtatattcacaatattatgcagccaccacctctctctggtccccagatatctccatcacttcaaaataaaagyccatacccattaactcctcagcttcttatcccaaatccccagcccttagcaaccaccaatctgcttttttccccctatagatttgcctattctagttattttatataaatggagtcacattctctgtgttctttcgtgactggcttcttagcaaaatatttttgaggtccatccatgttgtagcacgtgtcagcacctcattccttcttatggctgaataatatttcactgcatcataatttggttattcattcaactcctgattcacatttaggcttctctacctttttgctattgtgaatagggctactataaacatttgcgtatgaggatatttttaatctctgttttcacttttttggggtatacactcaggagtggagttgttggtcacacatgtactgttc

SEQ ID NO: 383525 - DNA, 537 bp, Homo sapiens
ctcccctcagactcagggagtccaacatcgcaaattctgaccaatcaggaatttattaaatacagcacaggctctgctgagctccatagtatggggcctagcctgagtttaagtgcaattcagacatgctaggtgaatggatgaggctgacttgcatttgggctamcacatttcctgaaagataggtcaacctgagaggagtgaggcaaagtaaacataagcaaacaagaaaccatagctacaggagatgtggggtagttcagggtgcagattgatgtgtatctctcagacctgtgtctcagccagatcacatctgatttctatggagaagagagggacggcaataaacacttaggaataggagcactgaagactgtaagatcctggggtgtgtaacaggctggagggaggctatctcctcgattgccacagcacaactttggcacagtgagctctctgcagtgcactggggtgggcctggtagagcagctgcagtgctgcttggcactgtacccagtggagtgtggagctcatact

SEQ ID NO: 383526 - DNA, 600 bp, Homo sapiens
gagtggaggaggctgacccacagtgtcaagggatgaacaaaggggaacttagtccttatttaagatgaaggtggggctgtggttgagaggtaagggacccctcaaactatatggacaaggagaggcagggaagcaaggatgctccaaagcaacaagtaaagggaatagacagaaaaagagtggaattcaaagtaaacaggcagtgatggagacagtagacagtaaagaagtggagcctggagaaaatctcaaatgcgctgggaagacccaaccagcccacccaattcatacacttccctagaaggctggtcttcaggagatatttaactttgtcagtctctttggggaattctcagtgtttttcactgagggggcaagaatcctcttgtgcttttyactaggggagcatgtacatcacaaagttcaaacattcacaactttgattgtaacccaagggggcagttaatcatcacagtttaatatataaaccttgtagcacatttgacatcaaactagccaatgctcaagggtcaatttccccttcataattctggaaaattatacccttactaccacgctaagatggtatatgttatgaga

SEQ ID NO: 383527 - DNA, 625 bp, Homo sapiens
aatacatcatatatttttttcctctgggtgatgacaggacttaaaatgcaaaatgctacacttgcctggaaaaactacctatttaaaaaaaaattagattttaaacgatctcctgggtactactatgttactcaggactgtcgacacagagaaatgaggcattctacttactgaaatgttgagaaatggcccaaacggtgccaagtgcatgtcccttactgtgaaccattcccccattccctgcactctggcccaattacgaggaatagccattactatgccaaatttggagagttgagctgccaggccagaagtgtcccttgatggtytcctgcgtactcattcaagagaatgaacatacaattgtttactgtgataagatgatactttattcactcttgtaaaagccatctaaaacaatcttcaaactttccagcaccatttgaatagtgatatgtatcatttaatctgtgccaaactcaaagttacaaagccttattcctggcaatgactacaaaaaatttccatttactatgaaaactaaaagaacacacaaagtttcagtcttcttctctggggtgttttcaatggattaatacaatgtgttatttctgaataaatacat

SEQ ID NO: 383528 - DNA, 619 bp, Homo sapiens
ttctcccattctgtaggttgcctgttcactctgatgctagtttcttttgctgtgcaraagctctttagtttaattagatcccatttgtcagttttggcttttgttgccattgcttttggtgtttcactcatgaagtctttgcccatgcctatgtcttgaacggtattgtctagttattatctcaccctagataatcaagtcagtcataggaaagaagctgcatttggaagcacaataagcagaattcagctacttagagaaggtggcaagcaggcttgagatcacaacattgctccagtgccaaaagcaattcaggggtttcaaggaaaccaggggaccagacccatctcattgcctgagccagcagattggaaatgaagaagtttgggggcacagaagaatcactcacagtcaaatagatgctgagtagatgccagatatattaattctactccattggtaaactgatgtttgtactctaatttttgcaatcactttgaaattgagctaagttgagccccaggtagaaggagtcttctctttcatttggccagggtttgagatgaaagtgactgatgtgcaccttgcttaatcaatatcttgatagtattctcatatg

SEQ ID NO: 383529 - DNA, 640 bp, Homo sapiens
aaagaaatacctgaaactgggtaatttgcaaagacaagaagtttaattggctcatggttccagatgctgtatgggaaacatagtagcatctgctcagtttctggagaggcctcaaaaaacttacaatcatggtggaaggtgaagggggagcagacacattacaggccagatcaggagacagagagagagcaagggaggagttggtccgcacttttaaataatcagatctcatgaggacttactcactattatgacaacagcattaaggggatagtgctaaaccattcatgagaaattcaccctcatgatccagtaacgtcccatgaggcccagcctccaacactggggatgttaaagtaaactatggcctgagaaggactctctacttctatagttgagtccttgtggacgaacggcaatctcacttaataggtagacaaaattgaaaacttaactgaggagtatgcacctgtaacaatagccgagtcttggccattccgagtggccgtacttcaaccattcatacacttttaagtgctcaaactgtgttcaaatcaggtaaatgccaccctgtaaccrgtccagccattctgtacctcatttccaatttttgtatgtcctttccctttttgtgtctgta

SEQ ID NO: 383530 - DNA, 648 bp, Homo sapiens
cactccaaaaatcttggatggggaagccaaacagattgtctaggaactgcaagagccatggaaacatcatgaaggacttggtttgctggggtggggaggaatgggggattgaggcataaaatattagcaatcatgggaaaagaatcttcatcatagcaaatatttgccagtaatcctgtccattcagacaactctgactgggatgagagtcgtgagatgagagaggatgcgtactgagtgtggatatgtgttcctgtttttccaaggtggacctggctccgtatttctctgctttgtggatcacatccacttttgctgtcaaatcacatagttacccctttggatccacgggatatgccttatatgtgcagggaagactccatctatatttacagaaactatgtttaaaaattccaaatcacatgctcttcggttcagagaattctttcagtcctccacatgctagctgcatgtagttctagatgccctaggccagggcttcccatgatatcccagagtaacaagcaaacgattttaggtacatggtaccctgtactcgggaaaaacaaatgagactgagcaartctcattgcaagatccatcccaagggctgagcgaatcaacatctcagcatatttgaacccgcac

SEQ ID NO: 383531 - DNA, 542 bp, Homo sapiens
gaaagaaaaagagcacattggagcccccacccaaagaatgagctygtttgcatactctaatctcacatagtcttaatttcattaacactttcattttggcagcttcacacacaacagtgaaagacataaaatccacaattttagcacagctgtttcctccttccttcacaaagttatttaaacacctcgtgacacaaggggaaagggtggatggatgacatttcaatgaattatctcctgtctgctgtgtcatttcagaaatacttactaattggcagaataatccttcaaaattacctttcaagatctggatattttaacaaactatacttattgtccattcctatgtttacattcttaaatccccaatatccgtagaagcagaattgctaagaaatgtagactcatgcaccatgttaaaaggcaaagaggatttaccaaatactgtaaaatccctaggaaaatttttttttagtagggagcttcaggatcatgtccttaggatttagaattttaaattgtgctgtcaaggaatttgtctt

SEQ ID NO: 383532 - DNA, 568 bp, Homo sapiens
ggagttttttaataatattcttgctattaaccttttattagatatatgattagcaaatattttcttgcattgctatagattgcctatatattctgttgattgtgtttaagctttctttttaagtttgatgtagtcccatttgtctatttttttattttgtttcctgtgctattggtgtcatatccaagaattgattgccaagtatagtgtcatgattttaccctggtttcttctaggaattttataattttaaggtttccatttaggtatttaacccattattttgacttaatttttgtaaatggtatgagatagtgggccaatttgattgttttgcaggtggatctctactttccttaatactacttgttaaagagactgccttttctccattgagtggtctccattgagtggtcttggaactgttgttgaatttagccatatacacaaggggttacttctgtgctttctattctattccactggtctatttgtctgattttaygtcagtatatcacactgttttaattactatagctttgtaatctgctttgaaatcaagaaatgt

SEQ ID NO: 383533 - DNA, 619 bp, Homo sapiens
aactcaacctctgctcccctcagccatggtcccagcttattactgctcacgcaagaatttagaggaagactcactcatatcttgtagcctggaaattatttacccatctgagactccatgataggcacagcagcctctatctcaaagcagattatgagaggcttcagtctcatctctggcctctcttgcttcagttaggaagctgtaccacctatgtagggagttgctagggattcacccctgctggggacacaggagtgtgcttgctggtccccatcctacagcagattctgagagggcccagtaccagctccagcctctctcactacagttgggggaactgctccatctgtgcagaaaactgcttagaagtgcacacatctaggctactgagaagtctcaccaacttctatcccgctgcatgttctgagaaagtccaatcttgactacaacccctctgacttcagtcagaggattatcttacctgggaagagaactgctgggaaaattgcttgtctttgccaacargacaatcttccaggctcagttccctagccagcttttcacacagtccgagtataaccctgccttgggtcttctccaagtacatacagcccag

SEQ ID NO: 383534 - DNA, 497 bp, Homo sapiens
cttttaattcatctttgagtaacaactatttttccgtagtgaattttttgatagaaactttaaaggaaggaaatttaagtttgaaaagtaaggttgagatttgtyttttcattccggaatgcagatattctaatttatttattaaagggtgatttaaatattctgtgtacagacatgtaggtaatggcaataatactactaataaaataccatcacaaaaattttattgagtacttcctatatgctatcaatgttctgagtcattttacatatatattaattaccttaatcctcacaaaaatctgtggttaattaatattacctcctttttacagacaagaacaccaaggcacacagagttttaatagattgtcccaaatcacagagctagcaaggaatgtagctagaactgaaatgcatgtactgtggctatagagcttgtatgtttaatgattatttcatactaccttgcatatatcttattcaaatatttctag

SEQ ID NO: 383535 - DNA, 497 bp, Homo sapiens
cttttaattcatctttgagtaacaactatttttccgtagtgaattttttgatagaaactttaaaggaaggaaatttaagtttgaaaagtaaggttgagatttgtcttttcattccggaatgcagatattctaatttatttattaaagggtgatttaaatattctgtgtacagacatgtaggtaatggcaataatactactaataaaataccatcacaaaaattttattgagtacttcctrtatgctatcaatgttctgagtcattttacatatatattaattaccttaatcctcacaaaaatctgtggttaattaatattacctcctttttacagacaagaacaccaaggcacacagagttttaatagattgtcccaaatcacagagctagcaaggaatgtagctagaactgaaatgcatgtactgtggctatagagcttgtatgtttaatgattatttcatactaccttgcatatatcttattcaaatatttctag

SEQ ID NO: 383536 - DNA, 497 bp, Homo sapiens
cttttaattcatctttgagtaacaactatttttccgtagtgaattttttgatagaaactttaaaggaaggaaatttaagtttgaaaagtaaggttgagatttgtcttttcattccggaatgcagatattctaatttatttattaaagggtgatttaaatattctgtgtacagacatgtaggtaatggcaataatactactaataaaataccatcacaaaaattttattgagtacttcctatatgctatcaatgttctgagtcattttacatatatattaattaccttaatcctcacaaaaatctgtggttaattaatattacctcctttttacagacaagaacaccaaggcacacagagttttaatagattgtcccaaatcacagagctagcaaggaatgtagctagaactgaaatgcatgtactgtggctayagagcttgtatgtttaatgattatttcatactaccttgcatatatcttattcaaatatttctag

SEQ ID NO: 383537 - DNA, 519 bp, Homo sapiens
tatttcactaggtgcatataccactttaactgagctttgcactttagctacaatttaaattagtaaataatttgttgctaagagtgagagaaacataaattattataaagaccatacatttctatcccagttgaaatatatgtaggtttttttctattaaattgttatgagctgggtaggcaaaacaaaatggtgtaatagaacgcttcaccaattgttgcccctgctaggacacccatttaataacgatctacacagaaaaaaacaccttcataagaaccaaaaatcagataagcactcatagtacctggttttaacattgtatctctaaaagaggcactgaagaggtagaaaaaaacagtattgaatcactgatgccacccctctaccaaccmcctgcagtggtagtgtagtacagagagtgtctctgggcactgggggagagagaaaacagcaattgtgagggtttgaactcagtgctgtcctgctagagcagaaaggaaaaatggaccaaactca

SEQ ID NO: 383538 - DNA, 602 bp, Homo sapiens
ttgatgcccaaccatggagggagcatttaaaccagccctagacagaggaaaatcactaatcccagtagtctaaacttgagatcccacaaacctcaccaccaagggctacagtgctctctgtctccaagtaaacatgaaaggcaatgcaagccataaggactgcaactcttaggtctgccctagtgctgacctaggcccagagacagtggactggggggtggtggagtgtggggtaacatactaagacacaagctagggtagtcaatggagtgctggcatcacatcacctctcccctaaccccaagctgcacaactcatggctccaaaagacacccctttcttctgtttaaggagagggaacagtggggaagactttgtcttgcattttggataccagctcaactacagcaagatagagcacttgtcagagttttgaggccccattccaggccctagctcccagacaatatttctagacatacctagggccataagagaaccctctgcctttaaggaaaggrctcagttctgccagcattcataaacagctaactgaagaacccttgggccctgaataaccagcagcgatacccaggtgctac

SEQ ID NO: 383539 - DNA, 614 bp, Homo sapiens
aggccttgggagagacccagtactgtgctggcttcagatctgacccagcaaagtcatagtgatggtgtccacaggggtgcttgtgtcactccactccactatttgtgtattttcaaatagctgatcttctctttccaagactataaaggtggtacttctacaagtttgcaagaaccgcggtgytactgggcttggggtgccccctaatgcagaaacagcttagatcatccaaattctttcaaatatctggaaggccttcccaaaaaggatggctacaagtaagtgcagatagcaaagactacaaataaatacataactcttcaatgcccagacactgaagaacatttactagcatcaacaccatccaggaaaacataacttaatccaatgaactaaataagacaccagggaccaatcctggagaaacagagttatgtgacctttcagagagagaattcaaaatagctgtgttgaagaaaagcaaagaaattcatgagaacaacaacaacaaaaaaaaaggaattcagaattctatcagataattttaacaaagagattgaaataaatgaaaagaatcaggcataaattctagagctgaaaaatacaacaggcat

SEQ ID NO: 383540 - DNA, 614 bp, Homo sapiens
aggccttgggagagacccagtactgtgctggcttcagatctgacccagcaaagtcatagtgatggtgtccacaggggtgcttgtgtcactccactccactatttgtgtattttcaaatagctgatcttctctttccaagactataaaggtggtacttctacaagtttgcaagaaccgcggtgttactgggcttggggtgccccctaatgcagaaacagcttagatcatccaaattctttcaaatatctggaaggccttcccaaaaaggatggctacaagtaagtgcagatagcaaagactacaaataaatacataactcttcaatgcccagacactgaagaacatttactagcatcaacaccatccaggaaaacataacttaatccaatgaactaaataagacaccagggaccaatcctggagaaacagagttatgtgacctttcagagagagaattcaaaatagctgtgttgaagaaaagcaaagaaattcatgagaacaacaacaacaamaaaaaaggaattcagaattctatcagataattttaacaaagagattgaaataaatgaaaagaatcaggcataaattctagagctgaaaaatacaacaggcat

SEQ ID NO: 383541 - DNA, 544 bp, Homo sapiens
gtggctgaatggatgaagaaacaagaccccatggatctgttgcccacaaaaaaatgcacttcacctataaagacacacatagatggaaaataaagggatggaaaaagatattccatgccaatggaaaggaaaaagcaagagtagctatacttatatcagactaaataaatttcaaagcaaaaactataagagactgagcagagcaccataaaatgatacagggatcaattcagcaagagaatataacaattttaaaaatatatgcacccaacactggagaacccagatgtataaagcaaatattattagagctaaaggtagaggtcggccccaacaccatgatagctgaagacttcaacattccattttcagcattggacagatcttccaggcacaaaatcaacaaagaaacattgggcttaatctgcacaatggaccaaatgtrtctaatatatatttacataacatttcattcaatggctaaataatacacattcttttcctcagcacatggatcactctcaagaatagaccatatatatgt

SEQ ID NO: 383542 - DNA, 580 bp, Homo sapiens
gagatattatctaattgaaaaaaataagaaatattaatgtgacttttttttttagaaaatatagacataaatagcaaaaattwccataaaaaagaagagagtgtttgttagggtgtggatagacattggtgcatgtaaggggtagaccaagaatgtgattttgtttttgtttctgttttcgtgttttttatttttttttttgtaagtcacataatagtattaggttggtgtaaagtaattgcagcttttgctctcacttttaagccatttatatgaatacttttaacacaaaaaatttaaaactatgagcaaatataaattagaaacttttaaaaaatcccaacagaaatacttgataataaaggagattctttccatgatttttatatgttttctataaataaaagaaaacagatgggtgagatacaaacctaaaataattacatgcttatacaaaactgattgtcaaagaatgctaaagagctagtttttaaacagcagtttctaacattttaagttgatgcagactctgtacaaaaccacagtaagattctgagatttattttttgtgctcattgac

SEQ ID NO: 383543 - DNA, 592 bp, Homo sapiens
tgtccatctaacgccagtaaatagtaggcagattttaggtttgtgaccatagctatgggaagatatgggtgtacatataatgaacaattatgaaagataaaataaaagtaatgtttcttaaacttaagcaagccttattaatgcctgcacacatatcagaaacaatacctacatagactttcatggactaaggtatacgaatcttatgagaattcatattttccgactggagtcagatattaataaccccaacagctgcactattaaagttataagaataaagttagagcaaataaattgtaacacattgatgtgttattcttactaccattttatatatgtagaaatagatkaataagtttaaaagatgactttaagtctttaatgggtataacattcagaatctctaaaaattctatgtgtggaactagacagagaatgcataaagtgaaatttccccaggtttacagattgtcctgtgaaatcaggaaagattacagaggtgagacattctagagaatattgttgagacagggtgcatgcgcatttaatgtgccttttgagccactaagacaggttaaaattagcaact

SEQ ID NO: 383544 - DNA, 593 bp, Homo sapiens
cctctatctccatcttagaattgtttattatttatactgtaacyacttgtaggttaaaggatgatgctccaaagcacaaatctgtagagaccctgggaatttctcccaggtcatcatcaaattgtcccaaatgcttcctgcaactccttttacttgtctacttttctttacatccattgtgacatttggattgacattatgttaattcaaaatgccattacatcttttttttatcatgtattaatttaatgcaacatctcctagccattctattttcctctagaagccattctactctccttatactaaagtgctcatcgtaataagcaaatcaaaaataatgccactgctttcttaaagcttttcaattattccaagatacatttctttacggtatcatctaggtctgtgtagagacagatctttactttttccagtctcagctctcaccaaaatcttgctcatacttgtctagctacagaaatttcctcttttactaaaaacaattttattgtggtaagaacacttagagatctaacctcttaatagattttaaggtgtaaaatacagtactgttgactataagcaaagtg

SEQ ID NO: 383545 - DNA, 593 bp, Homo sapiens
tcagcaaaacaaatttagctgcacatccaaaagctaatccagcatcatcaagtatgctttatcctttggtgcaaggttggttcaatatatgccaatcaatctatgtgattcatcacatgaacagaactaaacaaaaaccacatgaccatctcaatagacacagaaaaggctttgataaaattcaacatccattcatgttaaaatctctcaagaaactaggcattgaaggtagataacttaaaataataaaagccatctgtaacaaacccacagccaacatcacactgaatgggcaaaagctggatatattcttcttgagaagcagaacaatacaagataccttctctcaccactcctctttaacatagtactggaagtcctagccagagcaatcaggaaagataaataaataaagggcatcsaaatagaaagaaaggaagtcaaactatatctctttatagatgatatgatactatacctagaaaacctcatagtctctgcccaaaggtttttggatcagataaacaacttcatcaaagtttcagaatgcaaagtcagtttacaataatcagtaacatttcaatgcatcagta

SEQ ID NO: 383546 - DNA, 560 bp, Homo sapiens
tgtcttgcagtttggcaggccttgtgactcatttgagacaataggatttgacggacagtgaattgtttgtgtcgcctatgtactttcccatgctgctgtggcatgtgtggaggctgcagtttgtgatgtaggacaactgcaatgaaaagctgccraattaaagttttgcttttgtttatcctaacacatttctcacatttttgttatttgttatttaacctgtcacagcagaaatgcaacattgacaatacaatgcagaaactatacatataaaaaatgttatctatgttaacaatcacactaactgttcagtgattaagatataatattttcaatataatatgctatattttgtatccaatacacacacatatgcatatacacatccgtgtgttttactgtgttttagttacatttaaagaacttgttaagtgttttgtttgtttaaacattatgttctttcatatttaaaattatgggatagaagttcctgttaagtgccttcatagagaagttctgattttgagaagcagattatcaatgtaaaatgagggaagcct

SEQ ID NO: 383547 - DNA, 566 bp, Homo sapiens
tttatatgcagacatatataattctttattatcaattccagttgaatgtcctcattgttcagaaacccaacatttcctgagtttctgtcagaatagcgtgccccttctaggtgcacatcatcctttgacttttgtaacattgctctcttgagttacctttacatggctctggcttttttctctccctgtcttgacttctagtattttcttcatctctttccatccaaactcagtgctccaaagcttctttycttaacctttcctctttttctttctttgtttagcaatagcctctgcctgagatatcagctgtataggtacaatataatgatatctatcgccttcattttcgcagctgcattccagacatctcttccagatttcataaacccttccttcctacttgcatgtaaagctcagttatctgttagatgttcgtgaaatcttctatgaatttctgcaactacatacaatgtttcatctgataaatctttagaatatttaaatattttctaatataaattatcatatattttacctagaccatgagctatagatataagtgt

SEQ ID NO: 383548 - DNA, 566 bp, Homo sapiens
tttatatgcagacatatataattctttattatcaattccagttgaatgtcctcattgttcagaaacccaacatttcctgagtttctgtcagaatagcgtgccccttctaggtgcacatcatcctttgacttttgtaacattgctctcttgagttacctttacatggctctggcttttttctctccctgtcttgacttctagtattttcttcatctctttccatccaaactcagtgctccaaagcttcttttcttaacctttcctctttttctttctttgtttagcaatagcctctgcctgagatatcagctgtataggtacaatataatgatatctatcgccttcatwttcgcagctgcattccagacatctcttccagatttcataaacccttccttcctacttgcatgtaaagctcagttatctgttagatgttcgtgaaatcttctatgaatttctgcaactacatacaatgtttcatctgataaatctttagaatatttaaatattttctaatataaattatcatatattttacctagaccatgagctatagatataagtgt

SEQ ID NO: 383549 - DNA, 632 bp, Homo sapiens
tttacgttatccccaaagcagagcctgagaaaggatttatgtaaaaacaatgtatgaaaaaggtaaaactgtgaggatagaagaatggtcactacttgttaagaaatcatgggggagaagagagggacaaatggcggagcagtggatttttattgcacagtgcatctattccatatgacactataatggtggatacatgtttggtatatttgttaaaacccatagaatgtacaatacaaaacgtgaaccttaatgtaaactatagattttagttaagaataatgtaccaacattggttcatcagttgtaacaaatataccacattaatacaaaacactaataatatggaaactgtgtgcttaggggagagtatgaatagtatgtgggaactttgtactttctgaytaatttttctgtaaacctaaagctgctctaaaagattaagtctattaatttttaaaaagggtacatattggccgggcaccatggctcacgcctgtaatctcggcactttgggaggctgaagtagtgggtggatcacgaggtcaggacatcgagaccatcctggctaacacggtgataccccgtctctactaaaaacacaaaaaattagccggacgtggtggtgggca

SEQ ID NO: 383550 - DNA, 476 bp, Homo sapiens
gtcagtaatccatacacaatgtttcagtaactgtaaggaacagaacagaaggatggccctgctggaagacaaactaggctgatatttatatgaaaccctatataactaacaatctataaaaattggggtaaaagaacaaccaaaaatcaaatattacttttctcatctgcccatgggctcctgaaatttattttctagaggaaatccagttttattccataattagaaataaggcttaaatttctcttctagctattaaggagtaaggaaataaacttactctttctgttcaacaattagaaaactaggcaaatatatgaaacaattgtcttcagacatagaacaacagacattttaagagatgggtccctgagaggaaggacataaagaaggtaggatctgtgattgccctaacctactgcctggagttttctggacacmgtacagagagcgggaagaactttatagcttggtgg

SEQ ID NO: 383551 - DNA, 592 bp, Homo sapiens
tacaccattttcttattttacattgcgtgcctgtattaaaacatctcatgtactctatcaatatgtacatctactatgtacccacaaaaattaaaaataattaataaattgtttcaaaatttttatgtccctaaaaatgtcattagctttacctatgagaaattaacttgtctacttgtgaatcattacaatttgcaagcctggaagttaaaaatcatgttaacctatggatccactggcctttttagggtagaatgtttctcatccaggtaaaaaaaaaaaawaagtcaggcaactcaattttaataactgatgtgctgaactacgtgagagtaggtacaaataagcagatgaggatcaaatagagtataagctaccctttcataaatagcagaataaagttcttctggtatgctattttgaaatatgcacttcaggactgcttgggttaaggaagcgatccaagaatttgcaacccttttcaaactgtaatggaaactaaaacaaagctccagatctgcactgctcagtagatacccactactaacatgtaactcctgggcctgtgaaatgtggttagtctgaattgaga

SEQ ID NO: 383552 - DNA, 618 bp, Homo sapiens
aagcagatgaggatcaaatagagtataagctaccctttcataaatagcagaataaagttcttctggtatgctattttgaaatatgcacttcagkactgcttgggttaaggaagcgatccaagaatttgcaacccttttcaaactgtaatggaaactaaaacaaagctccagatctgcactgctcagtagatacccactactaacatgtaactcctgggcctgtgaaatgtggttagtctgaattgagatatgctctaagtataaaatgaacatcagtttttaaaaatttaatacaaaaaagaaaaactcttttgaccatttttatattgattacatgctgaaatgataatgtttgaaaataccatgctgaacaaaatatattattaatttaactttacctgctttttttacttttttaacgtggctactagaatttttaaaattacatatgcagctcatattatgtttttgttggaaagctctgctctagaccttggaggaggcctctggatctgtaggccaaagtctgggcactttcattagcccattgcctaagagccatagcctgtttttcagcttgataatccaagagaaagttagagatggtatcatgtgaag

SEQ ID NO: 383553 - DNA, 571 bp, Homo sapiens
cacagtgaactttgtctctgggggcagtttgatttccggtggcctccaccataggctggacagggttgaggtggcttcctcttgctgtttgggcattccttcttaaaatgccctggcttgtcacacggatagcaactagcggatgcacctagtggatcctggaatttgcaagcctgcaaagcagctgctatagcctttgttcttctcctgagcattccctcttttgggcctcctcctggtccctattataaaagattgaagtggccaccctcaggaggctctctaaggtactatctggtcctatagcttgcttctatagtttccttctaatatcagaagctgcctgtgtaataaacttgtcttttagaatragcagcccctcaactgagtcaggggttaaggaggtgtactctatcagtgcctccctcagcctttccacaaaggctacaggattcttctctggcttttggtttatcatagacaaaccaaatttacaattagaccaactcaatttagaattgagaggtctggccttagttctttgtagcccctctaaaacgcatattaaaac

SEQ ID NO: 383554 - DNA, 571 bp, Homo sapiens
cacagtgaactttgtctctgggggcagtttgatttccggtggcctccaccataggctggacagggttgaggtggcttcctcttgctgtttgggcattccttcttaaaatgccctggcttgtcacacggatagcaactagcggatgcacctagtggatcctggaatttgcaagcctgcaaagcagctgctatagcctttgttcttctcctgagcattccctcttttgggcctcctcctggtccctattataaaagattgaagtggccaccctcaggaggctctctaaggtactatctggtcctatagcttgcttctatagtttccttctaatatcagaagctgcctgtgtaataaacttgtcttttagaataagcagcccctcaactgagtcaggggttaaggaggtgtactctatcagtgcctccctcagcctttccacaaaggctacaggattcttctctggcttttggtttatcatagacaaaccaaatttasaattagaccaactcaatttagaattgagaggtctggccttagttctttgtagcccctctaaaacgcatattaaaac

SEQ ID NO: 383555 - DNA, 580 bp, Homo sapiens
gagtcatgatctattttagcatgttaagcctgttaaaagctctgacaaacctagtagtaaaaaaacactttgttatactgggcacttcccaaactcttataagcaaacataagttctattttttagaccagtgccattgaaaacagttttaaaagtgtttagacagagtcagttattaagaaaattaaatgaggaatatttatttttattttataggcatatcaaacattggtggtagtgtagcaaaaaataaattgctgatgagtactgcaattatgcataatccttatggaagaccatttggcaatatgtgtcagaagtttttaaacttctaagcattggacacgattataccamaagatgaactgcatgattaatttacataaaagatacatgttacaggattatttgtaatatgtccccacaaaggggaatgagcaaatacattttaggatgctatatattgcaatagtaatatgatgaaaaagaatatttaatggaatgggaaatatgctatataatttagtgaaaaaagtgcaggccataatacgtatactatatgtatacctttgtataaaaa

SEQ ID NO: 383556 - DNA, 463 bp, Homo sapiens
tggaatgtttaggttctcagggaaacctgctcctctattggacaccatggccttggctcactgccaagtcttcagggttcagacagcagacattcacttgtgagtaacctggtgggagacccatcccactacaatccaccctgttccccagctcttatatttttttgccaatcttatgtgagtgtccctcaacagcatacaaggggaagaactatatgtgcctataatgtatayccatggcttttgtgtataggctatacctatatcctatataacagcattaaaagctgaaaataactacaattatgatgcctgttagcaaaacataactccaatgaataggtaaggtgtctaactaatttgagaatgagtcaaagagacctaattggttgtatcatggatctgagttgacaaatgatttaaagcatttatgacattataattttctttatctgggatacag

SEQ ID NO: 383557 - DNA, 535 bp, Homo sapiens
tcttaatttggtgattaccctttattgaaataaaatgcaycctccctgttatatttgattgccaagttttttttcatgttttctatattttattatatgaacatattttctaccacaatatttaaagaaaatataaagttacaggtaacattggtagtatatgatatttatatagaactttataatttccaatctactttttacacacatgatgtgtttcacacaatatacttgaaaagctatgcatgccaatttttatatgtccagttttaaatgtgaggaaagtaattgagggattcgcctggccaggattatgtaactagaaagtttctgagttatacctggatttcatgtctttttttcctgcagtgttctccatattatgctctttattctgagacttcgttgatgtcgtacacataccttatttccttctcaaccatcctgcaatacacaaacacagaatatgatttggttgtactttgttctgcatttccctttatctttgtgatcatcacaatacattatgttggat

SEQ ID NO: 383558 - DNA, 535 bp, Homo sapiens
tcttaatttggtgattaccctttattgaaataaaatgcaccctccctgttatatttgattgccaagttttttttcatgttttctatattttattatatgaacatattttctaccacaatatttaaagaaaatataaagttacaggtaacattggtagtatatgatatttatatagaactttataatttccaatctactttttacacacatgatgtgtttcacacaatatacttgaaaagctatgcatgccaatttttatatgtccagttttaaatgtgaggaaagtaattgagggattygcctggccaggattatgtaactagaaagtttctgagttatacctggatttcatgtctttttttcctgcagtgttctccatattatgctctttattctgagacttcgttgatgtcgtacacataccttatttccttctcaaccatcctgcaatacacaaacacagaatatgatttggttgtactttgttctgcatttccctttatctttgtgatcatcacaatacattatgttggat

SEQ ID NO: 383559 - DNA, 535 bp, Homo sapiens
tcttaatttggtgattaccctttattgaaataaaatgcaccctccctgttatatttgattgccaagttttttttcatgttttctatattttattatatgaacatattttctaccacaatatttaaagaaaatataaagttacaggtaacattggtagtatatgatatttatatagaactttataatttccaatctactttttacacacatgatgtgtttcacacaatatacttgaaaagctatgcatgccaatttttatatgtccagttttaaatgtgaggaaagtaattgagggattcgcctggccaggattatgtaactagaaagtttctgagttatacctggatttcatgtctttttttcctgcagkgttctccatattatgctctttattctgagacttcgttgatgtcgtacacataccttatttccttctcaaccatcctgcaatacacaaacacagaatatgatttggttgtactttgttctgcatttccctttatctttgtgatcatcacaatacattatgttggat

SEQ ID NO: 383560 - DNA, 525 bp, Homo sapiens
tattttctttgtggcctgatggaaagccaatttgggtaaataatccatgtgtgctcaggaagaatgtacattttcttattattgagtgtgtgtgtgcttatatatacataataaaaaatatgtattataaatataaaatatatttatatttatatgcacacacatatgtatgcacattcaagcaagcataatagttctgtttttcaaatagtcaataatcttgcagccctcagaatcacagcagattcagggacaatgattgctaattgttggttttacatatcatttacttggataagatttcctagtgwgagtccattgtttttatcattgcaatattaccagatttatttcctgtatttggatgcaaatttacatggttcttatttattcaggctttaaaaaatctcacaccaacgtggcacatgtatacacatgtaacaaacctgcacgttgtgcacatgtaccctagaacttaaagtataataaaaaaaatataataaaaaaaatcttgtcaacataata

SEQ ID NO: 383561 - DNA, 525 bp, Homo sapiens
tattttctttgtggcctgatggaaagccaatttgggtaaataatccatgtgtgctcaggaagaatgtacattttcttattattgagtgtgtgtgtgcttatatatacataataaaaaatatgtattataaatataaaatatatttatatttatatgcacacacatatgtatgcacattcaagcaagcataatagttctgtttttcaaatagtcaataatcttgcagccctcagaatcacagcagattcagggacaatgattgctaattgttggttttacatatcatttacttggataagatttcctagtgagagtccattgtttttatcrttgcaatattaccagatttatttcctgtatttggatgcaaatttacatggttcttatttattcaggctttaaaaaatctcacaccaacgtggcacatgtatacacatgtaacaaacctgcacgttgtgcacatgtaccctagaacttaaagtataataaaaaaaatataataaaaaaaatcttgtcaacataata

SEQ ID NO: 383562 - DNA, 599 bp, Homo sapiens
taaccaaatatatataatttcatttttttcaaaactaatgatatggtttgaacatatcatcttygaaacttatgaaataaagttctctatatgtaagtgtatgaaattcaaacacgtaacttcaacaaaaataaaattatatctcagacaattattcagttagtaacttatctgtgatgctattgcgaaggaaaatcagttatgagaacataagtgagacctcattcataaatccaaactgttgtcctttaaaaatatttatcattttattcaacaaaaattgaacaagcaaaatatgtctgatacttttttaggtcctgggttcatcccaaaaattgcaacttagactacccactttggattcagaatttatttggagatacagaggtagaaaactgaatcacaaaacaatgagaaagagttgtaacatggccatattcgatgagtatttggagcatagaaggaggaagtgactaactagcacttacaagagaatataatgaacttgttatattttgacacattatctcttcctgacaggtagcaagaaaagtgactaactacagagacctaaatccaaagacctgagaaatgtaggg

SEQ ID NO: 383563 - DNA, 599 bp, Homo sapiens
taaccaaatatatataatttcatttttttcaaaactaatgatatggtttgaacatatcatctttgaaacttatgaaataaagttctctatatgtaagtgtatgaaattcaaacacgtaacttcaacaaaaataaaattatatctcagacaattattcagttagtaacttatctgtgatgctattgcgaaggaaaatcagttatgagaacataagtgagacctcattcataaatccaaactgttgtcctttaaaaatatttatcattttattcaacaaaaattgaacargcaaaatatgtctgatacttttttaggtcctgggttcatcccaaaaattgcaacttagactacccactttggattcagaatttatttggagatacagaggtagaaaactgaatcacaaaacaatgagaaagagttgtaacatggccatattcgatgagtatttggagcatagaaggaggaagtgactaactagcacttacaagagaatataatgaacttgttatattttgacacattatctcttcctgacaggtagcaagaaaagtgactaactacagagacctaaatccaaagacctgagaaatgtaggg

SEQ ID NO: 383564 - DNA, 599 bp, Homo sapiens
taaccaaatatatataatttcatttttttcaaaactaatgatatggtttgaacatatcatctttgaaacttatgaaataaagttctctatatgtaagtgtatgaaattcaaacacgtaacttcaacaaaaataaaattatatctcagacaattattcagttagtaacttatctgtgatgctattgcgaaggaaaatcagttatgagaacataagtgagacctcattcataaatccaaactgttgtcctttaaaaatatttatcattttattcaacaaaaattgaacaagcaaaatatgtctgatacttttttaggtcctgggttcatcccaaaaattgcaacttagactacccactttggattcagaatttatttggagatacagaggtagaaaacygaatcacaaaacaatgagaaagagttgtaacatggccatattcgatgagtatttggagcatagaaggaggaagtgactaactagcacttacaagagaatataatgaacttgttatattttgacacattatctcttcctgacaggtagcaagaaaagtgactaactacagagacctaaatccaaagacctgagaaatgtaggg

SEQ ID NO: 383565 - DNA, 593 bp, Homo sapiens
tcaatattagcatatgtagactattgggaagtttgtatcagcctagtgcttccatcataaacattataaaatttcacctaatttstttaatgtttctcttttgaactttcaggagctcttctgaagtatccaaaagttaattcaaggtcaaaaagacttgattttgattttggaaagtttgccaaaaattaaggttcaaaacatttgatcaaaatcttatcacataattattatgaaataatatttatttaatcaaaagtcttaacaggcctggcgcagtggcttacacttgtatttccagcactttgagaggttgaggtgggtgaaccatttgatccaggagttcgagatcagcctgggcaacatggagaaattctgtctctacaaaaaaaaagtaacaaaaattagctgaatgtggtgatacgtgcctatattcccagctactcaggaagctgaggtgggaggatcacttgaggccaggaagaggaggttgcagtgagtcaagattgtgctactgcactccagcctgggtgacgcagcaagatcctgtctccaaaaactaaaagtctttacaaagacaagcaacatgtaaa

SEQ ID NO: 383566 - DNA, 593 bp, Homo sapiens
tcaatattagcatatgtagactattgggaagtttgtatcagcctagtgcttccatcataaacattataaaatttcacctaatttctttaatgtttctcttttgaactttcaggagctcttctgaagtatccaaaagttaattcaaggtcaaaaagacttgattttgattttggaaagtttgccaaaaattaaggttcaaaacatttgatcaaaatcttatcacataattattatgaaataatatttatttaatcaaaagtcttaacaggcctggcgcagtggcttacacttgtatttccagcactttgagaggttgaggtgggtgaaccatttgatccaggagttcgagatcagcctgggcaacatggagaaattctgtctctacmaaaaaaaagtaacaaaaattagctgaatgtggtgatacgtgcctatattcccagctactcaggaagctgaggtgggaggatcacttgaggccaggaagaggaggttgcagtgagtcaagattgtgctactgcactccagcctgggtgacgcagcaagatcctgtctccaaaaactaaaagtctttacaaagacaagcaacatgtaaa

SEQ ID NO: 383567 - DNA, 593 bp, Homo sapiens
tcaatattagcatatgtagactattgggaagtttgtatcagcctagtgcttccatcataaacattataaaatttcacctaatttctttaatgtttctcttttgaactttcaggagctcttctgaagtatccaaaagttaattcaaggtcaaaaagacttgattttgattttggaaagtttgccaaaaattaaggttcaaaacatttgatcaaaatcttatcacataattattatgaaataatatttatttaatcaaaagtcttaacaggcctggcgcagtggcttacacttgtatttccagcactttgagaggttgaggtgggtgaaccatttgatccaggagttcgagatcagcctgggcaacatggagaaattctgtctctacaaaaaaaaagtaacaaaaattagctgaatgtggtgatacrtgcctatattcccagctactcaggaagctgaggtgggaggatcacttgaggccaggaagaggaggttgcagtgagtcaagattgtgctactgcactccagcctgggtgacgcagcaagatcctgtctccaaaaactaaaagtctttacaaagacaagcaacatgtaaa

SEQ ID NO: 383568 - DNA, 545 bp, Homo sapiens
actctaaaggaaaaatgtctcatagccctctgcacaaaggtttggccaaattataacttacaggaaggactggcttggcctcagaaagaaaccatttatttcaataccatcctgcagtgggaccttttctgtaaacatgaggaaaaatggtctgaggccccatatgtgcaggcttgctatacctggcaggacaatccagacctttgctgacagtgtaggattgattcagcccttagtttactatctcaggaaaggctgccggggcagtcctagggaactaaagaaatgaaacccagaggcacccccagcagggcagccagctccctccagccctcttgctcggggtctgccccgtcctccctgttcagcttctctctcttgcttgcctcctcctagaaatcctcaccctagacaagctccagtctcactcttgccccttcaacagatgcctggtgaattgggccccagtaaggtccaggtcyccttctttctataagacttaaagcaaattaagggggatcttggcaagtttttagatgaccctg

SEQ ID NO: 383569 - DNA, 633 bp, Homo sapiens
gttccaaacctttggttggcctaatcttttatatttattttgagacataaagcagaacattttatttttcataaaaatctatgcccactcagaatccttttgatgtttagggtaaatatagatggatcaaacagctttactttgtagaccacagttagcattatcttcagttagggttttaaaaggaagaatggacactaagcagagaggaagtattaacattttgtttatgaggagaggctcagargccagtctacttgggttgaggttattactctgccagtttaccagccacatgattttgaaaaggaacctaagctcactgtgaatccattttctcatctttaaatatatatctttaatttcattgatttcatagtttagctctgcaaattaaacattagtatatttaaaatgctttaaaaagggtaaaaatataacatataatcattattattttattaaaaataaacatcattagtatcagacatcttaaaagtacatagtttaaaaataaactgcatgtaagaagaaatagatccataaaaggaagttagattctggaagaaatgttattattattatagttgactgggatctaggagctttaatgtggcacttaattaacaagca

SEQ ID NO: 383570 - DNA, 417 bp, Homo sapiens
tatagatataaaatgtgataatctcagctaaataatacctagaaaattgtaggatttacttgagtgtactgagaaattactttggcaagcagaacataatatttttttatgacagtgctgacttgtacttatttctttcttatattcaaacatgtttaagatggcatgggcatattatcagttacgattggtaaaatacatcacctctttatttcctgggccatgagattttaattattttataatgttacyatgtactatttctttcatgtgattctgaaacacaattcttcaaaataaattccatttactgatatagacactattgatgtacacatgtacacagaagttatcccatagtgctgcaattagatcaatttaagtaaaccgtcttttggtgatactttaatagttgag

SEQ ID NO: 383571 - DNA, 610 bp, Homo sapiens
ttaatctcctttggcaacactctcacagacgcacccaagaccaatactttgcatcctttaatccaatcgagttgacagtcaatattaaccatcacaacttttatgatgtatacattttatctcaagaaagctgttatacagaaaaagaacagtaccaataacaacagccagaagcagtagcacagcatatccagtttctggytaaatttacttgatgggacctaaaaaaattacacaacaggtctagtagtccaactgtgatgcaatacttaccattctggtatcttttttctcctctttatcatgttgtaatccctaaagtaaaatgattttgttaggttgattggttactatctgaaatgtcttgctttatccactaattcctgcactttgttgcagaattagtttaatgtatacacttaatttaaaatatatattcactttatgcaaaaaaaaaattccatgggggtgcttccctcaaaaaaaaaaatgtgactagcagacaatttgagactatcacttcttcagcacaggggacatttctgcctcaacatataactctaaagtactttctcttaaggtaatataattattcatatacaatcaaata

SEQ ID NO: 383572 - DNA, 610 bp, Homo sapiens
ttaatctcctttggcaacactctcacagacgcacccaagaccaatactttgcatcctttaatccaatcgagttgacagtcaatattaaccatcacaacttttatgatgtatacattttatctcaagaaagctgttatacagaaaaagaacagtaccaataacaacagccagaagcagtagcacagcatatccagtttctggctaaatttasttgatgggacctaaaaaaattacacaacaggtctagtagtccaactgtgatgcaatacttaccattctggtatcttttttctcctctttatcatgttgtaatccctaaagtaaaatgattttgttaggttgattggttactatctgaaatgtcttgctttatccactaattcctgcactttgttgcagaattagtttaatgtatacacttaatttaaaatatatattcactttatgcaaaaaaaaaattccatgggggtgcttccctcaaaaaaaaaaatgtgactagcagacaatttgagactatcacttcttcagcacaggggacatttctgcctcaacatataactctaaagtactttctcttaaggtaatataattattcatatacaatcaaata

SEQ ID NO: 383573 - DNA, 610 bp, Homo sapiens
ttaatctcctttggcaacactctcacagacgcacccaagaccaatactttgcatcctttaatccaatcgagttgacagtcaatattaaccatcacaacttttatgatgtatacattttatctcaagaaagctgttatacagaaaaagaacagtaccaataacaacagccagaagcagtagcacagcatatccagtttctggctaaatttacttgatgggacctaaaaaaattacacaacaggtctagtrgtccaactgtgatgcaatacttaccattctggtatcttttttctcctctttatcatgttgtaatccctaaagtaaaatgattttgttaggttgattggttactatctgaaatgtcttgctttatccactaattcctgcactttgttgcagaattagtttaatgtatacacttaatttaaaatatatattcactttatgcaaaaaaaaaattccatgggggtgcttccctcaaaaaaaaaaatgtgactagcagacaatttgagactatcacttcttcagcacaggggacatttctgcctcaacatataactctaaagtactttctcttaaggtaatataattattcatatacaatcaaata

SEQ ID NO: 383574 - DNA, 569 bp, Homo sapiens
aattttttttcagcatcaattgaaatgatcacatgttttttgtcctccattctgttgattatgatgtaccatgttgattgatttgtgtatgcctaaccattcttgcatccctttgatgaatttcacttggtcataatggatgatactttacatgtgctgttgaattcagtttgctaatattttgttgagcatttctgcatcaaatttcatcagagatattgkcctgtagtttcctttttttgatgtgtctttgtctggttttgctattaagatagtactggccttgtagaatgagtttgaaagtgttccctcctcctctgttttttggtataatttgaataggtctggtattagtccttctttaaatgtttgataaaagtcagcagtgaagccattaggtctgggcatttctctgctgcaagacattttaatcatagctttgttcttgtctcttgttattggtctattctgcttttggattcctccatagttgagtctcattaggttttatgtgtctgggaattcatcagtttcttctaggttttccaatttattggcatacaattgtt

SEQ ID NO: 383575 - DNA, 495 bp, Homo sapiens
atctttgtcatgtctggtgtgtttatttggatcttctctttctgtttctttgttaatctagctatcagtctatcaatcttttttatcatttcaaaaaactaacttttggttttattgatcttttgtatggatttgaggatctcaattttcttcagttccactctcattttagttatttattttctgctagcttttgggtggtgttcttgttttactagtttctctwggcatgaagttagataattaagttgcgatatttttgtcttcttaacataggcatttagcgctataaaatttccttttgacactgcttttggtgcatcccaaagattttggtaagttgtgtctctgttttcacttatttcaaagaacttttttttaatttctgtcttaattttgttgtttacccaaaagtcattcaggagcaagttatgtgatttccaatgtaattgtgtgaattgagagatatttttggtaatgatttctatttttatt

SEQ ID NO: 383576 - DNA, 571 bp, Homo sapiens
ttatctaaccttttcctttagctgtctttaagatttttttctttagcattgagcttgcataatctggtgactacatgctttggtgatgttagttttttaaataataccttgcagttgttctctagatttcttgtatcttgatgtctacatctctagcaaaattcagtaaattttcttgaattataccctcaaatgtgttttccaggttgtttacttttcttattctctctcagtaatgccaataattcataagtttaatggctttacataatcctatatttcttgaagacttgatttttcaaaaatttctttttctttatttttgtctgaatrgtttatttggaaaggctggacttcaagctctgtaattctttcttctgcttggtccagtctattgataaagctttaattgtatttggaaatttcttgagtaagttttttattcctgaagctctgattgattaattttcatgtttatctcttccatcatttcctggattgctttagaagtttatttgttttgattattaactttgtcttggatatcattgaggttccttgcaatccatgc

SEQ ID NO: 383577 - DNA, 575 bp, Homo sapiens
ttgttactccttgacaactgttctgttcatcctccagctgaaattctcataaaaataatgtttatgctatgtactttcccccaaatgcatttcattaagtcatccaygtgaccaggatttcctattgtgaatattgctgcaatgaacatgggcatgcaaatgtctctttgagatacttttgtgagaacaccattaaattttaaaactgctcattaaaggaaagaacaaagtgaaaaggcaacctgtaaaatgggaaaatattcgcaaattatatttctgataagagcttaatatctagaataaatagaagctcctacaactcagcaacaacaacaaagtcccaattaaaaaaaaagaaaagaatttgaatagatgtttagatatttctccaatgaagatgtccaaatggccagtaagcatatgaaaaaatattcaacatccctaatcattaggaaaatgcaaatataaaccacaatgagacatcatctcattaagatggccactatctgctccaaccacccaccgcccccaaaaaaagggagaaacagagcgggagagagaagaagaagaaaata

SEQ ID NO: 383578 - DNA, 575 bp, Homo sapiens
ttgttactccttgacaactgttctgttcatcctccagctgaaattctcataaaaataatgtttatgctatgtactttcccccaaatgcatttcattaagtcatccacgtgaccaggatttcctattgtgaatattgctgcaatgaacatgggcatgcaaatgtctctttgagatacttttgtgagaacaccattaaattttaaaactgctcattaaaggaaagaacaaagtgaaaaggcaayctgtaaaatgggaaaatattcgcaaattatatttctgataagagcttaatatctagaataaatagaagctcctacaactcagcaacaacaacaaagtcccaattaaaaaaaaagaaaagaatttgaatagatgtttagatatttctccaatgaagatgtccaaatggccagtaagcatatgaaaaaatattcaacatccctaatcattaggaaaatgcaaatataaaccacaatgagacatcatctcattaagatggccactatctgctccaaccacccaccgcccccaaaaaaagggagaaacagagcgggagagagaagaagaagaaaata

SEQ ID NO: 383579 - DNA, 575 bp, Homo sapiens
ttgttactccttgacaactgttctgttcatcctccagctgaaattctcataaaaataatgtttatgctatgtactttcccccaaatgcatttcattaagtcatccacgtgaccaggatttcctattgtgaatattgctgcaatgaacatgggcatgcaaatgtctctttgagatacttttgtgagaacaccattaaattttaaaactgctcattaaaggaaagaacaaagtgaaaaggcaacctgyaaaatgggaaaatattcgcaaattatatttctgataagagcttaatatctagaataaatagaagctcctacaactcagcaacaacaacaaagtcccaattaaaaaaaaagaaaagaatttgaatagatgtttagatatttctccaatgaagatgtccaaatggccagtaagcatatgaaaaaatattcaacatccctaatcattaggaaaatgcaaatataaaccacaatgagacatcatctcattaagatggccactatctgctccaaccacccaccgcccccaaaaaaagggagaaacagagcgggagagagaagaagaagaaaata

SEQ ID NO: 383580 - DNA, 598 bp, Homo sapiens
ggcttgtgtatgatacaaaagtttttagatagcttctgtgtcatctgtgacagttgtatcagataacttaaataaatgttttcttgagggttttcagaaatgcaggyacaggaatacaattcctcgtgaggactcaactcctaatctcaacttcctttttatttatttgatgatgtggtacttccctagaccccattctagatgttacaaaaaatgcaataattgtactttaatatctttataaactcctaaaattttctgaaaattaatatattctactctaagggcttcagataagagattaggggcccagtgtggtggctcatgcctgtaatcccagcactttgggatgctgaggcagggggatcacatgaggtcaggggtttgagaccagtctggcgaacatggagaaactctgcctctttggaaaatacaaaaattagtcgggcatggtggcacgcacctataatcccagctactcgggaggctgaggcaggagaatcacttaagcccaggagagctgagatttgccactgagatacagcaagaccctgtctcaaaaaaaaaaaaaaaaaaaaaggagattagggatctgtag

SEQ ID NO: 383581 - DNA, 450 bp, Homo sapiens
ttcttgagggttttcagaaatgcaggcacaggaatacaattcctcgtgaggactcaactcctaatctcaacttcctttttatttatttgatgatgtggtacttccctagaccccattctagatgttacaaaaaatgcaataattgtactttaatatctttataaactcctaaaattttctgaaaatyaatatattctactctaagggcttcagataagagattaggggcccagtgtggtggctcatgcctgtaatcccagcactttgggatgctgaggcagggggatcacatgaggtcaggggtttgagaccagtctggcgaacatggagaaactctgcctctttggaaaatacaaaaattagtcgggcatggtggcacgcacctataatcccagctactcgggaggctgaggcaggagaatcacttaagcccaggagagctgagatttg

SEQ ID NO: 383582 - DNA, 450 bp, Homo sapiens
ttcttgagggttttcagaaatgcaggcacaggaatacaattcctcgtgaggactcaactcctaatctcaacttcctttttatttatttgatgatgtggtacttccctagaccccattctagatgttacaaaaaatgcaataattgtactttaatatctttataaactcctaaaattttctgaaaattaatatattctactctaagggcttcagataagagattaggggcccagtgtggtggctcatgcctgtaatcccagcactttgggatgctgaggcagggggatcacatgaggtcaggggtttgagaccagtctggcgaacatggagaaactctgcctctttggaaaatacaaaaattagtcgggcatggtggcacgcacmtataatcccagctactcgggaggctgaggcaggagaatcacttaagcccaggagagctgagatttg

SEQ ID NO: 383583 - DNA, 601 bp, Homo sapiens
ctgggagttaaagatttaaagcctctcacacaatttatatatttttatctgtttaagtatttctaaatctcaaatgcaaataatgtttcttctaccagaataacttaacatacgagacaaagtgatccaataaaggttaaaaaaataggatttgactgacagacctcatgttattttagggtacattttatagtgtccattttatagtgtcatattaccagagggttaaacttgatgtctatttctttaacctatgttgtcatttaaaatatttatcaattttgaagagaaartatgaaacaacttaactaaatacattgtcaagcttcagttatagcaatgatgaagtcatttcatgtgaggatgatagagtagccaaactgaataaaatgaatttcaagattgatcatatttttcacaaaactttttctgctgttgtcctaatgtgcacttaagatctcagagaaacatggttttcaaactgatttttctaccatgaaacttagttggccatcctaatcagaatatagttaaaatctcactagaattgttagcaattactattgaggacattattgctagtttttaatttaagtgagtg

SEQ ID NO: 383584 - DNA, 517 bp, Homo sapiens
atctaatatattacgttaagtcctagttttctgcagatacttagtaatgttttctatttttaaaaaatctcacatcaagactgggtttaaaaatattttatgtaataaaaaggaatttttatataaatcttttaggtattattaaggaatcttttctatagcaatgtttgcagttcctctttcaactttaatttattttaaaattttaaattcatgattattaatgttatttttgattaacaaatcataatggtatatatttaagggatacaatgtgatgttttgatatatgtatacaatgtggaatgtttaagtcaagctaactagcatatccatcatttcacttatttaccattttttatgtgaggccatcatttaactctgtacatttgtgggttcaacttttttatattacacatataagtgagatcatgtggtagttgaacttctgtgcttgccttatttcacttagcataatgtccttcakatttatccgtgtcatgaatgacagaatttt

SEQ ID NO: 383585 - DNA, 526 bp, Homo sapiens
ctgtacatttgtgggttcaacttttttatattacacatataagtgagatcatgtggtagttgaacttctgtgcttgccttatttcacttagcataatgtccttcagatttatccgtgtcatgaatgacagaattttcccaatattctattgtgtatatatactacattttcttcatccattcatccattgttgaacacttaggttcattctgtatcttggctattgtgtataatgcttctatgaacatgatagtacagatatctctttgacatattgatttcgcttcctttggatatacatccagagtggtattactggatcatatggtagttctatttttagtgtcctgaggaaactttaggctgtttactataatggtgctaatttgcatttctacyaacaatgtataagagttctgcattaggccgttcttgcattgctataaagaaatacctgagattgagtaactcataagaaaagatttttaattggatcatagttctgcaacaggaagcatagcagcat

SEQ ID NO: 383586 - DNA, 534 bp, Homo sapiens
ctttgcaaacagagacaattttactatttcctttctgatttggatgtctttgtatttctttttctttgctaattgctctggctaggacttgtagtactatatggagtgaaggtgatgagagtatgcattctygtcttattcctgatcttaaaggataagctttcagcttttgaccattttgcatgatattagctgtgggcttttctctctctgtgctatgctgtgctgagtaggcttgggaaaggggtaacttgagtaatgtgaaactgtctttcctaccttcttcaatgtgtcttttattgtttctgtgctccaactaggtgctgtaatctctcacctggagtcctcagcactggtgaaggtactcttgtgtgtggatggctgttcaaattgatgtgtctctgaggggatgagccctggaaactcctattccagcatcttgttgatgtcctctctatttttccttgaaatttatttgttgaaggaattggattatttgtttgatagtgttttgcacagtctgaattttgctaa

SEQ ID NO: 383587 - DNA, 585 bp, Homo sapiens
aaagagccaccattgggtcactaagagccaaaatggcaaaacagtctaacttctcaacataatttttagcctaatagaataaagaaaatatagtagatttgatatgtcaggacttcagccaggcctcctatgatagataccgttttggacaaggtggagaaagatgaattggatgtacaattagataaatttgtcactactaaatttcagtgtaatagcatgctcattaacggatctagtcatttgagaaacactgtgccaggcactgtaccagatgttgaagacacaaacatgaaagtaacatgattcctgctggcatctgtataagcttaagctggcctggatgatggtgggtcatgtcatgaagtataatgctggacaggcagcagggagatcctgtgcctgagagcctcaagcatcaggtgggtggttgaagtctacatcttaaagacccaggtccaaccctgaaattttatgagtcttataagccgaaaaagacatttatctagatatcataagaagctaaacagktttagtaacataaatgatgccagcaaatagttgtagcagttgggaggatggtaa

SEQ ID NO: 383588 - DNA, 456 bp, Homo sapiens
ctaacaggacattccaatctctttcctttatccttatgtcaacctctgaatctgactgtgaaactatattttagaaatagagaattcaggccgggcacagtggctcacgcctgtaatcccaacactttgggtcrgatcacttgcagtcaggagttcaagaccagcctaaccaacatggcgaaaccccgtttctactaaaaatgcaaaaattagccaggcctggtggagtatgcctataatcccagctacttgggaggctgaggcaggagaatcacttgaactcaggaggcagaggttgcagtgagccgagattgtgccattgcactccagcctgggcaacaagagtgaaacttgtctcaaaaaagaaaaaaaaaaaaagaaagaaatagataaatcaatgctgcaggtgacttctgacattcataaagaatgtttagggttgacattatagctcta

SEQ ID NO: 383589 - DNA, 579 bp, Homo sapiens
ggccaatcttggagaaacagaatttgtttagaccatttggagacagaattcaaaatagcattttgaggaaactgaaagaaattcaagataacacagagtaaacaattcagaattctatcagataaatttaacaaagtgactgaaataattcagaagtgtcaagcagagattctaaagttgaaaaatgcagttgccatgctgaataatacatcagagtcttttagtagcagaattgatcaagcagaagaattagtgaccttaaacacaggatatttgggaatacacagtcagaggagacaaaaaaaaaagagagagagaaagacaaaaaaaacaatgaagcayacctgcagaatctagaaaatagcctcgaaagggcaattctaagagtttttggccctaaagagaagaaagagaaagatatgagggtagaaagattattcaaagggataatgtcagagaacttcccaaacctagagaaagatatcaacattcaaatataagaaggtttcagaacaccacgtagatttaagccaaagaagactacctcaaggcatttaataatcaaactcccaaaagtca

SEQ ID NO: 383590 - DNA, 536 bp, Homo sapiens
attgaataattctgctttgccagtcccattgtatgcctaatttctcattttaccctgttggataggataacatattcaaagtttaataaaagggttgatagcagcatcattaacatgttcatgatatcaaaaaggagctttcaataattcatcatgtacatttgctgtagcttattttagacacatcatatattcagaaagttcccttttattttcagtttggcaaaagtttyttttaaccaacctctttttctatgtttattttatatatattcgtagattttacaatgttcaacttattctgtagtcctgagataaagtgattcatggttttattcattttatatatatagcaaaattcagtttattagtaattggtttagaattgttatatctgtgttcataaatgagattgtcctaaagttcttgttttgtcctcagaaattgagttgtgcagtgttttcacttcttctattctttggaagtggttatatatgatcaatactatgctttttatttttaaattttgaatgtct

SEQ ID NO: 383591 - DNA, 491 bp, Homo sapiens
aacttatggaagtgttaaatgaattaaaacacacaaaatactaaaatagtgtcagccatgcagtaaatcctcattaaatgcctgttatccttaccaattttattattatcatcatcatcattttaatgatggtgggtcattgaaaagtgtattagccagagtttcccagagaaatcgacccaataggatgtgtgtgtatatatagagagagatttgttttaatgaattggctcatatgattatggagactggcaaattcaaaatttgtagttcaagtctgaaggctatcagctagagactcagaaaagaacagatgttgcagttcaagtccagagcccatctgctgcagaatttcttcttcatcagtggggagtcaagtcttttgttctattcaagcctttgactgattagatgargcccactcacattatggagggcaattttgctattttctaacactaaattttaaactattatgaaaatattgtctt

SEQ ID NO: 383592 - DNA, 495 bp, Homo sapiens
tgacaggtccaaatgaaaccaaggcataaagtcgtgtcagtggcttcataggcctaagccatgagttttatcagaagttattaaagcagggagactggatttyttcaggtttccaaatagaaagttgaagaaaagttgttaagattggctaaaaaaaaaaaaaagggcttgaatggtggctcatgcctgtaatcccagcactttgtgaggagttcaagaccagcctgagcaacatggagaaaccgtctttacaggagaaaaaaaaaaaacccacgaaaaaacagccaggcctggtgatacatgcctgtagtcccagctactcagtaggctgaggtaggaggattacttgaacccgggagcagaggttgcagtgagctcacattgcgccactgcactccagcctgggcgacagaaaaaaatctggcctacaaaaaggaagatccagaaacaagaggagtgggggtatgcaaattagtttttcactgtaatttgaag

SEQ ID NO: 383593 - DNA, 583 bp, Homo sapiens
ttgctcctgctttggtggtaacattggctatctttggttggcaccaggctcctrcagtactttctgtgattaacatcagagttattaactcagaaatcaagttctctacattttaattggctctagtgaacaaaagagctatagcacatagatggttgaagaaaaaagtattcagtattagccatgaatgattgttaagaagcagagatatctgcttctccaaattaaatgtaacatgagcacactaattaatttagtataaactgtgacctcttgtggcaggattcttgacattgtttcattacatttatgctcagtattctctggctaatgattagtttaaagggatttgtcactatcttaagaccaatgtggcagaaaacagttttcttggcaattttgacgcattgtaagaatagaggtaatgaaactgtttcaccctaatctgtagaatctgtagggctttggcttttggcatttataaaaagcctccttctgtttgtttaaggtacaatattatttgtacagttcaaatggaacttttaatgatgtctttgtaattatttattttttacttcatttg

SEQ ID NO: 383594 - DNA, 595 bp, Homo sapiens
agcaatgaaattaaatgaactacacgtccacataacaaaatgaactaacacacatgaactgattaaaagatgttagctaaaacagagcatagatattcctccaacttatgattgggttacatcctgataaacccatcataagttggaaatatcacaagttgaaactgcagttaatacgcctaacctactgaacatcatagcttagcttagcctactttaaacatgctcagaacacttagagtagcctacagttgggcaaaagcatacaatacaaagcctattttataacagactgttgaatatctcatgtaatatattwaataacatactgaaagtgaaaaacaggatagtagtgtgggttctcaccattaacgtacacagccgaaagctcactgtgcctgaagaatgtttgaagcatggaactaaaattaatttctggatgatgagaaagctgcagagacagtgtcatcagtctctcttctgaggagtctcaagaacagctggtagaaggcactggagcatcctacacttgatagtttagcaggtgtgatgttctttgagaggaagtcaagtatctatttaccctaatcatgtg

SEQ ID NO: 383595 - DNA, 595 bp, Homo sapiens
agcaatgaaattaaatgaactacacgtccacataacaaaatgaactaacacacatgaactgattaaaagatgttagctaaaacagagcatagatattcctccaacttatgattgggttacatcctgataaacccatcataagttggaaatatcacaagttgaaactgcagttaatacgcctaacctactgaacatcatagcttagcttagcctactttaaacatgctcagaacacttagagtagcctacagttgggcaaaagcatacaatacaaagcctattttataacagactgttgaatatctcatgtaatatattaaataacatactgaaagtgaaaaacaggatagtagtgtgggttctcaccattaacgtacacagccgaaagctcactgtgcctgaagaatgtttgaagcatggaactaaaattaatttctggatgatgagaaagctgcagagacagtgtcatcartctctcttctgaggagtctcaagaacagctggtagaaggcactggagcatcctacacttgatagtttagcaggtgtgatgttctttgagaggaagtcaagtatctatttaccctaatcatgtg

SEQ ID NO: 383596 - DNA, 595 bp, Homo sapiens
agcaatgaaattaaatgaactacacgtccacataacaaaatgaactaacacacatgaactgattaaaagatgttagctaaaacagagcatagatattcctccaacttatgattgggttacatcctgataaacccatcataagttggaaatatcacaagttgaaactgcagttaatacgcctaacctactgaacatcatagcttagcttagcctactttaaacatgctcagaacacttagagtagcctacagttgggcaaaagcatacaatacaaagcctattttataacagactgttgaatatctcatgtaatatattaaataacatactgaaagtgaaaaacaggatagtagtgtgggttctcaccattaacgtacacagccgaaagctcactgtgcctgaagaatgtttgaagcatggaactaaaattaatttctggatgatgagaaagctgcagagacagtgtcatcagtctctcttctgaggagtctcaagaacagctggtagaaggcactggagcatcctacrcttgatagtttagcaggtgtgatgttctttgagaggaagtcaagtatctatttaccctaatcatgtg

SEQ ID NO: 383597 - DNA, 530 bp, Homo sapiens
ctgggtactggaaagactgctgcagaggaacaccggcaagatttttcacaaccccatgggatgcctaccctcatgaagaattggggtacacaccattggcactatgtggagatgttagtacagcagcgtctgcctcctccacgttctccatactgctgcctctggatgcatgggtgggatcagtgagagttaagttaatggatgttggtgctatcagtagccatagtagactttaaacatggcttgtttcctacccaggattttcycacctccctttgactcacctatattcaacacagtcttttctgatagtaacaatggtatctatgcttcctgggtatagacatttatgcaccccaccctgaactcaatgacattaacagcaatcgccactggcccaccctgtgaaatccccaaatcacacttcaggaaaggcctccagcaaatagagaagaactaaacatgctctaaaaatatatcagaaaggtgaaactatgtttaaataaaactatgatgtcatatgtatttgt

SEQ ID NO: 383598 - DNA, 566 bp, Homo sapiens
tttgttcattttgccattgaattattygcctttttactgatttatatgagctctttgtatatccattatatgaaccgtttgccctaaattattttaaatatacctatttttgaatgtgatattttattttgagccaaaagatttatttttgtgtattcaaaaatcaatagttttcctttaaaaaattctcagattcttcctttctaaccagaaatcagatcactcttcatagacattttgcactgtcttttcaaacaaaatcccctttattttctcaattaatagtatattctgcacaaagtctaaaatttctctaaattaaacacctgaaaacttaccaactagttggttgtaatcagaggccatgtggtgtggtataagaagctatgaccctgggcaaaattacttgtcttcacagcaacttattttcttcaaaatgaggataataatgtctatctcacagggctgatgtgaggataaaactatataacatgtgaaaacacctaggtggtattcaataaatgttagtgactttcactctcctagacctgtttttgttgaacgtc

SEQ ID NO: 383599 - DNA, 616 bp, Homo sapiens
ttactggaattaaagaaagagtgaatgtcatgggactgccaccaggcggcaagcccatgccatgcaagtgctatccaaatagaaaactgtttagctcttcattacttttgaaacagtctgaggttaggaaatatctggaaactggcactgttaccacagctacccattccaccagagagtagcacatgcagcctggtctggcctctgaaaaactggcatctgtgagagcctgtccatcaactgttaccatcacagaaagaagagcctccatctcacgtctaccttacaaattccaggcaggcacatttctttggaaggtacttaatcctaagtggaaagactacataaaaatacagattttctattgttatttccaaattgatttatagcaaatataattcccataaaaatctactttttttctgaaactcaagaaattgattctaragttcttttgtataagcaaacatgtgagaatatctatggggaaataaagaataatgaaaggaacttaggggctcagaaataaaaatacattataaatttttatcagcacatagtatggtgatataacatttgtgagatagatcaatggaaaagaataataatccagaag

SEQ ID NO: 383600 - DNA, 537 bp, Homo sapiens
tttttattcctgacatcttggtatatccaaattctttccccccatagaaatgctgaaattagtctctttcaccaattacagcagggcacgagataatgtccaatctcactattaagccagagataagcaaaatacctaatgaaacacractcaaataaaagaaagagagggaggaaggaaagaaggaaggaaggaagggagggagggagggagggagggagggagggagggagaaaggaagggaaggggaaggggaaagggggaaatgtgtaggcagtttaagtcttcttattttacttgtatgttgtatatgtgaaaacatctacattaaatgaattacctcagaccaaaactcctttatatgaagcacaaagatttatgcaaagtcatatgaagttacagaataacaaccacagcaaacaaaatcaaccataaaactccttgaacactttgtctgtagcagctatgaggccagaaatattttagtgcagaccttttacttatctcttgcttaggtgaatactgaatatccaattt

SEQ ID NO: 383601 - DNA, 563 bp, Homo sapiens
ttttctctctgccaaattgagattttaaaaatgtgttaataactacttccatatttgaggctttataacatctcacatattattgatgcttaaaaataaatatttcatggcatcctctgaatacttttgtgatcttcccaaatatgtttaaataaacaattggattcagttcagaaaaaaagttgaacaatgagtaaatttcatgtgcacagcaggtacaaaatgaagatgatatcattcccatcctgcaggagctttgctagtcagagtggtagtaaggtaaaaatgaagatgaaagatgaaaaatgatgcaatgtttattctcaagtatgctgcatattacttgaattttgtcccctcaaaaaaacacagtgaggtcctaacccctcggtacctgtgaatgtggccttatttgaaaaacaaggtctttgcagatgtaatcacattaagacraaggcattatagtgggtcctaatccaatatggctagtacacttttaaaggggggaagtttggacacagacacataaggggaatgccatgtgaagtcagagacacacagag

SEQ ID NO: 383602 - DNA, 644 bp, Homo sapiens
ccttactagctatgtgattagttcttcttgtgtctctatctgtaaaagggacataaaagcactgccaaccacatgggtcattttgtgcatgacacaaagtaatgtgtgagaagcctaagaaatgtagatggttattatgattatgtgtttttattttcattgatacatactttgtgcagtgcttaacacataaaagtcattttttaaaagacttgaagaaatgaatggaggaacaagtagatgaaatgtatgggatgaagcaggtgatactgaacatgaaacacagcagagggatatttgattagatgggcactaaagaggcagaaggagattgaattaagagaatcaaagaaaaggctggccttcagtgaggaagaacatttttgcctgagctagcatgtttattttgaaagcctctttcaatatcaagcattttaattaatcacagttatatttttggtttttgattttttttttgctgtcttaatatggtttatggtatagagtgcacrtcaagtggtactttctctggatcagttaagatcaaggaaacccaatctatcccaccagataacacgttgttttaatttctaaatgtaatgggctggaggagatatttatcaagttcacagaatgtttcttaa

SEQ ID NO: 383603 - DNA, 556 bp, Homo sapiens
cttgtgtggtatggctcaagaaatctttcccagtccaatgtcctagagaatttcccccaataatttcttttagcaatttcatagtacaaggtcttagatttaaggctttaatctatttcgatgtgatttttgtatgtggtgagaaataggggtctagtttcattcttctgcatatggctatccagttttcgcagaaccctttatygaagagactgtcctttccccagtgtacgttcttggcacctttgtcagaaatgagctcactgtagatgtatggatttgtttctgagttctctattctgatcctaggtctgtatgtctgcttttatgccaataccatgctattttcattactatagctttgtggtataatttgaagccaggtaatatgatgcctccagctttttttccctttgttcgggatagctttggctattctgggtcttttgcagtttcatataaattttagaattttttttctatttctgtgaagaatgtccttaaatttttgataggcattgcattgaatctgtagattgctttaggtagtatggac

SEQ ID NO: 383604 - DNA, 545 bp, Homo sapiens
acttggtgaaagtggattagagcttttcaaaggtattttttacaaagtcaatgttaattttatgaaactgcttctaatttgaataattatttatcttttacccaacctgtaagtcctctgtccaattaacragactttggccacccatgacaaagtttactcatttgttatcctacttgcaaaagtgatgttgatggaatttgtgataagctctggtttcttcaagtaatactcagtctctaacctcttccagaataaaagcctagaaaatattctgtgatcccttacaactgattgattggggatgacatgtcaagctttgggctggagattcagtgattgcctcttgcctaggaggtttaaattttcatgtctccctctgagctgcagctaacatgtaacaaatttgcctggttagataacattattgcctacaactctgggcatcatacatgacttgcccatcctgtagtaaggataggcatagccaggcctggtgtgtgaagctgttgatagatgaataatcctccatactgcagaagcca

SEQ ID NO: 383605 - DNA, 545 bp, Homo sapiens
acttggtgaaagtggattagagcttttcaaaggtattttttacaaagtcaatgttaattttatgaaactgcttctaatttgaataattatttatcttttacccaacctgtaagtcctctgtccaattaacaagactttggccacccatgacaaagtttactcatttgttatcctacttgcaaaagtgatgttgatggaatttgtgataagcyctggtttcttcaagtaatactcagtctctaacctcttccagaataaaagcctagaaaatattctgtgatcccttacaactgattgattggggatgacatgtcaagctttgggctggagattcagtgattgcctcttgcctaggaggtttaaattttcatgtctccctctgagctgcagctaacatgtaacaaatttgcctggttagataacattattgcctacaactctgggcatcatacatgacttgcccatcctgtagtaaggataggcatagccaggcctggtgtgtgaagctgttgatagatgaataatcctccatactgcagaagcca

SEQ ID NO: 383606 - DNA, 572 bp, Homo sapiens
gtggcctacaagtccccagtgaactcaagaaccatgttgctatttaactataacatraaagtcacaaatcaaactcagtttctttttctcttatgattgtcaaagttatacattctgaaaagcttcaaggtgaaacaaagaaatctacttcaatgattctctgtcatttcataggtaggtgttcaaatcaggctgtgagcattacacaaatacatctgtggctcaaaaatcagccttcaaattaggtatttattcttttcatgcctgattaagacctgattatatgaaagcatgccaagtacatgatttacattattaaaatataagacttcagcattgagtataattcccaagtgatcttattattaatttattaagcatgtatcttgtaatgaactcaagatttctgtctcacaaaagaatagcattatcatgtactaatgaaataggcaaagtatgaacctcatatattgaaggcaagttacacatagatgtcttcaagtcaaggtctaagcaaggttgtttgtaattcaggggaaattctggaaataatcaccacaaaaatgtctctg

SEQ ID NO: 383607 - DNA, 620 bp, Homo sapiens
cctccacagcactccaggctcaccgtgtaaacaccctgcacagcacaaccaactccctctcccagtctaagcctggtaatcttaacaaaatagatactttgtttctcagacccactggaggactccctttctggctggcaaatgcatgaaacaccaaaggaacacgtgttcaagcccaaaggaaatatgcacgtgtcaggtgagcatcacatattcccaatgtaggcggaggaccttgaggttgagctctgccatccttccrctcccaaagcaaacattcacagagctatcagtacagtaacacgctcagctatgaggctctagagcagtctgagagggagtaatgagagaggtgtttagaattaacacgtcagtgggaaaagcaaccccctggcagtgcctggctataaataggccaatagacaatatgcttgagaagacatcattgtcactaagaccaaaaggaagctgtttggtcccctctcaagtcctcacgaaattctcacagaatctttcgaaagtagaattctaaaagtgaaaacattttttttctctcctttgggaagaagcacggtacagaggaaagagcaaggtctttggggcctggttcaaacgctagt

SEQ ID NO: 383608 - DNA, 620 bp, Homo sapiens
cctccacagcactccaggctcaccgtgtaaacaccctgcacagcacaaccaactccctctcccagtctaagcctggtaatcttaacaaaatagatactttgtttctcagacccactggaggactccctttctggctggcaaatgcatgaaacaccaaaggaacacgtgttcaagcccaaaggaaatatgcacgtgtcaggtgagcatcacatattcccaatgtaggcggaggaccttgaggttgagctctgccatccttccgctcccaaagcaaacattcacagagctatcagtacagtaacacgctcagctatgaggctctagagcagtctgagagggagtaatgagagaggtgtttagaattaacacgtcagtgggaaaagcaaccccctggcagtgcctggctataaataggccaatagacmatatgcttgagaagacatcattgtcactaagaccaaaaggaagctgtttggtcccctctcaagtcctcacgaaattctcacagaatctttcgaaagtagaattctaaaagtgaaaacattttttttctctcctttgggaagaagcacggtacagaggaaagagcaaggtctttggggcctggttcaaacgctagt

SEQ ID NO: 383609 - DNA, 620 bp, Homo sapiens
cctccacagcactccaggctcaccgtgtaaacaccctgcacagcacaaccaactccctctcccagtctaagcctggtaatcttaacaaaatagatactttgtttctcagacccactggaggactccctttctggctggcaaatgcatgaaacaccaaaggaacacgtgttcaagcccaaaggaaatatgcacgtgtcaggtgagcatcacatattcccaatgtaggcggaggaccttgaggttgagctctgccatccttccgctcccaaagcaaacattcacagagctatcagtacagtaacacgctcagctatgaggctctagagcagtctgagagggagtaatgagagaggtgtttagaattaacacgtcagtgggaaaagcaaccccctggcagtgcctggctataaataggccaatagacaatatgcttgagaagacatcattgtcactaagaccaaaaggaagctgtttggtcccctctcaagtcctcaygaaattctcacagaatctttcgaaagtagaattctaaaagtgaaaacattttttttctctcctttgggaagaagcacggtacagaggaaagagcaaggtctttggggcctggttcaaacgctagt

SEQ ID NO: 383610 - DNA, 311 bp, Homo sapiens
caataacacatttatctatcaaacaagcaaaaattcaaataagaaacaataaaaataggcatcaccagaaggctaatattacaggtacggcatcattcccttaayatgcattgttttaaaacaaccctgtaagttctgtcattagctcatatgtcatacaaaatcacaagtgctgataaacagatcaagtgaaaacaagaaccccacatcctgttgatgggtgtaagtttcccagaaggcaatctgaccaaaacgtatttaaaaacttcacacttacactctctaatccaataatattttctagaattcta

SEQ ID NO: 383611 - DNA, 311 bp, Homo sapiens
caataacacatttatctatcaaacaagcaaaaattcaaataagaaacaataaaaataggcatcaccagaaggctaatattacaggtacggcatcattcccttaacatgcattgttttaaaacaaccctgtaagttctgtcattagctcatatgtcatacaaaatcacaagtgctgataaacagatcaagtgaaaacaagaaccccacatcctgttgatgggtgtaagtttcccagaaggcaatctgaccaaaacrtatttaaaaacttcacacttacactctctaatccaataatattttctagaattcta

SEQ ID NO: 383612 - DNA, 554 bp, Homo sapiens
tgcaaagggaattcacagctacttgcaggctcttctctaattgtttgtttgtttgtttgttgttgttgttgttgttgtttgagacagagtctccctctgtcatccaggctggagtgcagtggtgcgatctcagctcactgcaacctccacctcccaggttaaagcaattctcctgcctcagcctcccgagtagctgggattacaggcacctgccagccaccacacccagctgatttttgtatttttagtagaggcggggtttcaccatgttggccaacctggtctcraactcctgacctcaagtgatccacccacctcggcctcccaaagtgctgggattacaggcatgagccaccacacctggccttctctaatagtatttttagtggattccctaggattttctatatacaagatcatgtcatctgcaaatacagatagttttactccctttccaatctggatgccttttattttttttatttttattttttttcctaactgctctggctagaacatccagtgcaatgttgaatagaagtggtgaggacgga

SEQ ID NO: 383613 - DNA, 555 bp, Homo sapiens
tttctatgtctcctttcaattctgtcagtttttgcttcatgtattttggagctccatttttaggcgtttgtaattattatatcttggtgatagattaagccttttatcactataaaatatccttgtgtatctctagtgactttttttgttttaagtctactgtatctgatattagtatcatcaccccagtgtttgtatagttacagtttgtatcatacatcttttcccatccttttacttttttatatctttgaatatactagttgtatctttgaatataaagtgtgtctccaggagacactatatagttggcttttattttttaacccctagcctgwcaatttgtgccttttgattggatcatttatccattcacacttaatatttctgatatagtgggagtccatgtctgtcattttatgttttgttttctctagatctcatattttttcatttcctgctttcttttgcattaataaaaatttctagtagagcagtttaattcctttgataatattttcattatattttaagtaattttattagtggttattc

SEQ ID NO: 383614 - DNA, 555 bp, Homo sapiens
tttctatgtctcctttcaattctgtcagtttttgcttcatgtattttggagctccatttttaggcgtttgtaattattatatcttggtgatagattaagccttttatcactataaaatatccttgtgtatctctagtgactttttttgttttaagtctactgtatctgatattagtatcatcaccccagtgtttgtatagttacagtttgtatcatacatcttttcccatccttttacttttttatatctttgaatatactagttgtatctttgaatataaagtgtgtctccaggagacactatatagttggcttttattttttaacccctagcctgtcaatttgtgccttttgattggatcatttatccattcacacttaatatttctgatatagtgggagtccatgtctgtcattttatgttttgttttctctagatctcatattttttcatttcctgctttcttttrcattaataaaaatttctagtagagcagtttaattcctttgataatattttcattatattttaagtaattttattagtggttattc

SEQ ID NO: 383615 - DNA, 558 bp, Homo sapiens
gtatacccctgcatggggcatactttgtaactcgcctgctgaatgagttacagggggcctgctgggacttgagttataggtctagaagcaaatggatcctgaagagaatcagcattgttttgcaaaggcaactgacccaggggaggccatcacagttttctctgggaatgcagggttaatccctcagatggcagtaaggaggatacttctactggcaaagaagactcctaagaatttaggggcaaaatgtcctcagcattacacacacaaaatgtgtgttgtaattcagtcacttgtgagatgagataaaaccacagagggacacacatgggaagagagagtggcagtgcagaggtagaggcagatgtgctgccctaccccccatgtgtgcacatcatgcacayatacacccctatgccagggtggcaggctgatttcagaaaacaaaaagatggcagtggaatgactgttaggatggtgtgagctcaggtaacatcgtaatgcctaaccttgtttttactaaccttgtttttagactttctttttcctttaatcacc

SEQ ID NO: 383616 - DNA, 558 bp, Homo sapiens
gtatacccctgcatggggcatactttgtaactcgcctgctgaatgagttacagggggcctgctgggacttgagttataggtctagaagcaaatggatcctgaagagaatcagcattgttttgcaaaggcaactgacccaggggaggccatcacagttttctctgggaatgcagggttaatccctcagatggcagtaaggaggatacttctactggcaaagaagactcctaagaatttaggggcaaaatgtcctcagcattacacacacaaaatgtgtgttgtaattcagtcacttgtgagatgagataaaaccacagagggacacacatgggaagagagagtggcagtgcagaggtagaggcagatgtgctgccctaccccccatgtgtgcacatcatgcacacatacacccctatgccagggtggcaggctgatttcagaaaacaaaaagatggcagtggaatgactgttaggatggtgtgagctcargtaacatcgtaatgcctaaccttgtttttactaaccttgtttttagactttctttttcctttaatcacc

SEQ ID NO: 383617 - DNA, 529 bp, Homo sapiens
aaatgaataaggtagagaatggaaaaaccaatagatctaattagtaaatcaaattcctacttttaaaattaacaaaataaattaaccactagctaacttaagaagaaaaaagagaaggggaggaaggggaaagcacaggtacacaaaataagaaatggcaaaaggaactgaagcaaaaaattaaaaatccctaagaaaygactttgcacatccctatgcaaaaaaatttgaaaacctggatataaataagtaatttcctacgaaaatataggttacttaaattaacctcatcagaaatgtaaaacttaaacaggaccagtttagctgaacgttatcaaggcccagatggtttcacaggcgaattctacaaaatcaatgaccacatacacatagtctcaatgccacaaaattgtttcagagctctaaaaaatgaaagaagactttaaaatactacttataaagcaagtgtaatattgatatctaaacttaataaagacagtacagaaagtaaaattactagttaaaggat

SEQ ID NO: 383618 - DNA, 529 bp, Homo sapiens
aaatgaataaggtagagaatggaaaaaccaatagatctaattagtaaatcaaattcctacttttaaaattaacaaaataaattaaccactagctaacttaagaagaaaaaagagaaggggaggaaggggaaagcacaggtacacaaaataagaaatggcaaaaggaactgaagcaaaaaattaaaaatccctaagaaacgactttgcacatycctatgcaaaaaaatttgaaaacctggatataaataagtaatttcctacgaaaatataggttacttaaattaacctcatcagaaatgtaaaacttaaacaggaccagtttagctgaacgttatcaaggcccagatggtttcacaggcgaattctacaaaatcaatgaccacatacacatagtctcaatgccacaaaattgtttcagagctctaaaaaatgaaagaagactttaaaatactacttataaagcaagtgtaatattgatatctaaacttaataaagacagtacagaaagtaaaattactagttaaaggat

SEQ ID NO: 383619 - DNA, 529 bp, Homo sapiens
aaatgaataaggtagagaatggaaaaaccaatagatctaattagtaaatcaaattcctacttttaaaattaacaaaataaattaaccactagctaacttaagaagaaaaaagagaaggggaggaaggggaaagcacaggtacacaaaataagaaatggcaaaaggaactgaagcaaaaaattaaaaatccctaagaaacgactttgcacatccctatgcaaaaaaatttgaaaacctggatataaataagtaatttcctasgaaaatataggttacttaaattaacctcatcagaaatgtaaaacttaaacaggaccagtttagctgaacgttatcaaggcccagatggtttcacaggcgaattctacaaaatcaatgaccacatacacatagtctcaatgccacaaaattgtttcagagctctaaaaaatgaaagaagactttaaaatactacttataaagcaagtgtaatattgatatctaaacttaataaagacagtacagaaagtaaaattactagttaaaggat

SEQ ID NO: 383620 - DNA, 609 bp, Homo sapiens
ggaaatttgaacttgaatattgcagcaattttcatttttagttaaaagaaaacatttggattttgttctaatttatcctgttcagattgtggcaattaatatgattttgacactgaattctytaaggtgtttggacctttccaaataatgttatttgcagttcctgttattatttgcaaggatatatgtagataattataagatttaattagtaagagtattttatcagccagtcgtgatctgtaacaagtatttttaaaaagctagtactcctataaaacctgaaatatcttaaaattataagataatcctcttttatttctgtttggcatgcccaacaaatctaactttcttattttttaaaccataaccattaaagtcatcaaataagatatcattaaaatctaaaaacacagaatttacagggacagccctgtgttcagcatctttctgccggtcagttgtgaattcgacttcagcatatcatccgtcagtggcaacatcaatctgtagtgtaataatcttaacatattctttgtgaagcctgccagtaattgttctgtgctcttctcctttgttgtttctcatccaaatcctggttgactgaga

SEQ ID NO: 383621 - DNA, 551 bp, Homo sapiens
tcaggtagagaacacttcttaggaaatgctggagaatatcctgaggcaatctstttgtcttttaccataatcccattccttaatctcctattttcccatagtttctctcactaattttaccttgggtaaagtttcctaaccttttttatgccacagacacctggggaacgtaggtgaagcctgtagactctttctcagaatatttttacataaatttttttttactattttctctattttttatttttatttttacatattttattttgcataaaataaaatgcataatgcacagaaaaaaataaattgaaatatagttgtgaaactattaaaaacacatgatgtaatataggtgtctgtaattcatgtaaattaatatttaagatatacaaaattaatatctaacagtggatctactaaaatttaaaaattagttttgaatgtaaatgatattttaagatatttgtaacaactataatgtgatacaaaaatatctgtgaattctattggtgacaaattacaaatatccatctgtgggtttgttggttcta

SEQ ID NO: 383622 - DNA, 551 bp, Homo sapiens
tcaggtagagaacacttcttaggaaatgctggagaatatcctgaggcaatctctttgtcttttaccataatcccattccttaatctcctattttcccatagtttctctcactaattttaccttgggtaaagtttcctaaccttttttatgccacagacacytggggaacgtaggtgaagcctgtagactctttctcagaatatttttacataaatttttttttactattttctctattttttatttttatttttacatattttattttgcataaaataaaatgcataatgcacagaaaaaaataaattgaaatatagttgtgaaactattaaaaacacatgatgtaatataggtgtctgtaattcatgtaaattaatatttaagatatacaaaattaatatctaacagtggatctactaaaatttaaaaattagttttgaatgtaaatgatattttaagatatttgtaacaactataatgtgatacaaaaatatctgtgaattctattggtgacaaattacaaatatccatctgtgggtttgttggttcta

SEQ ID NO: 383623 - DNA, 498 bp, Homo sapiens
tactaattgagtgtgcagtttgtaccaggcatggtgttargtgttggagcatcaaaggtcattaagaaccagccctgtataatagtggagacaggcacaaaacagatcatttcaatataacataaactttttttttgtaagtatgcaaagaatccatctcagacctctctttttgagtttcagaatcattcatccaattgccatgtatctggacattgtcatgtgtatgtttcacaggcatgttgagctagacatgtttaaaactgaatcaccagttacctcccaagtgagtctgcctctgtgttacctaaatcagagactggcatcccatttatctgggtactcaagccagaaaatttcactcgtacttatcaagcatctccagcgtataaagatttgtgctaagctgtggatacatgacagcaaatagggtagtccctgtcttcaccaaagcttgtttaagaaactctatccttgatttctcccacttctgccctc

SEQ ID NO: 383624 - DNA, 618 bp, Homo sapiens
agaaatttaaggaggcaagtgaaatagatttacatttgagactggtcattctggctgctacttacaagatggatttggcggtgtaggtgggggtggtagtagttatggctgaaagcagtgagatgagatagaattgggagtacaaatgaaagcaaaggacaaattagagtttgaagggctcgtgagcctcccgaaagtcggaacttcaaggaacaggtcaggaatagcagtagttttagaatccatgagcaaataggttaaaacaatgagtggacagtgctcacagggaagatacagacagaaaacaactcaaggttggaactttgggaaatactatttaatgggtaggcagagaaaaaaagacccccaagaagcatgagacaggtagaaaaagatgggagaaatgcaaaacgagtttcaaggagggtttratcaatgataccaaatgcaaaagagaggtctagaacaagaaacagtggtcatacattggtggaggaagtacatttcattttctgagacagacaaataagacaggtggatatatgtggcattgacagaagtggagagggaggaagttatatattgtatgatggctttaattttctcaattaactggga

SEQ ID NO: 383625 - DNA, 618 bp, Homo sapiens
agaaatttaaggaggcaagtgaaatagatttacatttgagactggtcattctggctgctacttacaagatggatttggcggtgtaggtgggggtggtagtagttatggctgaaagcagtgagatgagatagaattgggagtacaaatgaaagcaaaggacaaattagagtttgaagggctcgtgagcctcccgaaagtcggaacttcaaggaacaggtcaggaatagcagtagttttagaatccatgagcaaataggttaaaacaatgagtggacagtgctcacagggaagatacagacagaaaacaactcaaggttggaactttgggaaatactatttaatgggtaggcagagaaaaaaagacccccaagaagcatgagacaggtagaaaaagatgggagaaatgcaaaacgagtttcaaggagggtttaatcaatgataccaaatgcaaaagagaggtctagaacaagaaacagtggtcatacattggtggaggaagtacatttcattttctgagacagacaaataagacaggtggatatatgtggcattracagaagtggagagggaggaagttatatattgtatgatggctttaattttctcaattaactggga

SEQ ID NO: 383626 - DNA, 543 bp, Homo sapiens
gcagtcatcattaccttgtttctgatcttgggggaaaccatttagtctttcattattaagtattcgttgtaggatttttcttagatgttttttatcagaatgtacaacttttactttatttcactgagagtttttatcatgaagggtattaaatgccttttcggcctctagtgagataatcatgggttttctcttttttaatctaccaaattacattacttgatttttgaatatcaagccaaccttgcattcaggatgtgtcctgattggttatgatatatttttaatatattgctagatttgatttgctaatattttattaagtttttttgtctgtgttcatgatggatattgttctgtagtttttttgcaatgtcactgcagtgactgatctgaatatcaggatataccagtctcatacaatacatttggaaagattccygcttccatttttgggaattgttttataaaatttgtattatttatttcttttttgaatatttggtagaatttaccagtggatctatcttggattgcagtttt

SEQ ID NO: 383627 - DNA, 634 bp, Homo sapiens
agtattttaatctattttgctgtgttaagttctgttccagttgaagagcaagaagagttcaagcagctttcagatggwattcaggagctacaacaatcactaaatcaggattttcatcaaaaaacggtatctgttgtgaggcaccttaaactttaaaaaataaaatttgtttgtagatgtggtgggacatatagtggaggtaacagcacattgctttctctattaccaaagaaacagaatatatttctgtgcccatttgtgccccttataatggatacatacttctctcaaccatctagaaccgtgatggtttttgttggcaaagttttttgttgtcttattgaatagaattttttagggttttcctaggtttaatttcactgcttccaaaccatgcactgtggcaccctggatactgcagtaaaccctcaagaatgcctcaaaatatcttaaattttcaagggaaccactgtagtactcagcatctgtcatatcctttttgaattcaaggtagttcacagtttcagtttttggtcacattcctttcatatccttgtgcagctgggattttggtatttgctgtgataaaagcaagtacaatgtaaaaatcactgtgacacaggaaatgagaatg

SEQ ID NO: 383628 - DNA, 634 bp, Homo sapiens
agtattttaatctattttgctgtgttaagttctgttccagttgaagagcaagaagagttcaagcagctttcagatggaattcaggagctacaacaatcactaaatcaggattttcatcaaaaaacggtatctgttgtgaggcaccttaaactttaaaaaataaaatttgtttgtagatgtggtgggacatatagtggaggtaacagcacattgctttctctattaccaaagaaacagaatatatttctgtgcccatttgtgccccttataatggatacatacttctctcaaccatctagaaccgtgatggtttttgttggcaaagttttttgttgtcttattgaatagaattttttagggttttcctaggtttaatttcactgcttccaaaccatgcactgtggcaccctggatactgcagtaaaccctcaagaatgcctcaaaatatcttaaattttcaagggaaccactgtagtactcagcatctgtcayatcctttttgaattcaaggtagttcacagtttcagtttttggtcacattcctttcatatccttgtgcagctgggattttggtatttgctgtgataaaagcaagtacaatgtaaaaatcactgtgacacaggaaatgagaatg

SEQ ID NO: 383629 - DNA, 495 bp, Homo sapiens
ttctctcaaccatctagaaccgtgatggtttttgttggcaaagttttttgttgtcttattgaatagaattttttagggttttcctaggtttaatttcactgcttccaaaccatgcactgtggcaccctggatactgcagtaaaccctcaagaatgcctcaaaatatcttaaattttcaagggaaccactgtagtactcagcatctgtcatatcctttttgaattcaaggtagttcacagtttcagtttttggtcacattcctttcatatccttgtgcagctgggattttggtatttgctgtgataaaagcaagtacaatgtaaaaatcactgtgacacaggaaatgagaatgtctatatccaatctgaaatatacgctccaasgtacgtgaatttatgcagtgcccaataggtacatacatctaattaggaagtactcgaggttatttaagaacaaaataaaaattttttctttcaacttatatgtattattttt

SEQ ID NO: 383630 - DNA, 657 bp, Homo sapiens
tgcctgtattccctatctagtacctttcccacatgttatatagcctcttatacttgtgtctaaaaagactgtgtttttcaaataaattgcaaagaaagaataaacaggaagcctattgactgagagagatataagattaagaaatctcaatgtgtgaacatttttggatcctaatacaaacaatccwattgagaaaagagcattgaaaatatttcgattcttaccggatattcaatgaattatagaattattgttaacttttaagtatgatcatggtttttaatgagctttatcattttgtaaagacttgatatgttttgtaagaagaaatatacgttgataattaaaaagtcaaaaaacaatagatgttggcatggatgtggtaaaaagggaacacttttatactgctggtgggaatataaattagtacaacctctatggaaaacagtatagggattccttaaagaactaaaagtagaactaccatttgatccagcaatcccaatccagtgtctgcccaaaggaaaagaagtcattatatgaagacatatgcacacttatgtttatagcagcaccatttgcagttgcaaagatatagaactaacctacgtgcccatcgaccagtgagtgagtggataaagacaatgtggtatacat

SEQ ID NO: 383631 - DNA, 604 bp, Homo sapiens
agtattttttaaatactgtaccatttttaaaatttatctttatttttttttaaaagatgaggttatgatgaggaaggataaaaaggagtaagttttatcaaaggccttagcacataattgactgacttaaattatgtttccttcactgcctacaaaggggaaaagagagataaaaggaaaataattgtttaataggggtccttttactaccccctagtcaccttaaatataatatttcatttatttcttttagcacttcctgagaaaatgaagttcagagaggtttggtgacttcccmaagttcacacagtaaggaagaaatagaggaagttatgagcactgttctttctaccccgccacactgcaattcaagcgctggtcttgaggcaggggagagactgtgagctcacatccttccttactgtgaacattttctttcctattcctgaatcctgtaatcttaagagtaacttcctcgatcgttagaaacaatcaggctttcactgtctttatcctctgggtgactcagccttcaaagtagtgcagatgcaatgttatctgagaactgattagaactttaagggaggaaagagataggaaactg

SEQ ID NO: 383632 - DNA, 505 bp, Homo sapiens
acaaatttatcatcaatcattgtggcctattttaatggacaaagacacaaactgagatagaggaaaaaatcagaattctagaggaaaaaaatcagaaacgggcaattatccagaatgagtcttttttttttgagacagggtctcactcagtcactgaggctggagtgcagtggcaccatcttagctcactgcagcccaggcctcttgggttcaagtggtcatcccacttcagcttcctgagtatctggaactacgggtgtgtgccaccacacccagttaagttttgtattttttgcagtgatagggttttaccatgttgtccaggctggtctcaaattcctgagctcaaccgatcctcccgccttggcctccaaaagtgctggtattaaaggcgtgagacaccacgccaggcccagaatgagtctttataaagaaaaaaaatgagcctattactgctcawttctccccttcactctggctttcacaggccataagcccccgtgct

SEQ ID NO: 383633 - DNA, 551 bp, Homo sapiens
catgtttgcaaacacactcctcccccaaattccttgacaagctctcctaaggattctctcttcatgctccactgtactccaatgggagctctacagtgggcctgcaggttctacagatcagaaaggaacaagaagaaagactctcccttttgtttgcatctctatctactatgattctcttgtagcacattcccctcacttgactatcctcttagccaactgttcttaagtagggtcactagtcctcagctggtcagcttggagaactgctacaaaactgtgctccagggtgcaccttctgctgctggcatatagctacyttcagatctgctatggagtctataacacagattattaaaagttggctatacaactgtttcttattttttttaatcttttttatgactatacatcttaaacagtttcaccattagaaaactatcatgttatctgaaaacttggggcttgggtacattttaatcatttctacaatgctattccgttattctcatttcaattttatcttgtatattcactacatgcacagcttt

SEQ ID NO: 383634 - DNA, 489 bp, Homo sapiens
cagtgttatggcatcatgagaaaaaagcataggctttgaatctgaattctatatccctgtattacatacaacactggaaatggaaatgatttatatggattatcattgcttatgatcataggggagcatggggatattttgaatatctagagggtgccctcagggttctattttggaatttgcatgtggccctctttctccagctcttacttctgaaccttgccttcctggaagaggatacagtcagtatgttacctcagtacctcagtacctcagtacctcagtacctccttctccacctgcagtcctctctagcaaccctctgcccccactgccagccactccggatttgctgatgccatgttctttcctctttccaactcttgagacttgcttttcctaatgtcttttcttctaatcaggctactcgaagtttcttaatagatycctagcaaattatgtaatactagtgagtgatgaaaaacttct

SEQ ID NO: 383635 - DNA, 590 bp, Homo sapiens
gagggaggggaggagagagggagggacaaagagagggagctggagagggtaagaggaaaggaaagagggargacagatcctattggagatacttgatgtcttgcccatccagaagacatagattacctgcacagcagaaacaaaagttacctacaaagcaaaaagcatagggttggccccaggattctctaaagctctattcattatgagaacatagtagcagtccataaagggtctgagagaaagaaaccaagacttaagaattttatatgcattcatgaattttatatgctggtaatctcagtggaaaagatatgctcaaagtaagaaaaaaaagatatttaaatagtgtctgcactgtgaaactgaaacaacaaacatttaaaatgcacatctaaataagtgagcagtatcttaagacttagagtaggtgactctgtagccatgagcatgaatagatagctatgaaaaagaatcaaatagggactttatgaatgaggcatatagttgctgaatgataacaagagatgggctaacaaatctaatgggcacagttggtgaataaaccggtaagtgaaatgttgggccaa

SEQ ID NO: 383636 - DNA, 590 bp, Homo sapiens
gagggaggggaggagagagggagggacaaagagagggagctggagagggtaagaggaaaggaaagagggaagacagatcctattggagatacttgatgtcttgcccatccagaagacatagattacctgcacagcagaaacaaaagttacctacaaagcaaaaagcatagggttggccccaggrttctctaaagctctattcattatgagaacatagtagcagtccataaagggtctgagagaaagaaaccaagacttaagaattttatatgcattcatgaattttatatgctggtaatctcagtggaaaagatatgctcaaagtaagaaaaaaaagatatttaaatagtgtctgcactgtgaaactgaaacaacaaacatttaaaatgcacatctaaataagtgagcagtatcttaagacttagagtaggtgactctgtagccatgagcatgaatagatagctatgaaaaagaatcaaatagggactttatgaatgaggcatatagttgctgaatgataacaagagatgggctaacaaatctaatgggcacagttggtgaataaaccggtaagtgaaatgttgggccaa

SEQ ID NO: 383637 - DNA, 653 bp, Homo sapiens
aatgtggcaatatgtgtgaactcactggccaagaatttaaaatagcaattttaagaaaattcagggattgccaagataacacaggaaagcaattttaaagtttgtcagataaatttaacaaagagattagaatacttttaaaaaattaaacagaaatattggaactgagaaatacatttgctgaactgaaaaatcactagaggctctcaagtgcaaaatggatcaaacagagcaaagaatcactgagctcaaagaggctcttgaaaatgcacagttcaagaagaaaaaagagaaaagaataaaaaggaacaaatattatctacaatatacaggaaattttttcaaaagaccagatctaagaattattggtgttcaagagagagttgagcaaaagtaggagatataaagttgattcaaagaaataataatagaaaacttccccaaacttgagaaacatataaatatccaggtataggaacgttacagatttgattcaaataatcctataccaaggcatgtaataattaaactctcaaagatcaagaaagaagaccctaaaggtaggaaragaaaagaagcaaataccatatgaaggagcttcaatatgtctggcaaaagacatctcaacaaaaccatacaggccagaagggagg

SEQ ID NO: 383638 - DNA, 565 bp, Homo sapiens
ttatacatgccaacagagaacaatctgaaaaagaaatcaagaaagcaatcccatttacaatagctacaaaaatatataaaatcccttggaatcagtttaaccaaggaagtgaaaaacctgtacaacaagttttcctgtacaaggaaaactttaaaacactgatgaaatatactgaagaagacacaaaacacatgaatgggtattccatgctcattaattgaaagaattaataatcttaaaattacaattttacccaaagcaatttaaagattccatgtaattcctatcaaaatactaatgatatttttcacagaaatagaaaaaaaaatctaaaatttatatggaatcagaaaagactccaaatagcaaaagcgatgttaaacaggaaaaaaacaagctggtgcatcacactayctgacttcaaaatatactacaaatctatattaacaaaatcatcatgacactggcataaaaacagacacatagaccaatgaaatggaatatagaacccaggtataaaaccacccatttacagccaacttattttagacaaaggagccaagaa

SEQ ID NO: 383639 - DNA, 570 bp, Homo sapiens
aaggaagaaaccctaattgataacatttgttaatttccatagtacatatttccaccatggctaacttcaagctrccaaattattttataatgattgataaaatttctgaatatttaacagttattatgtgccaataggagcctgtaggagccaaccacagtacaccacaaatgtaatcaaataacatgtggaggaagtttggaatttttgaatgataaaatgtgggaagatagtaacaggtcagaagaaacaaggagttgaggtaagttcattgagggggctacttgtcatatcaagaagctggcatttcattgttcaaaaaattaagagccatcaaaggatttaaaaagacaagtggctaggtcagatttgccaattaggaagatcatgttgatggttataaggaatatgaattgaaaaagatgagtctagatgtagaaagcctctaagcctttaaatgtcttcatgacatgagaagaaagactaatttagaaatataatatgatttgtgaaatgcaatggagaaaactgtcaataattataattttgaaactcaaggcttcataaatg

SEQ ID NO: 383640 - DNA, 539 bp, Homo sapiens
gtgactatgtcctaaaatgtaatattgctacctggctaatattttatatgggttaaaatttaataccaagaatattttaaatttcagaaagacagaagtttataccatttatctcaaakgttaacagaatgatgttcacataaatttatcaacacaaaaacaatccagacacatataggatgatttggaaatgttttcccagaaaaatccgtggtcagagtttaaggctctgaggttggttaaaagctacataagaatagttattcttaggcaagttgattaagaataattagattcactgcatttactatagataggtcagttgtggatgtgagcgcaatacttttagtgaaaagaatacatggtgaaggtgctcattcgtatgcctgctaatatgggaagaaggattatgatttaggtgcatttcttttttttacaaggctacgtcagttatgggaagaatcaaatgactaaactctggtcagagagataagtatttgcaaagaaccagattactgctctcctcctttattctaaga

SEQ ID NO: 383641 - DNA, 529 bp, Homo sapiens
ctttcaatacatggagattacaattcaacatgagatttgggtggggacacagaaccaaattacatcagtactaaacatgtatatctagagaatgtaagcatttttttttagaaattatgaccgttgtgtgaacacttaaattttaagtgtacaatacagtaatacaataatactaacatagaaaatgtacagtagatctctagaacgtatccattttgcataactgaaacttttcacccattgaacaatacaatggactaaatgctttttattagttcattttcacactgctataaagaactacctaagactgggtaatttataaagaaaagaggtttaaatgactcacagtttcacatggctgaggaggcctcagaaaactkaagatcatggcagaaggtgaaggggatgtgaggcacatcttacatgaagagagagcaaaggaggaagtgtcacattcttaaaccatcagatctggtgagaactcactttcatgagaacagcaggggggacatccacccccatgatc

SEQ ID NO: 383642 - DNA, 604 bp, Homo sapiens
gtgttgtcttttttgggaattaacatattatttatcatggagagtgttctgtaaacacttgagcagaatgtgtactctgctgtttcggggtagaatattctgtatatgtctgttagatccttcacattttaattaaaaagtatcattatataattgtcattaaatattttgttctcattaattttcaatatgttacattgacaacttaaaatatttcaaagttaaagaacacaaatgtaatttaaaaattgatactgaagaaagacctgatgtgattattactatctaggataggaaaagccacaaatctgcctctcactatctttaascttaataagacatattcctgttatatgtgtacacaacatatgttatgttcttatttgacaccgagtgaatttatcaggtcctggctttctcattggggtttctatggaaatgctgctcataggttcatcactgaggtaaaacacacagtttcaagatgtagtgccagaatagactggctgaattattatcaggaagtgcccaacttagatctaaaaataaattatgtatatatgtaaacataaaaaattatgtatgtttaacctaagtgatgaac

SEQ ID NO: 383643 - DNA, 546 bp, Homo sapiens
cacgtttgtgcacatatcccctgcctgctggcgggagtgcacatgaacccttctcccctgccatatggccattgcagttgaagctttgggggcacagagccctccagcaccatcctcaccagcatcctacccctatgccaacactgccaccagagtgaaagtaggcatggagaacagtggactctccctcaccctgagcaaccacagagtgtgcacagagacctgcacccgcccatgccctgcttctttgctaacaccaccaccagcacaatcaggtacacagtcaccagcagggagcccctattctccccaactgtgctgcccctgccacttctgtgaatgcccacaggaatgcagaaactctggcaccagctagcactctgctggcagctggcaatcatgcactcattgcactgctgctgccaccaccactgctgctrgcatgtgcaaacaaggacagatcccattgccatgtccatatggcagtgttatgagagcaccttgctgctaccaacgcagtatattcctaaccttgaggagcaagag

SEQ ID NO: 383644 - DNA, 560 bp, Homo sapiens
tgttctttctccttcattctaagttaatattagccaaaaataaagaaagaggaaaagaaaaaggaagaaagttgtatgagatttgagatgtgtaaatgaagcaatagacactagacttggaatgcatcatttttagaggcaatgagatgtgccagtagtttccagtttgtcctagtttttgcctttgccatgttcaatttttcttaccaacttttgtgcattgtggccaacagcaatgcaaagcacatgttcaaatgcttggatgtgaaattatggaggctttcactatgaagaggttgcaattkcctatagaattaggtgaccaaaaaaatgctgcagcagtgaaaataatgacataattgaatatatggcatataatagattacttccaattaggtacactgaagaacttggagaaattaaatgaaagcataaggcttttaattctcctcagactttggtaaggatccaaaagcttctataactgccctgaaagaaaccattgtctgatattgcaacagaagtgactttctaaagactaaatacaaactccagtcaca

SEQ ID NO: 383645 - DNA, 559 bp, Homo sapiens
cctatggtaatgatattattttagggtgatgattgtttgcctttatgattgttttgcctttaacatattgtgtattttccaatgttacatatggacatgatttttatatctaaacaagataatttaaatagagaaaaaaagatctccagaagaccatggaaggaaaattatagaatgtcacctttgttaagagctacagattaaactgacctgaaaattatgccagaaattgtacayagatgattaaatttatgtatccatgtacttatgtctcaaaaatatgtaccttttttatttgggtaaatcacaaaggaacattttgttaaattagtttcctaatttaagcaatatatgataaatttcttaaaataataaaatcttttaaacatcgaattggtttacaacatgtaacacttcaggttcatggatcactagtgatgcacatgaaggatttatgtcttttccaatctgtgatgctatccatcactttcatagccctaggacctccagcaatctgggctgactgcgttttgattctgtcattttttttccagttaac

SEQ ID NO: 383646 - DNA, 631 bp, Homo sapiens
tctcccctaaaatagctggaaggcagtatgctttactagagaaacactagtctagttgtcaggggatgtgagatattatttcaggttgagagctatagaatttgtttcttcatctgaatcttttttttttctggttgttaccctcgtgagttttattcaaggagagattattcctagcttgtcaaaataagttgtgaaatggtccagtagaaatatccacaaatattttagcttttagataggtgaatttcaacagatagatgcttagttttttttttttttttatcttaacctgattaaaaactgtctgagatttcaragtaactattttctgctgttctgaggctttcatttcaggattagcttttctggtctaattaaccatagacacacaaggagtgtagttaataactatactatgtgattttgtttgtaaacaattaaaaaatactttttcaaagtagagaagaaatttgttaaaaggacttatttttaaaaatcacttaactcatgggaagatcaagggacagtctcagaagagaagaaagagtacatggaggcaaaagtcatgctgcaaaactagcctgctgaggaaaacagtggcaccacaggagactaaaaccgcaggttg

SEQ ID NO: 383647 - DNA, 367 bp, Homo sapiens
acatggaggcaaaagtcatgctgcaaaactagcctgctgaggaaaacagtggcaccacaggagactaaaaccgcaggttgctccactatgattgcttttcttggaaaccacatttggtggccacaacttctgcctctttctgattcaaccatctctgcttctttcatcagtggcttccaatttggaatcctggacagacacagacaggtatctatttctttctgagtggtgcttgaaggtctcctgctgaaattataatttttgcaaaccatgaaactgtcattttcttctcaatagaggaacagtcctgttgcaygaaaacatctgaaaatacattttgtcttcatttctgggctgctagtgaccc

SEQ ID NO: 383648 - DNA, 544 bp, Homo sapiens
ctcattaactatatattttattgccttattaaagaattttgttgttaacacgttttacctttracgaaggagtaaactggcatttaaattcagcattgcaagtccttaaattaacattgtaaataatattccaccaattagcaaaccagaatatttcattttatagaaaatttttatattgtatttattgcttatactctaaaaaacaacaacagcaacccaaacctgagttagtagccaaatttttggctactcttgttgaaatatctcttgttgaagtgcagaaaaaaaccagaaactgcaagactgttccaaggaaaggcacaaagtaccctgtctctgttttatagaaaacaagggccagtaagtttaacaattcttgatataaaacttaggcagtaattatgtcctttattactatttggggtataatgagatgcacaaaagtactatgtataattttgtatttaagtctatgacagttataaaaagtactcttctgttacattttcctctggagtctaactattgtccttctatgata

SEQ ID NO: 383649 - DNA, 375 bp, Homo sapiens
ctcataattttccatgagcataatgagtatagcattgcttgttcctccattccaaagattgattggaatgctctttcagaagagtgatggcttactaatctcattactattatttttaatatttcatgtcttccccctagaatacttatgaaaatacttcaacaaggctttcaaggaaagttatacactgatattctgtggttatcacaaattataagagttgatgttcaccttagtacttgtataatagaatcagtcatgaatgttctatacagcaattttgctcattaaattaaacagttygtttcccaaattttacgcttcatagaaattgcttttctgcctaatgaatcctgtcgtcaaccgagcaattaa

SEQ ID NO: 383650 - DNA, 619 bp, Homo sapiens
tttttcatatacctgttggctatttgaatgtcttcttttgagaaatatctatttagatcctttgcccattttttaaatcaggttttttcttactaacagaaactgagatragttatttgaagttcttatatattttggatatttaactctttatcagatgtatggcttgcaaatatttttcccattctgtagattgccactttactctgtctttttctcgagtgtgcaaatgctttttggtttgttataatcccacttgtttatttttgttttgcttgcccatggtttttgtttcatatccaaaatatctatgcccagaacagtgtcatggagttttcatcctatcttatattccagtagttttacagtttcagatcataggtttaagtctttagtcccttttgcgttgattttaatacctggtgtaagacaagggtctgatttcattcttttgcgtgtgaatatcaagttgttccaacaccatttattgaagagattgccctttcctcattgtgtgttcttcgcaccattataaaaaaaatcaactgactgcaaatacatagatttatttctgggctttctattctattaatccctgtctctgtttttatgccagtac

SEQ ID NO: 383651 - DNA, 670 bp, Homo sapiens
gagccaccctacctagcaaaatttctaaggcttaatttattgaaccatgttcttcactcagctgtctctgctgcacactcctctccagcagtcagttctgttgtttatgtgaaaaaaaaatcagaattctacctcacatacatatataaaatatatacatatatacggtatagatatagataggtggcagttggaaaacagaaggtttgagagttcttgagaactgaagtattttacaatttaaatattcacgagagagccctcctgtttcctacataattggcataacctgttttcgcatttatatgattgtccttgccctagatttcatttactaatgttagagaatggtatttgtgatgagcagcctgctatttctggttaagttgtatcagctaaggtggcttttaatgttttaatttaaggaagtcacagtcaataactttataagtcagcatatccttctrtaagggtgattaaagaataaaacacttccattgactgatgattttttttgcactttagtaaaccaaatctttggacctttgtttccactattaagtattttaaagtatacaaaaatatgttttgtaattaagttttaaaatgcatagactattactaatcacttaaatgtgacccaaaaggtctttcagtggctttttctaca

SEQ ID NO: 383652 - DNA, 532 bp, Homo sapiens
gtgtcgtgaaatggaacattgcaattccttgytgttacctgtataaagccttgagcttaggtgggcctcctttctcttaaaaaggctgaaagtgttagacattacagtctcaaaaacgaatagatttttctctgtgatgcaatctgaagagctcaaaaagaattggaaaggaaacgagttagtcactatgatatttaaatttatttgatttcctttacataacactgagccatctgtctcatcatggaaaattatctcatttcctccctgagagggctgctttgttgatgactctcttggaaggccacccacagccattcattattttgttctgacatctgatgggcagcatattgtcccttatccagactcagggcacagatcctgattggttcaggtcagtcacagaaattctgtgaggatatgcccatttcacataagcctgtgattggtttggtctgagtcatgtgacctgcatctggccattgagatctaagactacgtcttatggggatttcagagaaacactttc

SEQ ID NO: 383653 - DNA, 571 bp, Homo sapiens
aataaggccataccttacaggtggggtttctcaaccttggcactattgctatttagggttggataattctttatagcaggaagctgtgctgtacactgtagaatacagcatcsctgacctctgctaactagatgacagtcatgccttctcctaagcttggacaataaaaaatgttgccaagtattgccaaatgttccctggggagcaaatggcctcaggttgagacttgctgctgtagataaccacattatcatttgagagttttaacagggggcgttgtgattccttaccttacaacaacaacttggaacagtaggttaagccttgaccgcagacaattacaagacaattataaaggctttccctgctaggcctcactggggtgggggaagctgctcccctcaaaccagctttagggcatagctagtgctttgcagactctgaagggagctgcactccagtcctcagacctccctggctcaccatgccttttcatggttccattcccagcccgagtgactccatgtttaggtctcgatctgaggcaatgggcccaggtcttcttcagagg

SEQ ID NO: 383654 - DNA, 564 bp, Homo sapiens
gtcattccacttgtctcacctaagtaatttaagtctcctctctggtggctgttggtgtttatttggaacttgttatactcttctgccctgatatctctcctgtgagcttctttacttcctaaagtctcatcccacaatctctcccagactcttaatgcagattctcagcttgtgcctgcaaacgagctgccatccgtcctgagcagaatgagaagagccaggggcccaaagaggagaggagaggacagggcagsctgccaggggacctctgaggagctgacaatgtggccaagggggcaagggtctttctatcctttctccatggattttcctaccttgtcctcttctctgactagtgcctgctgagggcaaaatggggacatcatttgtgttgtgctgggcttgtcagtcgttctaccggccattcttccaacttcagtcacagtcctggggtctgggagtccttataattttgtggcatggaattcctccacactccttcctctgtgcatccacagcacgtcttgaaggtccctttagttttattctgccacttgctagttt

SEQ ID NO: 383655 - DNA, 554 bp, Homo sapiens
tgatgttatgaagtaaaaagtgatttttttacttcataacttcataattggagtaaagtgatggaaataattggagtaaagttctccaattgttgtctccttttttttttttttgtcgttgtttgtttgtttgtttgcttgttttttgagatggagtctcactctctcacccaggctggagtgcaatggcacaatctcggttcactgcaacctctgcctcccaarttcaagtgattctcctgcttcagcctcccaagtagctgggattataggggccagccaccacacctggctaattttcatattttcagtagaggggatttcaccacgttgaccaggctggtcttgaacacctgacctcaggtgatccacccacctcggtctcccaaggtgctgggattacaggggtgagcaactgcacctgcccaggttttttttttttaaccctctgaagccatcttattttttcatttacccatgcccagttgaccactcccacagaatatcagctccatatcagcagagatcttgcccctcgtacacaactgtattcc

SEQ ID NO: 383656 - DNA, 553 bp, Homo sapiens
agaatttgcaaagtacactgttagccccatgctttagatgagttggatgcatttgcatcagatcaataggttaatgagggaatctctgactttgcaccatggtgcccgtaatgaatgtctgccttgtttcctgcagccaagccccatcctctggtcctccaaccatctttgagcaggggctccttgcctgccctttcagcttcccgaggtctaggcttcttctcagaccctcattctctcctcccaggtctgaacctcagtctgaacatcaaggctctgatgccacacagggaccatatagacacccactggctggcactgcccctcaactcctcctgcggggactcccttggttcctgtcctgtccccaggggtctggtctctgggtcctttytgcccaaatgcagctccccccaccaccagccagggcaagcagaaaagaagagattaggcaactctattttgttttccaatctgtggtgagcagtcagttgttgctacttcattcttagcatatgtcttagttggaattcttcccaaagcagacactgat

SEQ ID NO: 383657 - DNA, 553 bp, Homo sapiens
agaatttgcaaagtacactgttagccccatgctttagatgagttggatgcatttgcatcagatcaataggttaatgagggaatctctgactttgcaccatggtgcccgtaatgaatgtctgccttgtttcctgcagccaagccccatcctctggtcctccaaccatctttgagcaggggctccttgcctgccctttcagcttcccgaggtctaggcttcttctcagaccctcattctctcctcccaggtctgaacctcagtctgaacatcaaggctctgatgccacacagggaccatatagacacccactggctggcactgcccctcaactcctcctgcggggactcccttggttcctgtcctgtccccaggggtctggtctctgggtcctttttgcccaaatgcagctccccccaccaccagccagggcaagcrgaaaagaagagattaggcaactctattttgttttccaatctgtggtgagcagtcagttgttgctacttcattcttagcatatgtcttagttggaattcttcccaaagcagacactgat

SEQ ID NO: 383658 - DNA, 623 bp, Homo sapiens
caagttccacctgtcctcacaggcagtacaggatttccttgtagctatagaggaagggaggtgtttttgttgacatttaaatcacatttaaagctgttgctttaattagggcttttgtcttaatcccattatgctgaaaacctcgtggggcacaggcatcattagggatgtttagtggtagatggaacacaggttttggtttatgtatggacttgggttcacgctctgctttatcctaaacaataataattcttaaccaactattatcaacctgaaattacatatatatatacatatatatgcacaactgggaccatacaaacccaaattagagataattaagccatgagtaataatactctttttcttttcttttttttttttaagatggagtctcgccctgtagcccaggctggagtgcagtggtgcartctcagctcactgcaacctctgcctcccgggttcaaatgattctcctgccacagcctcctgagtagctgagaatacaggcacctgccaccacgcccagctaatttttgtatttttagtagagacagagtttcaccatgttggccaggctggtctcaaactcctgacgtcgtgatccgcctgcctctttttga

SEQ ID NO: 383659 - DNA, 558 bp, Homo sapiens
tgcatgtggcctgtctctcaggycagttgaggaatccgtcatctatcacttcttggtaccttagtctaagctccgaaagtgtcattcatttgctcctatttaatggaaaaattctgttgacgaatctgcctctcccagaagattgggaaactttgaagccagaagcaatgctgcgttaatggctgtgttgctaggttccaacacaaggactattgcaaggtaagctctcagtatttgcgtgtttatttgatgcataagggctttccaattgaggaaataattaaggcatgatgacaaaaggcctgaaatagaagtgttggaaagtttaccatatacagttgtacaggtcgtgcactactcaaataagaaagtcccatttacatacacgatgatatgaagatgcttcgcttcttagtgttgaccagggcacagcaggaacagctctccatggcagccctgcctgggtcaggtgatgccgttaaagttatcttcctctcgtaatttctttcccttcttggttaatgcaagtgaagctttaccactacacagatgcctcaa

SEQ ID NO: 383660 - DNA, 558 bp, Homo sapiens
tgcatgtggcctgtctctcaggccagttgaggaatccgtcatctatcacttcttggtaccttagtctaagctccgaaagtgtcattcatttgctcctatttaatggaaaaattctgttgacgaatctgcctctcccagaagattgggaaactttgaagccagaagcaatgctgcgttaatggctgtgttgctaggttccaacacaaggactattgcaaggtaagctctcagtatttgcktgtttatttgatgcataagggctttccaattgaggaaataattaaggcatgatgacaaaaggcctgaaatagaagtgttggaaagtttaccatatacagttgtacaggtcgtgcactactcaaataagaaagtcccatttacatacacgatgatatgaagatgcttcgcttcttagtgttgaccagggcacagcaggaacagctctccatggcagccctgcctgggtcaggtgatgccgttaaagttatcttcctctcgtaatttctttcccttcttggttaatgcaagtgaagctttaccactacacagatgcctcaa

SEQ ID NO: 383661 - DNA, 558 bp, Homo sapiens
tgcatgtggcctgtctctcaggccagttgaggaatccgtcatctatcacttcttggtaccttagtctaagctccgaaagtgtcattcatttgctcctatttaatggaaaaattctgttgacgaatctgcctctcccagaagattgggaaactttgaagccagaagcaatgctgcgttaatggctgtgttgctaggttccaacacaaggactattgcaaggtaagctctcagtatttgcgtgtttatttgatgcatragggctttccaattgaggaaataattaaggcatgatgacaaaaggcctgaaatagaagtgttggaaagtttaccatatacagttgtacaggtcgtgcactactcaaataagaaagtcccatttacatacacgatgatatgaagatgcttcgcttcttagtgttgaccagggcacagcaggaacagctctccatggcagccctgcctgggtcaggtgatgccgttaaagttatcttcctctcgtaatttctttcccttcttggttaatgcaagtgaagctttaccactacacagatgcctcaa

SEQ ID NO: 383662 - DNA, 558 bp, Homo sapiens
tgcatgtggcctgtctctcaggccagttgaggaatccgtcatctatcacttcttggtaccttagtctaagctccgaaagtgtcattcatttgctcctatttaatggaaaaattctgttgacgaatctgcctctcccagaagattgggaaactttgaagccagaagcaatgctgcgttaatggctgtgttgctaggttccaacacaaggactattgcaaggtaagctctcagtatttgcgtgtttatttgatgcataagggctttccaattgaggaaataattaaggcatgatgacaaaaggcctgaaatagaagtgttggaaagtttaccatatacagttgtacaggtcgtgcactactcaaataagaaagtcccatttacatacacgatgatatgaagatgcttcgcttcttagtgttgaccagggcacagcaggaacagctctccatggcagccctgcctgggtcaggtgatgcygttaaagttatcttcctctcgtaatttctttcccttcttggttaatgcaagtgaagctttaccactacacagatgcctcaa

SEQ ID NO: 383663 - DNA, 577 bp, Homo sapiens
cttgttcctgccctgccccaactgattgatcgacctcatgacattcttcttctggacaatgagtcttatgatctccccaccatgcaccttgtgaccccctcctctgctgacaacagataaccacctctaactgtaactttccactgcttaccccagtcctataaagyggcccctctcctatctccctttgctgactctcttttcagactcagcccacttgcacccaagtgaaataaacagccttgttgctcacacaaagcctgttggtggactctcttaacacggactcgcgtgacacaattaatttaaaacttaacagtggcgattaaccagtttgcacagagagaaagagaccagagactgatgtaagaaattcttacccttctgcctgcatgccgggtttctgggttctctctccctgagcacccctggtgaccctgcctgactgtatacaaacaaacacattgccatgaatcaagaatattcacaaacactttacaaattttgaagaaactaggcagagagagagataaatatgactcaaattctatttgtgagagtacactcaacacacttc

SEQ ID NO: 383664 - DNA, 625 bp, Homo sapiens
tggtgtggctgagcccatgtcctaatgaacatccagaaaagaaagacactcagagagccaggaaaatggaagaattttttttttcagccagccaggcacctgacagtaatcaaaatctgtaaagaacaggatgtggagcctcctctgcttgttcagcacgaacattttgtggtgggtgctgcaaagatgactcagacacagtctccaccccaggtcactcatagtctagtgcagtacaccaaagctgtgaaagctaaagggcagaccattggcccatccagggagagtggtagaagagggagcatttatttgaatagctstgatgctaccagtctgaaaaaaggggaaggtatcttgagaataagaagcaagttttcaaaacacagaggcagaatggatagaatggggtgaacacagtaaggtgcagagtgtgtgatgagcgtacttgtcaggtctcagatgaaagtgaccaagacctagctccactgtgatgaagcctgtaaagaaagacatacatgaacacacaaataaggcaatgcattttcttacgcagctgaaaggtacaagagaggaccaggttatcaaaaatgtcttcaggtaatggaattttcatatttggttctat

SEQ ID NO: 383665 - DNA, 625 bp, Homo sapiens
tggtgtggctgagcccatgtcctaatgaacatccagaaaagaaagacactcagagagccaggaaaatggaagaattttttttttcagccagccaggcacctgacagtaatcaaaatctgtaaagaacaggatgtggagcctcctctgcttgttcagcacgaacattttgtggtgggtgctgcaaagatgactcagacacagtctccaccccaggtcactcatagtctagtgcagtacaccaaagctgtgaaagctaaagggcagaccattggcccatccagggagagtggtagaagagggagcatttatttgaatagctctgatgctaccagtctgaaaaaaggggaaggtatcttgagaataagaagcaagttttcaaaacacagaggcagaatggatagaatggggtgaacacagtaaggtgcagagtgtgtgatgagcgtacttgtcaggtctcagatgaaagtgaccaagacctagctccactgtgatgaagcctgtaaagaaagacatacatgaacacacaaataaggcaatgcattttcttaygcagctgaaaggtacaagagaggaccaggttatcaaaaatgtcttcaggtaatggaattttcatatttggttctat

SEQ ID NO: 383666 - DNA, 571 bp, Homo sapiens
aaacctggctactttgctgctatagaacaagaggacatggttctgaccttcatggagcttaacactctagagaggaaaagcaacaccacacgaaagcaaaacacagatttagaagaagcacccttggtttcttcccatcacccttccctcttgggaatgccccaccacacatgggcatgaaaggtgcccttgacctcgtcatgcagccacagctgattggaccgggagtgaacacctcactcaggtgggggccaatcaacgtccctcctctccctgaagtgtgaaagagtccatggtccatgagctgcagggagctgaagtgaaaatcacttgactaggtgttgggagccctgaggcagccagggaccagggcaagtggagagagggaactgagaagttggaaaataataataatattcacagtattagatgttggggtcccaagctgaaattcctacaggtgccaggaaggaagaaaactcattaatarcttacttatgacaatagctggttaaattattttaaatgcactagcacattgaatcctcacaacagtcttggaagaactatc

SEQ ID NO: 383667 - DNA, 625 bp, Homo sapiens
ccagtagcaagaataaaagaggttaagtaattacatattcttgaaatattcaaaagataatgaaaggaaattatgcataactctaacaacaaatataatgagttggataaaattgacatgtaactcctaaggcatgtgctgacaaagcttactgaagaaaattatattcttggaatcaccacacatgtgattatattactataggttttataggtaaacatctcacagacaacattcgaggtacaggttatttcactggataattctaccaagtaagtaatacagaaataacataagtcatacacaaacatgcaaactcttctaaaaagttgcaaagaaaagaattccaaactcattgtacaagaccagtattaccctgataacaaaatcaaagacattagagaaaatgaaagaatactaatatacttcatgaaatagatagacaaatgctaaacaaaatttaatcaagtatcatscaacaacacagatgaatataacatcatggccaagtatgttttctctgtagaatacaagatttatttaacatttgaaaatcaccatattagggtaaaaagacatattaccatctcagtaggtgtagaggaaacatttgagaaaattcagt

SEQ ID NO: 383668 - DNA, 600 bp, Homo sapiens
atacacaaacatgcaaactcttctaaaaagttgcaaagaaaagaattccaaactcattgtacaagaccagtattaccctgataacaaaatcaaagacattagagaaaatgaaagaatactaatatacttcatgaaatagatagacaaatgctaaacaaaatttaatcaagtatcatgcaacaacacagatgaatataacatcatggccaagtatgttttctctgtagaatacaagatttatttaacatttgaaaatcaccatattagggtaaaaagacatattaccatctcagtaggtgtagaggaaacatttgagaaaattcagtcctctcccytaatagaaaacgctcaagaactgtaatagaagaaatgtttattaacttgataaggggttatctgtgaaaacatacacataacatcatacttaatggtgaaagaattaatgtttttaccctaagatcagaaacaacaaaggatgtccattattactacttttattcaatattttactgactgttctggccagtgcaatattgcctaaatttgtaagtaaaaaagtaaatgtatatatatttaaataaatgcatgaattttaaatag

SEQ ID NO: 383669 - DNA, 560 bp, Homo sapiens
atagttcaattaaccctccagaaagtggtggagaagaaaaaagctgatctaaatgactttgtaaaacattattttaactggatgtcttaaggtcacaaacaaaagaactgtgctcaaacactattcttgttggtcaatttgcttctcacaggagtatgtgctagcatttctcaaactattttaaatttatacaaggtttgaacaaataagtaaatatattgtagctatttagagccagttttctcaactgttagcaaaacaagatagccttactaaaagggaccagcttacaatgaaccttcattattggattagaatcagagatatcgctatgaactcaaatatctatctgatctatctatctatctatctatctatctatctatctatcatctatcatctatcttwtctatttatctctttatatctccatgcatccctgtatctgcatctgtatctgcatgtagacaagatggatatccatctgtctatatcttgacatacatatacatataactagatagagagggttatttttatctttgcacagattagtaaac

SEQ ID NO: 383670 - DNA, 585 bp, Homo sapiens
aagagggtacgggaaggtagtaaaaaactgaaactgaacttcagagttggattctgacaagtggacagccaaggtcagctttccccaatgtgtaactgataacatttgagttttatggtaagtggttggtgaaatgagacacttggcaagcctcccccattcaggactttgtaagaactagcaggacctcatctggcacagtcagaaagttgttattcctgattctaaatggaatggaaaagtcaaatagctgctcaacaaataccttccaacttgctctctcctgagatagatatgctgtgttcactgcaagaaactggaaatactttcaggtttgtatgtcagagggctcattagtcccaagccaccaatgccaccctctatgggatttctatagtcatgtgtttatccatgaagtaatgatgggggctgctgagaacccccaaggagattctgtgctctcatttsctattcttgagtcacacagtttgccctaaatcctcagtggcatctcatctgaaacaccaactggagcgagggctctttccctaaacatactcgggaagccatgatttaaaggaggag

SEQ ID NO: 383671 - DNA, 485 bp, Homo sapiens
acatggtgaaatcctgtctgtactaaaaatacaaaaattagttgggcgtggtggcaggtgcctatagtcccagctattcgggaggctgaggcaggagaattacttgaatctgggaggcagaggttgcagcgagccgagattgtgccactgcactccagcctggtgacagagcaagactctgtctcaaaaaaaaaaaaaaaagaaaagaaaagaaaagaaaaaaaaaaaaaagaacatrtccaggtaaatctgctgtttttacctctttggcatttttttttctttcaggctttgttttaaaccaacataatgcatttacaaaagcacagccaaaggagaatttatttttattaattcaaataatttcaacaaatatttattaagcactagtgatgctcgattgtaggaagaggtggtaggttgggaaaagcctggagttgaggaaagaacccagcttgtttgttgaatgttgaggagtgtggttt

SEQ ID NO: 383672 - DNA, 616 bp, Homo sapiens
gcagggatgctctattctcatcatgcccctgcagcccgagacgtggtgacggcctcccactattattgggttctgagtgtctcgccagctctcgggtgttcctttagttctacctgcgtctctctaagtcttgcccatttcaatgtctctttatttcaaccacccaaggagggttgtgtccagcttggattgtggctggaatttccaactctttccatttacaattcgacccacaagagtctctgtagtatcaaaacccttccaggatgtgggatgtataatatcacaatatctggaagccagtatgtgtataaatatatgaatgactgtatttatactacatatatactgtgtgtgtgtatatatatgtatatataaataaaacatgcatatatagtataaatactatattatatatacagtatggtataatagtatatatacacatgctgtatgtatatatatatactatyagtgtgtgcatatatatactataccatatatctacatagtgctacatatacattattatactaaatatatatatatttagtaaaccaaacaggatttctgctctaacagcaataaagacaatttttccccccagatggcacag

SEQ ID NO: 383673 - DNA, 597 bp, Homo sapiens
tgaaacatgctacattgcacagagcagccccacarcaaagaatcatccactccatatgtcaatagtgctgagctgaaaaaccgtctctgaagaagaatagagaaaccagggaagagccacttaattgggagcatcacacctgtccagtccccaccatggactctcctgggactccagcaagtgctgtgaatctctcccctagaatccaccaccatcatcccattcattgacttggtgggcctactcatattcctaaacaggacatttgtacttttactctcctgctcaatgtcacaatgaccctcacccctgctgtctgaagggctcaagcatggagtaaaacatctcctgttgcctcaaagctcccagctttgtttcttgttgcttccctgcaatagtcattggtttgtggcttgtactgttatctgaccatgctcactcaagactcagtgccatgctcatgctcttcttctgccaagattagagcctttcctgtcctatgactgtctgtcatagtcctgcttagtccttgacttctgcatgaggccttttctgactacttcaacccatgatcaatccacttctctctctcctcat

SEQ ID NO: 383674 - DNA, 597 bp, Homo sapiens
tgaaacatgctacattgcacagagcagccccacagcaaagaatcatccactccawatgtcaatagtgctgagctgaaaaaccgtctctgaagaagaatagagaaaccagggaagagccacttaattgggagcatcacacctgtccagtccccaccatggactctcctgggactccagcaagtgctgtgaatctctcccctagaatccaccaccatcatcccattcattgacttggtgggcctactcatattcctaaacaggacatttgtacttttactctcctgctcaatgtcacaatgaccctcacccctgctgtctgaagggctcaagcatggagtaaaacatctcctgttgcctcaaagctcccagctttgtttcttgttgcttccctgcaatagtcattggtttgtggcttgtactgttatctgaccatgctcactcaagactcagtgccatgctcatgctcttcttctgccaagattagagcctttcctgtcctatgactgtctgtcatagtcctgcttagtccttgacttctgcatgaggccttttctgactacttcaacccatgatcaatccacttctctctctcctcat

SEQ ID NO: 383675 - DNA, 594 bp, Homo sapiens
cctcaggcaggtgtcttcacttctccatgactcagtttctccaccataaaatgagaggcaccatattttctacctcataggaggggtgtgaaatttaagtgaatcaattatttgaaatgtgcttaaaatagcagcaaagataatctattgtattagtcagggaatctaaaccttagtattcacaacgtcaagatgacaatggctcgatacgataaaacttgttttggtttgtttgtgtctcattcacccattagtccactgttactattcctagtctgagggttttgggaggtgctgctttcttcctggttctggggaggtaagaaagctccttccacccaccagccatagataagagaagagggcaaggaggcagtaaagcatggggtggggggtggccccatggaaagttttaggacccaagcctagaaatagcaggcatcactcacaccattgtccactggctagaacgcagtcacatgacaacacctagccacaaaggaggctgggaaatgaagtccacctgtgtscacagaagaaagaaatgggtttgtgaacatacagcatccctgcaaaggctctccacagataaga

SEQ ID NO: 383676 - DNA, 583 bp, Homo sapiens
caatgctgctttttatcttagatcagtttccrttggttgaaattgacattcccctgtgctcttgcctggttttgtggttctgtcttctgaagccaagcaaggaaccaatgttgagatggatggttgtttgcctttcagcggtaggagaggggaccccgcagcatggccaggctctgcagaggccacagtgcaggagcgctgctctgtttcactcgaaatgtgagctgtggcaggtcataaagaggaaggaaatcacaatgatagagactaaacaaatcatgggctgcgcggctcaggggagaggagagaaaattacatgttcgggagctcctctgctcgtgtgtgtcactcgtacttggcgaagtataatatttacctgatctgtggaaatcaccccgatgttacctaccagctttactgcccaaaaagagtcacaaaacagccaatgaggcagcgaaagtgaatgtgtgttcaggttcaagcccgttgaaagaacattttggggggcatgccagctctcggtccctttctttcttctccaccgttaacctgaacatgatgtcatagctgtgtggggaaggcg

SEQ ID NO: 383677 - DNA, 428 bp, Homo sapiens
aatcacaagggagcagagaaagcaaagaacaaaactcaaaactggcttaatccctcaccgagwtaaaggactacataccacagcctcaagcaaaatctgggttctatcaaagccaaagaagacagagggatgaatgtgagggcacactctaacagaatcagccacacatggtatcagccatgccaggaacaaaggtaaaccaagttcactcatgtgccagcctgagaactcagtgaatacaagtgctcccaaatctgtcacatcccaaactgaaccagcctgaccacaaggcacaaatggattggcagagcagagtgccaacaaggggctgagctctgtcactctaccaacttccatctagccgcaagagtgccttccagaaccagggctcagcataatacacccacatcctacaagagtttacagca

SEQ ID NO: 383678 - DNA, 492 bp, Homo sapiens
gaaaagtccagaggaaacacagcttcaggaaagactggatccaggagctcaaatgagactatcaggaactgttgatttctctctccctccatttctccaccacatggttctcacgtggggttagaatctcctcacaaaatagcaaagatagctgccaacaaaatagcaaagagaactggctggcaccatcctctcaagaatgcagtaactggctcttatcagaccatcctggtcacatgccctcctgtaaagccctcatggatggagcaacccaactgtccaggcctgggtgggctgccatcctctggagccctgtaggggcagagggcagggacagccccatcaaaccacatggacacaaaggaaggagcaaagatccaccaaggaaaattgggggagtgtgatgrttaattttgcatatccatgtgtgtgggccaccggatgcccagatagctagatcaacacaatttctcagtgtgcctgtgatgatgt

SEQ ID NO: 383679 - DNA, 642 bp, Homo sapiens
tcatttaatgtaacaatgttctaacacattcgaaagggctgtaacgaagtgaaatagtcaacgctaaaaaaagaaaaggaactgaaactcacaatagccatcccctggaaatagatttcaaagattcaccatcaaaccaacctgtgtttttaaactcgtcctttaatggttcagagyttatcttccttagcaaaaacattagcacgaaaactgccaaagaaattattaagctcagtcccaaacaggtccagagaatcgcattcgttcctttcactgaattggtcacacctttatgaaaagaacatcagacagataatgagctgataacataatattcacatactttattgttattatttatttatttattttgagacaaagtcttgctctgttgcccaggttagagtgcagtggcgcgatctcggctcactgcaacctccacctcccaagttcaaacaattctcctgcctcagcctcccgagtagctgggattacagacctgtgccaccatgcccagctaattttttgtatttttagtagagacagggtttcaccaggttggccaggctggcctcaaactgccgacctcaggtgattcacccacctcggcctcccaaagtgctgggattacaggtgtgagcc

SEQ ID NO: 383680 - DNA, 642 bp, Homo sapiens
tcatttaatgtaacaatgttctaacacattcgaaagggctgtaacgaagtgaaatagtcaacgctaaaaaaagaaaaggaactgaaactcacaatagccatcccctggaaatagatttcaaagattcaccatcaaaccaacctgtgtttttaaactcgtcctttaatggttcagagtttatcttccttagcaaaaacattagcacgaaaactgccaaagaaattattaagctcagtcccaaacaggtccagagaatcgcattcgttcctttcactgaattggtcacacctttatgaaaagaacatcagacagataatgagctgataacataatattcacatactttattgttattatttatttatttattttgagacaaagtcttgctctgttgcccaggttagagtgcagtggcgcgatctcggctcactgcaacctccacctcccaagttcaaacrattctcctgcctcagcctcccgagtagctgggattacagacctgtgccaccatgcccagctaattttttgtatttttagtagagacagggtttcaccaggttggccaggctggcctcaaactgccgacctcaggtgattcacccacctcggcctcccaaagtgctgggattacaggtgtgagcc

SEQ ID NO: 383681 - DNA, 526 bp, Homo sapiens
atgtggaaaggtataaaattaagagacaccctcgaccctcacctgagttactgctcctaataaattcacgcatacctgagtgctgtgttttctagccttctgtgagtgggacaggcagggtagggatgctcggactgtctgtggtctctgatttagtcacttcgaggctgctgkgggagttcctctggggtgtccattcactgtcccctgtctgcctccattagatcccatctcaggccccttccaactctacacttctgacattcactgatgtgggtggaatgctgctttgtaaaaatggccgtgcaaatgtgtgctaattaccttgacatttccaagctgcttggtgctcagaactcatactttaggacatgaggctcacaatagtgacccacagcgtgatctcttggacctgtgtggtaagaacctcagtttacagtgtttaaaaatcagatctgtgtaaaaatgtgactcctggcttctctcaacaactcaggactggtggcagccatgtccccgcatagac

SEQ ID NO: 383682 - DNA, 526 bp, Homo sapiens
atgtggaaaggtataaaattaagagacaccctcgaccctcacctgagttactgctcctaataaattcacgcatacctgagtgctgtgttttctagccttctgtgagtgggacaggcagggtagggatgctcggactgtctgtggtctctgatttagtcacttcgaggctgctgggggagttcctctggggtgtccattcactgtcccctgtctgcctccattagatcccatctcaggccccttccaactctacacttctgacattcactgatgtgggtggaatgctgctttgtaaaaatggcsgtgcaaatgtgtgctaattaccttgacatttccaagctgcttggtgctcagaactcatactttaggacatgaggctcacaatagtgacccacagcgtgatctcttggacctgtgtggtaagaacctcagtttacagtgtttaaaaatcagatctgtgtaaaaatgtgactcctggcttctctcaacaactcaggactggtggcagccatgtccccgcatagac

SEQ ID NO: 383683 - DNA, 526 bp, Homo sapiens
atgtggaaaggtataaaattaagagacaccctcgaccctcacctgagttactgctcctaataaattcacgcatacctgagtgctgtgttttctagccttctgtgagtgggacaggcagggtagggatgctcggactgtctgtggtctctgatttagtcacttcgaggctgctgggggagttcctctggggtgtccattcactgtcccctgtctgcctccattagatcccatctcaggccccttccaactctacacttctgacattcactgatgtgggtggaatgctgctttgtaaaaatggccgtgcaaatgtgtgctaattaccttgacatttccaagctgcttggtgctcagaactcatactttaggacatgaggctcacaatagtgayccacagcgtgatctcttggacctgtgtggtaagaacctcagtttacagtgtttaaaaatcagatctgtgtaaaaatgtgactcctggcttctctcaacaactcaggactggtggcagccatgtccccgcatagac

SEQ ID NO: 383684 - DNA, 526 bp, Homo sapiens
atgtggaaaggtataaaattaagagacaccctcgaccctcacctgagttactgctcctaataaattcacgcatacctgagtgctgtgttttctagccttctgtgagtgggacaggcagggtagggatgctcggactgtctgtggtctctgatttagtcacttcgaggctgctgggggagttcctctggggtgtccattcactgtcccctgtctgcctccattagatcccatctcaggccccttccaactctacacttctgacattcactgatgtgggtggaatgctgctttgtaaaaatggccgtgcaaatgtgtgctaattaccttgacatttccaagctgcttggtgctcagaactcatactttaggacatgaggctcacaatagtgacccacagcktgatctcttggacctgtgtggtaagaacctcagtttacagtgtttaaaaatcagatctgtgtaaaaatgtgactcctggcttctctcaacaactcaggactggtggcagccatgtccccgcatagac

SEQ ID NO: 383685 - DNA, 450 bp, Homo sapiens
atgtgggacagataaaccttaaccttttccatttacaaaggcacagttcaaatccaattgtccttttaaacttgtgagttttagaggtctcatggctaaaattttaaaatcaagccgtagtctttctatttgtctgcatttttatgtatatgtgcttacctgtctctgtaaattctccttatggtaccaaattgacttataaataaatgagttctcataaattaagtaaataawcccaaatgcttttcaaattcacattgctttagtaatctcatggtatatgagataagtttaatgttgttggtttaataaaaataactatgtcttttgagttatcagcaatacatgcatgtgtttaactttaaggtccttccttttataatacttgcctgacatacagtaatataaaaatagtaaacaaaaaatttaacttgagatgatggctggatt

SEQ ID NO: 383686 - DNA, 596 bp, Homo sapiens
ttttttgtgacctcgagataaatggaattcacccagtttgaataggtatcacaggcacaatctagtggcaaaaatttctcttggatttttggccttgaggggcttttaaaagtctaatctggtatttcttatgaaaaagttctagaaaagccggttgaaaacagtctatatgttcaattactatttttgatgtactttattaaaaaaaatcagaccaagtataataaaactaaagcttatttcaaaaataaattggtattaatatgtgstgaaaaaatgggactggagggagaaatattatgttttggaaaaaaaaaacaactaaattacacctattattagattatagtcctaatcattgtttttgagttgtattctttgcctataatttgggctgaattctttcctgggtacaaatgtccaaactaatgtgttcaaaatttcctcccagttttctcacatgaaatcactagaaattaaaactttgatttttctgaagccctgcaaactaaagctagacaacttaatataaacttagcagagatcactataacagcttatatataaacagccttcatgcctgttgatgtgtgaac

SEQ ID NO: 383687 - DNA, 609 bp, Homo sapiens
gtgtcagtagctactattatctatgatatccttgttttgcctcctaaggtgcagtgttagtctgttgtcacactgctagaaagaactatctgagactgggtaatttatgaagaaaagaggtttaattgactcacagttccacaggctgtacaggaaacatggttggggagacctcaggaaacttaacaatcatagaagggtgaaggggaagcaagtaccttcttcacatggtgaagtgagagagagagaatgagacagagagagagcaagcacaaagggggaagtgctacacacttgtatacagccagatctcrtgagaacacactcacaatcatgagaatagcaaaagggagatctgccctcacaattcaatcaccacccacaaggtccctcccccaacattgggaattacaattctacatgagatttgagtgggggcacagagccaaaccatgctttgggtttccctagagactccttcctataaagtctgagccttgcagttattttcagctataatcccttattactatacagaagccctactgatgtaatagtaagatgtatggggacgggcactgttctataattttatgattaagtcttagg

SEQ ID NO: 383688 - DNA, 529 bp, Homo sapiens
aggcaacattctttagatttttaagacctaagtcctaaatggaaaacaagaagagctattgttactgataagtcttgttaacttccgaatagatacatacattgagatgtcacagctctctctagagtttcctgtggcataataatgcataaacycatcaaggatatatgtgagtcaaaaggaaagtagaaaatcaggaagtcttaaagaaactgttcatctaaacaacatttcacttcactattcagatatagctgagttggtttagtatacttaatgacattttagtaaggctatgaatatataagcttatataaaataagctcttcaccccaaatagagaaacactgagaactaatggaaaggcagaaaaaattttaaactgggaaatattcatttaaatcagggttttattatttagcagatatttgttatggggtcagacactactctctcatcagaggtgggcccagcatcctaattttatgggatacttaaataatatattatcaaatattctgtaaaccat

SEQ ID NO: 383689 - DNA, 547 bp, Homo sapiens
aagtctaatcgaaatctgagaagtacctttttatgaaaggttcttggaagacacggtttgatgaacaaaatcgacatctgcaaggatacacaaagttcattgacactaatcagtggtaccagggttggcaagcaaggcttcagcgaatagctcaaaggctggcgatgtgtagccctgccacagcctatgctctcaatgtgtctgtcaaatgttgggtttgtatgtgttttggagtctagtagctgaggccaataacaaacacatgtattctgttgaggtgtgacatacattctcatgaaaagagggatcacactccatgattttatcatggcaaaaatatatgttattcatgtagcaaattttgtaagtttttggagtcatttaaaagctacacgacgctcctgaccttaatgccctatcccttgaaatgtagatgccactccaaacaaaaaaaaacagrgaaggaaattctgaattgactaagattttgtgaaatcaacaaagattatgttttctgccatcaagttgactagacactttaaataga

SEQ ID NO: 383690 - DNA, 581 bp, Homo sapiens
ctgctgaaagccttgtcacagttccagcctctgcctcatcttaatccttctcatcctytcccaagctccacacttctctccattccagagcttctgcaaagacctactattgttacaaattgctcagtggagtctagaaccgaatttgctctcaaatgtggttgcatcatttttctgttttttatgtacaaagtactaacattagcatctaaatgcagctgtgttgctactcatcctcagctactccaaggattcctcagatactcaaaggataatgcatcaaagtctgcagagattctctgtataattgtcctagtcattcaatatataattcaaaataaaatacagttttgcaagtggtgcaagtggacataaccatgaaaggaggctttttattgtcacattatatattaatcacttgccgcacctaaacaacctcctcccaccaaatctaagaaataagaatgatgctgctcaaatatctcacactggggaaaataagaaaaataaggaaaaatctgtaaattggttatctcttatgtaaagtttcagggaaagaagaagtcaacaaatacagcagc

SEQ ID NO: 383691 - DNA, 581 bp, Homo sapiens
ctgctgaaagccttgtcacagttccagcctctgcctcatcttaatccttctcatcctttcccaagctccacacttctctccattccagagcttctkcaaagacctactattgttacaaattgctcagtggagtctagaaccgaatttgctctcaaatgtggttgcatcatttttctgttttttatgtacaaagtactaacattagcatctaaatgcagctgtgttgctactcatcctcagctactccaaggattcctcagatactcaaaggataatgcatcaaagtctgcagagattctctgtataattgtcctagtcattcaatatataattcaaaataaaatacagttttgcaagtggtgcaagtggacataaccatgaaaggaggctttttattgtcacattatatattaatcacttgccgcacctaaacaacctcctcccaccaaatctaagaaataagaatgatgctgctcaaatatctcacactggggaaaataagaaaaataaggaaaaatctgtaaattggttatctcttatgtaaagtttcagggaaagaagaagtcaacaaatacagcagc

SEQ ID NO: 383692 - DNA, 581 bp, Homo sapiens
ctgctgaaagccttgtcacagttccagcctctgcctcatcttaatccttctcatcctttcccaagctccacacttctctccattccagagcttctgcaragacctactattgttacaaattgctcagtggagtctagaaccgaatttgctctcaaatgtggttgcatcatttttctgttttttatgtacaaagtactaacattagcatctaaatgcagctgtgttgctactcatcctcagctactccaaggattcctcagatactcaaaggataatgcatcaaagtctgcagagattctctgtataattgtcctagtcattcaatatataattcaaaataaaatacagttttgcaagtggtgcaagtggacataaccatgaaaggaggctttttattgtcacattatatattaatcacttgccgcacctaaacaacctcctcccaccaaatctaagaaataagaatgatgctgctcaaatatctcacactggggaaaataagaaaaataaggaaaaatctgtaaattggttatctcttatgtaaagtttcagggaaagaagaagtcaacaaatacagcagc

SEQ ID NO: 383693 - DNA, 530 bp, Homo sapiens
aaccagtaaagatcaaaaaagactaagaagagcattacctagtggtaaacagttcacttcgataagaaaatcgaactatactaaatatatatgcactgaaacacaggagcacccagattcatacagcaagttcttagataccttcagagagacttagactcccacacagtaatagtgggagactttaataccccacygacaatattaaacaaatcactgagacaaaattaacatttaggatctgaactcagtactgaatcaaatggacttgatatatatacacagaagtctccacacaaatacaacagaatatacattcttctcattgccacgtggcacatactctaaaaccaaccacataattggaagtaacactctttgatttaagacagaaatcaagaagttctttgaaactaatgagcatgaagatacaacataccaaaataactgagacacagctaaggcagtgttaagagggaaatttatagcactaaatgcctacatcagaaaaggtagaaagatctcaagtt

SEQ ID NO: 383694 - DNA, 616 bp, Homo sapiens
aggtacaaagaagcaaaaagcatttcaaacattgggaatcgcagaggcaaaggtcaagcacattctgataacaaagttcaatatagatgggatgtcaactgaccttcatagaattaaataattcatgggaaagcactttgaaaagtgaaatatactatacaggtgaaaggtattattatctctaataaattctctctggtggggaaaagtgaaaaaatacaggattaaaagtctatttaatttcaaacacagtattttttttccaggggctataggcaaagcatgtagttaagtttaaatgtcttttatttcttctaaattcccggttttattttgcattgtgatattttggtactgctctagaaattttttggaaagattgcatataactacttttccccatagggattttctgaaatttagttacatttgtatccagcccaattatctagtaggaagaaatgttatgagtgctatacacatttattcagggcaaagttgtcataactgcctaagtaaaaakcagaaactcatacatgatgaaatatttcactgatacataatttacaaaagatcagagaggggagtgagggaattgactgtctcatgagaggaa

SEQ ID NO: 383695 - DNA, 642 bp, Homo sapiens
caccattttttgccactaagtcttaaactcagaaaacactctgagacacttggataatttctagataaagctgttgctcaatgaatgccacttttaaaattcaaaatatattctaatttctgcagtaggccaaaggaataataagtgtggggccagaggcactttctatggagtattgactaagagaacaagaatgaaattgaaagacrgggaagctatcagtgaaaatacactgttcctgggcccgaaactaactggatatatggatgcaagcaaaatctttggccaaggtaactttctgcctttcctcacacactctagagacttgtagccctctcacaggtcatttatcttctcaataattgtttcctttatggtgctatctccccagccatatatcttgatgatggcagacaggtccaagtaacctgataaattacagatagcagtctagtcaatgaatggcctagaccccaaaatttattttaccatgcctgcaataaaatgactgataaatacaaataaggaagcctaaaactgtcttatgacacaagagggaggtaccagttgaggtacataatctgctggatgcgaaccaaaactacatggttcacaggataggtgatcacaaattgggggaaa

SEQ ID NO: 383696 - DNA, 642 bp, Homo sapiens
caccattttttgccactaagtcttaaactcagaaaacactctgagacacttggataatttctagataaagctgttgctcaatgaatgccacttttaaaattcaaaatatattctaatttctgcagtaggccaaaggaataataagtgtggggccagaggcactttctatggagtattgactaagagaacaagaatgaaattgaaagacagggaagctatcagtgaaaatacactgttcctgggcccgaaactaactggatatatggatgcaagcaaaatctttggccaaggtaactttctgcctttcctcacacactctagagacttgtagccctctcacaggtcatttatcttctcaataattgtttcctttatggtgctatctccccagccatatatcttgatgatggcagacaggtccaagtaacctgataaattacagatagcagtctagtcaatgaatggcctagaccccaaaatttattttaccatgcctgcaataaaatgactgataaatacaaataaggaagcctaaaactgtcttatgacacaagrgggaggtaccagttgaggtacataatctgctggatgcgaaccaaaactacatggttcacaggataggtgatcacaaattgggggaaa

SEQ ID NO: 383697 - DNA, 570 bp, Homo sapiens
agaaaacatacacatggccatgggtgtatgaaagtaattctcagcaccactaatcattagagaaatgcaaattaaaackacaacgtgattttatctcaccccagataaagtggcttacatcaaaagacaggcagtaacagatgctagagaagatttggagaaaggcggaccctcatacactgttggtgggaatgtaagttagtacaaacactatgtagaacagtatgcaggttcctttaaaaaaactgaaaatagaacttctatttgatccagcaattccactatttggtatatattcaaaaacaaaaggagattgatatatcaaagatatatctgcactcccatgtttatttcaacactgtcacaatagtcaaaatatgaaatcaacctcggtgtccatcagttgatgaatggataaggaaaatgtggtttatatacacaatggaaaactattcagcaataaaaaaagaataaagcatcattattttcagcaacatggattgaactggaagtcattacaagcacaaaaagacaaaattgtatgttctcattcataggcaggagctaaaa

SEQ ID NO: 383698 - DNA, 570 bp, Homo sapiens
agaaaacatacacatggccatgggtgtatgaaagtaattctcagcaccactaatcattagagaaatgcaaattaaaacgacaacgtgattttatctcaccccagataaagtggcttacatcaaaagacaggcagtaacagatgctagagaagatttggagaaaggcggaccctcatacactgttggtgggaatgtaagttagtacaaacactatgtagaacagtatgcaggttcctttaaaaaaactgaaaatagaacttctatttgatccagcaattccactatttggtatatattcaaaaacaaaaggagattgatatatcaaagatatatctgcactcccatgtttatttcaacactgycacaatagtcaaaatatgaaatcaacctcggtgtccatcagttgatgaatggataaggaaaatgtggtttatatacacaatggaaaactattcagcaataaaaaaagaataaagcatcattattttcagcaacatggattgaactggaagtcattacaagcacaaaaagacaaaattgtatgttctcattcataggcaggagctaaaa

SEQ ID NO: 383699 - DNA, 599 bp, Homo sapiens
tttgaagtttcatattactaatgcaaagggtttctaccaatccctgaaaaaaatgggtgttttttgaagctggttgcgttaaaaagtagtcattagaaytgacaaatatttataagatttttttttttgttttgactacaaagaaaaaaatggatcagcttgacaatgacggaatgcaaaggagtcgaggcgaatgtacttgcaaggcagaaaaataaatcctagggatttaaataaacgacatagaaaaaggaaacagcttgaaagttcctggttaggttttggtcacagtattaaaaaaggaaaatcagaattctttttactcttttcttctttagagaacaagtttaaaagataaagtctgaactaccaagatgactcttggttaagggtccaaaagggtccaaaattcccccttcttaaattttgctctaaatcatgagcttctttaatctttttttttccctctcttacctgcgttagaacacattatgctttcttgctatggttctgcacctcttttcagggtagaaaccacggtcctgatgatgatgatttggggctttaaaataaatttctatgagtagatatttgaaata

SEQ ID NO: 383700 - DNA, 558 bp, Homo sapiens
tggggcttaaaacctagatgatgggttgatagatgcaacaaaccactatggcacatgtatacctctgtaacaaaccggcatgttttgcacatgtatcccggaactttaagtaaaaaaaaaaaaaaaaggaacattcacattcccacatatttggataagggtgtatcattttgggggccaccatacaaggtactacaaggacaaatcctacgtcccatagttagggagagtcagtgcctttctatggtaaagcttcagcaaactagaaagaaagggaaatatttttaactggctaaaaaatatttataaaatatcccctttatcttttgttttaagcatcattccctttaaaatcaggtacaatattaggatgagtattttcatcactcctagtcaaacttggattgaggattataaagatcagaaaggaaaaaacacattttactttttattagcaaataatgtgtagaaaatctaacagaatctatagtmaaaaatgttaaatgtaaaaaaaaaaaatcaaggctgttgcaaataagatcaaaacactaaaatcaa

SEQ ID NO: 383701 - DNA, 592 bp, Homo sapiens
gggtgtatcattttgggggccaccatacaaggtactacaaggacaaatcctacgtcccatagttagggagagtcagtgcctttctatggtaaagcttcagcaaactagaaagaaagggaaatatttttaactggctaaaaaatatttataaaatatcccctttatcttttgttttaagcatcattccctttaaaatcaggtacaatattaggatgagtattttcatcactcctagtcaaacttggattgaggattataaagatcagaaaggaaaaaacacattttactttttattagcaaataatgtgtagaaaatctaacagaatctatagtcaaaaatgttaaatgtaaaaaaaaaaaatcaaggctgwtgcaaataagatcaaaacactaaaatcaatcatgtggtttatatatataaaccaattattttaaaatggaatcattttaaaatggaatatatcaaatattccattcacaataaaactttaaaataacaaaaactataaagcacatggccatgtacaaactttgtaattaaaactgtccttaaatgaaagaaatagtatagatactggataaattccaagac

SEQ ID NO: 383702 - DNA, 592 bp, Homo sapiens
gggtgtatcattttgggggccaccatacaaggtactacaaggacaaatcctacgtcccatagttagggagagtcagtgcctttctatggtaaagcttcagcaaactagaaagaaagggaaatatttttaactggctaaaaaatatttataaaatatcccctttatcttttgttttaagcatcattccctttaaaatcaggtacaatattaggatgagtattttcatcactcctagtcaaacttggattgaggattataaagatcagaaaggaaaaaacacattttactttttattagcaaataatgtgtagaaaatctaacagaatctatagtcaaaaatgttaaatgtaaaaaaaaaaaatcaaggctgttgcaaataagatcaaaacactaaaatcaatcatgtggtttatatatataaaccaattattttaaaatggaatcattttaaaatggaatatatcaaatattccattcacaataaaactttaaaataacaaaaactataaagcacatggmcatgtacaaactttgtaattaaaactgtccttaaatgaaagaaatagtatagatactggataaattccaagac

SEQ ID NO: 383703 - DNA, 430 bp, Homo sapiens
ttggcccctactgggaggtgtctcccagtctggatacatgggagttcagggacccacttgaggaggcagtctgtcccttatcagagcttaaatgctgtactaggggaactgctgctctcttcagaactgtcaggcagggatgtttaattctgctgaagcagctcccccagccatttcttcccccaggtgctctgtcccagggggctctggtgggctccacccagttcaaacttccaggtggctttgtttacactgtgaaagtaaaaccgcctactcaagcctcagcaatggtgattgcccctcttcccatcaacctctagcatcccaggttaacctcagactactgtgctagcagcaagaatttcaagccagtggatcttagcttgctgggctctgtgggrgtgggacctgatgagccaggcactggaga

SEQ ID NO: 383704 - DNA, 566 bp, Homo sapiens
agacaaggaacctgcctatgtgttgttcttggattacaaagccttcagaactgtgagaaataaatttctatttcttataaattacctagtttcacacactttgttatagtaatacaaacasactaggtcagtttttatttttgttaaactttgattgtgtatgaataaacataattccaaggtaaaaacctgtaaaatagcatacattcaaaaaaatataattttaatttttgtctcctgtcctggttcattccctctcttatatgtagctatttataatttttggtttaactctctattatgtctttgtgtggctctctgtgtgtctgcatacttttatttccattccctttcacatacaaaatattacatattataaatcatagagtctgcttttattctgaataatatatactagaagacctgtgttacagttattgattgctgtgaaacaaaccacctccaaatcttactcacttaaaacagtaccttttaaaaaattattcatcacaatttggtgaggatttgcttgagtaatgcttcttttctatgtagcacttatagag

SEQ ID NO: 383705 - DNA, 462 bp, Homo sapiens
aacagttacattaatactagatactcatgggaatatctcccttttaacatctttttttgggtcacataatcaccataatcagactacatcatggtaatgacagtgcttggccttttcacgagycttttagctaaaaatcctcaggagatattgattaattaatcctttccatccttcttgtttgccagcattatccataccaaaaagaggccttggcagaaggcacagatatcagctatctgaatataaaacacatcaggaaatccttttctctgtctttacaatttacctctacacctttatctttcagtaatacagtacaaaatgtatgtttgttgcaggaagtcaaggaccccgaatggaagaactggctgaagccatggcagaagaacataaattgtgaagatttttatggacatttattagttccccaaattaatacttttaaaatttcttatgctt

SEQ ID NO: 383706 - DNA, 538 bp, Homo sapiens
aaaactcctaacaccaaaacacaacctaatatcagtagctaaaaaaaaaaaaaattaattacaatttaggtagatatatagaaagtaagaatcactggtgcctagcacatgacataaacttgttttgcttctgaaaaaaacattattaagacaaaaataacaaaatgataatgtgtgcattctctgccacactgggctccaatataaaagtctgtaccacatagaaagttgaagaaatattgatttctatacattaatttcctttccgtgagactagaggagtgcaatgtccagtacccatatttagctaacttatgtgcatctagtcagaaacctcaaattacagaagacaactggaaagacatatgattgcaaggtgatactaggaaaaactgctagaaataagatttggagtagaartgctacatattaaatctacacatataccttagtacacacacacacatacacacacatacattaaaaaaggacagagaatctgttgactcactcttaatttactgaatcacaatccaga

SEQ ID NO: 383707 - DNA, 638 bp, Homo sapiens
tcccaaggggaggggtgggtcaccatctctgctgtttgggcaacttaaccatttaggccttcaggttctggagaatccacaccaaccaagggtgaaagggatcccccagcacagcacagctgctctaacaaaatgtgcccagactgcttctctaagtggatcccaaattccattcctcctcactgggtgggacctaactaaggcttccagtcaccactgccagtgttctcaggctgacagacatttgaaaactccctaggacagaggtgccagggggagagtcaggccgctatctttgctgttttggtaacttagtctttctagactttaggctttggagagcccaagtccaygggggttggggcagtatctcagaacagcagagctaccctacaaaaatgtgaccagagtgcttttgtaagaaggtccctgaacctgttcctcattaccagggggaagtctcccaaccagggtctctggctacctgcactggtgttctctggctgacagagctttcaggccttcttaggacagagctcccaggtagaggggcaggccaccatctttgctgtttggacaacttagccattccaacctttgggcttcagaatgtccaaggggaccaaggacagaagcag

SEQ ID NO: 383708 - DNA, 569 bp, Homo sapiens
ggcaagggtgcaagttaaatcttacatgaatgttggcagacaaagtgagagcttgtgcagatgttttttaaaaccatcaaatattgtgaaacccattygctatcatgagagcagcacaggaaaggcctgctcccatgattccatcatctcctaatgggtttctccctcaacacatggaaattatgggagctacagatgagattttgatgggggaatagagccaaacaatatcacatagaaaacaagaggatggaggtatttttaggagttgatccagaagcgaaataaatgaaccgttagtcaattaacatggtaatctgcaggatatatgagcagtacattttcatagtcaccaatgcatggggaagtagaggtagcctgggaggtagggtaaggatgagtgggatatcacatcattaaaaaagttcatcaaaatggctttttagtgactgaatgttgtgttcccccaaagtttatatattgaaattttaagccccaagttgaaggtattaggagtaggcttttaagagatgattaggttatattctggatctgacaggaataggatt

SEQ ID NO: 383709 - DNA, 569 bp, Homo sapiens
ggcaagggtgcaagttaaatcttacatgaatgttggcagacaaagtgagagcttgtgcagatgttttttaaaaccatcaaatattgtgaaacccatttgctatcatgagagcagcacaggaaaggcctgctcccatgattccatcatctcctaatgggtttctccctcaacacatggaaattatgggagctacagatgagattttgatgggggmatagagccaaacaatatcacatagaaaacaagaggatggaggtatttttaggagttgatccagaagcgaaataaatgaaccgttagtcaattaacatggtaatctgcaggatatatgagcagtacattttcatagtcaccaatgcatggggaagtagaggtagcctgggaggtagggtaaggatgagtgggatatcacatcattaaaaaagttcatcaaaatggctttttagtgactgaatgttgtgttcccccaaagtttatatattgaaattttaagccccaagttgaaggtattaggagtaggcttttaagagatgattaggttatattctggatctgacaggaataggatt

SEQ ID NO: 383710 - DNA, 637 bp, Homo sapiens
aatgctcatttttaatcaatctaatctatggtatttgtgttacagccaccsaaataaagacaagactgaattaaaaagctgaagtgtgagcaaagatttgaagagggtatgagttttttcaagcagacacttgacaaaaaagcatattatggtaacgaaatccttagattaaaaggcctttataaaaataaatgtgcctagcaagatgcagaagcaacaagaatgccagtgtggctggagcaaagttaatgagagagagagctgaaaggtattatttcagattataaaagactttgtgagcaatgatttcagtgtttactcaggatgagtagggcaagatgttacagcatgtctacacaaatcagtttgtgctgctgtaacaaaatacctgaaactggataatttataaaaaacagaaatgcatttcttacaattctggaggatgcatagtcctagattcaggcatctgcaggtttgttgtctagtaaacgtccagtcttgcttccaagatggcactttgaatgctgtattttccagaggggaggaactcttgtgtcctcccgtggcagaaaagcaaaggagagagaacccactctctaatccctttttatatcagcattaattatgtcagcattaa

SEQ ID NO: 383711 - DNA, 699 bp, Homo sapiens
gattattatcattatgtacttcatgtcaagactcagctgagtascacacttatatttctgcaggacatagtaggtattcagagagcctctactgatagtattatagtaagccagagtctggactcttctgtttaagtgtgcaaaaaaggtagttagttattcagagttttcaagtctctatttcctcatttgtaaaattgagatgattacgtttgccatgctgacctcaaatgaccattgaaagattcaaatgaaataatctatataaatatatttaggaaataatacaactctctataggttttatgtaagcaccctgctgttgatagatatgtctttaaagagaatgagaactctatctgaaatatccccaagttactagtttccagccctctttagtgtttcaagacagatcagattcctttgatgttacaaatcaataccttaggatagcatcaatagggtaaatccctcctgccagaatttaaattcccataaattaaaatttcatcttgtaacagcaaaaaggtcagcctccaaataaagtagagcctttgtttgcgccacagatttgtataactataccttaatgaagggttattaattgacaacatataatgtttaaatgttttgttgctgattttcccttatatctaaaggatattccttctcaggagttccattaatcaatgaaaacag

SEQ ID NO: 383712 - DNA, 699 bp, Homo sapiens
gattattatcattatgtacttcatgtcaagactcagctgagtagcacacttatatttctgcaggacatagtaggtattcagagagcctctactgatagtattatagtaagccagagtctggactcttctgtttaagtgtgcaaaaaaggtagttagttattcagagttttcaagtctctatttcctcatttgtaaaattgagatgattacgtttgccatgctgacctcaaatgaccattgaaagattcaaatgaaataatctatataaatatatttaggaaataatacaactctctataggttttatgtaagcaccctgctgttgatagatatgtctttaaagagaatgagaactctatctgaaatatccccaagttactagtttccagccctctttagtgtttcaagacagatcagattcctttgatgttacaaatcaataccttaggatagcatcaatagggtaaatccctcctgccagaatttaaattcccataaattaaaatttcatcttgtaacagcaaaaaggtcagcctccaaataaagtagagcctttgtttgcgccacagatttgtataactataccttaatgaagggttattaattgacaacatataatgtttaaatgttttgttgytgattttcccttatatctaaaggatattccttctcaggagttccattaatcaatgaaaacag

SEQ ID NO: 383713 - DNA, 586 bp, Homo sapiens
acagaaaactgaagtaatctttttaactttttgctgaaaacattgctgatccttgttttgcttttcagagtcaaagaaacttttctttttagttatctacagcttttaacaattgagccaggtaaccatttgtgaataaaatttgtagcctatttgtttctctctgcctggtttctccagaatttggaaactactgttgagtattcttaatttatggtgatatagtcatttgcataagtgcaataagaatccattttcttttgtgacaggacacgattggagaaactggttgtttttaccaaggctttaactrgaagggtatgcttccctttaaggaatcaaggttgacttgcagagccaataaaagccccttgggaatattcacctcatatcttgtctacacagtctccttataggtttcctaacctgtggtgagtaaagtatgtcaatttctaacagccccaggagccccatgttatcttgggacctccagaagtgtggaatttacccaactcacagatgtttgagggtaaaaacccatgactgcatttgtttttaaaaagtcttatgtgagattccttataga

SEQ ID NO: 383714 - DNA, 630 bp, Homo sapiens
tactattgtatcacagtctcaaaggacagtttctgagaatctcttttgaagaggtacatggataaaaggagaaacatgctttttttttaatggagaagaaaacatttttttttaaaagccacgtctagaaagccatatattattgtttattccatcatgtttgtaaaagggtatattttcattgagatgaaatgcttgagttttaaaaacttgatattattgtttagtggtattttcagtgaggggtaaataaaasaattcattgagcatgtactgcacacagaacattatactaggatctgcacaaattcaaagacgaagacaaaacagtcctcactctcagtcagcgcaagaaaagacatagttgctcttttcctttcaacattaagaaacaagaaattgaaatttaaacaggttcctttcctcccctccttttctcccttcttccctccctccatctctccttgagtatctaccgtgtgtcacagctggggatatgtagacaaggacaccctttgtcatgacccgtcactcctgcagatgagactccccccaggctgggacattttaggcaagtgggcgaaaagaatccccagcacagtccctctgtgcggtgctgcctagcagctg

SEQ ID NO: 383715 - DNA, 581 bp, Homo sapiens
tcaggttttacagggggagggctcagttctgtaagactgccccctacttccagtgccaagcacaagctccaggttgttttgcctgtgcttctgaccaaccagccataaattgggaattccatgacaccctcaagtttgatgaatgtgctagrgcaggtcccaggactcagggaaacatttagcttattggtttattataaagacaattacaaatggcacagaagaagagatgcatagggtgaggtgtgggggaaggggtatgaggagctttcataacctctctgggaacagcacattccaggaacctccacacattcagctatctggaagctcctcaaactctgtgggtttttttttttttttttttttgaacattttacggggacttcagtggatgggcatgatggacaaccataaaaaacgtgattggacaaaaagagtatgatctaatgttagtagagtgagtgatgaaacctgtctgtcagatccttcttggtctctctatgcagccttccttcctccagggcatggggcagaacctcttctgaaatggggatcttatgacctacaatcaggcaagg

SEQ ID NO: 383716 - DNA, 565 bp, Homo sapiens
tattcacctgtcatttcacaactaatattcttttcctcctaatatatgtaatttttcaaaacacaaatatctttattacatataggctgtttctatttttatagggatatccatttggcccagcatcrtttattgaaaagactcctttgcccactgctcagcagtgggaccttcaagtgtctatatatgcatgaatctgtttcaggattctctacttgcttccattgtctatatgggtattcttgtgccaattgcataccattctaattactgtacttttataatagatcttgatatataatagggaaagtcttcccaccttgttctttttcttcaggaacatcttggctatttggggccttttgtaattccacatgacttttagatacagattctcaagatctactgaaaaatccccaccttgggattttgactgagattgcattgaaactatagctcaatttgggaggaatttgtatcttgacaacttcaacccttatagtccttgaacacagtaatacccacccatttatttcagtcccctttatcttaataatatcttaga

SEQ ID NO: 383717 - DNA, 555 bp, Homo sapiens
cttttgtgctttcttgttgctccatgctctcacatgtggtttcaaatcatctttcacggaaagtgaagatgcagctggaagattcacgttactgtgaggctggtaaatgcattaacattctacatcctccaaaatctagctgtttgttaayaagaaggccctccagaacatctagtctagcatactatcagaatagaggtttagggccgggtggctcacgcctgtaatcccagcactttggaaggccaaggcggacggatcatgaggtcaggagtttaagaccagcctgaacaacatggtgaaatcccatctctactaaaaatacaaaaattagctgggcgtggtggtgtatgcctataatcctagctacttaggaggctgaggcaggagaattgcttaaacccaggaggtggaggtcatagtgagctgaggtcacgccactgcactccagcctgggcaacagaacaagactctgtctcaaaaaaaaaaaaaaaaagtttaattcagggttgttgttagttttccaagttgaaaatagcttgctaaaagggagaa

SEQ ID NO: 383718 - DNA, 611 bp, Homo sapiens
ggctgcacctttgccactgccatcctcggagcggaggaagcagacatagcagtcgggcaccagccgccacacggtcttatgtagacgcttggcaaaatgggggtgtttcttgtagacggaaccgtcgaccccaatagtagagcgaagctgctcctcrcctttgttctccttgatgcgctgcagcacgggggccagggtggctgtgcacaggctggcggagtgtgtggacacgatctgacagatccggtgagtggccacgcagtcctcctgagtcgggtccatgcccaaccgcatcaggacctcacgggccttccggatgccatccttctccccttcagtgtctgagatgtctttggtctcaaagtgaccggtgttgagaagctctgggctgagcttccccctaaagagcagctcctccttggccatcttcaccaggataaacctcatcagctcccccatgtacatcccactgatcaccttctcaaacagttgcttccccaggttcagtgagcccatgtcaatctcctggtcaaactcagtgcgaatgtcattgagcgagccatcgtccccgaaggccccccactccatattgatacacatctgcccctcgt

SEQ ID NO: 383719 - DNA, 611 bp, Homo sapiens
ggctgcacctttgccactgccatcctcggagcggaggaagcagacatagcagtcgggcaccagccgccacacggtcttatgtagacgcttggcaaaatgggggtgtttcttgtagacggaaccgtcgaccccaatagtagagcgaagctgctcctcacctttgttctccttgatgcgctgcagcacgggggccagggtggctgtgcacaggctggcggagtgtgtggacacgatctgacagatccggtgagtggccacgcagtcctcctgagtcgggtccatgcccaaccgcatcaggacctcaygggccttccggatgccatccttctccccttcagtgtctgagatgtctttggtctcaaagtgaccggtgttgagaagctctgggctgagcttccccctaaagagcagctcctccttggccatcttcaccaggataaacctcatcagctcccccatgtacatcccactgatcaccttctcaaacagttgcttccccaggttcagtgagcccatgtcaatctcctggtcaaactcagtgcgaatgtcattgagcgagccatcgtccccgaaggccccccactccatattgatacacatctgcccctcgt

SEQ ID NO: 383720 - DNA, 512 bp, Homo sapiens
cacccaattccccctaacaggagttagggactccattccagaatggagaaatatgttataagaggaagaaagaaatcatttaggtggacagggtaaagcaagtccctggcaaaaaaaaaaaccactttacttttaacaaaaagcagctcaaaaatagctctctttctaacctcatgcagttcaaagaaatcacctctcctctaacaacaagcagcytgatagagcagactgtaaaacacagataagacagcttgggtacagaaggagagggggaagtttcttgagtttcttgggtaatcaccaaacttcacactcataccggtaaaaacagtgggccttagtaagcacattcctttccctttaggcacactaagatagggaagctaaaagtgggtgtggggggatgcctgcagctgcaagaagatgtctgggaacagacacagaaactctccctcccagataagcaagacaaagcagcacagactaagattctgcctatgtggtcagcaaac

SEQ ID NO: 383721 - DNA, 652 bp, Homo sapiens
acatatttcaggatattgtccatgaaaatttttccaaactcactagagaggccaacattcagataacggaaatgaagagaacccctgcataatagacaagatgacaatctccaagacacttagtcacaagattcttcaaggatgacatgaaagtaaaaatattaaaggcagctagagagaagagacaggtcatcaacaaccgaaaccccatcagactaacagcagaactttcagcagaaaccctaagccagaagagattgagggccatattcagcattccttaagaaaagaaacaccaaccaaaaatttcatatccagccaaatttagcatcataagtgaaggagaaataagattctttttcagacaaagaaaagctaagtgaatttgttaccactagaactgccttacaagaagtctttaagggagtgctaaatgtggaaacgaaagcctgttaccagcaatcacaacaacacacttaagtacatagcccactgataytataaagcagctacacaatcaagtctgcataatcaccagctaacaacctgcttacatgattaaatctgacatatatcaatattaaccttgaatgtaaatgggctaatagccccaattaaagggcacatagtggtaagttagataaagaagcaa

SEQ ID NO: 383722 - DNA, 569 bp, Homo sapiens
gtaagtgcagtgtttttataaagtagatgagtaatcagggaccatctttcccctgatatccatttttggccgtaagactggtttgcacaaataaagtgtaacccaaggtgatttggaagaaaccttttctaccatctgttttcccatatgtctattagaaatggatgacsagggaaaattttgaaagcttttgttaaggttggaagacctgctagccaatttggactatccattttgaaatttcatgaatggtatgccacgattttggattatgaattttgggaatttctttaagattttaattaacctagcttatacaaaagcctattcagtgagttacaattttaaaagtcaaaaaataaacacatttcaagttacaaaaattatataacttttgtatttgtatagatgaggcagggtgggaaaggggttttctattcttgtttatctttctgggcttttgaaactctcttatttttctaccagctcagccatgcaattaaagagatatgatactctatctttagaattacttctaaaatatgaaaatgataatgtataattccaaa

SEQ ID NO: 383723 - DNA, 551 bp, Homo sapiens
aaatgtggtacatatatacaatggagtactattcaaccatcaaaaggaatgagatcctgtcatttgcaacaacatggatggaactggaggayattatgttaagtgaaataagcaggacacggaaagtcaagcttcacacattctcactcacttttgggagctaaaaagtaaaacaattgaactcacgaagatagatggtagagtggtggttaccagaggctgggaagggaaggtgaggatggttaatgggttcaaaaatatagttagatagaatgaataagatctaatagtatttgatagcacaatagggagattatagtcaacaataatttattgtatattttcagataactgaatgagtataattggaatgtttgtaatagaaaaaatgataaatgcttaaggtaatggatatcccatttaccttgtgattattacacattgtaaatctgtatcaaaacacctcatgtaccccattaatatatacatatgctataatttagtgatctaataaaattttattgttctccacttttctcgtgtaatcaact

SEQ ID NO: 383724 - DNA, 551 bp, Homo sapiens
aaatgtggtacatatatacaatggagtactattcaaccatcaaaaggaatgagatcctgtcatttgcaacaacatggatggaactggaggacattatgttaagtgaaataagcaggacacggaaagtcaagcttcacacattctcactcacttttgggagctaaaaagtaaaacaattgaactcacgaagatagatggtagagtggtggttaccagaggctgggaagggaaggtgaggatggttaatgggttcaaaaatatagttagatagaatgaataagatctaatagtatttgatagcacaatagggagattatagtcaacaataatttattgtatattttcagataactgaatgagtataattggaatgtttstaatagaaaaaatgataaatgcttaaggtaatggatatcccatttaccttgtgattattacacattgtaaatctgtatcaaaacacctcatgtaccccattaatatatacatatgctataatttagtgatctaataaaattttattgttctccacttttctcgtgtaatcaact

SEQ ID NO: 383725 - DNA, 550 bp, Homo sapiens
aacactgtattctattgtaaccatatcatttaatggtacgtttcctcctagctgcttcaccgaagtccctttgcgagtcaaagacagcgtgtcctcgctatagatatttcccttggcataagcttgcctctctttttctccactcaccttagcttgctgagacaggagaccattcagggaagtaggcaaaaatcaaaccttgcattaaggttagttaaggggaagacagaattctggatgtgtattcaagggaagctgagttttttcactgtacaagtcagttagtctgttactgggttctctgtaawactggtatctctccctctcacttatgttgtcttcttcagcgaagaggcacttcagcactgttcccagtcactctttctctccttccttctctctctatctctttcacttccttcttcctccctccctttgtcttaattccatttccaaatacttgatgttttgtttaaaaaatgaagattcagaatacaactaaaaagtctgcaataattagcatcttattactattacagtgtaactattt

SEQ ID NO: 383726 - DNA, 525 bp, Homo sapiens
tgctctctgcatatagcaggagacacgaacaagcagctgcagagagaaacaacccaatccagggcctcctctctgctaggagctgaggagatgatgaaggacctgcctacagggaggarctaccctctccaaaaccccttctctgctgagagctacagagaggacaggatgacctgcctgcagagaggacctttccactccagggtctcctctctgttaggagctgaacatttgttgggacatgctgactgtggaaaggagctacccgctatgggtttcatttgagctgtcctattgttcaataaagctcctcttcattttgttcaccttccacctgtctgcatacttcattcttcctggttgcaggacaacgactcaggacctgctgaatggtggagttaaaagaggtataacacaaacagggctgaaacaaaccccttgctcaccatgttgtgggtgaagagaagcagagaaaagttgcctcccctcagggagctgagaccagaaagctccaagagccggggc

SEQ ID NO: 383727 - DNA, 523 bp, Homo sapiens
tcatgaacagaaaggtccactccagccacaaaactggatagataagcagccttcatttgatgctggtgtttcacaggtattttctttctttcttttttgaaacagaacctcgctctgctgcccaggctggagtgcagtggcatgatctcggctcactgcaacctccacctccctggttcaagcaattctcctgcctcagtcttccgagtagctgggattacaggcgtgtgccaccatggccagctaattttctgtatttttagtagaaacagggtttcaccatgttggccaggctggtctcgaactcccgacctcaagtgatccacccacctcggcctcccaaagtgctgggattgcaggcgtgagccaccgcgcccagcctcacaggtacyttctaatcaaagttaaaagaactggcaaaataaataaaataaaatattctgtctgattaatatactgctcagtttcccagaatctcaaatatcatccacctcagcttcttgtactgaaatgacaacacctg

SEQ ID NO: 383728 - DNA, 353 bp, Homo sapiens
gtattactccaatttacacatttaataaaatttattcaaatcttgattactctgaaatgtgtaaaaaaaactttgtagcttctctggggactgctgataacttcattacaactttttacctgagataaaatgaaatctgggagagatttatrttgattattccttaagtttgcttgataaacttctcaattctaaaataactgaacctatttcatgattaagaaggatatcagggttatgacgtgtcaattattcgattgttttatatttttgaaaataaaatgtttacaaagaaaattatttcaaaacatgttaagtagtgttatttgctaacagtctccttagtttaatct

SEQ ID NO: 383729 - DNA, 353 bp, Homo sapiens
gtattactccaatttacacatttaataaaatttattcaaatcttgattactctgaaatgtgtaaaaaaaactttgtagcttctctggggactgctgataacttcattacaactttttacctgagataaaatgaaatctgggagagatttatattgattattccttaagtttgcttgataaacttctcaattctaaaataactgaacctatttcatgattaagaaggatatcaggkttatgacgtgtcaattattcgattgttttatatttttgaaaataaaatgtttacaaagaaaattatttcaaaacatgttaagtagtgttatttgctaacagtctccttagtttaatct

SEQ ID NO: 383730 - DNA, 508 bp, Homo sapiens
gactttactcctctgttctgggcctatttcctcaaatccagactcatgtattaaacagattattcaacatttctacttgaacatttaccaggcatttcacagtaaacattttcaaaactaaggccaacttctttcttcataatgtgccccttcctaacatttccatttcagttgccagtaacttacatcctcatgttgtgtaatgcacaaaccttggcattgtcttttactcttctatcacatcccacagctctcagtaacttttaagtatcactcaaggctggtgactttacaccaagtccacagctacctcctttgcctaagccacctgcaatagagtcttaactggtatttctatttaattatttttcatagcttcctcctccatagttttatctcagtcttatttcaacaatctttycaaattatcagaagaatctttttaaatcctaactgtaatcatgttatgctgcttcttaaaactgccagtgactcttcatattattca

SEQ ID NO: 383731 - DNA, 586 bp, Homo sapiens
gcgtttggctactttatctgcaaggctatttccttgacttgtaaaggaaaagtctttcttgtgtccaagtacatgtacaatggccatttcttctgacagctgaagattgtttaaaatatggacaattagcatttcgtgggcaagattttggcctttactattaataagacctggcttagcccaaatttttccaaatgtatgtgctactccaagacatacttagaatcagtataaatagttccttccttgttttgtaagcattttaaagcctggctgagtgcaaataatacacaagattgggcagaccaactgttgggcaacctctttgattctgttttttcaatagtttctccatcaattactgaatacccattatgcctttctcctttatttacttgggaggaaccatctataaataagtgttgccctgttttgaaaggagtttctcctagatctgtcctgacctttgtttggtggtcaattaaatctagacataagtaatttctttttagatttgggtctyctgtcaagaaacctgctgggttgagtgaattatcagtagtcaaggttaaatcatctttttcta

SEQ ID NO: 383732 - DNA, 567 bp, Homo sapiens
agaggatcccatatgctggattctttaggcccaggaattggtttttttgactcttaattttgatgttcttgatttaatttttccctaattgtctttaagggaaaaaggaagataggtccctgcctccaacaaagagcacagtccagttattcctgagaaaccagacttttatcacttacatgttgaattagaagttggcacatcacatcctcatttgacccaaactttggccagaagattgaaggtttgaggatgggtccctgagtccaaataaaacagcaatattttatcacttgttgctttttcttatgtttagttctctcattatctttccaatattttaacatgagtcctaggggactatcgggggaatatctttattactatctttatcctttttattctgtcttgcttgggggtatttcccatattgggtccagttaggctcaatccctcmtgctagagactaattgcctatctgtctctgaaggcttgctggggctcaatcccttgtattagagatttcttgcctattcttcccttggggcttgttaaggctcaattcct

SEQ ID NO: 383733 - DNA, 580 bp, Homo sapiens
ccttgtgacgtttcttaccttggtctgtgcacagagttacctggttgccgtggtgttgcaagccttttcctccccatgttgttgagggtccgggtttatttgtcacaccagttggtgggggggacctgatccctcaccttgaggccaccacaacgagacagtgggatgtgcctcctcatgagaggtgaccatagaccccttccccaggggagaatgggaatcctggacaagccccaagaaattattggaagtaaatgcttggtgtcgcaaagtgaaaccagcactcagggaagtttttttcagcaaggcaatttacttctgcagaagggtgctccctgtgtcaattatgattgcaaaagcacaccgaacaaaggagggaaaggctttttatctcggaggcrtagtgcctacctctgtgccactctcccatgggctggggtcgaactgcacaatctaaactgaccctattggcttcttgtgaatatttttcctaaataaggaagggggaagcggaaggtgagttacagtggtgggaagtgaagttttggtgggaggaatgggtgcagagtgagtaaccaag

SEQ ID NO: 383734 - DNA, 580 bp, Homo sapiens
ccttgtgacgtttcttaccttggtctgtgcacagagttacctggttgccgtggtgttgcaagccttttcctccccatgttgttgagggtccgggtttatttgtcacaccagttggtgggggggacctgatccctcaccttgaggccaccacaacgagacagtgggatgtgcctcctcatgagaggtgaccatagaccccttccccaggggagaatgggaatcctggacaagccccaagaaattattggaagtaaatgcttggtgtcgcaaagtgaaaccagcactcagggaagtttttttcagcaaggcaatttacttctgcagaagggtgctccctgtgtcaattatgattgcaaaagcacaccgaacaaaggagggaaaggctttttatctcggaggcgtagtgcctacctctgtgccactctcccatgggctggggtcgaactgcacaatctaaactgaccctattggcttcttgtgaatatttttcctaaataaggaagggggaagyggaaggtgagttacagtggtgggaagtgaagttttggtgggaggaatgggtgcagagtgagtaaccaag

SEQ ID NO: 383735 - DNA, 604 bp, Homo sapiens
gcgaccaataactagcagtgagattgaatcagtaataataaaaatatatcttccaacaacaacaaaagtccatgaccagatagatttacagctgaattacaccagacatccaaagaagaacttgtaccaaccttattaaaactagtccaaaaaattaagaggaagggaatcctccctaactcattctacaaaaacagtatcatcataatattaaagccaggaaaggacataacaagaaaaaaaaagagaaaactacagattaatattcccaatgaacacagatgtaaaaatcctcaacaaaayattagcaaactgaatccaaaagcacatcagaaagataattcaccatgattaagtagttttcatctcagggatgcaggggtggttcaatatgtgctaggcagtaaatgtgattcaccacataaatggaatgaaaacaaaaaccaaatgatcatctcaatagatgcagaaaaacatttgataaaatctaccatctctttgtaataaaaaccctaaacaaactaggcataaaggaacatatcccaaaataataaaagccatatcaacccacagccaatatcgtgctgaatgaggaaaggtagaa

SEQ ID NO: 383736 - DNA, 633 bp, Homo sapiens
gaagctccacaaggtaggaaagcatgagggagtgactgagggcctcagagggattcatgctctacacagggaccgtgcttctaaactgaggcagagagtcacccagagactttgcagagatagctccaaattctcgacctctacaatccttggacctggaaatagaccttcaccagcaccatagccccagtagaggctgcagtcagggtgcctgggagcaggaagattcctctgccctgcccttgccagacaaagacctgtcgagcttctggccaagccatcccacttctayccaaactgggctactcccactgcctcttgttgcccagaatgccctgatggcagagcaggcaaccccacctacccccaccattgttaggtgggcaatgcctgatggagcttctagctcaacaggacagcaaggcacagcctcctgctgtcccaagaaacacccaaagggcagggtggatgaccccactcacctccaccactgctggagcttccactccagtggttcagctcctgcctgaactcagtcagggggtgcagcctcctgttgtctaggaagcacttagacaacagggagggtgactccgcctgctcccactgctggtaaccaggcggccaatgcct

SEQ ID NO: 383737 - DNA, 633 bp, Homo sapiens
gaagctccacaaggtaggaaagcatgagggagtgactgagggcctcagagggattcatgctctacacagggaccgtgcttctaaactgaggcagagagtcacccagagactttgcagagatagctccaaattctcgacctctacaatccttggacctggaaatagaccttcaccagcaccatagccccagtagaggctgcagtcagggtgcctgggagcaggaagattcctctgccctgcccttgccagacaaagacctgtcgagcttctggccaagccatcccacttctacccaaactgggctactcccactgcctcttgttgcccagaatgccctgatggcagagcaggcaaccccacctacccccaccattgttaggtgggcaatgcctgatggagcttctagctcaacaggacagcaaggcacagcctcctgctgtcccaagaaacacccaaagggcagggtggatgaccccactcacctccaccactgctggagcttccactccagtggttcagctcctgcctgaactcagtcagggggtgcagcctcctgttgtctaggaagcacttagacaacagggagggtgactccgcctgctcccamtgctggtaaccaggcggccaatgcct

SEQ ID NO: 383738 - DNA, 604 bp, Homo sapiens
catgaaaaagaataaaactggatcactatcactcaccatatacaaaaattaactcaagattgactaaagacttaaatataagacttaaaacyataaaaattcaagcagaaaccctaggaaaactgttctggacattaacctaggaaattatttacaaataagactgaaaaagcaaatgcaacaaaaacagaaacaaataattaggacctaattaaactaaaggcttcttcagagtaaacagacaacttacagaatgagagaaaatatttgcatactatacattcaacaaagaatgaacgttctgaatctatagaacctatagaaagggcctggagaaactacagaacctataggttataggttctgtaaacctataggttaaccagaatctgtaggttatcaagaatctacaaggaactcaaacaaatcctcaagaaaaaaacaaataatcccatttaaaaaatggatgagcaacatgaacagacatttctcaaaagaaaatatacaaaaggccagcaaacatatgaaaaaatactaaaaaccactaatcatcagggaaatgcaaattaaagccacagtgatataccaccttacaccagccaga

SEQ ID NO: 383739 - DNA, 396 bp, Homo sapiens
attatatttccaccaaaagtggaacaaaaaatgttctcttcttgccacatcctcatcaatactcattatattttgtattttttataatacccattataataagcatgtatgtagtgttaattttcatttccctgatgattagtaatactgagcattttttcatttccttgttgaccatcttcatgtcctctgtagagaaatgtctattcaggacctctgtcaatcttttacttgggttatttgttctcttgctattgagttacttaagtcccttatatattttgaataytaccccttatcagatgtgtagtttgcaatttttttctcttccctatattgatttttgtttctgtgcagaagagttttagtttgatgtaacttcatctgtctatgcat

SEQ ID NO: 383740 - DNA, 559 bp, Homo sapiens
ccagcactttgggaggccaagatgggaagatcatgaggtcaaaagatcaagactgtcttggccaacacagtgaaactctgtctctactaaaaatacaaaaaattagccaggcatggtggcacgtgtctgtagtcccagctactcgggaggctgaggcaggagaattgctgaaacctgggaggtggaggttgtggcgacccaagatcgtaccactgcactccagcctgggcaacagagcaatactccatttcagaacaaaaacaaaaagaaaaacaaaccatgttctaagtatttcaaacatytgtctattgtctgtaggatttactccctccagtttcctagcagagagagaaaagagtaaaattagaatgatatgcatttatttcaatattgaaaccacattttgaagagttcactgaactaaatgaagaacctaagctggtctattaactataagcagacttcgcacatgaaaaacgggacattttctggatgattgacactaaattcaacttggacagtgagctagcatccaggagagccagttactttggtttta

SEQ ID NO: 383741 - DNA, 559 bp, Homo sapiens
  misc_feature (1)...(559): n = A,T,C or G
gtttctgcatcaagcacatcatcatcacgatattaacatcagacggagagtgatagtagtatggccaaccacccctgtgggctgccaatgggctggcagcgccataacttctgccccagcctgccctctcgtccaccatcattcaccacacagcatgggcagaaagatgcatcctgtcagtagaacatttgagttcatttatttayatcagatgtaccaaaatgacaaaattgtttcttcataaatgaaataataacctgagaaggagagaaatggcatcattaagagctagggaaatagaagtgaagacagttataagtaaacctcaggcattcctcttctgtggaaaatgttaatgtcttttgccagcattagaaaatatgtttgtgatgtttacagcatccacaaagtaattaagctcctggccatataaaaattgcccacattgacttagctccagccgtgtgcatttggctgcaggaatgagatttgaggtctaaacctgaagccagtcaagttattaagggctacttagtggcatatctaattatgcatnnnn

SEQ ID NO: 383742 - DNA, 570 bp, Homo sapiens
ctctggggccctggggctggggcttgagagcctgggtctctaacacacccagcagttgctgatggcggggccagagctggagtggccaaggttttagagcagtacttatggtgggtctctctctagctgggccatccttgaggccatcctcttcatttcagatcagtttgcyccctccccatttctcaaagctgcttactgtttgctggaagggaaggctggactcctccaccccaccttccacccccaccttcctttcccctccgccccacacccgtttctctgctccctagtctgtttcctgtacaactttaggacatggccttcattcatgttacctttctgttgttgtttttttatgagctttagttaagataactaattgctgcagacaaaaccagctcaaaacaatttaatccacactttgagagagggagaaagaaatgcactctgcaggaggaatctgaagaatgtagagaaccatccaatcaacgactattccaagcatttccctgagaatgcaaacttccacccacctcaagccctccaggaacttgccattttcaccac

SEQ ID NO: 383743 - DNA, 568 bp, Homo sapiens
ttggggtgatgctgccgcaaacaggaaaaccaaagattgccagcaaaccaccagaagctgggggagaagcctggaacacacaccctggtggcctcagaaggaaccaaccctgctgacacctcggtctcaggctttcagcctccacaactagatgacaacacagttctgttgccaaagcccctctgtttgtggtgtgttgccatggcagccctgggaaactaacacaccaactcacaaaccaaaatgtaaacgggttaatttgccgttagagttgtacctgccaagggggcatttatttgtgtctgctgtccaggctctccaccccacgtaggaaaaccatggcagccatcagtggccacactggctgttgaaagagtgaggtctctgctgccagcgtctcttggggtctcctgttttccacgccttgttggctggcctgggccctgtgggtggacaccatccttatgtggatccactaactgctttgtccagatctaactctggccaggacagtagsctgtctctttaagtttccttcttatataccgatactcatccgtgacaaatc

SEQ ID NO: 383744 - DNA, 590 bp, Homo sapiens
ttattccagcagttggatgacattttctaagacctaggttcctttcatatttcctttctgccatcctcagtgtctgggttggctctcctcatgggatcaggatggctgcagtcactccaggcatcacatcttcatttgctgaaattcagagacagcaaaggagagccatatggtccctatgtctcattttccaatataaaaytttttttccaaagcccacccgctctctcttctacaaaaagcctttcctttcatcctcattggtcagaatggcaacaggacctatcctaagcaaattgcgggcaacaggaatgattgattttatggttgatattaatttctcttaaagctggggatagggtagccttttctgaatacaaaaccatgagacagaaggtgccatccaagcaaaatcagggtcctgccagcaagataagatattgactgtataggttacctgcagtgtctccttctgaggccttcaccccatatcagaccctttaatctctgattccagcatccaattatctatacaatcagattcaggaagagcagaattaagacacagcctggatttcagggggaagtag

SEQ ID NO: 383745 - DNA, 336 bp, Homo sapiens
acagacccacagctagtatcatacatcatgaggagaaattgaaagcctttcctctaagatctggaacatgacaaggatgcccactgtcaccactgttattaaacgtagtactggaagtctgagctagagccatcagacaagataaatatataaaaagcatccaaattggaaaggaagatgtcaaattatccttgtttgcygatgatatgatcttatatttggaaaaacctaaagaatccacaagaaaactattagaactgataaataaattaagtaaagttgcagaatacaatattaacatacaaaaattgtagcatttctataagccaacagtga

SEQ ID NO: 383746 - DNA, 611 bp, Homo sapiens
ctaacaaatatataaactatgagaagtaggtattaaacaaaatgtatttgttttattaaaataaaagctagcttcattttgcagaaaaagaggtgtgctatgttattaggaacagggaaaattgcaaacatatttatattgttagtattgcctcttgtttaatcatttttcaacaaaatgtacaatggactactgcattttaaaacaattccaaaagcacacttaaaacttaacaagaaaattcttactatctatatattttgtaaaaaaagctgaatgcaaaaataaatctagcaccctactgacaataaacagccaataytaacatcattctccaataacagtaccaactgattttaggactggggaagggattataaaagacaggcccggacatcttgtctcagaaaggaagaaagtgcccaacacacacacatgcacatccacacgcacacacactttgatgcgggtacttcaaaggagcacaccggccccctgaaatgagctcataatggccaaaccaagaaatatttgagcaaaaccaaaaaaaaacaattcaatagtattaaattatagcccaaagtataaaataaatatccatgagcacatac

SEQ ID NO: 383747 - DNA, 611 bp, Homo sapiens
ctaacaaatatataaactatgagaagtaggtattaaacaaaatgtatttgttttattaaaataaaagctagcttcattttgcagaaaaagaggtgtgctatgttattaggaacagggaaaattgcaaacatatttatattgttagtattgcctcttgtttaatcatttttcaacaaaatgtacaatggactactgcattttaaaacaattccaaaagcacacttaaaacttaacaagaaaattcttactatctatatattttgtaaaaaaagctgaatgcaaaaataaatctagcaccctactgacaataaacagccaatattaacatcattctccaataacagtaccaactgattttaggactggggaagggattataaaagayaggcccggacatcttgtctcagaaaggaagaaagtgcccaacacacacacatgcacatccacacgcacacacactttgatgcgggtacttcaaaggagcacaccggccccctgaaatgagctcataatggccaaaccaagaaatatttgagcaaaaccaaaaaaaaacaattcaatagtattaaattatagcccaaagtataaaataaatatccatgagcacatac

SEQ ID NO: 383748 - DNA, 611 bp, Homo sapiens
ctaacaaatatataaactatgagaagtaggtattaaacaaaatgtatttgttttattaaaataaaagctagcttcattttgcagaaaaagaggtgtgctatgttattaggaacagggaaaattgcaaacatatttatattgttagtattgcctcttgtttaatcatttttcaacaaaatgtacaatggactactgcattttaaaacaattccaaaagcacacttaaaacttaacaagaaaattcttactatctatatattttgtaaaaaaagctgaatgcaaaaataaatctagcaccctactgacaataaacagccaatattaacatcattctccaataacagtaccaactgattttaggactggggaagggattataaaagacaggcccggacatcttgtctcagaaaggaagaaagtgcccaacacacacacatgcacatccacacgcacacacactttgatgmgggtacttcaaaggagcacaccggccccctgaaatgagctcataatggccaaaccaagaaatatttgagcaaaaccaaaaaaaaacaattcaatagtattaaattatagcccaaagtataaaataaatatccatgagcacatac

SEQ ID NO: 383749 - DNA, 517 bp, Homo sapiens
attaccaaaaatctcaagtcacgaaggaaaaaggtaatggaagtagaaaaaagaaagaggaaagataatttatgagaattctgatgaaagagcatgccactttcaagggtattttcaaggaaaaacaggcctggctgggctacaatgagcagagtgcctaaaagagatgaaaactttccaagaaaacttcaaactgtgatagagtcttttgcaagggcaaggggattctgagcacatcctctcagtaactatatccccactactgaccatggaatctagaacgccagtagaggaaataaacaatttattgagtatataaacacataatattttaccagtttaacaacccagtgcaatttcatataatagctatcagttttatttagtagctactgatcatgttcaatttctcaagggttttgaaatccagaagttcccaatgaygtaattatgtcatacgactagacttggaggctcgccaataatctgatgacaccatcatttctatttttacctg

SEQ ID NO: 383750 - DNA, 577 bp, Homo sapiens
tacataatacaataagaccaaaaaagataataaaacataaagaaattgggaaggaagacatgcactgccttagtttatagatgatttgaattctatgtagaaaatcccaaaaaatcaagaaaaatttctggaactaataaatgattacacaaaggttgaaggataaaaggttaattaacaaaagtcaattgatttccaatatgccaataatgagaaaatggaattttaatttaaagacacatcattgaactggcacttctacataaacaaaactacaaaactctgatgatcaaagtcaaagatttrataaatggagaaatactcaatgtttttctatccaggagtataagaagactcactgctgccaagatgtcagttcttcccaactccatctatagattcacatggagaatgtaatgtgaagattagagttattctgttacaagccaaggaacatcaaagattacgggcaaactatctgaagctagaagggaggttctcacagccattagaaggaactatccccaccgacaccttgatcttggactttagctgccagagttgtgagataataagt

SEQ ID NO: 383751 - DNA, 622 bp, Homo sapiens
tgtttttaatctgtgagacagaagtcagctatcatatgtagaatgcctcagctggggtttcttacctctggatgacaaagttgttcactgtccaacagagttgtcaaggtgcattcatattgtggctgaaaagatttccgagatacttaatggagagcttgtaagtcttcttgtgactctgtcttcggagtagaaattactaaattcctgacacattcttttggtctaagcaaatcagaaggataagatttaagggatagggaaatagattccacttcatgctgggaaaagctacatattcacatagcaaggacatagatacactgagttgaataattgatcacatgggctaagcaaaagaaaggtaggtcacaacatgactcagtagtttagagaatgaattagagatttgccaggatataaggtgagttgagtagccaaaattacaactaaaagcacaccacagaattagtccaatgccatcatcactgctgctgamccctggatgctgcagccacctacctctactgatgctgtgggtcaatgtcaagttccacccatgaaacagggtattactgccaccctgatgccacaaccccttggaatggatgcttcactagtt

SEQ ID NO: 383752 - DNA, 571 bp, Homo sapiens
ctacactgtgagaatagctttcccacctcagggctagtaccagagaatgaaataaaattccctttctaggccgtatcatgttcttattgttataagagattagcttgcactctgaccattaaaatcaactcggacktcaatagggagtggcacagagtgttaggttcccccaaaataggtcttcagatgccgggctgccaaggagcaaaggctgatgtcaccagaatgttttattgttcttgatcctaacacaaatcttttgctctgctaagcaggcccagtcatttccttccacttgaatgtggcagcctcattcccaccacatgccctaacttacattgtttacacaacttacaagtatttctcttttgccctttttcctgagccccttaaagcataagaaaattaagttaaataatttcctgattcatatctgtattactattggatggaataatgagtcagttgcccatcatgcaaatatgaaaacactaaaaaccaaattaatatcagttttcgtcttctctcctctgccctgcatctctcctgcctggctgccaaatagtaatca

SEQ ID NO: 383753 - DNA, 545 bp, Homo sapiens
aatatggctgtgttccaagagaattttatttaccaaactaagactgctgccattgggctttaatttgccatctcctgcctcagtttattctaaatgtcccagacctttggccttctaaaatcttcactaatatcaaggagcctgaatcttaatgggatttatggctcaccattgccatrcaagctttctaaggtattcatagaacttgtcacttcctggtcaacatatcaacagcaggatgtcatccttatagtgtaccaccaagatttcctctgggatatcaacatgattaattcatattgattcacatttgaatgatattttgaatcgcatcatattgatttaaatttatattaattcatattaaattcagtctattgtagtggaatgttttgcctttttcatgtaaaaaccatgtttgattaatattactctcagcgatgagtactgagaagaaagccatatcagtagcataaagcaagcagcaaaggctctgtggatctgttgcagtaaagatggcacattcccagttgctgcagtagagg

SEQ ID NO: 383754 - DNA, 607 bp, Homo sapiens
aagcttgtgaaactcttctggtgcttcataagattaaatgtctcagcagtaatarttgtttgcttacgaatcagattttgatccagagcattttctgagtatttataatgctctacttcctcttcagttactacagttttcactacattctctttataaaattgagttggggtgtgatgaatagcatgacttaataaattagcagaaagtcagggcgtggggagaggcaagaatgaaagggaaaacaagctacacaaactctagagttgtcttagagaatgtgagggagatgagagtggtgagctaggaatggaggggaaatggttgtaggagaaggcttcagtcagcaaaagaagcaaagtcaaattatgccaaccatactgtgacttattttcattcagacctaccatgtttcttggcatcaaaattcaatgaagccccactcatgacttccagttccctcagtctcctgagaattgactaaagaaacatacacatgaccacacatttatgtggaataccagcaaaatttgtaatgtagaaagaattatcttgtaggaagaagtctttataactaaaataacttaatatcactacataactacta

SEQ ID NO: 383755 - DNA, 583 bp, Homo sapiens
ccatcttcctgctcctattccagtcacaycatgtaaaatcgtaggtgttatttaagcagtgtcctaacatcttcactttatccttcttccagtccatctttcagactccaatcttttatcacctacctaaaatcccagtttcctcatctagtatgcttctgcttccaatttaaatcacttattattttatatacagataaagtctaagctctatagcttatcatgagaggatctcctttataagaaatgctagttatttcatattgtttgctgttgccaggcattgtacaagcacattccatacattaatgcaatccactgtctgatataagttcaattattccccacctgtgaggaaattaaaggagagaaagttcaagaaacttgcccgatgacacacagtgagaaagcagcagagtatgaccccaatcctgggtttagagtggggaaaatgtggtcctgcataagaaaaaaaaactcttaagtattatttaatttttaaataaagagatatttttgacccataaaacatttgggagacaaggaataaagtggaaaaagtaaattaaaatagtgaaatacc

SEQ ID NO: 383756 - DNA, 526 bp, Homo sapiens
ttctaagcgttttatttatctgaatttatttaatctatacaacaatgccaagaggtagatgctattattgtcataacagaatgaagcaactgagtatcagaaaagttaaggaaatagcgtgaagtcacacagcttttaaattgcagggatgaagtttgaggctagacattctgactgcatatagttcacgctccacttagagaatcatccacattctctgctgctctagaaaggaaatgctaaaaggacctcctcgaatctccctttgtcaatkgtcaagtcttcctgctatcacttgtaacacatcatgacctggaaacttatctgcaatgcagatgctcagccccaccccagacctgaagaatcaggcttagcattttcgcaagatccccaagtgcttcccctggtaaaagtaaatgaaatttactgggagatgaacctaatcactccaatttcttatttcagctttgttttccagcagatacaccctaaaacttctgaagtgcacatggatgacctctttact

SEQ ID NO: 383757 - DNA, 528 bp, Homo sapiens
caatataatgtatttgcaactgtctactattcagcagccttctgaaatgtgctggtgctattaaacttctctattccattagtcacactcctaggtaaaacctacgtaggagtttctagactccacagcctgattttcctgatataaatgaaacctacattccagccaagctatttgctcttccttgccactatgcaatattttagctgataagctaayaagaatcaacatttactaatctagttaacgccttctccaaacatatttctcgttttgattttagtgaacagtgatgttcatgaaaacgaacattgaagtcacaatctaaatttccttaatgaatccatctctttcaggagaaaagccaatttcctttgagtattatacagtatcattcataacagagccccagcctttctctccagcctcttcccttaccccctcccaatatacaggtcacacacaacacagcccacttatctgtcagtagtcctaccagtgccctgggctccttcaaggtcccaagtc

SEQ ID NO: 383758 - DNA, 601 bp, Homo sapiens
gtgttatattacataaaaacttattaaatctgtgaaaaaagagagaaagcatgtacatgagaaagacataaaaatcgataaaaataaaygtgcaaaccaatgaaaatgtgcaaaagaaaagaagtattttagaaaagagaatattcacatggtcaataaacatgagataaactatttaacttaattacaaatcagagaaatacaagaaataccaagaaaaaagacatttttaacaattatatgtaaacatgttgacaaaataatttttaaaatctgacagtataaagatgtaaagcaacaggacttctcacacatttctgttaggaatgtacctcattacaaatactttgaataacggtttggccttagcttcccaatttaaaaacatgcacatcctgtgactcagcaactcagttctaggcatacatcctagagaaatgtgtgctcttcatggaagatatacgtatgtgattgccacatttttttttgcactaacctcagagtgaaaacaaaacaaaaaaatggtctatccttactatagtggataagtatggtctattcagaagagagaatttaatacctcatcaataacaatgaataa

SEQ ID NO: 383759 - DNA, 589 bp, Homo sapiens
gatacttatgagcaaagaaatggacattcaccagccagatttcaaattcagagattacaactgagcaagagttttggctttggtcaatatcttatgaaaatgaccagaaaaaatactagcttggtaatacatttatttactattgttttgtattttctctagatatttatacatgcatctattacttttacttttgtcattttagttctagaatttatggttgattcaattttagggtttctctgatacaacttttcatcatattgaacacrccaattaaaaagcatctgaaatcttatgcccaatttctggatcttctgtagatttgtttttattgtttgatttttctccaaaaattctgttatgctgtcttttgatagacttgatcatttgcttattacattccaaatgatgatgtgaaacactatagagataattttaaaatctaagtgatgttatatttctcatgggaggttttcgtttgtaccaggtagccagttagggtagacacagagcaccacaatctaatcagggatcaatctgcttcaaatttaggcttcagaccttataaaggccagccatttttcta

SEQ ID NO: 383760 - DNA, 582 bp, Homo sapiens
tactgacgcattcttgaaaacctgttaaagagtcctaagcattctcctgttagtattgggcctttacccatgtcctataaagatgttatgccccaaaaatgaagttgagggccataccctgagggagggaagggatctctagagttagaaaggtgatgccttttgtcctcacttacatgaataggaaggatacaatttctgaggctccccatatcctagattcaagaatagcttttgttaggcctgcttgtctgaggagggatcctagaattccagatagtcccccctacgatgrggctttgggcaaaaattatgtctttctgattggtgagcccgggtgcctaaagaaggtaacagagtcctggagtttatactagaaatcattcttataggagaaactagaaaagcatcagagacagcgagtggtttttagaagcgggactagcctcggagaagagaggcaaaaggaagtttgtctgacaggcattaggacccaggaggcaagggtcaggatagataggatagatgggcgagtctcacttgggcgacatgactttgagagttccgctcatggccgcaggg

SEQ ID NO: 383761 - DNA, 598 bp, Homo sapiens
gtatacaggcgtatcacttattcacacaatcctataaaaaatattaatttggtaatttattcaatggttgttaataattattgataattttaggtgacaaacttttccggttaatggacagtcagacagtgtccctgacttttcacaaccatcaccctagtggtagaggaagataataagcaagtgtgcaaatagcgacactcaatcataattgcatgaatgatgccttgagacacgacttctatcacctaacatcataagaagcacaagataatctcaatagtcagcaaccccagaatattatggagacatggaaatattatcacttttatataatcaagcctcatttttttgttttatactttttatttattttagattattttttattttgtgggtacctagtaagtctatattttgatacaggcatgtaatatgaaataagtacatcatgaggaatggggtattcatcccttcaagcatgaggcttgaaaatagcttagagtgtaatcaaccttcattttgattttttttttttctgccatgatggggcagaaaccacttaatcaccaggcacasatacacacacacatacagg

SEQ ID NO: 383762 - DNA, 558 bp, Homo sapiens
agagaggagggaaaacacacctaagatatctacatccaagaggacaggccacccatttggggagcatttcaatgcaggtagattttaaagtgaataaataaaagtaatgaggtgataaccctaccaggtgctaaaacatatgttaatgatataataattaaataaatgtttaagtaggtaaatagcagtaaaaactagaaatgacagaaaaaaggcctagtacatgtaagaatttagtatatgataaaggataaacaaaagtattacrtaatatatgtttctgggacaatagtttacacagtgcgatatacgttcacttagatatttactttctgaatagtttctagacatgttaaataattaaatattaaaataatcaactggaaaaatagataagacttttttaaatggaaaaagcacataataaatttataaaattaaaatttataaatccatacaacttttgtttgttaaaaatttatactctgggggacagccaatatggctgactagatgcagccaggaagagcttctcccatagagagagaccagaccaag

SEQ ID NO: 383763 - DNA, 529 bp, Homo sapiens
tttaagtaggtaaatagcagtaaaaactagaaatgacagaaaaaaggcctagtacatgtaagaatttagtatatgataaaggataaacaaaagtattacgtaatatatgtttctgggacaatagtttacacagtgcgatatacgttcacttagatatttactttctgaatagtttctagacatgttaaataattaaatattaaaataatcaactggaaaaatagataagacttttttaaatggaaaaagcacataataaatttataaaattaaaatttataaatccatacawcttttgtttgttaaaaatttatactctgggggacagccaatatggctgactagatgcagccaggaagagcttctcccatagagagagaccagaccaagtagactggcacactccaaacggatctttggaaataaagcattgggagtggacagagggaggatgcagaccctgggctgaaacagaaggaaactgggaactcttcacagggttgccaagtagctggtctcgttcctggcc

SEQ ID NO: 383764 - DNA, 588 bp, Homo sapiens
atgactgccctgctgtgtttcagacttgcataggcctgtagcccctttgttttgcctgatatttccctcttcaaataggtgtatttacccagttcctgtacctccattgtatcttggaagtaactaaattgcttttgacttyacaggtttataggtggaagggacttgccttgtttcagatgagactttggactatggacttttgagttaatactaaaatgagttaagacttgggggactgttgagaaggaagcattatattttgcaatgtgagaaggacatgagatttgggaggagcagaatgatatggtttggatttgtgtcccaaacctcatgttgaattgtaaaccccagtgttggaggaggggcctggtgagaggtgattggatcatgggagcagatttcccccttgctcttctcataatagtgagttctcatgagatctggttgtttaaaagtgtgcagcacctcccacctctctgtcttctttctccagccatgtaagatatgcctgcttaatctttgccttccaccatgattgtaagtttcctaaggcctcccgagtcatgcttcctatacagcctatgg

SEQ ID NO: 383765 - DNA, 622 bp, Homo sapiens
gcttcactcatacttctcaaatgccttggctatttcatcagttagtgaatttatttccacagcttcagactttgcatcagtaaatatttttaaaattgcaccgccgcagagtttaacacttaccaccaatggggtcctcattgccagccatcttgtcagaaatcctaatcccattttgtgttattttccttggactacttttgttgccacttatcttacktagagtccctggagatagactcaaagggagaagtttgtatgaagaagttttattgaggaatgcaccctgaaacaaaacctccaggaaatgagagaagcagggttgggcagaggaaggagctggattgtgctgtagttagaagcctcagacaatccaatgaggagctcttgacttgggcaagtccatcagaattgccctaattgaggaaatggggctaatccttcattcctttacactgactggttatttaatggggtataaccttgggcaaggaagttcgccttgagttatggcaattcctaagtaggagttcagctgaatactgaaagtatccaatgctccctgcagcctgaagaattagtgcctcagtcatgaaaagagtatattttaataacacactga

SEQ ID NO: 383766 - DNA, 609 bp, Homo sapiens
cacatgccactatgcctgcctaataacctcattttatatctagtgttgatctgagaacataactcttttctcagtaggagtcctctatttcttaaattagctataaatctccatgttctttccgatgggttaagagtagctcacatttgaagcatgaggtgtctgaaaataaaatcaaatgtactcaacagtgtgtaaagcagcttctagactaaaggctgtcattggaactgtgctatatattgtaagcagtgaccaagagactaagagactgcattcaggctactaattatatggaaaagttaaatccttccttcttcttgaaatttatactaaaaaaatacgtcacctttgattctttaaaaatgtgaaaattgcaagtttttttaaaaagctatcatcaaagaaaatacaatataaaaaattacagtgggataattttatctctatatatttcttttgtctagaatggaggtacaaactttctctcctaaagttcrgtaaatctagaatgatcagttttgcggaatccaggcattgactgtaattacatgttggtattttgacggcatggactcttaggttgagttactgagaagctgaccctga

SEQ ID NO: 383767 - DNA, 609 bp, Homo sapiens
cacatgccactatgcctgcctaataacctcattttatatctagtgttgatctgagaacataactcttttctcagtaggagtcctctatttcttaaattagctataaatctccatgttctttccgatgggttaagagtagctcacatttgaagcatgaggtgtctgaaaataaaatcaaatgtactcaacagtgtgtaaagcagcttctagactaaaggctgtcattggaactgtgctatatattgtaagcagtgaccaagagactaagagactgcattcaggctactaattatatggaaaagttaaatccttccttcttcttgaaatttatactaaaaaaatacgtcacctttgattctttaaaaatgtgaaaattgcaagtttttttaaaaagctatcatcaaagaaaatacaatataaaaaattacagtgggataattttatctctatatatttcttttgtctagaatggaggtacaaactttctctcctaaagttcggtaaatctagaatgatcagttttgcggaatccaggcattgaytgtaattacatgttggtattttgacggcatggactcttaggttgagttactgagaagctgaccctga

SEQ ID NO: 383768 - DNA, 605 bp, Homo sapiens
agacttctattcacaccttgcacttgggtgccccattaggacattgtatgtctttcagtcacattttcatgctggcaaacttttttatttttaattcacagcaggtaataattataagtcttcaacagagttacatgataagctttctttttctaaattctagaataatctatttttaatattaagaaataacagaaagcaaataaagcaaaaccytcaatgatggtatttttacttccatttcatctttttagagcagttttggggtcatggcaaacttaggagaaaggcacagagatttctcacataattcctgaccccacatatgtgcagtcttcccagttttcaacattacccgtcagagtggtacatttgttataaatgataaactcacaccgacacatcataactactcacagatcatagtttacattagggctcacacttacttttgtacagtctatgggtttcaacaagtgtaaaaaaacatatattcatcattatagtttcatacagagtagttgcactgcctcaagagtcctctgagcttcacctacttatcactcccttcccaataaccctaggcagccactgctctttttatt

SEQ ID NO: 383769 - DNA, 636 bp, Homo sapiens
tagtctcagctactcggtaggctgagccgggaggatcacttaagcctgggaggtcaaggctgcagtgagccacgattgtgccactgcactccagcctaggtgacaaagcaagaccctgtctgcaataaatatatgaaaatttttttaaatgttgtttttaaagacacaggtttccctctagcatgtagagtatggcagaaagagtaaagacgtagccaagtgactagcacaatgcaggagtgaaataccccagggtaccttgtgcatagtttccaaagtacatcaccttatccaccagaaaaattttttgagtcaaaaaccattaacataattttgccatttttgattagtacattaccttctgcatagtatgttcaattaattcttaaagaatgaatctacttaaatatagtttcattaggttgattttttgttgttatacctctctcaaatcttccccttttactacttttaaggaacatagcarttatgtaaagtgggccacaggacacaatagaacctctttgtatcattagacctttgagaataaggttagcatgagtagatgaagctttattgtaatttagttgtcatatacccagaaagacataacctgctctgtgttctaactcatgt

SEQ ID NO: 383770 - DNA, 579 bp, Homo sapiens
atttttataaaagttgatagagtaatagtttattcctaagcagcatctctaagtcaataaacttattctagtatctataaatttaaaataagtgctttagataatcgttgtataacttggccttcactgtttttggtggggacatgtgggcgatacggcagggagaaaacaaaaatatctagctcactaaatacatacagtgtaatcttccagtgacaacattaatgcattccagaaaggcacagggtaataaaaaaagatacacacttgcaaaaaggaaaaaaaatctacatactaatcaccaagagttattgataaaaatcaagattcagagtcagagatcgtggtttgtgtctgggtctgcacaaattagttattaggtcatttgatctcmctggaacttgaattgcaaaactggaataacacttcctgcctctcaaggttgctgagagggttaaatgggtaaggtatattcattgtctagcacaatggttctcaaacttggttgcacaatggacccacctacatttaagaaaatactgaggcctaggtgtcactttcagagattctgatttaatt

SEQ ID NO: 383771 - DNA, 585 bp, Homo sapiens
gaatggcaaatagacacacaaaaatakgtttaacaacattatctattaggaaaatgcaaattaaagctatgatgatctaccactacacacctaaattttaaaatactggtaataccaagtacagacaagaaagtggagaaactggctctctcatatgtggcttgtataatgtgaatgcaaaacggtgaaggccactctgggaagcaatttggcagtgccatatagaactaaacatacacataacgtatgacccagtaatctactcctaggtatttgcacaagagtagtgaaaacttatattcacaaaaacctctacatgaatgtttctggctgctttcttcataaagacccaaactggaaacaacccaaatgtgctcccatgggagaaacaataaaaaactatgatgcatccatacaacagaaaactactcagcaataaaaatcagcaaagttttgatacattcaactaggatggatctcaagggtactaggctgactgaaaaaagacagtctcaaggagttacatactgtatggttctgcttatgtaagagtctcaaagggacaaacttcaggtcacagaaaac

SEQ ID NO: 383772 - DNA, 585 bp, Homo sapiens
gaatggcaaatagacacacaaaaatatgtttaacaacattatctattaggaaaatgcaaattaaagctatgatgatctaccactacacacctaaattttaaaatactggtaataccaagtacagacaagaaagtggagaaactggctctctcatatgtggcttgtataatgtgaatgcaaaacggtgaaggccactctgggaagcaatttggcastgccatatagaactaaacatacacataacgtatgacccagtaatctactcctaggtatttgcacaagagtagtgaaaacttatattcacaaaaacctctacatgaatgtttctggctgctttcttcataaagacccaaactggaaacaacccaaatgtgctcccatgggagaaacaataaaaaactatgatgcatccatacaacagaaaactactcagcaataaaaatcagcaaagttttgatacattcaactaggatggatctcaagggtactaggctgactgaaaaaagacagtctcaaggagttacatactgtatggttctgcttatgtaagagtctcaaagggacaaacttcaggtcacagaaaac

SEQ ID NO: 383773 - DNA, 585 bp, Homo sapiens
gaatggcaaatagacacacaaaaatatgtttaacaacattatctattaggaaaatgcaaattaaagctatgatgatctaccactacacacctaaattttaaaatactggtaataccaagtacagacaagaaagtggagaaactggctctctcatatgtggcttgtataatgtgaatgcaaaacggtgaaggccactctgggaagcaatttggcagtgccatatagaactaaacatacacataacgtatgacccagtaatctactcctaggtatttgcacaagagtagtgaaaacttatattcacaaaaacctctacatgaatgtttctggctgctttcttcataaagacccaaactggaaacaacccaaatgtgctcccatgggagaaacaataaaaaactatgatgcatccatacaacagaaaactactcagcaataaaaatcagcaaagttttgatacattcaactmggatggatctcaagggtactaggctgactgaaaaaagacagtctcaaggagttacatactgtatggttctgcttatgtaagagtctcaaagggacaaacttcaggtcacagaaaac

SEQ ID NO: 383774 - DNA, 573 bp, Homo sapiens
acacacaaaaatatgtttaacaacattatctattaggaaaatgcaaattaaagctatgatgatctaccactacacacctaaattttaaaatactggtaataccaagtacagacaagaaagtggagaaactggctctctcatatgtggcttgtataatgtgaatgcaaaacggtgaaggccactctgggaagcaatttggcagtgccatatagaactaaacatacacataacgtatgacccagtaatctactcctaggtatttgcacaagagtagtgaaaacttatattcacaaaaacctctacatgaatgtttctggctgctttcttcataaagacccaaactggaaacaacccaaatgtgctcccatgggagaaacaataaaaaactatgatgcatccatacaacagaaaactactcagcaataaaaatcagcaaagttttgatacattcaactaggatggatctcaagggtactaggctgactgaaaaaagacagtctcaaggagttacatactgtatggttctgcttaygtaagagtctcaaagggacaaacttcaggtcacagaaaaca

SEQ ID NO: 383775 - DNA, 472 bp, Homo sapiens
catcattgcactcgagcctgagtaacaagagcgaaagagccaagctcgcatcattgcactcgagcctgggtaacaagagtgaaactccatctcaaaaaaaaaaaaaatgcaaatgctgttagtcataacacatctgataatacagaagtgaaaacactgacataagaaaaaaaacccatgctrtgaaaacaaaggtgtgtagagaaaatatatcctcaataagacacaggcgtcacatatttaaaatgtctattataggcctttatctatgcttttatatgaaataattattgttggcaaatcataaacaaaaataagcatcgaggcacttgatttaaaagtttcctttgttcgatataattcatgaaaagatcaacctaaatattactccatatacaacacagtaagagttaaaacccaagaagtttccaaatcttcactcaaattctctcctaacaggatgtccacagga

SEQ ID NO: 383776 - DNA, 577 bp, Homo sapiens
gtattgaaacataacatttattttaaaaatccatgagttattaataataaaaactaaatagtcattatgaaggctgctaaggtaggacatctcttagtaccctgaaaatttagggaaagaatcaatcaagcatttatactgcctgaaatacagttcatacagaaatataacatttgaygaacaagggtttcctttaaagaattctagataataaaatacagaaggaataaaataattagaaaattattggtttcaatatttgctcaaaaaacagtattaagcaaccattcatcaatgaactctaagccatgaggtgagaatttaactgggaacataataaatggatcagatggacaccacctgaatccacttttcaaatttagcatcactaaatactggacagacatcatgcgcttcatgacacgttgcaatggaatgcatacagtaccacatatgaagtactcttatctaatacatttaatatgactctaaccaaaaaattaagtagatcaaaaaacaatataaacacaaccacaagaatgtagttagcaagatcctgaatttgcaacagtctgca

SEQ ID NO: 383777 - DNA, 594 bp, Homo sapiens
ctaccaaactgtcttcccaagtggctgtgccattctcatcagcaatgaatgagagttcctgttgctctacactctctccagcatttggtgtygtccatgtcttacattttagccattttaataggtgtttacatattttctatatccagacaatttcttaaatgtttttattggttttaaatgaaaggtttcctttgattctcttagttactgttaggggtcttgtttacaaaaaataaaaggaagaaaaagggaaggaaaaaaaaaaactccaacgtcactcctttgaaatttgtgctgccatttcttctataacagtgacttcccaaggaatatacagtgactatctgtgtaccacaaaactgagtttgatacctagttctgccacgtacaatctatataactttaagcatgatttttctttaattaatatgatatgaataattttctactaactaagccattcttgaactcctgcaataatctcacttagtaacagcaatttaattttggattttacaaccatacttagaggatggcttctttttcattttgtgcaatttcattgtaaaatattagtagaaatgtactcac

SEQ ID NO: 383778 - DNA, 505 bp, Homo sapiens
ttagtatattttatgtgtggcccaagacaattctttttcttccaatgtggcccacgaaagccaaaagattggacacctttgaattaagatataaatacagaagcatagctttccagaaaccatttttattcatctatagaaataatccctcttatctggggaagaaatgatccagaaccatcttatgtctattagttaaatgcctcctatcatatatcccttagtaaatcacttgataaaaagaaattttaaaaatctactgtaaatcttattagtgtcatcagaattgaaaaatcacaattaaatttaaagataagtaataygtattgacaaacgacatttctaaaaatctccgtgaaagcactggccttcctatttccttaactatttttaggtatatttgtattgcaagcacacgatggcacactaagcaaagaaatctgtttacacactaaatgtttccatacaagcaacaatatgcaaatggcttattgtaaatgttcac

SEQ ID NO: 383779 - DNA, 629 bp, Homo sapiens
ttagcaaagactttgttcaaaaatagcctttggatatcaaagccattaaaacaacttttatagcacaagaattctggtattataggtgtggtccagttattataaatgtcaagatacaggagctaaaatcctaatttacacatttactttttgatcctaaaataaaaataagatatttttattgtactgatctcgcataaagatcattatgttctatatattgtcctcaatttcataagcaccacttatgttactcttacaatattttcttaattgccttctaccacttttcttataaaaagctagaaaayataaaaattttatctcaaaagcaaaactaattctatgtcactgagagatcattgtttatatttatgaatttaatgagatacctataatttatgtgcactttaagaaaccacagatgacgttgaccaacaacctaagttttttacatcaacagtatgacactttgaaaatcatctttagtaattttaaacaaaacaaaaaacacacatgtaacacgtaatcaatttgatattccatccaaatatgttgttgtttaaacaacagggtatcactgtcttctagagtttctcattagaaaaaaaaaattgtgtactgtgttt

SEQ ID NO: 383780 - DNA, 477 bp, Homo sapiens
gtgtactgtgtttcagttcaggcactacagcatgattagagtacccctattagacaaaacataaactcaaacttaagtacmttttgcaaaacatgaaaacttttaacaagtgacctcaactagaattataaatgggcttgtccatatgacttgggagtttcatgacataattgacaacaggctaaagttaaaaaacaaaaatgggtcagtacaaggcacactgttctgaatagatggagacaggtttagaaagcacgagtttctaattgtacatcaccacatatatggtttatatgccaactactgcatgtgtctttgtaaattactatctactttcctttgacaagaataaattgtgataagaaggcatctaaacattccaagttatagctatgtaacttcaaaaatctacagaaaagtcatccagttctaaagattaatgcataattatttcaaacatgaaaatggaatataatt

SEQ ID NO: 383781 - DNA, 518 bp, Homo sapiens
agctggtatttctgtttcatggcttcacttctactaacattctactgtgaaggccctgatgtgaaaggagaagaatttaaacagctagattttatagtcagtccttttctaaatcaaagtgcatctttgcaacaattccgatttttccagaatgttcaaaatcaaatgcagactattytaatatgagtgacagaaactttgatacaaaattacatgtcccattactttcactgacagaagcattatttcttcttccatgtgtgcaatactgattgataaggttatagctcaaaatatcacaagaactgtgactggcacttgctttctagccttgactgtctcttatatagctctacgtactttgtacctacatctgtctccacaacaaacatttttaagaaggtgttcataagaatgagtctagagcgttaatgcatagcatgaggattgtggctaatattgtactgtatactggaaactggaaatttgctaagagtagttttcaggtgcctgtatca

SEQ ID NO: 383782 - DNA, 518 bp, Homo sapiens
agctggtatttctgtttcatggcttcacttctactaacattctactgtgaaggccctgatgtgaaaggagaagaatttaaacagctagattttatagtcagtccttttctaaatcaaagtgcatctttgcaacaattccgatttttccagaatgttcaaaatcaaatgcagactattctaatatgagtgacagaaactttgatacaaaatyacatgtcccattactttcactgacagaagcattatttcttcttccatgtgtgcaatactgattgataaggttatagctcaaaatatcacaagaactgtgactggcacttgctttctagccttgactgtctcttatatagctctacgtactttgtacctacatctgtctccacaacaaacatttttaagaaggtgttcataagaatgagtctagagcgttaatgcatagcatgaggattgtggctaatattgtactgtatactggaaactggaaatttgctaagagtagttttcaggtgcctgtatca

SEQ ID NO: 383783 - DNA, 553 bp, Homo sapiens
ccatgttggcctcgaactcctgacctcaagtgatcygccagccttggcctatcaaagtgctgagattacaggcgtgagccacggcacctggcccttggtggtagtctttagtgcccaaacactccctcctcttatgccctcaaagataccccaagttgtataatcagttataagggatcaccctacttgggggtcttactacccatattttaaaatctcttggctgcccatttgtcatctcaaacttgataatgccaaaagtgaacttttcacccctcctcccttagtttccccgcctcaataacagccccaatacagtcccaaatctaagaatttaccttggttcattcctctctttccctcacttccattttcaatccaaaaaagatgctgaattaatgtacttcgtctccacttcaacaaacccccccagtccaattcaacccccggtcctttcccactccaccctgacagtctccctgcctctgctctcaggcagcattccaatctcttccacaaaacttccatgtcaccatcttaaaatgtaaactat

SEQ ID NO: 383784 - DNA, 553 bp, Homo sapiens
ccatgttggcctcgaactcctgacctcaagtgatccgccagccttggcctatcaaagtgctgagattacaggcgtgagccacggcacctggcccttggtggtagtctttagtgcccaaacactccctcctcttatgccctcaaagataccccaagttgtataatcagttataagggatcaccctacttgggggtcttactacccatattttaaaatctcttggctgcccatttgtcatctcaaacttgataatgccaaaagtgaacttttcacccctcctcccttagtttcccygcctcaataacagccccaatacagtcccaaatctaagaatttaccttggttcattcctctctttccctcacttccattttcaatccaaaaaagatgctgaattaatgtacttcgtctccacttcaacaaacccccccagtccaattcaacccccggtcctttcccactccaccctgacagtctccctgcctctgctctcaggcagcattccaatctcttccacaaaacttccatgtcaccatcttaaaatgtaaactat

SEQ ID NO: 383785 - DNA, 589 bp, Homo sapiens
actttacaagatacttcactgataagggtaagaactatttagcraattagtcaaggcagtagtacaccttggaggcaggacttgaacctaggcagtctgactatagagctacattcttttccactgaactaaaagtcaaatttaatttgaaattgtgccctaaattaaaacatagatcctgactttatttcaaaggctttatctgtgaaggtgctcaagacaaaacaaagcataaagaaaccacatacacagagaaaaccaataaagtagatctattttcaacaaatctcaaaagtataacaaggtattcaaacctcattactgctttttagagaaattgtaaacatgcttccctaaaaacattatcaatgtgttgttgaattttttaaaatggaataaagctatcctttcttttaagtgttttttctttagcctcagagaaggctatccagttaaaaaaaaaatggaacttttaccctcataacttaggacattttttatccagccaacacttctaattctcattactttgaattgtcttttacttttatgtttgcaattttatattcccacaaattacaaaagtgag

SEQ ID NO: 383786 - DNA, 543 bp, Homo sapiens
aatatcttcttctaagtcctgtacaggtgctttttgtctacgtttaatcttatgaggcagttaccactgccatttagttggggtttacagaggtttaagaaatttgcccaaaagcacagagagcatgggacaactacaaatgaaaacccaccaaatccactccccactacccaataaccctagcaagggccataagccycaacatttaaacaggaaggcagataccagatgtacccataccccagccctaccactgagacagctacttccccaggtgaggttggagaaacaatatactggacatcaaaaggcctgggagtatcctaaatggccacttgtgttaccgtaagtaaatcacttaatttctctggccttccattttctcatttacaaaatacgggtattaaacaagatgatcccatgcccctttacctctgacataaaatatttatgcacaattttgtttagaaactggaaatggagacaagatagttaggactagggtcaaggcagggcacagtggctgcactaatttacaagtag

SEQ ID NO: 383787 - DNA, 543 bp, Homo sapiens
aatatcttcttctaagtcctgtacaggtgctttttgtctacgtttaatcttatgaggcagttaccactgccatttagttggggtttacagaggtttaagaaatttgcccaaaagcacagagagcatgggacaactacaaatgaaaacccaccaaatccactccccactacccaataaccctagcaagggccataagccccaacatttaaacaggaaggcagataccagatgtacccataccccagccctaccactgagacagctacttccccaggtgaggttggagaaacaatatactggacatcaaaaggcctgggagtatcctaaatggccacttgtgttaccgtaagtaaatcacttaatttctctggccttccattttctcatttacaaaatacrggtattaaacaagatgatcccatgcccctttacctctgacataaaatatttatgcacaattttgtttagaaactggaaatggagacaagatagttaggactagggtcaaggcagggcacagtggctgcactaatttacaagtag

SEQ ID NO: 383788 - DNA, 543 bp, Homo sapiens
aatatcttcttctaagtcctgtacaggtgctttttgtctacgtttaatcttatgaggcagttaccactgccatttagttggggtttacagaggtttaagaaatttgcccaaaagcacagagagcatgggacaactacaaatgaaaacccaccaaatccactccccactacccaataaccctagcaagggccataagccccaacatttaaacaggaaggcagataccagatgtacccataccccagccctaccactgagacagctacttccccaggtgaggttggagaaacaatatactggacatcaaaaggcctgggagtatcctaaatggccacttgtgttaccgtaagtaaatcacttaatttctctggccttccattttctcatttacaaaatacgggtattraacaagatgatcccatgcccctttacctctgacataaaatatttatgcacaattttgtttagaaactggaaatggagacaagatagttaggactagggtcaaggcagggcacagtggctgcactaatttacaagtag

SEQ ID NO: 383789 - DNA, 504 bp, Homo sapiens
atcttacaaaaattctctacacaacaaacaggcaagaatttttaaaataccatttagcaaaatttggtctaggtattccagtcatttaaaatactgtaactggttgcaatgtatacatcaaaattaaagacattctatgagaaatccaaaggtaaagtaagaaaaatacatattttgttgtttttaccacgtgcaatttactaaaaatggttaatttgccccattaaaataatttataaaaattttcgtctcactgctaatactattctctgcctgttgctcctagtcactgcattttatacttgatcattgatatttgctccctttcttctagtgaccagttctcacttgcccaattacagttgctcctaaattgtagtacatcatactcaaaaaacatattctctgtggtttctttaatgtaaaaatgactagaagtgaattcaaatattagtgctagcaatgaattcamtaactggaaaatactcttgcaaggtcaagaca

SEQ ID NO: 383790 - DNA, 578 bp, Homo sapiens
tatatcaagagttaaggagagattcagaaaaaaggcgggaggggtttgtaaggtacccattagaaaaaagaacactaaacataataacaacaattagattttcctactctttaaatcttaggtattaggycagcagtttgctttcttgaggttgtctgcaggactaaaaagagagtacctaaaatcctgactcagtctgagagttgtctaagtggtgacacttaagatccatattctataccatattctatacccatagtctgtatcttgaggtatcagtaaagagtataatcaatgaaatatttttattaataacataagtataacataattacattgatagtatttagggaaggtagagattctctttgatatgacaactattcccatgcagattttacaatagtgtgcagctatttaagaaatatagaatataacatataactcaattatttacatcttcctgttttatgaagtaaaagaaaaaaattttggaattgcccatggccctgggaaattccaaaaatagtttagacataaaatatatattgaaaataatacttcttacattgtaggat

SEQ ID NO: 383791 - DNA, 572 bp, Homo sapiens
cataaataaaataaaataaataaaaaacaaaaaagaaaagaagaatgttggaataagattgctaggttagatagaaaactgattcatgycctatagggaaatcaaataatattcttagaggtatcttttctactagacaaatgctttgcatctctacccaatgaaaacccacaagttaacatgtaacttcacagcctaggttctaatcaatagtaaatagtatatcaaacaaaggggcattctcttacagagttaaactacctttaagtggacctgttagacaaagctccagtatgatactgaaaggacacatgatcctttttgcttcacttccaatgtgtaatttttcataagaatgtttagctataagttgggattcttgataaacatgagagttcctatgtcttcactaatccaaataataaaacttaattagatgtttatttgtgacaaaattcatattatttttcaaaagttcatatttaagctaaacttcagttgttgtcagatgacaccaacatgaaattccttaaaatcctggaggtcgaggataaatttgatcataaggttag

SEQ ID NO: 383792 - DNA, 530 bp, Homo sapiens
gcctggaatgcagtggcgcaatcttggttcactgcaacctctgcttcctgggttcaagtgattctgctgcgtcagcctcccgagtagctgggattacaggcgcacaccaccacacctggctaatttttgtatttttagtagagacggggttttgctatgttggccaggctggtcttgaactcttgacctcaggtgatctgcccacctcagcctcccaaagttytgggattacaggcgtgagccatgacgcctggcccatacctcatttattgtgtttccctttatcatgcttcgcaaatgttgcattttttacaaattgagggtttctggcaaccctaatcaggcaagtctattggcaccatttttccaacaatgtactcattttatgtgtctatgtcacattttcgtaattctcccaatatttcaaactttttcattattattatatttattatggtgatctatgatcagtaatcattgatattaattactactaaaattgtttgggggcaccacaaattgcacttata

SEQ ID NO: 383793 - DNA, 583 bp, Homo sapiens
tggttaggattccttaaataagaaaaagtgcaactgtgtgctttatgattaaaataataatctgccttgtttcagaaatgacatggacaattttttgttttgttttgttttgttttgagatggagtcttgctctgtcgcccagactggagtgcagtggcgtgatcttgkctcaatgcaacctccgcctcccaggttcaagtgattctcctgcctcagcctcccgagtagctgggattacaggcatgcatcaccatgcccagctaattttttttatttttagtagagatggggtttcaccatgttggccaggatggtctcaatctcctcacctcatgatccactcgcctccacctcccaaagtgctgggattacaggcatgagccactgtgcccagccatggacaatttttaattagatgagtatccatgtcaaaatgaatgtgacctgacatgaagatggcaccacaaagctcaaagaactttgagagagaacaccttcccacaaatgccatcccactctccacacccaagagaatttgtgctgtcaagagaacgaacctcgtcaaaaacacagaaaggaaat

SEQ ID NO: 383794 - DNA, 583 bp, Homo sapiens
tggttaggattccttaaataagaaaaagtgcaactgtgtgctttatgattaaaataataatctgccttgtttcagaaatgacatggacaattttttgttttgttttgttttgttttgagatggagtcttgctctgtcgcccagactggagtgcagtggcgtgatcttgtctcaatgcaacctccgcctcccaggttcaagtgattctcctgcctcagcctcccgagtagctgggattacaggcatgcatcaccatgcccagctaattttttttatttttagtagagatggggtttcaccatgttggccaggatggtctcaatctcctcacctcatgatccactcgcctccacctcccaaagtgctgggattacaggcatgagccactgtgcccagccatggacaatttttaattagatgagtatccatgtcaaaatgaatgtgacctgacatgaagatggcaccacaaagctcaaagaactttgagagagaacaccttcccacaaatgycatcccactctccacacccaagagaatttgtgctgtcaagagaacgaacctcgtcaaaaacacagaaaggaaat

SEQ ID NO: 383795 - DNA, 569 bp, Homo sapiens
ggattacaggcatgcgccaccatgccctgctatttttgtacttttagtagaaatggggtttctccatgttggtcaggatggtcttgaactcctgacctcaggtgttctgcctgcctcggcctcccaaagtgctggggttacaggcgtgagcccctgtgccctgccatgatttagaatgttataaaaacttggttgattaagtagcagtagggtttgagaggattgactccaattttgaaagaaattctactgtgggtaaaatgttgccaaacaggatcacataccacagagaaatctttcatgaaagcaaaagtcaattgataagcaaacttcattgttgtcttattttaagaaattaccgcaaccacccaaactttagcaaccatcaccctcgtcagtcagcaactatcaacatcaaggtaagacactccacmagcaaaaagattacaactcactgaagactcagatgataattagtatttcttatttcttagcaataaaatacttttaaattaagatatgtacattgttttaagacataatactattgcacacttaaactacaatat

SEQ ID NO: 383796 - DNA, 544 bp, Homo sapiens
atcccttgaacccgggaggtggaggttttggtgagctgagatcatgccactgcactccagcctgggcaacagagtgagactccatctcaaaaaataataataataataatcacatggaagctatcaatacaaatatgttttccattcccttacacgtatgtactctgtcatttatattctgaattacgtttccggtcactttgttctccatgaaaagagaagcccagaaaacttctgccttgcataaaactaaaacttgggttaatggctttaaatagaacccgtcccatccagatgggtaacagggttgacaagctcccactgtggtttcctgacgcagtaaagccacatggcttaaagctgtgctcccacagatctattgagcttatctttagccagtgttatttttcaccccaacrctgtactgttctccaaacaacagctgtgtgtctgcctacttcgtttgccctctggataaatctagccttttagaattagattagagcaggcccagctgtagtgggtggataatcatctgctttat

SEQ ID NO: 383797 - DNA, 615 bp, Homo sapiens
tatcaatttcttaagtttagacagtttttctagttaagacaacctgattgggtaaacatttagtcaattccaaattcaactcgttattaggactttgtcctgtgcctgcctcccttataagagggcaactcgatgggaagcataagattctcattggaggagagagtgcctcatgatggtcttcatgcagatccagctcatggatttgcaactgttgatgtctattaacttgtgctcactctagttcggttcttgagtgttttgctggtgtgtatgaatgaaatctatggctaggaaattgyggtatgttcatcttaagtcagaacctaattgtttttccataactacgtcctatcttacttaatcctagtttgcactacagatcctgcatttgttctggtgtgtctcccccttgctcccaagtttgggtgcccttttggaaatctttagctataggaggactttgacctcctcttgcaaccatgttgggtgagcacccaactagtttttgaaatactagtagtgcctgcttgttatggacaggaatttttgggtcccttttatgctatgtgtagtctttgtggagtcacaaatactgctggaggaggaatcaca

SEQ ID NO: 383798 - DNA, 581 bp, Homo sapiens
cacaatttaaaacttatgaattgtttatttctgaaattttccatttaatatttttggattgctgttgactgtgggtgactgaaactgggcaaaatgaaaccatggataaccaagaactactatatagacattattattcttaatttctaggtaggaaagggaactgatttagacagagagagtgtgacctttttgatctccttcagcaggcaaaataaggagctagaatctcagtggtgtggttcagaatctactttagtctccgaagtactcagtcctgtggtgggcatggggagaaggaaacaggctacctagttcagctggatattttactcttactgatggcatcagacaaaatattggctatcagacgtcagcacagttgcactgacattggctaatatgtatttgacactagctgatctaagacagaaccagaatcaagtgataaaagatgggacactgagggacccatgccacaatggaaggggaagaggcctggctggtgatcattwtaatacagcaccatgtgaaggtcttgagcgttttcataaacagggatggatagtggaaagaactga

SEQ ID NO: 383799 - DNA, 585 bp, Homo sapiens
atttattccactctcatttgtctaaaacgttgtttacaaaactgtgtactatagtggtcagtgtgccacaactagctcacaggaaaacttcagattatcttaaacttttgatagaaacacagtatcaactgttaaagactgcatgatctatcagctcaaggtagttcacagtttgaggtagttaacattagatcacatacgtatctttataaaactgtctgttcatggattctgtgatgtaaaacaagtattgcatggcaatcattttgccacagaaaataatgatagtggtaaatctaatctgactaaggattaggaagttgtactacaggtggaaaaatgcctgtagtaagcaatggtggctatttaagaatgaaatacggccaggtgtggtggctcacacctgtaatcccagcaatttgggaggccaagtcaggtggatcacctcaggtcggaagttcgagaccagcctgaccatcatgatraaaccccatctctactaaaaatacaaaaattagccagatgtgctggtgggtgcctgtaatcccagctactcgggaggctgaggcaggagaactgctagaa

SEQ ID NO: 383800 - DNA, 433 bp, Homo sapiens
ttttctgtcacgttatttgtcaaaatatagaagaaaaaatgataactcataaataaaaggtaactttattattttttttttttgctatttgaaagttatgagaaaaaaagaagctacatctgttcatgattttggatcacagaccacagtgaaaacaggtcacagttgcttacttcttaatatttttcaagttaaacttttttaattttctgagctctccaagtagataaaaattatttttaataaaatagttcttgcattctctaatttaaaagtaaaatttaggattagattgtgtagatatatggccttcacatttaagaattctatcttctaataaatatacttagatatacatatatacaattatacatycatatataggtcccaatgttctatggttaatagacgagttggatttagcattatacac

SEQ ID NO: 383801 - DNA, 555 bp, Homo sapiens
aatgtcaaaacaaaatcctcagggtgaaggaaaataatagcaaaaggraagttggatcttcacaaagaaatttaaaaaactggaatttttttaaatttctagaaaaatttcagttttcttctgtacaaaatggtaaaaataatatattattagaaggctattactaaggtttaagtaaataaaatgtttgtaaattacttaataaagagcttgatatataagaacatttggtaaatgtgtataatccccataatcatcattgtcacattcattatcaataccattatcaacatcatggtcatcatcactgggactgtaatcaatttcagatgatgtttctactttcagagtctcaggttgagagtttattgttactagtttttccttttggtttctaaaagaatatcctctactctttcaggaaactccaatgtttgctgaacaagtttggatggcttttggtttcttgagatcatataagacctgtataaaagtcccattattataggagttattaagaaattattttagggagctagaaagggtaaaagagtc

SEQ ID NO: 383802 - DNA, 555 bp, Homo sapiens
aatgtcaaaacaaaatcctcagggtgaaggaaaataatagcaaaaggaaagttggatcttcacaaagaaatttaaaaaactggaatttttttaaatttctagaaaaatttcagttttcttctgtacaaaatggtaaaaataatatattattagaaggytattactaaggtttaagtaaataaaatgtttgtaaattacttaataaagagcttgatatataagaacatttggtaaatgtgtataatccccataatcatcattgtcacattcattatcaataccattatcaacatcatggtcatcatcactgggactgtaatcaatttcagatgatgtttctactttcagagtctcaggttgagagtttattgttactagtttttccttttggtttctaaaagaatatcctctactctttcaggaaactccaatgtttgctgaacaagtttggatggcttttggtttcttgagatcatataagacctgtataaaagtcccattattataggagttattaagaaattattttagggagctagaaagggtaaaagagtc

SEQ ID NO: 383803 - DNA, 555 bp, Homo sapiens
aatgtcaaaacaaaatcctcagggtgaaggaaaataatagcaaaaggaaagttggatcttcacaaagaaatttaaaaaactggaatttttttaaatttctagaaaaatttcagttttcttctgtacaaaatggtaaaaataatatattattagaaggctattactaaggtttaagtaaataaaatgtttgtaaattacttaataaagagcttgayatataagaacatttggtaaatgtgtataatccccataatcatcattgtcacattcattatcaataccattatcaacatcatggtcatcatcactgggactgtaatcaatttcagatgatgtttctactttcagagtctcaggttgagagtttattgttactagtttttccttttggtttctaaaagaatatcctctactctttcaggaaactccaatgtttgctgaacaagtttggatggcttttggtttcttgagatcatataagacctgtataaaagtcccattattataggagttattaagaaattattttagggagctagaaagggtaaaagagtc

SEQ ID NO: 383804 - DNA, 555 bp, Homo sapiens
aatgtcaaaacaaaatcctcagggtgaaggaaaataatagcaaaaggaaagttggatcttcacaaagaaatttaaaaaactggaatttttttaaatttctagaaaaatttcagttttcttctgtacaaaatggtaaaaataatatattattagaaggctattactaaggtttaagtaaataaaatgtttgtaaattacttaataaagagcttgatatataagaacatttggtaaatgtgtataatccccataatcatcattgtcacattcattatcaataccattatcaacatcatggtcatcatcactgggactgtaatcaatttcagatgatgtttctactttcagagtctcaggttgagagtttattgttactagtttttccttytggtttctaaaagaatatcctctactctttcaggaaactccaatgtttgctgaacaagtttggatggcttttggtttcttgagatcatataagacctgtataaaagtcccattattataggagttattaagaaattattttagggagctagaaagggtaaaagagtc

SEQ ID NO: 383805 - DNA, 575 bp, Homo sapiens
atgtggggattatgggtactatagttcaagatgagatttggatgaagacacagacaaaccatatcattccatgcctggtgcctcccaaatctcatgtcctcacaattcaaaatacaatcatgcccttgcaacagtccctcaaagtcttaactcatttcagcattagctcaaaagtccaagtccacagtctcatctgagacaaggcaagtcccttctgcctataatcctgtaaaataaaaaagcaaattagttacttcctaaacacaatgggatcacaggcactgggtaaatgcacctcttcaaaagagggaarttgaactaaataaagatgctataggccccatgcaagtctgaaatccaatagggctgtcattaaaccttaaagttccaaaattatctactttgactccatgtttgacatccaggtcactctgatgcaaaaggtgggcttccatgcccttgggcagctctgtcgtgtggctttgcagggtatagcccccctctcagctgcttttgcaggctgatgttgagtgtctgtggcttttccaggcacactgtgcaagctgtctgttgat

SEQ ID NO: 383806 - DNA, 575 bp, Homo sapiens
atgtggggattatgggtactatagttcaagatgagatttggatgaagacacagacaaaccatatcattccatgcctggtgcctcccaaatctcatgtcctcacaattcaaaatacaatcatgcccttgcaacagtccctcaaagtcttaactcatttcagcattagctcaaaagtccaagtccacagtctcatctgagacaaggcaagtcccttctgcctataatcctgtaaaataaaaaagcaaattagttacttcctaaacacaatgggatcacaggcactgggtaaatgcacctcttcaaaagagggaagttgaactaaataaagatgctataggccccatgcaagtctgaaatccaatagggctgtcattaaaccttaaagttccaaaattatctactttgactccatgtttgacatccaggtcactctgatgcaaaaggtgggcttccatgcccttgggcagctctgtcgtgtggctttgcagggtatagcccccctctcagctgcttttgcaggctgaygttgagtgtctgtggcttttccaggcacactgtgcaagctgtctgttgat

SEQ ID NO: 383807 - DNA, 603 bp, Homo sapiens
taactacctgtgatcagatgtgggaaaaaaaggaatgacttaaagttggaacttatatttaaaagggaagtaaagcataaaaatttggaaagctcacagactacccttgtggcatgcattttcaagagagtaatatgagtgtgctacagagcaaccagttgctggagagattagcatgactgaaatggagtcaagtgctccatccaagtgttccttttccccattcaagtcaatagggaaaaggcctagaaggcatttcagagatcttctaggcagtgtctacccatacaggcccagagggctaggaagaacaaatgatttacagggccatgcccagggtcccgctatgtcgtgtagccttaggacactgctccccacatccaggatgctctgactccagccttggctcaaagggccrcaggtacagctccagctaccacttagagagtgcaagccaccataagccttggcagctcccccatggtgttaagtctgcaagcacacagaacgcaagagtataggaggcttcgtagtttccacctagatttcagaggatatatgggaaagtctgtgtgcccaggcagaagcctgccacagaggagg

SEQ ID NO: 383808 - DNA, 560 bp, Homo sapiens
ctttcaagacccaagtatggtagaaccaacaacaggttgtaccctgagcctagaaaagccatagacattcaagttctacacatgagataagccacrggggctgcaccccacaaagtcacaggggcagagctgcccaggttcttggcaatccaccccttgcacgagtgtgccctggatgagcaacatggagtcaggggagattattttggagttttaatatttaatgaattccctgctgggtttcagacttgcttagggcctatcatccctttattttggttattttttcccttttggaaggagaatgtatactcaatccttgttccatcattgtatcttggagtaactaacttgttcttgatcttacatgctcatatatggaagaaactcatctccagatgagaatttggacttgggacttggaacttttgaattaaagctagaagaagttgagaatttgggagactattctgaaggcattattatatttttgaaatgtgagacaggcatgtgatttgagggccatagtcagaatgatgtggtttggatatctgtcccct

SEQ ID NO: 383809 - DNA, 617 bp, Homo sapiens
cttgggacttggaacttttgaattaaagctagaagaagttgagaatttgggagactattctgaaggcattattatatttttgaaatgtgagacaggcatgtgatttgagggccatagtcagaatgatgtggtttggatatctgtcccctccaaatctcatgttgaaatgtaattcccaatgttggaggtggggcctgttgggaagatattagctcatgggagtgggtccctcatgaatggcctagcaccatccctttggtaataagtgagtttatattcagttattttatgcaagatctcgttgtttaaaggagactgggacatcagttttatctctctcttgttccctttctcgtcatatggcacactggctcccatttgccttctaccatgattataagytttctgaggcccctaccagaagcagatgctagcatcctgcttcctgcaaaggctatagaactgtgagccaattaaacgatctttctttataaattacccagtctcaggtattttttagaataacacaataaaggactgacaaagctcccctgggaatactgagaatgtggaggttttgcttgaactggaaccacatttaaagcctatattgacta

SEQ ID NO: 383810 - DNA, 513 bp, Homo sapiens
caagatctcgttgtttaaaggagactgggacatcagttttatctctctcttgttccctttctcgtcatatggcacactggctcccatttgccttctaccatgattataagttttctgaggcccctaccagaagcagatgctagcatcctgcttcctgcaaaggctatagaactgtgagccaattaaacgatctttctttataaattacccagtctcaggtattttttagaataacacaataaaggactgacaaagctcccctgggaatactgagaatstggaggttttgcttgaactggaaccacatttaaagcctatattgactacaggccaactgggagttactttgaaggtagatgagatatagacacgtgagctgacagagagagatgaaacccagtggtttttcaatagtaaagtgaattccaaaatatgaaggtaaatacacatccccaaagtgtctgcctgataatgaacatttctaacaaatttccaagtgatgtggatgctgtt

SEQ ID NO: 383811 - DNA, 616 bp, Homo sapiens
agtattgctaggacagagggctaaatcacaaagattcagctatccaggctactaagtacctttagcaaatgagagcaatttaaaggcaatgtgaaatctcctgtgcagttggctattttatacatatgtgcatacacggtttaaagagagaagtgaaaataaacaacttagataaaatttggctggctttgtagcatactctgacctaatctcctgcagtaataacttcaaatccaacctaatagaatagcataaatagcagygttttatcccaattaactcagcttggcactaaataagcttggttctattctataaaatttaaaatacctcctcctgaccacctgcacacattcccatggtttgcatatatttgattttaatgtttttgttttgtttcattttgttgtgtatttttgctttctaatagagagggatgagaagtattgaatgggaaattgctccaatatgcccaaatctcattccctttgcatagctctgagtatattcagtgggagagaacagttgctgaggtctacaaaaattgattcacatttttgccaaatcttcatgtttccttcttaaagactaatacacacatgaaaatgttgcaacc

SEQ ID NO: 383812 - DNA, 592 bp, Homo sapiens
gcttaaatgctctgtttcaagtgttattatatacttgctaatttggttctttattgtggagaaagagaggcatccaatccccctagtaagccatcttaaagccctttataactattttgttgttatttctttttattcccagggtatttaatggagattttatactctggagtcttagtagaagttcatttaaaatttattaattatccttttttttctggttgccatcttattgtttcgatttttattattttcttatagtctaatatacagctaaattatttgtaaatatttgtacatatatcagaatagaagttattcccgattattggatatccatttttgatacatatttaaaacatatgagaagaattaagttgaatgaaaagtgatttaatatgagaaaatatattgatatataaagggagaattattataaaatgacttcaagaaatacagaaaattatttgacaaaaattcraacactttcatgtgaaacaagaagtacccatcaatataacagcatacaaattctttacatagaaaaagatttattgttttcaactcttttaaaccaacttgttttatcact

SEQ ID NO: 383813 - DNA, 617 bp, Homo sapiens
tgactcctgttttattgtcttaggattcaaaccctctgtccaaacttcttcattttgcagacatttttttcaggttcattttgacaaagaggacgtgagtaatcttattagaaagttcttctgaacaactagccattcctctgcatattccacatgcttcttatgcccttgatatggatacaagacccatcacttttaaatatgatagtatttaaatcacttcatatcagcatgctgtagtattttgtagcattggaagttattcgtttaggtagaaaatggcacttggccagtatgcctagtgcagatgctcctaacttcctttaaaaatcaactaaaatattattcaaaaccaaaaatgcacatgaaagccaatgagggaatgtaaatattttaatttttatatcgcaagtaaacacatatcataacaaacaatttgctaccagaattgatgagtaagaattggataactatattaaaattaataattaagggrctttcaatactgcatccctgaaatgaagtatgtacgaaagcaagaggataaggagaaaattcataactcacaaattcattgtccttagaccagaaaggaaagatttatgacaaataaaaaa

SEQ ID NO: 383814 - DNA, 570 bp, Homo sapiens
aaaaactgaaagaaaagagggggagggaaaggraaaaaaggaaaagagggatggaggcacaggagaggtaaagagacagagacagaggttagcgctatctcacctgggatgaccctaatggtaaatttataataaggagatgaggctgctgaatgatttactgctaatcccatagcaagagcaggaggaggtgaaggaacaaaggtttacagtccctttggagatttgtttcatctgcacatcagcccacaattaatggccatttagctgtttttctcctgctggacactggtggattgattcagtaaataaaagtgacagagcgatgtcccacggaggcaggtggcggagtctctgcacctgttatttgtgaatctcggcttgccaggtcgttgacctttagaagctggcaaaaattaataagtgaaagcacaaagctgcttgcttttaaaaatgcaaccagaggacccaggcagagttgggctgcctttttaggaagtggccagaaatctctgcatagttaccacctctcaatcctcagaccaggagcacccacaggaagtaaggctg

SEQ ID NO: 383815 - DNA, 570 bp, Homo sapiens
aaaaactgaaagaaaagagggggagggaaagggaaaaaaggaaaagagggatggaggcacaggagaggtaaagagacagagacagaggttagcgctatctcacctgggatgaccctaatggtaaatttataataaggagatgaggctgctgaatgatttactgctaatcccatagcaagagcaggaggaggtgaaggaacaaaggtttacagtccctttggagatttgtttcatctgcacatcagcccacaattaatggccatttagctgtttttctcctgctggacactggtggattgattcagtaaataaaagtgacagagcgatgtcccacggaggcaggyggcggagtctctgcacctgttatttgtgaatctcggcttgccaggtcgttgacctttagaagctggcaaaaattaataagtgaaagcacaaagctgcttgcttttaaaaatgcaaccagaggacccaggcagagttgggctgcctttttaggaagtggccagaaatctctgcatagttaccacctctcaatcctcagaccaggagcacccacaggaagtaaggctg

SEQ ID NO: 383816 - DNA, 570 bp, Homo sapiens
aaaaactgaaagaaaagagggggagggaaagggaaaaaaggaaaagagggatggaggcacaggagaggtaaagagacagagacagaggttagcgctatctcacctgggatgaccctaatggtaaatttataataaggagatgaggctgctgaatgatttactgctaatcccatagcaagagcaggaggaggtgaaggaacaaaggtttacagtccctttggagatttgtttcatctgcacatcagcccacaattaatggccatttagctgtttttctcctgctggacactggtggattgattcagtaaataaaagtgacagagcgatgtcccacggaggcaggtggyggagtctctgcacctgttatttgtgaatctcggcttgccaggtcgttgacctttagaagctggcaaaaattaataagtgaaagcacaaagctgcttgcttttaaaaatgcaaccagaggacccaggcagagttgggctgcctttttaggaagtggccagaaatctctgcatagttaccacctctcaatcctcagaccaggagcacccacaggaagtaaggctg

SEQ ID NO: 383817 - DNA, 593 bp, Homo sapiens
gaaacagtaaaactttacagagtttttcatttattgaagyagaataacaaaatactgtcacatagttctggccacattctcaccagatcagttccctgactcaccttgttctcctttcaccctgtcccccaacaatcttgatcagccttttaaatttttcagggctttctatttcttagtttcacaaattgagaaaattatttcctctcttgactaagtatcatttctttaagcccacgtttccaggactggtagatcccctttccactagcatgaaggaaaatctaacctgccaaggcattggtttgacagtatattgcctagatttaagatgtttgattttaaagcacaatcttgtgaaatgtttcacccatgctgcactgcaccaattctatcaatttgtcactcatggccttttaatttttccagcatgataggaaatgcattatcctctcaatccacattccatatcttctgcgaaagcattcacaagacagtacgtatgcatttccaaggcagtctaaatcaagatttaatgatgaaaatgtcttaaaaaatttgctgaagatatttttgccaaaaattatgctgaa

SEQ ID NO: 383818 - DNA, 593 bp, Homo sapiens
gaaacagtaaaactttacagagtttttcatttattgaagcagaatracaaaatactgtcacatagttctggccacattctcaccagatcagttccctgactcaccttgttctcctttcaccctgtcccccaacaatcttgatcagccttttaaatttttcagggctttctatttcttagtttcacaaattgagaaaattatttcctctcttgactaagtatcatttctttaagcccacgtttccaggactggtagatcccctttccactagcatgaaggaaaatctaacctgccaaggcattggtttgacagtatattgcctagatttaagatgtttgattttaaagcacaatcttgtgaaatgtttcacccatgctgcactgcaccaattctatcaatttgtcactcatggccttttaatttttccagcatgataggaaatgcattatcctctcaatccacattccatatcttctgcgaaagcattcacaagacagtacgtatgcatttccaaggcagtctaaatcaagatttaatgatgaaaatgtcttaaaaaatttgctgaagatatttttgccaaaaattatgctgaa

SEQ ID NO: 383819 - DNA, 625 bp, Homo sapiens
aaatggatgtcatgtgcagaagaatgaaattaaaccttatctcaaaccatacataaaaaaattggatataaggcttcaatataagacctgaggctgtaaaactaatgaaagaaaacatagggaaaatgttttctgacatttgtctgggcaatgattttttggatatagtcccaaagcaaaggcaacaatgtgaaaatagaaaagcgagaccacatcaaactaaaaacttttcaacagttaaagaaacaattaatagagtgaagagacaacstatggaattgaagaatatattttcaaaccatacatccaatagaaggttaatatccaaaatatataaggacttcaaacaaggcatcacaatttaacaaataattaaaaacaggcaaaggaactgaatagccacttctcaaaagaagacataaaaatgtctatcagttatatgaaataatgctcaacatatctaattattggagaattataagttaacaccataatcagagatgacttcacacatgttagaatggctattatcaaaaagatgaaaggtaacaagtattggtgaggatgtggagaaaaaggaactactgcacattgtgggtgaaaatgtaaactatatagccattat

SEQ ID NO: 383820 - DNA, 590 bp, Homo sapiens
tattccttttgttgtgttttacaaattgttcaaggccctgtgggcccagtgtctgagagaagagggaggacttttgagtcctttccaaatcctcattgtagggtagygggatcctactaggagatttcttcagcaaaattttcttcatatttgaccgactgagggtgcactatccctgagctctggcaatccagtttataaggctgcttgtggcagttgaggttcaaaaacaaagctgtgggtagaaaaagatccgaaagtttcaaaggcaaaagcagctttctgaagttttctaacatgtctgtaggaagtagagagggagtaacgctgagaataccctgcaaattatacaaaggagacttgaaaagctccagtatgtcagttttcaaaagtcctcctgaggccgagagactgtgaaattctcatgtatgttgatttatgcagtgatttgctttgaccccagggaaagctgctttatggtttggacatctatgcctatccaccttcccacctatctgtgagaatcgccgaacaaaatgtgcaaagggaaaatgaatggagcaaaaaataaagcaatcacagaaataata

SEQ ID NO: 383821 - DNA, 588 bp, Homo sapiens
ggtcttctctttgaaaagcatcatataatgaataagaaaaactaagaaaaaagtaataaaactataatactgacttcagtattataatagtatatatactcactataatactgacttcagtgtccaaaccttggggatgagatagaaaatatgtttgctggttgggcatggtggctcacacttgtaatcccagcactttgggaggccgaggcaggcagatcacttgaggacaggagttcaagaccagcctggccaacatggtgaaaccccatctctactaaaaatacaaaaaacaattagccaggtgtggtggtgrgcacctgtaatcccagctactcaggaggctgaggcgggagaatcacttgaacccagaaggtggaggctgccatgagctgagatcacgccattgcaatccagcctagacaacaagagtgaaactccatcttaaaaaaaaaaaaagaagaagaaaatacgtttgccatcttgagtctcaattttgatgtgcaataaagttgcgtcggatctaagagtaaggaaatatgggctggaggttgagattctcacttgctaatgcaaaaatgtatgtct

SEQ ID NO: 383822 - DNA, 511 bp, Homo sapiens
ctcacttgctaatgcaaaaatgtatgtctatcaggagtcatgctttatatattttatcattgaaaaaggtatttagtaagtatttgcatatttgcttttttataatctctttctaaaagcaatttggagatgtttctatttttttaaaaataattgttgaatattcacccacaagcccatgaggtaggtaaggcagctgaattcagaatacatggctgctgagaaccrgagaagtcatgaattgcccaagatcaaaaagcaaactttctggtcttttgatacttaggcaattttatggaccgaatgcttatatccccccagaatgtttatgttgaagccctaatccccaatttgatgatacttggaaggtgaggactttgggaggtaattaaattaagtaatgacagtgagatccttatgataggaataaagcccttataacaagaggaagagacacatgatttctcactgcattcacctacatgcaccaagggaagaccatgtgagcaaa

SEQ ID NO: 383823 - DNA, 646 bp, Homo sapiens
tgctgtttcagaatccaacagtaaatcctaagaggaatatctcattttaaggaccttcttccagaccttacttaggacccatcaactgggaacattcaagggaatccacatacaacacagccagtttcaaaatgcagtgcttttgagaaacacagattactgggcccacctccagagatctcaagagatctttctttttgacaagtgccaaggtaagtctgatgcgagtaattcatgttgaaacaaatacgaatgcagactctttataagcccccttgaatcatctgtgcaattaaaaaaaaaagctgctgtcccacccccaaagactttgttttaattggtttggggagaacctcctaccatctttgtaaaagcccatgaggtgattctaaagtgcagctaaacttgagaataatttgagtcctcttgaaygtgaggccctctgacagccagagcaacctcccaggaaaaaaatttcattaactaaaacccagcagtatctatctctgtggaatcaacacccttaatccagtatgtgcttaaataataagagacaacttcacagagaggtgttatgtgtccccaggagaaaccagctttcattgacacaaattaagccctagacaactaccgtgactgtttttct

SEQ ID NO: 383824 - DNA, 615 bp, Homo sapiens
attctgatgagaattattagatatacaaaattgcaacattttaaaaggatgagtaaatacaggctaggaggtagatgtcaatgattacattttctgaaaatattttgcttacgttagatcttatctaatgttacatagaataactattctttctcattcccttgattctctgaatcaaggcatccctatgcctaactagaaaattagtttagttattctttctaccacttgattcctattatgtgctatttttatttactccatttttcctcaaagagcatgtgggatgcttgataactaatactccastcagtagggagtgggctgtcaccagaatggtgccatggtgggagagctcctctggccttctgggatctcttcattgacccagaatatctgataattggttccagcttacttccttagactgagttatcctaactgcttgtttcttctgagtaggatttgagggcttttccttttgctacctaagaaacattaccataatctataatactttatttcactaaacccttcaatgcatcttttatgactcctcaggctcttccattaacttgaagtctctgatccagccatgaatctacataacacagt

SEQ ID NO: 383825 - DNA, 595 bp, Homo sapiens
aactattaaattacagattgtatttggatttcacttgtttttctatcaatgtcttttatttgttccaggatccaagctaggataccactgcataacaatgttaaaagatatactgtggatagatttgactgggcaagatgaaatctggagggtacgaagatgagtaagatgtagtcgagcctttgaggtgcacacggmagggaaacagacacagaagtaaaggattttactagatgcgattctgccaggccagaaggaagcttaccatgttgtgagagcaaaagcaagtcccagccttgagatttgagaaggcttcctagagatcaggcaaggagcatagtgcgagtagatactgcatgccctctgtggatgagggggaggtgaaaagagcctggtcaggaaatgccaggaactgctctggattagcatcttgaaatatttagaaattatttataagaactttgcattttagtgaatatcctaggacttttaagatttggtttagaggttttaggtaaatctttaaagtattgcttaaatctttccattctttggagtctcttttgataacattatatacaaaggttaatgatta

SEQ ID NO: 383826 - DNA, 595 bp, Homo sapiens
aactattaaattacagattgtatttggatttcacttgtttttctatcaatgtcttttatttgttccaggatccaagctaggataccactgcataacaatgttaaaagatatactgtggatagatttgactgggcaagatgaaatctggagggtacgaagatgagtaagatgtagtcgagcctttgaggtgcacacggcagggaaacagacacagaagtaaagkattttactagatgcgattctgccaggccagaaggaagcttaccatgttgtgagagcaaaagcaagtcccagccttgagatttgagaaggcttcctagagatcaggcaaggagcatagtgcgagtagatactgcatgccctctgtggatgagggggaggtgaaaagagcctggtcaggaaatgccaggaactgctctggattagcatcttgaaatatttagaaattatttataagaactttgcattttagtgaatatcctaggacttttaagatttggtttagaggttttaggtaaatctttaaagtattgcttaaatctttccattctttggagtctcttttgataacattatatacaaaggttaatgatta

SEQ ID NO: 383827 - DNA, 632 bp, Homo sapiens
gagactcctccttgtcatttaggtctcagcttaaatatctttctccttggagagaccttccctaatcacctaatctaaaatagcaaccctaatccttttccgtaacactctataacatcatactctatttccttggcagcacttaygaccgtggaaataatcttgtttctgtttcatttatcatctgtcttgcccacgtactgtgtttgttccctccattccatccatcaaaaaagtaatattgttagtattgtttacagctcggaatatctacccctagaaaaagtgcctggcctaaaataggcatttaaaatatctgttaaatcaatcttgaatcaactgtaaccaatccatgtgagaaggcttgtgagaaatcctgaccctgaacaagtgacaatatacttttaccttaattgtccatcttcctgctgaataaaaggtagctgaagaatttaaagacaatctattagattctcagctcaaaggaataattcaccttgaggactattcagttccgtatttggattgtgctccctcaatatcttcatacactgctcgtattttggagaagactgatccacgcccaagacactcaagtcatatgcatcaagtaaaatgaaccggaatttagg

SEQ ID NO: 383828 - DNA, 646 bp, Homo sapiens
ttcttgtggtctgacctccaaccccattcactggctggggaagtgaaatagcagacacatggcccagacctggcccgtaaaaacccagtttcctctggccagttaggggtaggcatgtaactcaacctgggtcacaataagcatcagccctgggacaggcactgccactactacaaacgctgataaactaaggcttcaatttttggagaaaatgaactgacaagaaatccaacatagaaagaaacaattctgaatgatggaaagatggagatttctgaaaacattagttgaatacctaaattcacctgtccctgctagaacactggtcatttagttacacatrtcagcacataaattctcctgggcttaaagctaaatcaaattgattttctgtcatttgataccaaaatcctctcaaatacaccttccactggaacaagttcagtttagaaaaactcaaggctatcctaagaactggcaatttttaaggaaagttaatgtggagagaagcaccaaggggcacacacttcaaaacagcgatgtgttctggggtaaaaagagagatccaaagtgttgaatatacatggcttttaaaaataaggttagtatctccttatccaaaatgcttgggaccagaagtgtttta

SEQ ID NO: 383829 - DNA, 612 bp, Homo sapiens
tttcctacttagaatgtaagtgcatccatgggaggctagagaaaggagaaataaatccacctgtagtcaacttgtccagagctctctcaaacctgctacagggtgagcagcaatgaggtcctgggtgggcacagagagatgaggtcgacagtgtgtgcaaggcatccatggaaatggcaggcacatcacatttaatcagacttactacctaagaaccataaatctattggcagctctgggacttaataaaaagtagattaccaaggagtttcacttttatgagaactggctttgccatttaagacagtttaaagtagacgaaaataaggcaaataaaaacctttgttctgccaccattttggaataacagaatatcgattaaaaatctaacagtggaaagataatcttttcttgctattttcttcttcttttaatatataagccaagtggaaaacactgaaaagggtctgtgtgcatggggagaatgacactgcagaacttaaaaacagaacctgatgatgcctaagagcacatrtgtaacacttgaagcttccttgacatagatcagcttctgtttgcagctcagcaaaccatatgctatattcactcact

SEQ ID NO: 383830 - DNA, 488 bp, Homo sapiens
actcagctttgattttttttgctaatgtaactcaaaatcagggcacattttcccatttccttcatgggcttatcttctagtttcagatctatctgtagattcacacccagtcacagtgtaaataacccctggctttactccagcattcagaccctcaggcttcatcaggcaccattgtctctacctggaatatgtttccagctctctccaatctggcctgcccttctgttacccacmctgaattctgactaacacaggtgcttactgcggctaaaatgaatccatgttcgaattctggctctgaaacagacaactaggcaggttcaagttaatttatctgttaaagcccctgagagttaattcacctttttagatctttgagggtttattaataaacagggtaatatagagcatctatctcaattagaagctgaaaagattaaagtgactgtgcagggtagatttgcaaatattttagtgttctttct

SEQ ID NO: 383831 - DNA, 621 bp, Homo sapiens
gcattttgcataatgagtagcattttgattccttataaatgtttcacctgtcagaaaaaaccaataatcatatttgaaagccaagctgcaattctggacttctctgctcttttttgtgcatctgcaaatcttcttcttgaagtgttagtcacgctctgatttctactaaatacatcyggctctataaacttcaccagctgacgctatgcctgggaaaaggcacagacttctttgtctgcaatttgtaatctagaatttcatcactcataattcacaaaacaaattgagcaggttgtaaagactcactcaggcctctgaaagacatctcccagcatcacagaaactagagaggcagcatgtgcaaatactatttgcaggtacaacttgcctgtagttgtaatattgcttaaatgctgtgcataagacatttcctcagcaggtctttaacttcaacgaagtgaagatggtgagtcagaaggaatactgagcctgtgcttctcaaacttcagcatgcatattcattttacctgagaatcttgttaaaatgcagattctgatttgatagatataagactggacctgagaactggcatttctaataagcccttggtgatgctgatg

SEQ ID NO: 383832 - DNA, 599 bp, Homo sapiens
tgtacaagaccctgttggtgtcctacaccaygtccaccatctaaggtgactcctgcagcttaggtgcacagttcccacacatgctgatgtcttcctcccttacatgcccagcctctcagatggccccaagaggggttgaaccccagttgttcgtatcagtggcccactcatccaagtacactttaatgacctttctcctttctctgcttcactccccctactccactcactatggtacctgggatcactttcaaataatccacctgtatacaagtgcttttctcagagtcagcttttgcaggattccaaattaagacctatggaaaggggccaaatgcaataaattgtcaacatcattttctagttcgaacacttataatgtttccttcctttaaactttttaatgataattttttaattcaggtgtcaagacttcttttactacagagaaataaggtacacatccagctgcaactagagatgctgagtaaaccttaatgcccttccacctgccatgtaaggactctgtttgtttcatgaatgggaaaatcaacagatcaatcagcagggtaagttttgttcacatttgggaaaagatt

SEQ ID NO: 383833 - DNA, 592 bp, Homo sapiens
atcttcctgcattccctccattccaacctacggcaccactgggcaaattaaaatctaatatttccaaacacttcttacgattcccaattacatcatttactacatttgaccttgtattacagcctttggacactccctgttgttttttgtttggttggtttttgagacacagtcttgcttcattgacccagacaggagtgctgtggtgcgatcatagctcatggaagccttgaactcctgggctcaagtaatcctcccatcctcagcccctcaaagccttaggattacagtcatgagccactgtgcctggctttgtggggctgaggagggagggtttcaaaggtaagaatcatgagcataagaactatgttttatttctttttttatatcatttgggacttcacacaktgattttcctataagagatgtcaactatttttatttaattaaatagttctaactcacaaagagtttagaatctaataaaatgatatcatatacaacactgattaatttttgcccaactgcaaagggatgagaattttaccaagtcatcaaaatacataaacttaaattcaaagacaaaaataga

SEQ ID NO: 383834 - DNA, 461 bp, Homo sapiens
ggaaggatatggatgagagtgacttccctgagcattcttctttatataattttgaatgytgaggcaaaggaatattttatactttccaaatgtaaaattgataaaagcaatagagcattttaatctctaaaactgaacgtaactataaatatataaatctaagtgtatagcaaattaataatataactctatagaaaataattttaataatcttggagtatatattcttagtgaagcatacaataaggaataaagataattgcaaagaaacgttggattttctctagtggacttgtattagtagcaacagtatttttattctagaattattttgtgtagactatgacaaagaagtgaatacattaatgcagtaaggaatcaaaattgccactatacaaaaacagatatacatgaaagaagaggaaatgaggaagaaacctgtgataatggattgaattaga

SEQ ID NO: 383835 - DNA, 627 bp, Homo sapiens
cctgtggtactttgctgtggtaaccagagaagactgatacaagtaccgtggtgtacttctctacattaagtatagtggtcaagtttaaggaaaacttgactgaaaagtggtccttttgacaagcatattttgtaggaaaattctcaatgcttttctgtgtaaaatctctattttcaaaagagaaatcatccatttaagctggtactctttttacttagacgaatggttttgaaacttggttgaacactggaatctcttgggaactttaaagaaaatatcagtgttggagccccacagcagacatttcaatttaattgattggggtgtggcctgcacatcaggattttaaaagctccccaagtgcttctcatatctctatattagaacccatgattgaaaaccctggcttagagagcagttcrctatgtagaattaatttaagaatttaatatcggatatgtccacaagatggcgcattattgcgtttaaaagaattaaaattgagaaatgtttcccaaatgcaactatgtaccattgcatgtagaacaaattggatttacgttgaaattacaccagacaggggcaatgataaaaatgagtcacaatcttctgaaaagacctgggttt

SEQ ID NO: 383836 - DNA, 608 bp, Homo sapiens
agggttgttttgaggacttaatgaattaatatactcaaaacgcttagcatttgtcttggcccatagtaagcactgaataaaatactagctactattttttattaagtagtggtaaaaattacaaataggtaaaacatacctttaaagttaagatacaatgtaactcctccatttgaaatcttagatgagggcagttgatgagaggaaggggaggtgagtgaccctgggcctaacagagagctaggctattcctatgataccaggaacaactttgagcaatgattttgccagctacyggcactttatttcagtcatatttaattagagacacagagccactaatcaagattggttaccggatttgaccttatgcaattgtggaagctattaaacagtccctatgagtctgtagtcttcacatctgaggatggagctcaaagccaacagggaaggaaggatggatataaagtgggggagagcaaggcaagctgggctcatgagctagagccagaccttaggagaacagactggaactcaggtcagttcttacttcttccatccttggactaagcagggatcctgtaggagaagctggctccttcgtcatg

SEQ ID NO: 383837 - DNA, 580 bp, Homo sapiens
gctctaattcagtgtgtttctgggaggactttatagaagacatctaccataatattacaaaaattaaattactgaagctattcaaattattttctgatattttcattctgtccttttcttacttctatcaacccatccccatgtgtcttttttccctgcagtccaagattatttagccccatcctacaaggtcaagtattttatacaccagctaaggagtaaagtgtaaaattttwaaaaaaaatcagtaggtagaatattacactggaatcttaatagttcttgctgatagtgcccttaaggttaaaaaaaaaaaactcattaaattccaagagagaagatggttataaaaactgaatgaaaagatagaagttattccacaagcatttcttaaattagtttgttaagagccttagatcatcagacatcaagtagaaaaacacttatccaaatctacagaaagcatttctcagaaagtgaaagaatgcagaaatttacttccaaagttatgaattaaacatgacagaagaaggcatcaatttggaaaactttctcagaactctcccttgcttggtagagt

SEQ ID NO: 383838 - DNA, 642 bp, Homo sapiens
gtactagtcaggtattttctagaatatcccttaatatgggtacaggatgtttttctcatgattaggctgaagttgtgggtttcgggagagagaccacagaggtaaaatgccattttcatcacatcatgtcaaaggtacctactatcaacatgacttaatactgatgagattatccttggtcagctgactgaggcagtgtttgtcagtttctgcatcacaattactctttatcccctctttccatattgtgctttttttgcaggaagttgctatgtgaatcccacacttaagagaaggcagttatgctcctacataaattatttggtatcctatatgggagaattgtgtattcttcccaattatttattcattcaatgactgatttataataatgtggcctatggatacttattttatactttgagttgcaatctaatatcacatctttattttgttgcttaaattgttccagctttgaccattgagaagtcttttagttggttccatatgttcctttgagaaactttcttgcttcctggcattgttagatgctccagcctaatcttgtaaattcccttcyccagctctagaatcagccatttctccaagagccctagttccttttattgaagaacggcacta

SEQ ID NO: 383839 - DNA, 595 bp, Homo sapiens
ccctgcttctcccaggcctctgtcaagccagcagggtcccactccttagctcgaatcatgcacrggtgccccatggcgcaatgcaaagagcagaggctttggaatcagggttccagtcctggtcctgctcctccatttagacaaacccctgcaagcctcagagtcctcagcagccaaagggggcgtcagctgcagagaagacccaccacgtcacactgtggggcagggatggcacaggaccagccactccagcagaggaactgtttgtggaacccaccagggaaagaaattcgactttgagagcaacagctttggcagcttaaaaatcatctggaggcttcccgtgcacacattaaacctcaagctccaggtagcccagccctggttctgtaagcggccagataggcccacccaggctcttggcagcaggggaggagctggtggctctgaaaacagcactggctatgaccacaggggccaagaggactttgtcccctggctcctgctctttctccagcctcaggactccctcacctcctccgtccattcccttgccttcaggagtcccactatggcctgaggagcatcccgctct

SEQ ID NO: 383840 - DNA, 595 bp, Homo sapiens
ccctgcttctcccaggcctctgtcaagccagcagggtcccactccttagctcgaatcatgcacgggtgccccatggcgcaatgcaaagagcagaggctttggaatcagggttccagtcctggtcctgctcctccatttagacaaacccctgcaagcctcagagtcctcagcagccaaagggggcgtcagctgcagagaagacccaccacgtcacactgtggggcagggatggcacaggaccagccactccagcagaggaactgtttgtggaacccaccagggaaagaaattcgactttgagagcaacagctttggcagcttaraaatcatctggaggcttcccgtgcacacattaaacctcaagctccaggtagcccagccctggttctgtaagcggccagataggcccacccaggctcttggcagcaggggaggagctggtggctctgaaaacagcactggctatgaccacaggggccaagaggactttgtcccctggctcctgctctttctccagcctcaggactccctcacctcctccgtccattcccttgccttcaggagtcccactatggcctgaggagcatcccgctct

SEQ ID NO: 383841 - DNA, 587 bp, Homo sapiens
actttggttcccgtgcagtctgggctccatttaaatgtagtttctcgttcattcatgcccagccctgattctttcatgagtctatttttctgtggcttatgtaggtatgacacaacctcaggctatcccagataattgactgatgggcgacaatagtgatgacgtgtcacactcagctgtgatccacagttcataaagtgacttctcgtatattttctcatcaaatctttacaaaaacctgaagaggctggtatgattactagccccattttatagatgggatgctggcctttatgtcagatacacgagggttcaaatcctggctcactcttcctcttactgtgtgacctarggtaagttgcttagcctctctgtgcctctgttctgttatctcagagtcatgaggcctacactgtccttgtgatccacatagcccttttctggtgtagcactttgccatcccaggccctgggatagaggaggctagtgagattcttggggtttccaattgaccaatgcatgtcagggaaatttcttcctcttagcaagtgtagatacatcccaagggcacctttctaggcaggggt

SEQ ID NO: 383842 - DNA, 464 bp, Homo sapiens
ctttattggagggagttagcatttctcaaatttgttgggatggttamaattaaggaaaggatagctttctgttgccatggagattaatgtgtcagtaacaagccatactgacgggtgcctgttgctcaagctggcacagacccttgttccctcatcatctctggataccatgggaaatcttcagtattttggagtccttgaggtctgtttgtgaataaatgctacctgtgagtgccatgtggtggatggtgagtctataacagctgcaaatcctttgtctgacaatgtcaccaacacttctcacttctgaaaacctcagctaagcaaaaatatgggcacagcacacaagaggcaagacaaacaaaatctgaaatgtcacttgttaaaagtgttctgagattttgttaatttatatctattgaaaaacagaactctatgccactgcatgcacaaaacccccaaag

SEQ ID NO: 383843 - DNA, 464 bp, Homo sapiens
ctttattggagggagttagcatttctcaaatttgttgggatggttacaattaaggaaaggatagctttctgttgccatggagattaatgtgtcagtaacaagccatactgacgggtgcctgttgctcaagctggcacagacccttgttccctcatcatctctggataccatgggaaatcttcagtattttggagtccttgaggtctgtttgtgaataaatgctacctgtgagtgycatgtggtggatggtgagtctataacagctgcaaatcctttgtctgacaatgtcaccaacacttctcacttctgaaaacctcagctaagcaaaaatatgggcacagcacacaagaggcaagacaaacaaaatctgaaatgtcacttgttaaaagtgttctgagattttgttaatttatatctattgaaaaacagaactctatgccactgcatgcacaaaacccccaaag

SEQ ID NO: 383844 - DNA, 464 bp, Homo sapiens
ctttattggagggagttagcatttctcaaatttgttgggatggttacaattaaggaaaggatagctttctgttgccatggagattaatgtgtcagtaacaagccatactgacgggtgcctgttgctcaagctggcacagacccttgttccctcatcatctctggataccatgggaaatcttcagtattttggagtccttgaggtctgtttgtgaataaatgctacctgtgagtgccatgtggtggatggtgagtctataacagytgcaaatcctttgtctgacaatgtcaccaacacttctcacttctgaaaacctcagctaagcaaaaatatgggcacagcacacaagaggcaagacaaacaaaatctgaaatgtcacttgttaaaagtgttctgagattttgttaatttatatctattgaaaaacagaactctatgccactgcatgcacaaaacccccaaag

SEQ ID NO: 383845 - DNA, 545 bp, Homo sapiens
ctaaaattgcctttgcacttggactggtttcctttgctgacctaatacagaatagctttttgtgctgtgactgcgagtgtgttgaacagatcctctgtattttaggagaagaaatttggtgcctcgttgctcaccatcaccactggccctggtagctctgcggataaaccagcttggatttcacccttgaggattaacattgcaacactgcataggcacataaagccacctgaaagtcaagatgaggcaggtaatgtgcactgggatctcatgtggttggtgtcttgtcttttgccatttgtcaagcacagcagctgaggttgctgaagcrggtgactttcaagagccgaacccactgcaagaagctctcctggaaaggggcatcaaggctgctgaccctcctcctgcccctccgctgaccaactccacacctgggattagaggggaggaaacctttatcccatactctcttatgttctattcctggggacctgcaaattaagctgataaaacacagattaacaaaggaaaaataatacaatttt

SEQ ID NO: 383846 - DNA, 630 bp, Homo sapiens
gcctagccaagagcaggcagcagtgggctttcttctggggaagccagtcacctgaacagcagtcactcctcacaagtcctacctacctgcagagtgtgccggaaggtgggcaggagatctatcagagtgggtctcattgaacagtctgggtcactgaaatagcagcttctcagactgatgctcctgatcgggatctcctgcaagaggattcgggccaagcgttcgtacttcatgatccgttcaaagaagaagttcaccttcagattggtggcctgcctggccagcttggcccaggacataccccagatgacctgtccgtgggggtcatgaacgtggcatttgatgttgatggtccggagggtgctggcattctcacacaagttctcaagcagctcgtcggagatacagttgtagttgargttcagggacacaagattgtggaatgtggacatggtctttttgaactgggggctgttgtagacagcaaggtgatggctgaaatagtcctcgatgttgagctctgagatcacattctcattcctcatgtagctgagggagtcgagaatttggcagccttgctccacggtcagcctggccccttttaggttgagataatccaggcgtttgccc

SEQ ID NO: 383847 - DNA, 490 bp, Homo sapiens
gcaggggcaagtgaatcacatttcccaattcaggamtgacattattcgtctgtgcaagacccctctctagttttatttattcatgtgttccattttaaccctctgtcccattccgttgcccccaccataggcaactgttcaagtgtgtttgacgtgtgtctttttgtctgtatgtgtgcttgccaaatgtgtacttactgtttgtcggacttattcctgtggctctgtgtacatttcacccattgcgtctagcagctgaatagaacccatggcaggtatcctgcctgtctcccatcctctttcctttgatggaccccaagtctcctccagctcccaccaacaccacagtggcagtgagcatcctcaagtaagcacagttgtgggcctccctagggaccttctccaggctttgtcctcactacgccatcactttctctcaccacccactcactgatttggcccctgtctccagctggccttcccaccgcca

SEQ ID NO: 383848 - DNA, 490 bp, Homo sapiens
gcaggggcaagtgaatcacatttcccaattcaggactgacattattcgtctgtgcaagacccctctctagttttatttattcatgtgttccattttaaccctctgtcccattccgttgcccccaccawaggcaactgttcaagtgtgtttgacgtgtgtctttttgtctgtatgtgtgcttgccaaatgtgtacttactgtttgtcggacttattcctgtggctctgtgtacatttcacccattgcgtctagcagctgaatagaacccatggcaggtatcctgcctgtctcccatcctctttcctttgatggaccccaagtctcctccagctcccaccaacaccacagtggcagtgagcatcctcaagtaagcacagttgtgggcctccctagggaccttctccaggctttgtcctcactacgccatcactttctctcaccacccactcactgatttggcccctgtctccagctggccttcccaccgcca

SEQ ID NO: 383849 - DNA, 619 bp, Homo sapiens
tcaatctaagacctcaaactatgaaactgctacaagaaaacattggggaaactctccagggcattgaactgggcaaagacttcttgagcaatacccacaagcacaggcaatctaagcaaacatagacaaatgggatcacatcaagttaaaaagtttctgtacaatgaaggaaacaatcaacaaagtgaagagacaacccacaggaagaatgggagaaaatatctgtaagctacccatatcacaagggattaataaataaacagaatatacagagctcaaacaactctataggaaaaaaaaatagtaatccaattaaaaaataggcaaargacttgaacagatatttctcaaaagaagacatataaatggcaaaataagtatattaaaaggtgctcaacatcactgatcatcagagaaatgcaaatcaaaaccacaatgagatattatctcaccccagttaaaacgatttttattcaaaagacaggcaatagcaaatgctggaaaggatgtagagaaaaggaaattctcatacacagttggtgggaatttaaagtagtacagccactgtagagaacagtttggaggttcctcaaaaaactaaaaatagagcttacatatg

SEQ ID NO: 383850 - DNA, 619 bp, Homo sapiens
ttgctcctaagctataaacctgcatagcatgttactgtactgaatattgtaggcaattgcaacacaatgataagtatttgtgtatctaaacacatctaaacatagaaaaggtatagtaaaaacactataaatgatacgaaatggtacacctacctagggtgcttatgaatggagcttgcaggactggaagttgctctgggtgagtgagtgagtgagtgagtgacaagtgaatgtgaagcctaggatattactgtatactaatgtagatgtttttaacactgtacactgagactacactaaatctgtaaaaaccataaagtaatcacactacaacagctatggtgtcataaagcaatagaaaattctcagctctattataatcttatgggaccactattgtacatgtgatctgttgttgaccaaaacattgttatgtggcacatgtataacaacatttagaaatatactttttgaggctctggaatcaaagccaaacatggacttgttacttgaatatgttttcatataatataccggtattaatggyttgtctaattcacatttggatttacatgtggctgccccacatttgctacactgagtgtcacctggcagtcat

SEQ ID NO: 383851 - DNA, 576 bp, Homo sapiens
tgtgtgcaaacgtcttttcttttatgattttatttttattcgccttccacaagcattcattgcctagcacagtgcctggtagtcatcatacaaagacaaaatgtgtcttgcccccaagagttttcaagtycagtagtataaatcaatgccatcaggtttgatgggtgttgtgatagatatgtgagcacaaatgaggctcattggactatatgcaacttgcttatctcaaggaaaggaacatctcccttaggtttgcttttgcatatagattatatcaatatgtgatgaaacttggcttattttaagcattttgtcatttgcagaatagcttaacactgatggacaggttgaaagtcaaaggtttaattcatttgatcttaggacaagcagatattgattgggtttttttttttctgatgccaaagattgaatttagactcaaggtaagctcaaacaaaatagtgaattcactattttacagagttgggaagttcaacattgcactggcttcaggcatggctagctctaggggcttaaacacagcttttttcttttctccttccttctctttctttt

SEQ ID NO: 383852 - DNA, 593 bp, Homo sapiens
atatatacctgcaaagttgtgtgcaaacgtcttttcttttatgattttatttttattcgccttccacaagcattcattgcctagcacagtgcctggtagtcatcatacaaagacaaaatgtgtcttgcccccaagagttttcaagtccagtagtataaatcaatgccatcaggtttgatgggtgttgtgatagatatgtgagcacaaatgaggctcattggactatatgcaacttgcttatctcaaggaaaggaacatctcccttaggtttgcttttgcatatagattatatcaatatgtgatgaawcttggcttattttaagcattttgtcatttgcagaatagcttaacactgatggacaggttgaaagtcaaaggtttaattcatttgatcttaggacaagcagatattgattgggtttttttttttctgatgccaaagattgaatttagactcaaggtaagctcaaacaaaatagtgaattcactattttacagagttgggaagttcaacattgcactggcttcaggcatggctagctctaggggcttaaacacagcttttttcttttctccttccttctctttctttt

SEQ ID NO: 383853 - DNA, 511 bp, Homo sapiens
tatctcacatagagaagatgtgattcagatagaaaatgaaggatctcactagccataaaagaaagaaacaatattacacagttaaagtcttgccaacaggaccaaagtatggctctacagtctttgtggtctgagacacctctctgttctattcctaaatttcaaaattgattcttctgtatttagttcttggcaagattatcagacaagccaatctgtaggattgtttgaattcygtatgtttggcatttgaattaaagtaaggataaattataacatttaaagttctttgaggcaagagtttgaaggtcctcacccccttttcttttattacttactatttgtcttcgttggctctgatgatgtattttcaacaacatggagctaataatgacataataataactattagttcaatctatacattggccagttagtttcatttgattttatggccattatttttaggccacacatctcaccaacttctacttttaattgcaatggagct

SEQ ID NO: 383854 - DNA, 563 bp, Homo sapiens
aatttgaaagtcctacacatacttaatagattaaagacccttaatgttgtcaagggtctgaagttccattgggtctatttgctcttggataatgggtgcagtatttctgtctctaaactccttgggacaccctaggcaagctggcattcgaagcagttagccatacccctgaatccaaacagttctatttaataaatccctatttctgtccactgtgctgaagaaaattctgtttattggatgtagtaatgaaagtggaaatatgactggcygtctattcccttctgcaagccccctcaggttctgggttgactaatgtctggggtctccgtcttagaccacctgcagtgattctcacctccaggtattcatgcccctgtgtagtcctcttcccttgagtgcagatgggacttgtgacttgcttctaaataatagaatacagcaaagatgatgagatcactgatgtaagtttggttttgctagcagactctctctctctctctctctctcactgattttaataaaacaagctgccatgttgtgcactgctgtatgcagaggcc

SEQ ID NO: 383855 - DNA, 578 bp, Homo sapiens
agtgactcacacctgtaatcccagaagtttaggagtctgaggcaggaggatcatttgaggccaggagttcgagatcggcctgggcaatataatgagaccccatttctacaaaaaaaattwaaaaattagctgggtgtggtggtgcctgcctgtggtcccagctacatgggaggctgaagcaggaggaatgctcaaattcaggaggttgatgctgccatgagccacgttcacaccactgtactccaggctgagtgaccaagcaagaccctgcctcaaaaacacaaaacaaaacaaaaaatgacaaaaaaacacacaacttgagttttctctctcatcatccctataaactttagtcaaggtaggtaacctcagctgcctcaggaggcaagtcccagcaggctcctgactttctgctccatcttaggcaatcaatgtccctaaggcccattgcaaacacaatctcattgcaggagttaatactcggccctcctccattcagaaattggaataagcagtctctttttgaaaaattaaaatatataaaaactattgtaagggcaacggctctcacttagcaa

SEQ ID NO: 383856 - DNA, 616 bp, Homo sapiens
gacacagtctttgtaggtaggtaagagccatctctgtgagtagtaggtgaggtaaatacaatgtacaaagcatgtaaaactgttaagccattatatatgtttacgatacataaataacccaaagaaattgcagtggctaatggccagcttcctgcagcatcagtgcccacttttttacttcgtgctgttaaataacaaacattaacctactagtcataatctgttctattgggatcatgatttgataaagcatagttttgggtatagatacagtagggtgcaaaagtatgtctcagcaatatgcaatctatttttgttattctttagttttaaaaaatagggcacagtggctcatgcctgtaatctcatcactttgggaggctgagatggtcaaataacttgagctcaggagtttgagaccagcctgggcgacatgatgaagccctgtctctacataaaacaaaatgaaagaaaagaaaaaactagccaggtggggtggcrtgtgcctatactctcagctacttgggaggctgaggtagtaggataacttgagcctgggaggacaaggctgcaaggaactttgctcgtgccactgcactccagcctgcctgggtga

SEQ ID NO: 383857 - DNA, 568 bp, Homo sapiens
attttgcatttctgttttgtaatctttctttagagaggtgatgtgttagtttgctacggctgccattacaaagcaccccagactgggtgatttaaacaacacagttctggaggctagaagtgcaagatcaaggtgctggcagggtcgctttcatctccttgtgtctacacataatgtctcctctgcacatgtctgtgtcctaatttcttcttatatggacaccagttatattggctttgggctcaccccatgacctaatttaactttagctctttaaggactcaatatccaaatacagtcacattctgaggtactggtgattagaatttcaacatatgaattttagtggtgcaggaayacagttcagcctacaacaagtgattacatcatttaattcttttcctgaattcttgacaaagtacttagttatttgagtctgttccttttgctacattttgtggtcagtattcttcatctaattgtaaaatttgctgtttccctctgtattttttaaatcatattttcatattgattctgtgagaatttcttttatattactcactgaata

SEQ ID NO: 383858 - DNA, 524 bp, Homo sapiens
agttactttacattggtgcaatgagtagagtgtcattaagcaagatggagagaattccaattgatgatgcttggtttttggtggatgatacaactgggagaggaaactacacaggcaaaaacatgagatttatatttagggaatgattagatggcatcctgctgcagattacagacagtcatgtagattagtacagaaaccatgaccttatgaggatcaaagacaaaagtcacagtatggtacacaaggtatggctgaacttcatgggtactggatgcagaaaaccaccaggagccaagtgctccagactattcttgcctagtctctgttcttctgctctcttctcctttctgcatcacctagtttcttcttcttacttatgatttcttttccatttactgcttcagcttgagtttggggttgatgtaaacttgactttatctcatttttttttcattatcaacacctgatgatgtccactgctcaacctctggaaaytctatattcacattccttggaggaat

SEQ ID NO: 383859 - DNA, 574 bp, Homo sapiens
tcacaagacgctgtgcagacaacccccagtaccagcccagaaccagktagacttgctgggtggctacacccagaagagagataacaatcactgcagcttggctcacaggaagccacatccataggaaaagggagagggtactacatcaagggagcaccacatggtacaaaagaatctgaagaacagccttcagccctagaccttccctctgacagagcctaccccaatgagaaggaaccagaagaccaactctggtaatatgacaaaacaaggctctttaacatcccctaaaaaaatcacactagctcaccagcaatggatctaaaccaagaagtaatccctgatttacctgaaaaagaattcaagagattagttattaagctaatcagggaggcaccagagaaaggtaaagcacaatgcaaagaaatccaaaaaaaagattcaagaagtgaagggagaaatattcaaggaaatagatagcataaagaaaaaacaatcaaaacttcaggaaccattgaacacacttatagaaatgcaagatgctctggaaagtctcagcaatagaattgaacaa

SEQ ID NO: 383860 - DNA, 411 bp, Homo sapiens
caaaaaataaattctgagatgcctataagagaatgaaaattggcacaggttggctttgaagacaaaaagaagaatcttctagagctcttgactggtaacaatcagcttattaacctaaaccttttcctaatattcctcttaaaagtgtgagtttcaccctagagaaggaagttatatttatattgsacatgagagaaaattcttatataaattcttggctgaactaggtccatagaaaagaaaaaacatctcaggtataaaaataaagtgtggtggtagaagtacactctgtaccgtaatagctatttcacactttcagaaagttgattccagcatggtttctaattacaagagagagacataagctaattagttattgagtctctatgttcttctttaaggaaagccatc

SEQ ID NO: 383861 - DNA, 411 bp, Homo sapiens
caaaaaataaattctgagatgcctataagagaatgaaaattggcacaggttggctttgaagacaaaaagaagaatcttctagagctcttgactggtaacaatcagcttattaacctaaaccttttcctaatattcctcttaaaagtgtgagtttcaccctagagaaggaagttatatttatattgcacatgagagaaaattcttatataaattcttggctgaactaggtccayagaaaagaaaaaacatctcaggtataaaaataaagtgtggtggtagaagtacactctgtaccgtaatagctatttcacactttcagaaagttgattccagcatggtttctaattacaagagagagacataagctaattagttattgagtctctatgttcttctttaaggaaagccatc

SEQ ID NO: 383862 - DNA, 583 bp, Homo sapiens
agatatggctaataatcctgatttaatgacgtgacattgtacacgtatttcaaaatatcacattgaactctttaaatatatacaaaaataaataaaataaataaaatgtcaaatcatgtcatcccttcactcagatttctcatatatctccctaytttattaaagtaaaattcaaaaatccctatggttgcttacaatattcctcaataccttccagacctcaattcccctactctttcccatcactctggtccagccacaatggcctcttgtgttcctctaacaccctacatacctctatctggaaggctcacccgagcaaaacctttcccagaaagctaactcttccaatcactgtttgcatgtcactttctacttgaagcctcccatagtgccctattcaatactgcaacctgcctccagatcttcatcctggtgtcctaatcctccttatgctattctgtttttccatagtacatactttattttgctatacttattgtatgttgtttgtcacatcccactggaacctaagctccagagtacaagaatctcaactgtaagcacatagaacaatgcctga

SEQ ID NO: 383863 - DNA, 583 bp, Homo sapiens
agatatggctaataatcctgatttaatgacgtgacattgtacacgtatttcaaaatatcacattgaactctttaaatatatacaaaaataaataaaataaataaaatgtcaaatcatgtcatcccttcactcagatttctcatatatctccctattttattaaagtaaaattcaaaaatccctatggttgcttacaatattcctcaataccttccagacctcaattcccctactctttcccatcactctggtycagccacaatggcctcttgtgttcctctaacaccctacatacctctatctggaaggctcacccgagcaaaacctttcccagaaagctaactcttccaatcactgtttgcatgtcactttctacttgaagcctcccatagtgccctattcaatactgcaacctgcctccagatcttcatcctggtgtcctaatcctccttatgctattctgtttttccatagtacatactttattttgctatacttattgtatgttgtttgtcacatcccactggaacctaagctccagagtacaagaatctcaactgtaagcacatagaacaatgcctga

SEQ ID NO: 383864 - DNA, 581 bp, Homo sapiens
atatggctaataatcctgatttaatgacgtgacattgtacacgtatttcaaaatatcacattgaactctttaaatatatacaaaaataaataaaataaataaaatgtcaaatcatgtcatcccttcactcagatttctcatatatctccctattttattaaagtaaaattcaaaaatccctatggttgcttacaatattcctcaataccttccagacctcaattcccctactctttcccatcactctggtccagccacaatggcctcttgtgttcctctaacaccctacatacctctatctggaaggctcacccgagcaaaacctttcccaraaagctaactcttccaatcactgtttgcatgtcactttctacttgaagcctcccatagtgccctattcaatactgcaacctgcctccagatcttcatcctggtgtcctaatcctccttatgctattctgtttttccatagtacatactttattttgctatacttattgtatgttgtttgtcacatcccactggaacctaagctccagagtacaagaatctcaactgtaagcacatagaacaatgcctga

SEQ ID NO: 383865 - DNA, 583 bp, Homo sapiens
agatatggctaataatcctgatttaatgacgtgacattgtacacgtatttcaaaatatcacattgaactctttaaatatatacaaaaataaataaaataaataaaatgtcaaatcatgtcatcccttcactcagatttctcatatatctccctattttattaaagtaaaattcaaaaatccctatggttgcttacaatattcctcaataccttccagacctcaattcccctactctttcccatcactctggtccagccacaatggcctcttgtgttcctctaacaccctacatacctctatctggaaggctcacccgagcaaaacctttcccagaaagctaactcttccaatcactgtttgmatgtcactttctacttgaagcctcccatagtgccctattcaatactgcaacctgcctccagatcttcatcctggtgtcctaatcctccttatgctattctgtttttccatagtacatactttattttgctatacttattgtatgttgtttgtcacatcccactggaacctaagctccagagtacaagaatctcaactgtaagcacatagaacaatgcctga

SEQ ID NO: 383866 - DNA, 583 bp, Homo sapiens
agatatggctaataatcctgatttaatgacgtgacattgtacacgtatttcaaaatatcacattgaactctttaaatatatacaaaaataaataaaataaataaaatgtcaaatcatgtcatcccttcactcagatttctcatatatctccctattttattaaagtaaaattcaaaaatccctatggttgcttacaatattcctcaataccttccagacctcaattcccctactctttcccatcactctggtccagccacaatggcctcttgtgttcctctaacaccctacatacctctatctggaaggctcacccgagcaaaacctttcccagaaagctaactcttccaatcactgtttgcatgtcactttctacttgaagcctcccatagtgcyctattcaatactgcaacctgcctccagatcttcatcctggtgtcctaatcctccttatgctattctgtttttccatagtacatactttattttgctatacttattgtatgttgtttgtcacatcccactggaacctaagctccagagtacaagaatctcaactgtaagcacatagaacaatgcctga

SEQ ID NO: 383867 - DNA, 557 bp, Homo sapiens
tgtctttgacccaaacaccaatgggcttagcaagcttaattggactatgagtggaccacaagaatttcttgacccatcaagtttaaagcctagaggagaaataggccaagtaatcacttcaaccctctccccctagatctcgtgggcgtagctagccttctggatccaattattctgacaatgagagagatataccagtgtagagccaaaattattataaatgaatcaaattaggcagttatttggagcctcaccatgaaagaataaagctagatttcagatctagagtaaaatarctaccaacatcttcaataacgcagattgtcatccctgaacatgtttttactccactcctcaagtggagtttatgttaattatgcaataaatatgcatacttgctgcaaattgagggttgaaatggatttgagaccttaccaaataaaacaggccaaataaaaacattctgtatactacgtaaaatataaaatgtgcaataatacaggaaacaattaaaaaattaaattttcacttttgtgaaagttggtatctaactaaca

SEQ ID NO: 383868 - DNA, 659 bp, Homo sapiens
atagctataaaccatagatctgtaatgaaaaatacacttaagtcttgtgaggagatcttggaataatgacacagaagagaaatagtatccagtatcaatcatagtgccaagaaagactctcaataaatatttggaaaatcagtgratgagggtagctctaaagagtgagaaggagtttgccaattggtcaggtttaaggagggcattcccagcaggaaatccctatgcaaaggctcagaggtaggagaggtgcaggaaaagatgatggagcataaagttggaagttgagtcatagataaaattgtctttgaaggtgatgaaccagatgatgaagagacttcttccatgaaaagaagttagattttatcttgcagatgctagaaagccattcatttaactataaaactactatttttcaaattacacatattgtgtgccagggacctatgatctgcatacagagttagtatattcccattttagggttgggaaactaagacttagattaattaacttgcccaggttttcactgctactaagtggaagaactagaattcaaacgtggtcagttgagtccatatctccagtctgctttttaaactatattttacagactatccaacaaggaagaagctatatatttttactttctcttcagc

SEQ ID NO: 383869 - DNA, 540 bp, Homo sapiens
tactctaaaaatactttttaattttttttttttttttgagacggagtttcgctcttgttgcccaggctggagtgcaatggcgcaatctcggctcactgcaacctctgcctcccggattctcctgcctcagcctcccgagtagctgggattataggcatgtgccatcacgcctggctaattttgtatttttagtagagacagggtttctgtatgttggtcaggctggtcttgaactcccgacctcaggtgatccacccccctcagcctcccaaagtgctgggattacaggtgtaagccaccgtgcccagcctaaattcattttattttttaagagaccagataggctgggcgccatggctcatgcctgtaatcctagcactttgggaagccaaggccagtggatggcktgagctccggagtgagaccagcctgggcaacatagtgaaccctacccctacagaaaaaaacgtacaaaaaattagcccaacttggtagtgcgactgtggtcccagctactcaggaggctgagttggaggatca

SEQ ID NO: 383870 - DNA, 622 bp, Homo sapiens
tctttaaattactattgtacttgcaacagctacaggtatcctatccataggcttctaatttttagagaatagaggtttttttggttgttttttaactgaagagccaaacactatattgagttttagcttatttactttctaaggctctggaaatgtctgacacatattgaatactttctamattggcaattttacatttcaacttaattttcattattaaattctctatttcgggatggatccaatttacaataagagaagatacagttctctacttcagctatagttttatggtagcttcttgagtatttcgtgaagtctatttttcatctttgctttgtttataatttgaaccttttaaatttttctatcaaaatgttttcttaagtttccttattgtagttaattttaaatttttattgctgttttaagacaatgtttaaaaattttacataattggttgacaaatctttcctatctttctgcttactaagcattttctgtaactaagaggctaacacttagctgaactagttggtacagatctgtggtagaagaaaccaagtatgtaataaaattttgacttccataacaatgatctaccaatattctgaaaatttag

SEQ ID NO: 383871 - DNA, 614 bp, Homo sapiens
gcaggggaggtctccatttctcccccaagttctggagaattcagggtgatattcttgcctttgaatattttccagttgtatttttgttgtggaactgatactggggaatcttctactccacaatcttgctgatgtcactgtactgttcatatttctatcagcatcctaatcacaaccacttaggcaataactaaggagttgcaaactttctttagtcttcttgtctgctaagccctcaaaatctaggctttttctagcttgtttctacaaattcttccaaactttttccattacccagttccaaagccacttccacattttcaggtatttgttatcagcaacaccccacttctctgtaccagttttctgtattagcttgttttctgttgcttgtaacagaatatttgaaaatgcataatttaaaagaaaaagaatttgtttcwtacaattatggaggctaaggagtctcaagttgaggggcgatagctggtgagagccttcttgctggtggggcctctttgaagagtcccaaggcagttcaaggcatcacatgatgagggggctgaacatgttagctcagatttctagtccttgtcttataaatccaccagtcc

SEQ ID NO: 383872 - DNA, 635 bp, Homo sapiens
acctcatacttaaaaatcttctctaacaagagaggtattgttttagcattttgataaataactttttgtttttaagcccaggccattcagcccacctgtaacttccaacaccagcccacctcctgctgcaccattagcccgggcagaaagttcttcttctatctcatcatctgcttcattgagtgctgccaatactccaacagtaggtaagtgattatcatcaattacatgtgaaatgtagtgtacaaagtatatgtatgstaaatatgtatatatttttaaatgggctaatgaagaatttaacattataaattttgtttttctggaaacacacctggaatttattaaactgtccatgctttgcttttctgtttcacagtctatgttatctggatagaagaattttaactgtggttagcaccgttaagaatgagttaaatttataaattgctgatcaatataaatagttgaaggcaaaacaaaatgcagttcttccttctgtgaactgatagttgcgtttctaagaaagtttatgttttaaaaacaatagtgttttgaaaatgattgaatgaaagaaaacaatttgtgcttgcagtgaattatatttttccacaagaatttcaagacttaaaaat

SEQ ID NO: 383873 - DNA, 570 bp, Homo sapiens
tcttcttaccacagtgtggaaaaacctttgaaactgctttttaatatgggtaaatgactaactgaattaatataatttatttctatttaagttacatgctttttagaaacacaagagagtaaaagtggattactttaaaaaacagcctatacttccccagtccttttcacagtgcacggagttaaaaagcacctagcagttatgaaaatgcatgagaattagtataactgtttggattcataagcatccgtgaatctaatgtaagccatgttcattttgttgttcgcattcagtcagtatgaaaactgccctgcaagcctgttcagtgcatagtgtcatagcaggyaatgtgtcaggagcacaaaggatgtaggaaatttactcctgccaccaaggaagtgatagggcactgatacagtattatcccagagaagattggtttattctgttttgattcctggagaaatttactcaaatggataaattcactttactggacaacagagaccaaactaaggacatccaaaaagatattatctatggcagtgccttccattgtcactggcaagc

SEQ ID NO: 383874 - DNA, 523 bp, Homo sapiens
aggggttgtaaacaggaaacttagagcaggcacagggccaaaaacaggcagggtacccaggtacccattggagatggcaaactctcacacctagaagaaatgcttttgacacatattatccagccctttttgacacacccccttctccatcatcatcagaaggargacactgttattaatagacagacagaggtcctgaaaaacaaatttgaacagacatccaggaatgacaagatttttaaggaaaacaaacactataaaaaggagataccaaatataacaaatgattaatacttgaagaacaaatgttaaaagtgataaaaaatttaaaatatatgtgatcaatatatgcaaagagatttatgagtctgcatattcataaaacaatttttgtctgcaacataaaggaagcagccagatttgttggaagtaaaaatgttatcaatcaaataaaaatagatgggttaattagtgttgggagacaattctccattggtctctcacattcggcacatcttgcaaa

SEQ ID NO: 383875 - DNA, 523 bp, Homo sapiens
aggggttgtaaacaggaaacttagagcaggcacagggccaaaaacaggcagggtacccaggtacccattggagatggcaaactctcacacctagaagaaatgcttttgacacatattatccagccctttttgacacacccccttctccatcatcatcagaaggaggacactgttattaatagacagacagaggtcctgaaaaacaaatttgaayagacatccaggaatgacaagatttttaaggaaaacaaacactataaaaaggagataccaaatataacaaatgattaatacttgaagaacaaatgttaaaagtgataaaaaatttaaaatatatgtgatcaatatatgcaaagagatttatgagtctgcatattcataaaacaatttttgtctgcaacataaaggaagcagccagatttgttggaagtaaaaatgttatcaatcaaataaaaatagatgggttaattagtgttgggagacaattctccattggtctctcacattcggcacatcttgcaaa

SEQ ID NO: 383876 - DNA, 523 bp, Homo sapiens
aggggttgtaaacaggaaacttagagcaggcacagggccaaaaacaggcagggtacccaggtacccattggagatggcaaactctcacacctagaagaaatgcttttgacacatattatccagccctttttgacacacccccttctccatcatcatcagaaggaggacactgttattaatagacagacagaggtcctgaaaaacaaatttgaacagacatccaggaatgacaagatttttaaggaaaacaaacactataaaaaggagataccaaatataacaaatgaytaatacttgaagaacaaatgttaaaagtgataaaaaatttaaaatatatgtgatcaatatatgcaaagagatttatgagtctgcatattcataaaacaatttttgtctgcaacataaaggaagcagccagatttgttggaagtaaaaatgttatcaatcaaataaaaatagatgggttaattagtgttgggagacaattctccattggtctctcacattcggcacatcttgcaaa

SEQ ID NO: 383877 - DNA, 584 bp, Homo sapiens
tttctccttggtttcttgatatagggaatgacattgattcttgaaagttgaaccagtcgtgcattcctggcataatcctcctgttggtctggctgtattgtcgtctgtctgtctatctatctatctatctatctatctatctatctatctatctatcatctatctatctatcatctatctatctatctatctggttgtattttactcactagtgttttgttcaacaatccttttgaatatcttggtgattgttttgaattttcattagctctttttttttattctgttgttgtttttctaagaatactctatcttgtttgttgaggatgcaatatctttccaaatgtactagagtataattagaactatattttctccagtgtcagtgtttctgatttgcttttttgatagtctttctctttcaagttgtagactctcctcaaatatctagtgatccttgtttgtttgttcctagttaagaatragctggttaaagctgattgtcatttaacttatggcttcatctttgggtaaatgtatgaggagcacagaataggttctgacattagaattttgtggcataa

SEQ ID NO: 383878 - DNA, 553 bp, Homo sapiens
gcttcttgagggtttattttcctgaagccttcttttttttaaaaaaaactattttataaaaaataatacgtataaacagaacttttatgcagatacgtagaaaggggaaaagatgatttatgccagaagtaaacatcytaacatttttgtatatttccttggcagattaaaaaataagtatatgaatatacatatacacaggcaaatatatatgtgtatatagagagagaaagagagagcaagtaagcagcatataatatatgtattacactggagttcacttttttacctaacaacataccacctattagcttaccctttctaagtgaattagcctcctgagtcttagttttcttatctataaattgaggataacagtgcctagctgatagtgttgttgtgatgagtgaagttattcataataaagtctccagtatggttatgtacggaaaaagattaatgcattcagatgcttgtccaagtttcttctttactcataatagtttgatgcagagattgcatactagtggcatgtggtccaaatgtggccaca

SEQ ID NO: 383879 - DNA, 447 bp, Homo sapiens
gggaggaagggaggggaggtaattgagattgcaggaaagagaaagggtcagggagctgactaagcactaacctgttatcttcttatatttggggagattcaaccagcagaagagccctttctctcagtctctgggacatctaaacacctggaggatagcagcacaccaaggtctgggcctgagagctgatgcctcctttctctagtctttgatagggaaaactcactctcaagcttgtgtgaagttctggtcaggcgcrgtggctcacacctgtaatcccagcactttggcaggtgaaggtgtgtggattacttgagctcaggagttcaagaccagcctgggcaacatggcaaaactctgtctttacaaaatattaggtggcatgtgcctgtagtctcaactacttgggaggctgaagtgggaggatcacctgagcccaggaagttg

SEQ ID NO: 383880 - DNA, 518 bp, Homo sapiens
tggtagcgctccaaatatgctctcttgctcttcagaaactgagtctgaaagggtgaggggaagtaggtctggaaatagagcttccatggccaggcttgcctatgraaataaatacttgccttggacaaagagacttgccattttggtgccttctgctttaaacaattcctaggttccttagctggagatctggggagctgactccaggggtcagtgaaagcccctgtttatgtactccgaaacaggaaactttctgatgagaaatgtttggtaaaaaaaaaaaaactcacttcttttccagcttgtccaagagttcaacacacaagtggccctgtaccgagagctggtcatttctattggggatgtctcggtcagctgcccctcactccgggcggaaatgcacaagacaagaaccaaaggctgtgaaatggcccgtcaggcacaccaaaaattggctgccatctcagggtaggagactcggcattatttggtaatccatatacatgatgcatggatgc

SEQ ID NO: 383881 - DNA, 515 bp, Homo sapiens
tattatagctatgttaccccggctggtcttaaacttctgcactcaagtaatcctcccgcctcaggctccagagtagctgggactacaagaatgcaccatggtacctggcttgaggtggattttatttactctggtgtttttagctctttgctacttgtttgcatgttatctgtgtgttgatgttaatgggggcagttttataagaattagtgggaaaataagatgttcttagagccttgccaaaggaaaaccaactccataaaatattctaggatagaacttgacacatttccccccttacaataataattaaatgcaatttaacattygttataaaaaatgacagcaatataattgaaggaaatccctttagttcctcaccatctgggctccgttaatgaaggatgtgattccctttggcggaattccgtttctgatatcatttgttatgtgggttcttgtttcaagcttgatgtgaaggctggtagggaggctgtaggagtcactttaaagtt

SEQ ID NO: 383882 - DNA, 477 bp, Homo sapiens
ttcatccctgaccaactgaaaccctcaaggaatggtggagctcacgggagaagaaaactcagactatgttttttctaactggccctgtttaagaaggccatctccacaaatacaatcaacacrctttctcaaattgtgtttggatcagcagagttcaggcacagccttttctttcaaaggcatcagatatctgcattctggacagacccagccaggtgaatacaaagtatcctctgactgtcttgatttactaaagttatgtctttacaactctgaccctgtcccagacattaaagctaagaggggccttaaagatcacttgcaagaatgggcctcaaacttttttagcagcaaatcctcccttcaatctaaatgtagaaagccatatttataagacagtcgcagtggcatatactctgcactgcttggggtgtgtgtgtatgtgtccacgtgcctatcagagtagtcagtcctgcc

SEQ ID NO: 383883 - DNA, 477 bp, Homo sapiens
ttcatccctgaccaactgaaaccctcaaggaatggtggagctcacgggagaagaaaactcagactatgttttttctaactggccctgtttaagaaggccatctccacaaatacaatcaacacgctttctcaaattgtgtttggatcagcagagttcaggcacagccttttctttcaaaggcatcagatatctgcattctsgacagacccagccaggtgaatacaaagtatcctctgactgtcttgatttactaaagttatgtctttacaactctgaccctgtcccagacattaaagctaagaggggccttaaagatcacttgcaagaatgggcctcaaacttttttagcagcaaatcctcccttcaatctaaatgtagaaagccatatttataagacagtcgcagtggcatatactctgcactgcttggggtgtgtgtgtatgtgtccacgtgcctatcagagtagtcagtcctgcc

SEQ ID NO: 383884 - DNA, 640 bp, Homo sapiens
ggtgaggttttctacagagagaaaagcctggctccaaaagatcatctgaggacacggagttatgctatgtctcaggtactcaaccgctcagtgattaaaaagtatattatgaaaacatagtgtgctgtggacatgtgaggtctactggagatggagaagctgggttccaaaaagtcatctgaggacatggagtttggctataccccaggtayacatctgctgagtaataatattatacaatgagaacatagagtgcttttttcattgttagataaaagcccataatgttgtggcataatttgtaatagtacacatgtactttcctgttgataaaacttagcctgggcttttaaaggtttcctccccatctcttccccgaaaacctctgctagtgacacgtaaagatagttgatttgtttctgggaagataaaattagcaattcttactgggaacctgtaatatctctagaatcctgatcctcttaaaacttcttgcatctttttctgtaataatttttattataattacaattagtagagatctttggaattgtcttaaactctcataacacacatacctgtggctgtattaatcagttacagtaaaggtaccacattcagcaaagcagctactattgga

SEQ ID NO: 383885 - DNA, 564 bp, Homo sapiens
atatgctactccaatgttattaataaaggagttctctaaattacctaaataccctatgttgtttgaaaaattctctctaattcttgcatagcaacatacgctcaaaatcatgtgagaacaagcctaccatacatgtgcacaaacaagatttttttcaggatctgtgaatttttatcttcattttcccagaagcagrtgctggaaacctcagtgcctaggacacagaaaagtgcataataaatgtaggctgaaccaatgaatgagtgaatgaatgaatgaacaaacgaataaggagcatatttccatactgtgccctagaatggctgtgaccttattgcatggggtgacttcttcacggactgcagctagattagaaaatgaatgagtgtaatcccacagacctcctaatttggaagatgtcgaacaacaaactccccaggtgcaagttttgtatttttttttctcagtgtgcagattgattgagtctccaatgactctgttatttaccacagatttttaaaattaagattgaataaagtattctttttaaaatagcttgtaatt

SEQ ID NO: 383886 - DNA, 564 bp, Homo sapiens
atatgctactccaatgttattaataaaggagttctctaaattacctaaataccctatgttgtttgaaaaattctctctaattcttgcatagcaacatacgctcaaaatcatgtgagaacaagcctaccatacatgtgcacaaacaagatttttttcaggatctgtgaatttttatcttcattttcccagaagcagatgctggaaacctcagtgcctaggacacagaaaagtgcataataaatgtaggctgaaccaatgaatgagtgaatgaatgaatgaacaaacgaataaggagcatatttccatactgtgccctagaatggctgtgaccttattgcatggggtgacttcttcacggactgcagctagattagaaaatgaatgagtgtaatcccacagacctcctaatttggaagatgtcgaacaacaaactccccaggtgcaagttttgtatttttttttctcagtgtgcagattgattgagtctccaatgactytgttatttaccacagatttttaaaattaagattgaataaagtattctttttaaaatagcttgtaatt

SEQ ID NO: 383887 - DNA, 570 bp, Homo sapiens
acaccaattgaagataaatgatgaaataaaaatggaggagatagatgtccatttacaagtgatagaagaatctgcttggtcctagctctgcttactcagaaattcttcacaataaataacaggatggctggagaggggcacctgtggggtcgtgggcaagatcgtgggctagaagtcaggagatctggctgctcattccaactcagttgctcacaagctgtgtgactaaggcaagtcacctcacctctcagggcttcagtttcctcatatgtaaaacagggataataattcccagcacatagaggtgttagaaaggattaaatgacataattttggtggaagcacattacatcttgcaaatcactagaatatccacagtcatrgtggggtccaccctttcagtaaagggtaattgtgcctcttgggagcctctcattctccaagatatcaaggagtaggatacagcacacctttagctctaaagttgaagtctaaaaccacaacaaaaaccctgtaagggacttcataagacatctaggaaggaatacagtcccaatagctgttctttct

SEQ ID NO: 383888 - DNA, 561 bp, Homo sapiens
gttacagtagatagaaggagtaagttctggtgttctattgcacagtaagtagcatgactatagttaaccataatgtattttatatttcaaaatagctagaacagagtattctgaatgttctcaccacaaataaatgataaatatttgaggtaatagatctgtcaactactctgatttaatcattatacaatatatacatgtatcaaaacatcacactatataccataatatgtacaattattatgtgtccattaaaaataaaataaaattttaaaaaatwtctgcctatgagccaccaggggccaatgttgtatgtaggtgaaaataggcagctgatgttgggatgatgaaccagcatagaaaagacctgtctgccttaaaatattttccctttaccctccttttagattaagacattatcttcagattttgctctgaaaataaatgtattagtagataatatacaaggatcaatttttattacatgaaccattaatgcccattatctgttcagaatctagcaggtccatgagggaataggacacagtcagagactgtgaa

SEQ ID NO: 383889 - DNA, 557 bp, Homo sapiens
catgcattcacacataaacacgcatacagagtagtattttcattctttttagtgaccgagtagacaagggataggtagttttattcccaggtctgcattggctgcacctgcaggatttcatgccttgttgccactggaatgttccttgctgatggcatgtccttaacacctggtgatctctactccyagtcctgctgtagctcctcgatttgccacctggtctccttctgccatccactcttactttttgtcttttcagaactgatttttgaaaaggcaacaacaactcttctctgctagctatctgtttataaataaaggggatttccccatccagactgctttcttgttgcatttggtcatttcacgcaaatgaaatgcagtcacctcttaactgagcagctcatttggtcttcactgcctcctgtcttcactgtcagtttctgctctgcttccttctctgcctatttttaaaaaataatcagaaaaactgctgccccctgctctagtgcctaaacttctgtgtacaactcgtaaaaagaaaatacctgatagta

SEQ ID NO: 383890 - DNA, 492 bp, Homo sapiens
cacttggactccaagaatgcaaaatgtgcttggaaaagggctgcctgcctgcatcagaaagactgaaagcgggatccctggaagagccctgagtggagggtcccttgaaaaggggtttsagaaattagaaacgctatatgtttccggctaaaaggggaagctgagtgaggggaagcgaaaatctgtatttgagaaatagattaattttttttcattgctgggttttcagcagtgagttcatttcgttgggggtttgagggggctgaaagatatgagggggtccttgtgcagcttgaaactgagaagagtttgtctgtttctaacttcgcaaaagcaaagggtttcatttactcctaacagagaacaggtgacagggctggaaaagctccaaccaaaacacaattatacgctggtgttagtttggggagtttatttgtgtgtgagtgtttgtatgctttgttccttgaaactttatgtatacaaaagttctct

SEQ ID NO: 383891 - DNA, 492 bp, Homo sapiens
cacttggactccaagaatgcaaaatgtgcttggaaaagggctgcctgcctgcatcagaaagactgaaagcgggatccctggaagagccctgagtggagggtcccttgaaaaggggtttgagaaattagaaacgctatatgtttccggctaaaaggggaagctgagtgaggggaagcgaaaatctgtatttgagaaatagattaattttttttcattgctgggttttcagcagtgagttcatttcgttgggggtttgagggggctgaaagatatgagggggtccttgtgcagcttgaaactgagaagagtttgtctgtttctaacttcgcaaaagcaaagggtttcatttactcctaacagagaacrggtgacagggctggaaaagctccaaccaaaacacaattatacgctggtgttagtttggggagtttatttgtgtgtgagtgtttgtatgctttgttccttgaaactttatgtatacaaaagttctct

SEQ ID NO: 383892 - DNA, 626 bp, Homo sapiens
aatatgacccagtgcctaacccgttgatactttattagatgccattaaaactttagagagctgggagattattaaggcctacatttggaacctggaatcttttcctttgggaacctggaatctcaactcaaggattctgtagcttgcttttttgcctgtatctaagattgctctattttgtgataatgtaaacttaatggaagaaaattacttcatagatgctagacattcaagaattaaatccccttttcatgttagctagtgtcaaaacatttgtttaaacatggtttmtaaattttgatggggtagcatacatggttttattttattctgtagatgtagtgaaaaaatattttattttgatacattaacaaggaagataagacagcattcattttgagtatttgctatagaatataccctgcattggactgtgcgtggagtctggtatttgtatgtttcaaggaaataaaggtacagagaagcacttgttcgttgcctatataaagactaactgtacagctgacagcttaaaagtactgtatgacactgcatttcttgtccaacagtagcgtctgtttccttcattccaaaaccaaaaaaaaacattaaagatgaatgctgaa

SEQ ID NO: 383893 - DNA, 582 bp, Homo sapiens
cagaatgtatttgaagtttaatttgttgtgttctttaacctatgaagaaggctgttctgtgatagggattgtgtgaaacacatctatgtggtccatgtccatttatctctggaacaactccaaaaagtggggatcattgtactyatcttacagatgaggaagccgagtaccagtaatatccctgagcagtgtggcagttcatggaaccattagctacagagtatttggacttttataagtatactatagttttccaggaccctggggaaataagttgccacagaaaaagaacactagtgcattaaaggttcatactgcagtctttttaaaaaaaatgttttcggtggaaaacattctaatatgtgttacaaggtatgttttttaagaggataaattcatgactctcatataaatacaaattgcacatattgaagattttacttaactcatttattaatgagggaaccagtaagctcttatatttggttcaaggaggatcttaagagcagtcaaacaagaaaatcaggaatcaattgcatgcagctccactgaacacattttatttgtgtctgtatgtagaag

SEQ ID NO: 383894 - DNA, 551 bp, Homo sapiens
acttagtagggaggcaggagagaatcaaagatcagttttgcatatggtaaatttgagatgcctgcaaaatagtcaggaaagaaaaatcttgaatgcacttacaaaatgagtccagaaaagaggtcagggctgagttatggctatgggagtcattggcacatgggtggtatctgaagctgtggcagtggatgagatcacacaggggtgaggatagactgaaggagaaaaacttgatccaggactagctctgagatacaccagacttttaagggatctggtagagcatgtggaactgacaaatgagcctgcacaggaatggctaacagcagttaatttgcaagaaaaagaaacaaacttcatgagcacagaccacacatccctggccagcgactctcagccacaagccccagttggctycaaaaaaactttctctaatgctggaaaataaatctactcatgcatgtcttcttggtggagggggagaaagagcttcagatggtggaggggaacaaggagcttcaacctcatttaaaaagacgacttcactggaa

SEQ ID NO: 383895 - DNA, 391 bp, Homo sapiens
attggctaatcaaatcttcatcaattacctgtgtaataatctcaattaacttgcctccttgtwtataaatggaaataatcctgtttatttaaacgtatttttatgtatcaatagggattaatcaggaaattcaaagggccttttttttgtatctttccctaatttgagctccctattctcattaacagataaaacaacacatttgcttcagcctggaatatttgcttttggtgcttagaggcagagacaagaaatgggcactcagggagtcacactggtagttgcacactgtatctacagagggcgtgtctcatctgtactctgctgggttacaggatgttcaggaggtatttgtgtccacctgagaattccgtttattaccttccaattt

SEQ ID NO: 383896 - DNA, 559 bp, Homo sapiens
gagccaccgcgcccggccgcttgtctttttaaacaagcgtctccaagataaatagcaaaagmaaaaaagagggtgtgaggctccagacccacactcactcacttaatcatcttcttctgccttgtatagaatgatgtacatatataccttagacaacccagagtttttccctggtggagaggggagactttcagccctacctgtttccaggactgtgcacttagttaagggtgtgtggagagtgaggggaggcctatagatagtggtttgtatactgggtcctgaaaaccctcttggtgctctgtttttcaggagctgaagccaaagaatgccaataataatactttttgagtggttcttttcattattgttaattagacttatggtaccttgaattcttaagtttggcatagcatttctaaagaaagattgaattatttgttgataatgtttttaacccaataccgtgtggtttataattgccaatgccatagatttaaaaacctggcagattatacccctcatcttctctgcttgtcctcagcactactaccacaat

SEQ ID NO: 383897 - DNA, 575 bp, Homo sapiens
ctcagccagggcactgtaaaatttaacctgaaacattggttcagaccattatgggaagtaggagtcgcacatacctcattatacccctccagcattaacatcaacagagaccttaaatctgataagaaacaattacaatctattttctctgaagtctgctacctggaggcttcatctgcatgataaaaccttgatctccacaactccttatcttaacccagatgttcctttctacggataataactcaaccaattaccaatcagaatatgtttaaatctacctatgacctggaagcgtccccrctctttgatttgtcctgcccttccagatcaaaccaatgcaaatcttacatgtattgactgatatattattgttacagtaggtagctatagccaggcatgaggtgggcaggaaagggtttcccacctacccccccaccaggagtgtcaggtgaccgtcaggtgatggtttggcagttatcccactgcctctctaaaaatgataatcggcagttggtgccagggagaagcagtttcctgatggtccccggttgtcacactaaagtgataattga

SEQ ID NO: 383898 - DNA, 575 bp, Homo sapiens
ctcagccagggcactgtaaaatttaacctgaaacattggttcagaccattatgggaagtaggagtcgcacatacctcattatacccctccagcattaacatcaacagagaccttaaatctgataagaaacaattacaatctattttctctgaagtctgctacctggaggcttcatctgcatgataaaaccttgatctccacaactccttatcttaacccagatgttcctttctacggataataactcaaccaattaccaatcagaatatgtttaaatctacctatgacctggaagcgtccccgctctttgatttgtcctgcccttccagatcaaaccaatgcaaatcttacatgtattgactgatatattattgttacagtaggtagctatagccaggcatgaggtgggcaggaaagggtttcccacctacccccccaccaggagtgtcaggtgaccgtcaggtgatggtttggcagttatcccactgcctctctaaaaatgataatcggcagttggygccagggagaagcagtttcctgatggtccccggttgtcacactaaagtgataattga

SEQ ID NO: 383899 - DNA, 560 bp, Homo sapiens
ggctctgtggcactgggtggtggaaagtctgcagtcagcactttgatcaggtcaaacccagtaatatttttgaactcttatttttctctgtcaggtgccagcaagcaaaactgagtaaggaaataatagtttatggccttatattttagttagtttgagtacctgttgacaggtggtccaatttttgtgtttaatttagaagaaattctgaaggatgaggtttaataatcacaattgaagtagtggatatgggatcagagtctgattgcattggatacaatattccaagatcactgaatgatacaactcctgcaaaaaggatgctatgacaatataagcataaagccgcagggaagtggacagaggtcttaagggttggaaaaaggagtgggcacatttgtgaaatgtagcagagctatgggatttggactttgcratgtacttgtacagtaggactaaagcagacaagcatagaatgcatgccattaattcttagccttgaggcataccttctcaataattaggagaatgaaaagaggtgttttttatatatccttcca

SEQ ID NO: 383900 - DNA, 470 bp, Homo sapiens
tccaggctggaaaagtgtaagtgatcctcaactttgtccccccaccttccattcctatcattcagggggtcacctcaaccatctcttctatttatacctttcattcatttcactctgctatagagcattttgaattcaggatttatttacctcctttctaagtaagttgaatggcctttctgtgctttttctgttctggtcttcacgtaatccgcttcacattctttttaaattcacctttcccaagattcatcattgcttacaggacaatgtccaattcyttagcattacatgcagtccatctatctttcctaccttagctctcacttcacagctcataatccctctcctccccaatgtacacaaacacacccacctttccactgtggttcatcttctggctattggttatattttgccttcaattacctctgctggatatggaatagcatagaagttatgcacatggg

SEQ ID NO: 383901 - DNA, 569 bp, Homo sapiens
gggtgtagagaggaggcaccatttaraatcttggaaaatctgaaaaaacttgcttctaggccagagagtagagagaactgtgagattgtgtgctagccacagtagaccaatgttggattggagatgataggtcgtcttaatggaaagtgtgatggggagccaatgtggcacagtagctcagagtgtgggctctggagccaacataagaagagttaccctaacagaatatagaccacagagttcttcccttcaagtatggattcatcatacatccttcaaacctgccaagtacttcactttctttctctctaccaacctgcttcttaccaaccttctaaagtcctgttcttgattcaccctaggctcacctataaccttcagaagccctgtctctgactcttaactcttcctgtcttaacactgagcctctactttcagctttgggagccacaatgagtgtttcagagctgaagaatatctggagcccatatgtcagacatgaaagatttggaaaaacagaaataaaaaagttccttgaagtatttgaaatgatttattcaagtagggtt

SEQ ID NO: 383902 - DNA, 309 bp, Homo sapiens
agattcattccatttcaaaattgagatgctccattctctcagccaagatgaatgggttcattttacactgtgatcacaatttagagatgctattgaatgggctgccagtgtttgctttgtaatgttaggggcactcttttttctagtcttaaggcatrggttacagcacataacagaaaccatgcaggaaagacaaaaagaagaaagagagggagggaaggaaggaaggaagaaaaaagaaggaaagaaggaaggaaggaaaaaaggaaggaaggaagggaacgagggaggtgggtgggcaaatagcaa

SEQ ID NO: 383903 - DNA, 567 bp, Homo sapiens
acacaacatgaaagcaaaaaaggaaagagaatgttacttattctattatctgccatgatggggaaaggggagacagaaaaacaactttctccttataaatcccagcttttgctgctgcctttactataaatattgttattcaaaaggttttcacctccttcttgggaggctattcagtgaagtataagatataaagagcaattttattgcctaaatgagaagctggccaaagtgtagtttcctcagctccatgctcagaacatctgattcagtaggttgagttgggactgatatacattttcataagcatgtgcagtaattctgatgtagctcgtctgtggaccacaactcaggaaccctagtcttttaaatgtatatwtttttaataacatggtgctctaatttggagccctcagaaagaaaggaaaataaaacagcataacctgtgtcctccatgatagtttagtgggctctagtattagtttatttcatgacatgtaattgttattttcatttaatttgctgcacaattacttttatgtataatccatgttgagatgtgaatag

SEQ ID NO: 383904 - DNA, 460 bp, Homo sapiens
agggttccacaagaataaaaagagcccaccacatctgcatgctataaacactacacagctagctcttgcttatttctgagtccagcaaatattatttgagtgtttttacacatcactgatccaataaggaagaacttgtataaagactaatgtttttatgcttcctttatagaacatgaacacactttagatggttttkgttacttattctggagcattaatgcaaggatccaagaatatcagctttaagatttgtttttctattctcagaataggtttgaaacagagagcaaaatacctacctgtatgcgcttctttagtgacagttgtttctaaaatatctgtctttcttctgagagaactatttgagtagtgagaattaagtaggaatggacataaagagattatcatgaagatggttttatgatcatcactgtcattgccattgtcaaagaggcat

SEQ ID NO: 383905 - DNA, 586 bp, Homo sapiens
accaccaccgctgggtagaatctgcttaaactgcagctttggatttttcaggggtaaacaaacctcttatgaaaaagaaagccatgcattaaaattataaaggcacatgaaatattacaggaaagaatgagaggaagtaaagaaaactaacattcttctgttttactgctttcagggaagagttttatgaacagtttccaaaagtgttcttaagcggttgtaggttttattttgctttacaatttgacagtattttaagattctgtatttattctctttttgagctgaattatgcaggactaaacagatatcttttstaaaaccttttatttccctgacagttaggagaaatatgaagtaggaaattctttggtaattgttggaggttggtatagtgcagtagataatgtccctttactgaatttattatcaaaatacacaagtcagagggaaggagatcaaaatatagcttctatttggtgatatactggtaaatgtttaattttcttccttttagaagagaggagactgatttatagtgttgacatatttttacggtataaatactccctccctggtgaaattc

SEQ ID NO: 383906 - DNA, 491 bp, Homo sapiens
ttttgtcctccaattatacttccatgcacgactgtccactctttatcaaacctaagcataaaawtacccagatttccctgtgtcttcgggccttcatttctgaaggctcctgtgtataagttttatataaataaatatatgcttctttatgaatgaatataaattttacttaatataaatttatgtaaatttaatatttttataattataaaattacaaaaatgattgtaattttaaatcatatataaatttattataaatttatatataaattttaatataaaatatacttaattttacttaatataaatttacttaatataaattattaagtaaatttgttttctcttataaatctgtctttattacaggagccttatccaggaaccttgtgatgtatgagtaatctttctcccctgtataggcaaaattgtttctaaaatccccatataatttagggcaagttctgatccttgcatagtagcatctga

SEQ ID NO: 383907 - DNA, 576 bp, Homo sapiens
caatagtataggcagggtaagtctgttgtcagggaagccaataaaggatggagaagcacctttttacccattacctctcttaggcttgaagggggaaagggagtgaatatttattggaacaaagagccagagatgtggctgtaactgggagagggcctcccaataggatctgaaaagttcagtagtgaaatgcaagcactgcaacccgaggcctggcagggaggagaccaaagaaactgatatcccaatctcacttttcccactccctggctttctgccaatgactcccatttgatgcagtccagaaagatgggcttcctagagagcagagtagggtggaaaatggattcagagggccatgaagagtatcagagtatcaagaatacctgttacattataaggaatatatatgtatatatgtatttattcatatggtacatgtgcttacaagcaggaagctattgtgtatatataagtgttatgtatttacgcatatggtacatgtgcctacaagcagaaasctattaatcctttcaagaacctttacaggcattattcatttaatattgataaaac

SEQ ID NO: 383908 - DNA, 577 bp, Homo sapiens
aaaaagaaataaaaacactgaacagtatgtgttcatttgtctcatccattattgtatatagtgcctgatacagagttcagtatatattcagtatatatagtacctgatacagagttcatgatattcaataaatatcatgagtgatcaaacacatattctctgccttcttctcttcctcccttccttttttctctttttcttgcttcttttatatctctttctttttttctgatcccaaacactttagagkctttaatttgagctagattctatgataagtgattgaagaatcaaagacatatttaaccttggggaaagtcataatgggaataaaggaaaaaacattaatataaagtattagtaaacatttctaaattactgatttcattaaaatatttaacagtcttatgaaagactaaagaatcattttgagttcatctactaggcatggacaagccacttcaggaagtttaatatccttctttgtgcctttgggtttaatctgtgctagtgataccccagccttgacagaattgctgccccaatggcccaggctgtgggattctgcacaggaaag

SEQ ID NO: 383909 - DNA, 577 bp, Homo sapiens
aaaaagaaataaaaacactgaacagtatgtgttcatttgtctcatccattattgtatatagtgcctgatacagagttcagtatatattcagtatatatagtacctgatacagagttcatgatattcaataaatatcatgagtgatcaaacacatattctctgccttcttctcttcctcccttccttttttctctttttcttgcttcttttatatctctttctttttttctgatcccaaacactttagagtctttaatttgagctagattctatgataagtgattgaagaatcaaagacatatttaaccttggggaaagtcataatgggaataaaggaaaaaacattaatataaagtattagtaaacatttctaaattactgatttcattaaaatatttaacagtcttatgaaagactaaagaatcattttgagttcatctactaggcatggacaagccacttcaggaagtttaatatccttctttktgcctttgggtttaatctgtgctagtgataccccagccttgacagaattgctgccccaatggcccaggctgtgggattctgcacaggaaag

SEQ ID NO: 383910 - DNA, 494 bp, Homo sapiens
aattctctgtaaatcctttaaaattttattatccatctcttcactggggaaatgtctagatacattttcctaagtggttccatctttctgtaaatggctattgaccygctgagtgcagttttgctttcagagaagcattgcacttggtgtgtgatttgagtttgggatcatgaccttatttcctttgcacttgattgctttacttcaccaactgcatccctgattttgatattatctgtggctagctcctttcatgattttgggaatggctacctctcagttttctgaatattttttagtacttgctgttacaatgtagacattgcaataatgttctaaaattatatgtacatttacttactcaacacaaatttaaagagtacctgataagagctggtactctgagtactgagcactgagtacctggtagaatcattaatacagaagacaaagctctggcctcaaggattctgcagtacagcagcagggaggta

SEQ ID NO: 383911 - DNA, 534 bp, Homo sapiens
gtgtgatctttctgggagggtgccacgtctgtccaatattgatacaatagygcaccagtggcagcttcttggttgggccaagtaagccttctcaatgtatttactccttcagtatttataacaatcaggaagctgtaattattgtccatattttactaatgaagtaactaaaacttagagaagataagcaatttgtctgaggtcatgctctagtagtgagcagagccagaatctgaactctggcatgatgactatagcgtctgtgtttttatgcattactgataggtatgggtggtatactggagacttagtgagtatttaggtgtgagtaacgtctacagtgacgtcagggagctcactgtacatccatgacatgagaaataaaattcccacgcttccctgtcttgaagctgaggcaatatattacatgggttaactgacaattcagacagagtgagagattcattatattcaccacaaatgaacacagatggacactcttcaaataaagcttcctattgaattttaatagtg

SEQ ID NO: 383912 - DNA, 511 bp, Homo sapiens
actccagcctgcatgacagagcgagactctgcctcaaaaaaaaaaaaaaaaaaaagaaaaagaaaaagaaaaatttgcacccattcctgtattctttttataggcttctgtaagcttcaaaaatgatccttaaagagattgaagatgatgactcagagcagaaaaataaaacaaaaacaacatgggtggcagagttgcgtgatagaaagaatggaaccttcaggtccagttaaacctgctctgctattaattagtttttggttttgaggtgatttttccaagccgtcattattagtaataagagctacaatatcaytggatgaagaagaaaaatttctgaacagaagcatagctcccaaccatatgttttccataccagcatctatacaggcaccaaaaatcatggatgttcttatagccttgtgcctcacggcgtgaattgctcattgatcatttgaactcgtaacaatggaaacatcagttttaccaggcctcctgggcacttgtctga

SEQ ID NO: 383913 - DNA, 500 bp, Homo sapiens
tttcttatcatctgtgtgttcactggagtagcacttttaatttccttcaagaacttttcctttgcattcacaactaggttaactgtttggcacaagaagcctagatctcagcctatctcagttttcaacatgcctcactgagcttaatcatttctagcttttgatttgaagttagagatatgagactcttcctttcatttgaatacttaggcctttgtgggagtattaattggcctaatttctatattattgtgtctcagggaatagggaggcccaaggagaggaagaaaaatgtgagaatggccagtaagttgagcggtcagaagacacacaacatttattaagttggccatcttatatggacatgatttgtgttgccttcaaagaattacaataatgacatcaaagatcactcatcaaagatcaccatctcagatataataataatgaaaaagttttacrtgttgagagaattaccaaaatgtgatgtagtgacatga

SEQ ID NO: 383914 - DNA, 453 bp, Homo sapiens
  misc_feature (1)...(453): n = A,T,C or G
attcaaagtagtagagtgcttgaggagaaataaaagcagaggaggaataaaaggagatgaaggaggaggaaggggaggaggagaagttataaataaagattagcccctaattckaaaacattttttcttgatctaaatatatgaacaacgaagtccaaattatttaatgtttcccattgactataggatgaaatttaatactttagcctgatgtacaaggctcttaaagatctatccttgtctaactgagtccagagccaaccctacagctgcccaccttgaattttatgctctggaaatactaaatgattacaattacctaaatataacatagttatattcaggaaatacatatattaaatattatatatatatgtataatatgtaactatgttgctcatggatctgtgactgtgcacaccatagttccctctgtnnnnnnnnnnnnnnnnn

SEQ ID NO: 383915 - DNA, 589 bp, Homo sapiens
gtaaaactccagtccattaggacgtagcacatgttgaaatgattaatgtgcaactgctgtgtgtcatcttggccatcagtaaccatcaaagccacagcaaaagttgaaataaatacaggaaaatcctttaactgttttaagccaactatacttttccagcagatgaaattaccattacttttcccattaaaatgcaaggagackgggtagagtaagacagatctctaaagcaatccttggaaggaaccctctgactcatgaaatcactcacaggcctaggggcagggaggagcttctgggagcacctcggtgtaatactgctctacaataagcccctaagtgggcagaatctcctctattttgtagatgaggaagatgagattcaaagagcaaatcactttttttcctcgtcctagttctccaacatgtaaactggaaacagtacttgccatccacaaccgtgaaacccaactttctagaaagaagcatagagaaaacaatcaaaaaagaaatagtatctccccttccaaaacgaaagacaaaaaacctttctcggccgagcatggtggctcaggcccataatcccagc

SEQ ID NO: 383916 - DNA, 580 bp, Homo sapiens
tgagaaagcaaaccaagagaaggaccaaaagaaatattaatactataattaacccaagaaaacgtgcctaaaattgtaattaaaggatttgaaattacatgttcaggaggacactatgtacttatgaatattgacaaaaagttattaacacctggagatattctagtataactactgtactttagagatgttacttggttgggaggctgaggcaggagaatcacttgaagccaggagttcragaccagcctgggcaatatagcaagacccaatctctaaaataaataaataataaaaataaaagttatttgggcataaaaagagagagagaatggaacttgaatagaaaagaataatagatcatcattagactttttgaaagcagtactttatgccagaaaaaaaaaatagtcacatatttaagaaaaggtgcatccaggattttatattgcagaaaaattggatttcaaatattaaaaacaaactattatcaacaagaaagatctaagggaatattgtttccatgagtctaagaagtttagcagagaacaaaacttcagacaaccaaaatgacccttac

SEQ ID NO: 383917 - DNA, 580 bp, Homo sapiens
tgagaaagcaaaccaagagaaggaccaaaagaaatattaatactataattaacccaagaaaacgtgcctaaaattgtaattaaaggatttgaaattacatgttcaggaggacactatgtacttatgaatattgacaaaaagttattaacacctggagatattctagtataactactgtactttagagatgttacttggttgggaggctgaggcaggagaatcacttgaagccaggagttcgagaccagcctgggcaatatagcaagacccaatctctaaaataaataaataataaaaataaaagttatttgggcataaaaagagagagagaatggaacttgaatagaaaagaataatagatyatcattagactttttgaaagcagtactttatgccagaaaaaaaaaatagtcacatatttaagaaaaggtgcatccaggattttatattgcagaaaaattggatttcaaatattaaaaacaaactattatcaacaagaaagatctaagggaatattgtttccatgagtctaagaagtttagcagagaacaaaacttcagacaaccaaaatgacccttac

SEQ ID NO: 383918 - DNA, 580 bp, Homo sapiens
tgagaaagcaaaccaagagaaggaccaaaagaaatattaatactataattaacccaagaaaacgtgcctaaaattgtaattaaaggatttgaaattacatgttcaggaggacactatgtacttatgaatattgacaaaaagttattaacacctggagatattctagtataactactgtactttagagatgttacttggttgggaggctgaggcaggagaatcacttgaagccaggagttcgagaccagcctgggcaatatagcaagacccaatctctaaaataaataaataataaaaataaaagttatttgggcataaaaagagagagagaatggaacttgaatagaaaagaataatagatcatcattagactttttgaaagcagtactttatgccagaaaaaaaaaatagtcacatatttaagaaaaggtgcatccaggattttatattgcagaaaaattgratttcaaatattaaaaacaaactattatcaacaagaaagatctaagggaatattgtttccatgagtctaagaagtttagcagagaacaaaacttcagacaaccaaaatgacccttac

SEQ ID NO: 383919 - DNA, 609 bp, Homo sapiens
ttatacacattttctcctaaatttattccatttttttatttttcatttagggttaattcattcataatgattttattcatggctggaggtgttattttccagatcaataaccaattatgttagcagtattaattaaataaatcatcttctctcccactgaactaaaatgccatctttatcatgtattaaatttgaatatatactcagattttttttgactttctggtcttctgatctgtacacttatttataagctaaagtcatacagttttaaaattattatattagytttctagaaagttttaatagctggtaagggaatcccacccactgtcttttcacaattaaatatttttgttgtcagttctaaaacatttagaatttctccaatataaatgctaagtactttttgtatagccccaggaaaacaccattgatattctgattggaattaatttaaggtacatatttatttggaaatcactgacatttatgatgattaattcttcccattcaaggacatcctgtgtctcacaattagttgaaatattgtttttacaccctgtaacaaaatgtatagctttcttcatggaggtctcataatttttg

SEQ ID NO: 383920 - DNA, 513 bp, Homo sapiens
ataataatcatcatcataattcttcagtctcttgtgacctcagcaggaagagacccattttcagagccctagcaaaaacaagtcaatgaacctgtaatgctgagggctcgactctggaatgtggtgcctgtggtcaagcaacacttctacactatccccttcaagtttcttttctttttgttacctctttcccacttcctcactcctcatctctctcatttctctgtttgtttgtctcttaggatcccaataggaacctttggctcactcaaatataatctgaaaaggacagtttaataaagggacaattttcaaagatgtgggaggggtttagggaaactacaagggatgatggagtccctatcagaactgaagggggytggggagggcatagtccttgaacttatagatagagaagcctgtgtggagagggcctcctgacaagaactatgcccttctgttgacttctggagtgcactataaccccacagggaggaagatgacagaatagac

SEQ ID NO: 383921 - DNA, 630 bp, Homo sapiens
atgaaatatctttttccatctgttcactttcaatccatgtctttttcaatctatttgatctaaagtgagtgtcttrtaaacagcatatagtttaattatgtgtttttttatctagtctgccaatctttcttttgattggagagtttaatctatttatatttatattaatcactgctaagaaagaacttagttgtgtcatttgactatttgtttttaacataccttgtaagatttttgtccctcatttcctgcattattgtcttctgttatgtttcatcggttttttttgtagttaaatgtttaacttattttctcattttcttttgtgtatattctataactatattctttgtagttactataggaattacacttaatacagtaaagttataatactctaatttgaacttataccagcttaacttgaataataaagaaaaaatctacttttttacagcctcatccctacctcttttagttgctgatgtcacaaaattacatctttttctattgcatatgccaaaatatatgctagtaacattttaaatacattagtttcttaaattacatagaaaatagaatgtggagttacaaaccaaagttacaaaaatcctagcttttaaactaata

SEQ ID NO: 383922 - DNA, 593 bp, Homo sapiens
tggctggtttgatcttctatccagaccactaaacagcaataagactgtttcactttcttatcatttgtgtgtgagcacatgttgttggaaaaatggcaccaataggctttctcaaggcaaggttgccacaagccttcaatttgtaaacaacraaatatcagtgaagcacaacaaagcaaagcacaataaaatgaggcatgcctgtacttttttttaatgtagccagccccaacattttccatatgtagtaaaagaacattctctatgttcatgaatgcttatgacaaatgaatgatagaatgaatgaataaatgaatgcaaagagctcagactggaaagtagcagatatgtgatctagttttatttctgatactctgactggttctcttttttctctcatcttaattgaacactggacattccatttggctcttaaattatgtaacttaaatataataaattttcagccaatgatttcattagatacctggctgtaactccagaagacctatgaagagccctagaggccagctccaccttggttcctctaatagtttcttttgctccatcgttttcttcaacttagcatctgt

SEQ ID NO: 383923 - DNA, 619 bp, Homo sapiens
aggttagctcatcatctcattatctgtatccagttctctttccaggcttgcatattatctgtgcggctacacacacttgctaggtgggtagtgaagggagtattaggctctgcatatggaaaagtgggcctgggtggccaagccccagcatatctccaaacctcaatttcttgtctgtaaaatgtgaacagcaagaatgtgcaccttgctgggcacggtggctcacacctgtaatcccaacactttgggaggctgaggcgggaggatcacgaggtcaggagttcgagaccagcctggccaacatggtgaaaccctgtctctactaaaaatacaaaaattagccaggtgtgggggtgcgggcctgtaatcccagccacgtgggaggctgaggcaggagaatcacttgaacctgggagatggaggttgcagtgagctgagattgtgccattgcatttcagcctgggcaatagagtgagactccgtctcaaarcaaataaataaaaaaagaatgtgcacttgtggaattgtggtaaggttttagaccagcactggtcagcatggtagcatctagccacatatggctatttacatttaaattaataaaagtttaatgaagttt

SEQ ID NO: 383924 - DNA, 512 bp, Homo sapiens
tagtgagttgagtggaaccagtatttgaaccaaggcctgtttggtgccacagcctgggtgctgcccagaacgcacataaccttgccagtcaggttgaaggatggcataggtcagtgggccaacagaggcttacatgcagaggcctggactgcagcaggcctctggctccattgtctgcctatcaaaccagctgcatggggctgcctcttactccagaggggtctatgggtcctggatccagttgggcatagtctgtggagggaagtttgctccacaagggccagctggccacatctgtcaacttcctggctgactgcctggatactccagtcccagggtcctaatgggcagtatgcaagttggaatkggggtggtacagcagaggagaggggtctggagcctggtctcgattctgacttggagcaggggagatgatacctaatggtaggttggctgccagcagccagggactgctagccagtgtggacatccagaagggtgctcaaggtgtc

SEQ ID NO: 383925 - DNA, 512 bp, Homo sapiens
cacgtatacatatgtaacaaacctgcacgtagtgcacatgtaccctaaaacttaaagtatatatatataaaaaaaaacctggtggtgggatgtaacaggacaaacattaaaaaaaaaaaaaaagaaacatgaaagcccaaagtatctcaattacactacaagaaaaaataattagttttcaccctgatgaaagaaactgtagatgccacagacaaatgaaaaaaaaaatcccatatgctcacagattggaagaatcaatatcgtggaaatagccatactgcctaaaacaatatgcagattcaatgcaattcctaccaaaatayaatgtcatttttcacagaattagaaaaaacaatcctaaaattcatatggaactaaaaaaacagcctgaatagccaaagcaatcctaaacaaaaagaaaaaatctggaagcatcacattatccaacttcaaattattctacaaggctgtagtaacaaaaacagcatggtgctaatataaaagtagacaca

SEQ ID NO: 383926 - DNA, 573 bp, Homo sapiens
tgcgaaaggagggcgaggacatttttcagcaactcaatgaaagcaaagccagaatggaacattccagggagcttttaagaggaatgtatgaggatctgaagcaaatgtgccataaagcagatgtggagctactccaggtatggactgaccatggggtatcatgatgttgaacattcacatacatgggtgtttttcctctctcctgaactccgtctcccccttcacttccattatttgtttccaaaaacacgattccataactaatgctacttggttgggagggtatagcctctcctagtgattctactagaccgaaggtccctcctacttyatccaccagcaacaaaactttgtagaatggctaaggtaacagacagcaccaagaaatatttcccatcaaaagtcactgattaatttaggatttttgaaagtggaaaaaatgagaagtgattcattggcatttaggctaatttggagacatggcatgatggagaagttggggaatctaggatcacactaatattattttggggtccactcattttggtaacagggcttagggaagaagactga

SEQ ID NO: 383927 - DNA, 556 bp, Homo sapiens
agcagatgctttcagtttccacaaatatcaagcaggaactttgatattgaaggtataattgattcagatagtgatactgccttgtgctggttgtactttctccatcccccaccccatgtagtcatctattttgttgccatactcagtgactttattaagcagctcartgaaagttctgcaaaagcaaaaaaataaataaataaataaataaaacaaaaaataaataaacgaaagaaaaataaaggaagtgagcatctgtattcctaatttcctttttattgctcaaaacattcatatttgaaagagaaaatattacattttctacatggctacaaagtcaaccaggggaagccagagagaaaaggggaaagtattttagcagtgaaaagtgttgatgatttctagtttatatttaaatatataattctgaaaaatggatgaagcaaactattcggaatgtttgaaccgtgtaggcctccagagaacctcaactacaaaaggcagatctccctgcctggagcaagtttcaacaccctggccttgagaagggagcaac

SEQ ID NO: 383928 - DNA, 556 bp, Homo sapiens
agcagatgctttcagtttccacaaatatcaagcaggaactttgatattgaaggtataattgattcagatagtgatactgccttgtgctggttgtactttctccatcccccaccccatgtagtcatctattttgttgccatactcagtgactttattaagcagctcaatgaaagttctgcaaaascaaaaaaataaataaataaataaataaaacaaaaaataaataaacgaaagaaaaataaaggaagtgagcatctgtattcctaatttcctttttattgctcaaaacattcatatttgaaagagaaaatattacattttctacatggctacaaagtcaaccaggggaagccagagagaaaaggggaaagtattttagcagtgaaaagtgttgatgatttctagtttatatttaaatatataattctgaaaaatggatgaagcaaactattcggaatgtttgaaccgtgtaggcctccagagaacctcaactacaaaaggcagatctccctgcctggagcaagtttcaacaccctggccttgagaagggagcaac

SEQ ID NO: 383929 - DNA, 641 bp, Homo sapiens
gaaaccacaccagagatcctccaaataccagaaaggggtggggataatgaatctattttactaagaataataattggttacatttactgagtacttcrcctgtgccaggtactattctatatctaactgtgaacacatgtttttcttcataaaaatggttgacatcagtactgttgttatttctcctttaaaaataaggttatggaggcacagcagttgtaacttgcccacagtcacacacagattccctggtagagagcagccaagtgtagctttttgtttgtgccatctgtgtatctataaggatgagcagagctccagaatggtactggtgtgggtgactccttcttcaatgctggtggtcattaaatgggaatttctcaaggacctcctcaagctctgcctccttcttgactagatataggaaggtcaacctgaacaaagtgttcaaatctcagtctgtgtgaccctagataaaccaaacatttgaataattccatggatgtaatgagttacaatctatatgtgttttccaaaattgatctgggaattctctgaattggaggagactatctgggtctccttttgtacctagcattctcacaaccacttttctctcactctttaaaagcaagggattt

SEQ ID NO: 383930 - DNA, 590 bp, Homo sapiens
taagttatatttaatgtctttagttgcattctaatgtcatcaaaactcatttatagtgtttctattaaatatggtgaaaacattaaaaccatgtgtattgattcctttttaaatcatttttggaaaatcattacccatgatgtatggcatagaatatattatctggtttttaattatttctgaatgtcacaaagtgaaataatagatgacagagttgtctaaatgaagttaaaatcaatggaagaaagtagagatcttgggcttcatgaaaaaagttggagtaaaaagactcagtggtaacctggaaatattgtctttctcttcatctaacaatattatacttatccatgtgttttatttatgaacctatactttgagrtaatcttatttgacctcctatgctgtgcttatctttgtaaatctcatcttataaacaaaatgctcatgcattattagagtgctgttctacagtgaaatttacaaggggatcaggacaatgctggatcaattaaatattcaaatggacataactgaatactgacccctacctcataccatacacagtgcattcccacatggattcatgctct

SEQ ID NO: 383931 - DNA, 357 bp, Homo sapiens
gatgctcttccctctctcactcacatacccckggtatcggctatggatagaaaggaaccagggatgcctgcgcccctctttctagatgggtggccatttatcttgagtcttaactctttttgaatgcatcccgaatccctgggactcctttgaaaaaaaatgctaaaaatgccttctttttttctttctcctccttggttctctcttcacagataggtaattgtgtgtctgtgctgtgggatactcccctcagatgcatcctccaaactggaaagagttaatttcccaaacttcaaactggttggcttaggactgggctcaggggaagggaacccagaagcccaacatgtcagcaaa

SEQ ID NO: 383932 - DNA, 357 bp, Homo sapiens
gatgctcttccctctctcactcacatacccctggtatckgctatggatagaaaggaaccagggatgcctgcgcccctctttctagatgggtggccatttatcttgagtcttaactctttttgaatgcatcccgaatccctgggactcctttgaaaaaaaatgctaaaaatgccttctttttttctttctcctccttggttctctcttcacagataggtaattgtgtgtctgtgctgtgggatactcccctcagatgcatcctccaaactggaaagagttaatttcccaaacttcaaactggttggcttaggactgggctcaggggaagggaacccagaagcccaacatgtcagcaaa

SEQ ID NO: 383933 - DNA, 357 bp, Homo sapiens
gatgctcttccctctctcactcacatacccctggtatcggctatggatagaaaggaaccagggatgcctgygcccctctttctagatgggtggccatttatcttgagtcttaactctttttgaatgcatcccgaatccctgggactcctttgaaaaaaaatgctaaaaatgccttctttttttctttctcctccttggttctctcttcacagataggtaattgtgtgtctgtgctgtgggatactcccctcagatgcatcctccaaactggaaagagttaatttcccaaacttcaaactggttggcttaggactgggctcaggggaagggaacccagaagcccaacatgtcagcaaa

SEQ ID NO: 383934 - DNA, 357 bp, Homo sapiens
gatgctcttccctctctcactcacatacccctggtatcggctatggatagaaaggaaccagggatgcctgcgcccctctttctagatgggtggccatttatcttgagtcttaactctttttgaatgcatcccgaatccctgggactcctttgaaaaaaaatgctaaaaatgccttctttttttctttctcctccttggttctctcttcacagataggtaattgtgtstctgtgctgtgggatactcccctcagatgcatcctccaaactggaaagagttaatttcccaaacttcaaactggttggcttaggactgggctcaggggaagggaacccagaagcccaacatgtcagcaaa

SEQ ID NO: 383935 - DNA, 592 bp, Homo sapiens
tttgtaccgcatgctacaagtctgtgagttcagcatggggattaacatggcataacatacagagtgtgctttcacarttgcctgtgagtttttggagttagtgcactagagtgaggaaggatggtggaaatgtgggaaatgggtggagaaggttgatgtgcactggcagaaagtgccttttagacaagttgaaaatgaaagctaaggagtgaggactctgagattccttaattaatcaaaattgactaaagcaaaacaaacaaacaaacaaaaatccgctatccagatgaactcacgaatctgaaatggcaacagaatatttattttaaaatatattaactacattgtgcccacaataggcaatacaatgagaaaatgagtgaccggggatagattatatgccctggtctaacatcctgctggatggatggagcaaaacttctgggacatggtgagtgtataatgcacagggctttctcaactcctgctctactagtttccactgacttgctcttgaaaagctttgtctgcaaagatttaaacaatgcaaagaacttactttaaagggagagtatgtatgttaagatgtata

SEQ ID NO: 383936 - DNA, 582 bp, Homo sapiens
tgctgaaacattaaaatattaatttagatttttaaataacataatgaattttaaaatgagtagccccatttattttttgtacaaggaaactgaagcrtatatgaattaggagcttgtatgtggttagacagcttgttagtgatgagctggattttgaagttgaccctgaacggcagaagctgcagtatagtgcagttatccctccttagtcacaagtgatacatttcaagactcctagtaaatgcctgaagccacgaatagtaccgactgccatatatactatgatttttccctatacatacatacccatgaaaaagtttaatttgaaaattagacacagtacaagattaacaataaactaataaaagaaaataattaccacaatatgctaacataattacttttgcactttggagacatgatttaataaaataagggtcatttgaacacaagcattgtgatgatgctgcaacagttgatctactttttttcttcttcttctttgttataaatgatgaaagggacagctcctaagaaagagggtagcatctgtagcatgggaattctggacaaagggatgat

SEQ ID NO: 383937 - DNA, 428 bp, Homo sapiens
aggaagaagagatcagaactcaacaaactgagcccttgggaagacagactcagtttatttggcacttagactaatgcggagtttcctattcaaagatttcaggatttcagggtgccccatatgagtgaaagataacacgagatatatcactgacctgaagccaattcacctgaagatcctaatctccacggaagtttccactcagaattcaagtatcacttaaattattaagaagttgataaatatagaaggagtccacaataaatttaaattagtattctgagaatatatttcttttttaatacacagaaaaaaatcggggaaagkaggagaaaagggagagagagagggaggttttgaagctgattcttcttcctagaaataaaatctagggtttatgtaggccttcatgaccttggggttttaga

SEQ ID NO: 383938 - DNA, 607 bp, Homo sapiens
aacaattgatttacttcatggaaagtaatttatgttttcttccaaatatgaacgtgctacttttccaagcttataataataaaatcaagtcttgaaatatcatttttgtccataccttcttaaaaataacatatgtattttagaagcacatttaactgtctaaaactattgggggtcaaccaatcaattgcttccactacacctaaatatcctgtaattatatccacttaggctctctctggacttgtgaaaacttggctaaatttgtcagagtctccacctgggaccactaacacaacagaagctatttatccatrggatatagaaactttgttgtagatggcttggttttattccagatttccaggtatctgcctcaaaaacctagaaggttttcttccaggattcttagagattggggtcttacatttaaatctttaacacatctcaagttaatttttgtgtatagtaaaagataagcatctgcatttggctagccgggtattccagtaccatttattgaatagggtgtcttttgctcagtgcttatttttgtagactttattaaagatcaaaaggctgtaggtgtggagctttatttttgggt

SEQ ID NO: 383939 - DNA, 519 bp, Homo sapiens
taaaatctactccttcagcaattttgaatatacaatacattattattaattacattactttcaaaggcaaaaatcacaattacttttgtacctacctaatagaattgttattcaaattaataattattagctacaatacattataattaactgaaacatttaaaatctactccttcagcaattttgaaatatataatacattattattaactatgatcattgtgctctacaatagatcactaaaacttattcctactgtctacttgaaacaatattccctcctttaaccatctaccctttccccatctctcactattcaattttttgcttccatgggtttgacatttttatattccacttactaktgagattatgtgttatttacgggaactctgatacactgttagtggacatataaatcagtacagccattatggaaaatgtaaggaggttcctcaagaaaaaaaaaagaaaagaattaccatattatccaggaattccacacacctgtcagacctc

SEQ ID NO: 383940 - DNA, 643 bp, Homo sapiens
ggttgggaaggcatgattgatttttaaatttgaggacatgagatttgggaggggccagaggcaaaacgatatggtttggctgtgtctctacccaaatttcatcttgtagtcacacatgttgtgggagggaccaggtgggagattactgaatcatgggggctggtctttcccatggtgttctggtgatagtgaataagtcttacgagatctgatggttctaggagggagaatttccctacacaagctcccttctgcctgctgccatctatgtaaggtgtgacttgctcctccttgccttccaccatgattgtgaggcctccccaggcatgtagaactgtaagtccattaaatctctttcttttttgaattgcccagtctctggtatatctgtatttgcatcatgaaaatgaactaatacacatatatagtatactatatacactcagatatataatagaataatgaaaacctttgttaawtatctattcattttgttcttagtgtattgctaaattattatcacaaaatgcgtctctcttgaggaagagagtcatgatagaaaagctgaaaatgcatctatagaaaacataattggcagtattgccttatgtcatatagacaacccacaagaaagctgttttac

SEQ ID NO: 383941 - DNA, 490 bp, Homo sapiens
ctcaaggcccttgttcactagaagcaaggagctccctgaccccttcttccaaacatactcttttgtttttgtctttattctcgcattcgtcctcctttgttcagtccaccagggtctgtggcaccagttcatgaaatatgcaaatatgtaaaacaggacatatgatacattgataytgataatcatgtttatggacactaaaatttgtatataaaaatgaagaggaataagtctattaaaaaagcatttggatgtcaattttaggaacttggatatgcacatataaataattacaaatcactaagatttacatgctggggaataatcctattgtagggctgatataacaggttattttattttgctaggctttgatttgcacaactcatgaagtttggtgagatttgcatgttttacaggacaatttgattacacgttaattatccaaattgttgcagttaatattgattttacttgtaggttttgaaaa

SEQ ID NO: 383942 - DNA, 556 bp, Homo sapiens
catagttaccccatttctaacatgattaattyaaaatacatagattatcaaatttcttgtcatttcttttgtcctggaactcacatttaagttctatttactctccagaattgtgtctcttatgattcacatgagtttattactttgtaattaataaatatatgtaaattaaccttttatttcttgtggtaataaagttttatgtgatttttatctacaacaaataatcactacaacaaatattaccatagttctactaaacaacttaaatgtgttagaaatatttataaaatactcaaagagaaactgtaaaattatctatggaaatgcatctcttaactatattaattgggatgaatttttatttttatttcaattactaaaattatccatgaataaatatgtttattggtagaagagcacaggtttcagcattctttattttttcaagttttattttagattcagggagtatgggtgcagatttgttacaaagatatattggttgatgctgtggtttgaagtatgattgaaactgtcactcaggtagtgagca

SEQ ID NO: 383943 - DNA, 556 bp, Homo sapiens
catagttaccccatttctaacatgattaatttaaaatacatagattatcaaatttcttgtcatttcttttgtcctggaactcacatttaagttctatttactctccagaattgtgtctcttatgattcacatgagtttattactttgtaattaataaatatatgtaaattaaccttttatttcttgtggtaataaagttttatgtgatttttatctacaacaaataatcactacaacaaatattaccatagttctactaaacaacttaaatgtgttagaaatatttataaaatactcaaagagaaactgtaaaattatctatggaaatgcatctcttaactatattaattgggatgaatttttatttttawttcaattactaaaattatccatgaataaatatgtttattggtagaagagcacaggtttcagcattctttattttttcaagttttattttagattcagggagtatgggtgcagatttgttacaaagatatattggttgatgctgtggtttgaagtatgattgaaactgtcactcaggtagtgagca

SEQ ID NO: 383944 - DNA, 505 bp, Homo sapiens
cgatgaaggccttttgatgttttctgaccttgtgtggccagcatttcatttgaatgcagatgcaactctatcatagtacatatcggagttattaaactcatttataattgtttttctcaatcactagatacatttttgcttcttttcaatttattgtaccattgatttgcatagaatattatagcagttgtttgataagttgctttgagctggctaaatcaaattagataataaatataatcaaatttttcatatagtaacctaccatttcaaaagccaaagtatgtctctttgyagcattctcgtgatgtagaaaaacatcttacatcatttcattttgtgtttaatcaattccccagtagaaatgtttaattgctcacatatcttttcccattagagatttgaatatcagagtttgagttcttgggatctgatgtgagatcaaaagctgatctcgaaagcctcagagcaaaatataaaaagccttgtttctcctaaggaacca

SEQ ID NO: 383945 - DNA, 607 bp, Homo sapiens
aaacagataatcatttaagggtttaagcaagaaggcagcatgaccaaaatatattttgtacagataactgtatagtggcattcatatagattttgtagcatgtttggaagtaggttggggagagactagaggaatgaggccaattaaggggttcaaatgggggaaaaggagtgatgttaaataatggaatgtcagtcataataaagcagagatattaaacagtttccacattttccaaagtgaatcaatagamcttggttgtgttttagccagagggaagttttttctttggaccaggaatataggtggtaaacatgtatacaaagatgtattacagattaggcttaagttgtaggaggtgatatcaattaagtgttattttagacatgctaaaatgtacctattttgtagccaactttgagatggacaggtgattttggattggatatatgaaaaacgatcactgtataaattgtatttttaagaaaatgcatagaattaactacagagagtatgcatggtggggaggaaagtcctaagaaattgttactcacgtgaaggaggcttaataggggcatattgagattaggaaagaaatcaagatacg

SEQ ID NO: 383946 - DNA, 607 bp, Homo sapiens
aaacagataatcatttaagggtttaagcaagaaggcagcatgaccaaaatatattttgtacagataactgtatagtggcattcatatagattttgtagcatgtttggaagtaggttggggagagactagaggaatgaggccaattaaggggttcaaatgggggaaaaggagtgatgttaaataatggaatgtcagtcataataaagcagagatattaaacagtttccacattttccaaagtgaatcaatagaccttggttgtgttttagccagagggaagttttttctttggaccaggaatataggtggtaaacatgtatacaaagatgtattacagattaggcttaagttgtaggaggtgatatcaattaagtgttattttagacatgctaaaatgtacctattttgtagcyaactttgagatggacaggtgattttggattggatatatgaaaaacgatcactgtataaattgtatttttaagaaaatgcatagaattaactacagagagtatgcatggtggggaggaaagtcctaagaaattgttactcacgtgaaggaggcttaataggggcatattgagattaggaaagaaatcaagatacg

SEQ ID NO: 383947 - DNA, 634 bp, Homo sapiens
cagcattactactgcctccaaaaaacggtttcccatttccacagctaatctcatcattgactctgccatccaagtttattctgtgccactctggaagaatctggaaaaatacttaaaatacattttaagtattcatcatgcacatgtattgcattttattttatatatgttcaggtgaatatctttctccactaattgtttgcatttcaattcttgtatcatgttttttgaaacacagaagtcctcattaatataaacctactaatttttttaattgttaatttttgtcctggttaagaaatccttatgagaatattgtatcatgttccccttaccttcagaactggaatctatttggaaatgactgtgtgtgttttgaggtaggagtcaatatttagttrttttttaaaattcaattaatccagcattgttctgaccaccttgtgtatttcaatgtagaagagcacactaataatgcaggattatttatctatgtggtgagaattccaaaatgaagcccagcatggaaggtcaaataatattaactcaaaggatagattagtaaaatgaaatgtgatggagaagtgcaatatagttaggtaaagagaaagaaaaacatttcccagctatcatt

SEQ ID NO: 383948 - DNA, 609 bp, Homo sapiens
aaccaggacccaaagaaagaaagaaagaaagaaagaatattaccagaatcccccaaagtcttctgcatgatccctcctaagttactaccctcctactcccaaagggtaattactttcttgatgtttaaaacagtaaattactttcatattttttgaaccatatataaatggatgcctacagtatgcacttttacttaatgacatatttatgcaatacatccaatttgtttcatacaattgtagtacattcattcttattgttgcatattggagattgacatccaccttttcttggamtttattctgattcaagcacactcctgccatgatgctgttccagatatatctagtgtgcaggtaaaatttccaaaagaacatggattaactgaggagatataatgaccaaaggaagcaaccccattgagttttctacttctatacttccccatgctatgtctccgaatctcagaaagaatgtcatcctagagaacagagtatcattgctcaacttgggatttacaggaaatctaaaatgttttcactcaaaagcattttacaatggcacctagctagccttagatattgagtgacttttagcctgtgtaattg

SEQ ID NO: 383949 - DNA, 572 bp, Homo sapiens
cgctttctgcttttgttttttttttctacttttgagctgttttgttaaaaactaatatataagtgcatactttagcctaggcctacatagagtcaggttcatcaatatcactgtcttccacctccacatcatgtcccactagaaggccttccagggtagaaacatatatggatatgtcatctcctaagataacaatgtctccttctagaatacctcttgaaggatgtgtctgttttacagttaacattttttaatacatggaaggagtacactccaaaatgatgataaaagtatatattattaaattcataaacyagttcatgatcctttagtgtcagtatcaagtatttggtactgaatataattgcatatgctgaggttttatatgactggcagcacggaaagtttgtttacaccagcatcaccaaaaacatttgagtaatgcattacactaccactttatgatgctaggatgtcactaggtgataggaattttttggcactattataatattgtgggctcaccatcatataagcagtccatatttgcctgaaacatcattatctagctt

SEQ ID NO: 383950 - DNA, 572 bp, Homo sapiens
cgctttctgcttttgttttttttttctacttttgagctgttttgttaaaaactaatatataagtgcatactttagcctaggcctacatagagtcaggttcatcaatatcactgtcttccacctccacatcatgtcccactagaaggccttccagggtagaaacatatatggatatgtcatctcctaagataacaatgtctccttctagaatacctcttgaaggatgtgtctgttttacagttaacattttttaatacatggaaggagtacactccaaaatgatgataaaagtatatattattaaattcataaactagttcatgatcctttagtgtcagtatcaagtatttggtactgaatataattgcatatgctgaggttttatatgactggcagcacggaaagtttktttacaccagcatcaccaaaaacatttgagtaatgcattacactaccactttatgatgctaggatgtcactaggtgataggaattttttggcactattataatattgtgggctcaccatcatataagcagtccatatttgcctgaaacatcattatctagctt

SEQ ID NO: 383951 - DNA, 596 bp, Homo sapiens
ttttttttttttcttttagaagatgttttgctaggctaggaatgataatgatccctgtgtatattctctataagttttggttgtgaaaaggatcttgtggggactggattttcttctgcctgtctatgtttgtgttgtgttgtgatgtctgtaaaaagagctctaattaatttggcctaaaggaagacacgggcttggatcaaatattttttaaagggaagataaaagctgtggtacctttcagttcatgtgactttaatctttgagaaataaaaacagccttaaagattattggtaaagtgcaggtggcattaaaatataaataggtgggctaaattatgcyggtcagatgcaagctttgataagtgttttgaggttataaactgctttttgcattttgagaactatttaacttgccagcttcacattggtaaggcctggggacagatggaactaactcagcccttaataatgctgggaatcaaaacttggctgcccttagcacacaattaaaacaacttaccaggttttacattaaatttaaaaattgctaggagttaccattataacatgtcactgagactattggaaataaa

SEQ ID NO: 383952 - DNA, 431 bp, Homo sapiens
ttttgaactatttatgacttttaataattgagtaaggtatatatatcctgtgatcaagatttggagcatgtttgtttctctctgcctggttcctctagaatttggaaactatctctgagtattcttaacttatggcaatatagttgcatcagtgcaataataacccaatattttttagaaagcggacacaattggagaaagtggttattttaccaaggctttgactggaagggtatgcttccctttaaagagtcaatctcgacttacagagctggtaaaagccccattttagactggccccataaacccatctacmcagtccctgtacagagtccatgacctgtggtcagtagagaatgtcactttctaacaagcctaggagctacaagtttttcttgggactttaagagacgaggatcacccaactcaca

SEQ ID NO: 383953 - DNA, 591 bp, Homo sapiens
ccaaaaattatctacaaatttggcacttgagggttcatttgttgtaaactcagtggttcttgataagagggagttyaaagtttgtttatggagattagccaaggtgttgaatcaatcatttcctctcttctggtgaaacctaatcaagaaccctaatggctatcctaaactccaagaaatgtacaacctgttggaaatggctgtgatttttcagagattcaatataaagaggtacaagtagccaagttcattcttttctgggacacacagagtggctttggaactggctgtgaagatgtctgaaagctactaccactatatggtggggccctgatccctgatcagactttatagtgttacttctacagcaagtttcagtgagaccataagtatatttctagggtgagaacacaactaacagaggaggagttcctgctacttttccaatccaaaacagactgccctatgtttaatttttcaacaaactgagcttctttctataagtgatgtcatttgcttacttagtaaaaatgtttttactcttattttgtcatcctgtcttcctacatacttgtgaaacacagtgaagat

SEQ ID NO: 383954 - DNA, 580 bp, Homo sapiens
tgttttttaaaaagtacattgcttgctcaaatgagtcatttacagagtcagcttaaagagctaagagctttattataacaacaaaaccaacccaaaccccttctcaatctctcygaagtaaattctccttttctgtacaactatataagcttattcatgtctaatacagcactcatcaaaacaactctacttatttacttacaaatctatcttatctattgattagcaagtcatggagaacaaagactgtgctgtattcatctttgttactcaacagagtgcctaacacatattggtgcttagttaataaacagaaatgaaataaaaaaataaataaataaaaagtacattgcattagggaatgatttgggaagtgatggaggggtcctaataagtgatacattctatgaacaatcaatatgccatttaaaattatggaggaaaagaaacacttaagagatagtgaaatatttttgtcttaaaattctgttcaattagtaatgcaaaacaaatattctgctaaaagttttatgttttaattaattgtttcactcctatgatgctttgaaacatataacac

SEQ ID NO: 383955 - DNA, 639 bp, Homo sapiens
tcattgaacaaatctcttgggttattttcagctgtgccagtcatttaatttgttttctgaatcaaacgataagaataaatatggcttagagtgtaaacagcattcccagatacattacaacttggtgtcccatctgcctaattttgaacctataggacaggaataaaaagcattgtgagaaacaccaggtgatttccttaaagccaaatactcttgtccctcctactttttttctggctttcctgctgcattggacatggcaataaatkggagtttcctgcacacagaggtaaaattcacttgttgaagatgtcagtcttcttcttgaccaactcctatattggtacaaacatgttagagaaatgcaccttctgaatcatttctaagtcaataatatattctgggttgtttaacatgtataaaatagtgagtgattcgtttacatttaggttaatttgaggacatggcaagatcagaagttttgggaatctaggctcacattaatattattttgaggtcccctcatttgggtaataggttctgggaaagatgactgagtaggttatttgaagttaccacagagcatagactctctgggcctcttctcccttcacttctggagagaacgtcttcaagact

SEQ ID NO: 383956 - DNA, 522 bp, Homo sapiens
agaaacaattacagagtggtcacagataaaattatttatgaaggtagattcacaaaacgataagtcaagaagaaaatatgtgagtatcagggagcacactatcccccatgtataggacccagccaccagaagagcacagagcttctgagacataatagtggtatacagcaagggtttacaaactgccacaaaacggtcataagccatcgctgctaacatgaaagtttctgtcactccaaaaatgcaagcaaaacaaaattgcatgatgcaaccagagaaagagatggttctgtattccacaaccaagttctccaacagtttaggtgtaactacagtggaaaaacagaagtctgtcaaggacaagtgactaaggaaaaagyacatgattgtatggagttttgaattgagtctgatgattattatcatgcccaagttccccactacagtgactgtgtagacgaacaagaaaaccagaaagagtggaacctggatttctgggtattctgaaaaacccaagagaat

SEQ ID NO: 383957 - DNA, 575 bp, Homo sapiens
atgtctactaaactctgggttttatctgtctccatgactacagagtataattagagttttcttggttggcctccaaacacaattaattggctgtctcttgtgtcattatgatagatacattttcttctaaattattagggataattacatcaccacaattattccattaactrcctttaactcttgaattattgaaattgtacatgttcaccaaataaaacatcaacagcatagtttgagaataggaaaaaaataaggaacaattcagaaatagctagtatgaatacaactacatttcaaattccacattcaaattcatagtgaagaaatcggacatgtaaaactactttaagcacaggatgaaagttaccacgaccagtggtatcatgatgtgagtatcatgtacccttgacatgatgttataagagagacactttgcttttgtcatttacttatgctgaaaaccgtaaacccagcttaatatgagaacattatcaggaaaacccagacgtgggagtactctacaggatatgtagagagtactccttaagactctcaaagtcaatgtgcagtgt

SEQ ID NO: 383958 - DNA, 464 bp, Homo sapiens
atattgaaaacaaagcaaaacaaaaataaacaatttttctaatgacagaatagaaaaatggcctttttaartggacttttaaaatcagtgataaaattaagcatggatagacttactatttagatactaaatatatcagtgtcaaaattctgataaaatcaaaaagagacaagcttaagatgtggtgatcagctcacatactggaaaatatatatatgccagaagaatggctaatattcttaattcacacagatattataatgtaatttataatgtaagaatgaaataaattgaaaagcaatgtaattttaacatatataacgatcagctgtactattaattacagaaatacaaatgtaagcaatgttttttgaaattagaaattgtttatatcagtattaggttttgttgtacttttaaactataagctatcatttttattccttgctggccaatatgtacat

SEQ ID NO: 383959 - DNA, 645 bp, Homo sapiens
agggaaggaaatcaatcttgtctttaaaaatgggcaaaattttttgagtaattttacttataaggatttgtgttaataaaacaattgagagattaacagatatatgaasagggatactcattgcatcgttatgaatcatagcaaagaataatttggcaaaacaagctaaaatatcatttggttggaggtaagtaacaatacaatcataaaactgaatactgtttagctatttaaaagtgcagtgaaacaaggccaatctgcaccactaattctcaagtgtgccatcacacaacaagaataaataggggaatataaaattgtatttctcgccccagggaaacactatattgagagtaacgagatctggttctgtgattccctgggccagcagatctattctatatgctctggagaccaccaagcctcaggatctcttttctgaaaagcaagaaaaagtttggagagccccagtatctcataaccttgatcacatgtctattctttgcactaaaacaagatgaaaacaacaaatcactctaacctagaatagcctttgttttctggcccactttaggtcaaagagataagagactttacatattgatgtagagatatatggtggatttttcctgttttatgcaagca

SEQ ID NO: 383960 - DNA, 580 bp, Homo sapiens
ctttgcactaaaacaagatgaaaacaacaaatcactctaacctagaatagcctttgttttctggcccactttaggtcaaagagataagagactttacatattgatgtagagatatatggtggatttttcctgttttatgcaagcatcacttcctttgttggccctctttccctacttgaagctagccaatagaattctccctcctgttggacagaatgatagatacagtaatggacaaatttcccaagctgaattccactctgagatgttctcctagaacttatataggaaaagatattcccctctcagctacaggaagaaaattatttttagtagtattacagcaaaatatgcaggaagtcatcaggctcgggttgtttctttacccaaaacctttatgcaagcaaaacaaaacttaacttggaggcarttttgtctgtcttgaaaaaaaatctagcctcaatcacaaccaggcaactagctgattggttatataactaggggtctcttctcagaccacacataaatgaggcaaatgactacgtgtagtcatcaggtaattactttgcttctgtcttca

SEQ ID NO: 383961 - DNA, 485 bp, Homo sapiens
tggagctgtgagaagagatccactgtcccatagaccccagaatgttaaatccactgacagcttgcaccttatacctggaaaagctgcaggcactcaataccaacccaagaaagcagccacaaggtttgtaccctgcagagccactggggcacatatgcccaaggtcttgggagcactgatgaaagccaagccctttcatcagtgtggccaagatgtgacgtgaagtcaaaggagattattttggagatttatgatttaataactgccctcctgggttttgggcttgtttggggcctgmagcccctttgttttgtcaaatttctcccttttggaatgggtgtgtttacctaatgcctgtatccccattttatattggaatcaactggcttgttttgattttacaggctcataggtggaaggaacttgccttgtctcagatgaaactttggactgcagacatttgagttaatgctgaaattagttaa

SEQ ID NO: 383962 - DNA, 472 bp, Homo sapiens
aactcctggccctcaatggtcaagcatacccggggctctgtgagggtgatggcatgggctggcgcttgcccygggcaccctcagtcctgctgctggatcatctggttagtggcttctgacccagaggaccttcattccctggggaagtgggccttccagtgattcccttcacataaggggcatggacaaggaggtggcttatttctatttggacaatcttttttaaagtgtccgtgtaggccgcagtggaagcaagccctattaggcatgtgatttgcccagcctttccctgttccagagcctccaaagtccgcttgccgagggccatgactaaagcggtggccttctttttatcctgttcgtcccgttccgcctgctcttcctgatctctattataaaaaaccaaggttaccaagttaaatagggtttctaagttttgctcggggcctaaggcggacttttgaagtttttt

SEQ ID NO: 383963 - DNA, 472 bp, Homo sapiens
aactcctggccctcaatggtcaagcatacccggggctctgtgagggtgatggcatgggctggcgcttgccctgggcaccctcagtcctgctgctggatcatctggttagtggcttctgacccagaggaccttcattccctggggaagtgggccttccagtgattcccttcacataaggggcatggacaaggaggtggcttatttctatttggacaatcttttttaaagtgtccgtgtagrccgcagtggaagcaagccctattaggcatgtgatttgcccagcctttccctgttccagagcctccaaagtccgcttgccgagggccatgactaaagcggtggccttctttttatcctgttcgtcccgttccgcctgctcttcctgatctctattataaaaaaccaaggttaccaagttaaatagggtttctaagttttgctcggggcctaaggcggacttttgaagtttttt

SEQ ID NO: 383964 - DNA, 472 bp, Homo sapiens
aactcctggccctcaatggtcaagcatacccggggctctgtgagggtgatggcatgggctggcgcttgccctgggcaccctcagtcctgctgctggatcatctggttagtggcttctgacccagaggaccttcattccctggggaagtgggccttccagtgattcccttcacataaggggcatggacaaggaggtggcttatttctatttggacaatcttttttaaagtgtccgtgtaggccgcagtggaagcaagccctattagrcatgtgatttgcccagcctttccctgttccagagcctccaaagtccgcttgccgagggccatgactaaagcggtggccttctttttatcctgttcgtcccgttccgcctgctcttcctgatctctattataaaaaaccaaggttaccaagttaaatagggtttctaagttttgctcggggcctaaggcggacttttgaagtttttt

SEQ ID NO: 383965 - DNA, 472 bp, Homo sapiens
aactcctggccctcaatggtcaagcatacccggggctctgtgagggtgatggcatgggctggcgcttgccctgggcaccctcagtcctgctgctggatcatctggttagtggcttctgacccagaggaccttcattccctggggaagtgggccttccagtgattcccttcacataaggggcatggacaaggaggtggcttatttctatttggacaatcttttttaaagtgtccgtgtaggccgcagtggaagcaagccctattaggcatgtgatttgcccagcctttccctgttccagagcctccaaagtccgcttgcygagggccatgactaaagcggtggccttctttttatcctgttcgtcccgttccgcctgctcttcctgatctctattataaaaaaccaaggttaccaagttaaatagggtttctaagttttgctcggggcctaaggcggacttttgaagtttttt

SEQ ID NO: 383966 - DNA, 648 bp, Homo sapiens
cctcatttaattaaaaccactgtgcccaggtgaagtattgaaaatagattttacctggttcatttctgtcgtcataaagtcgccgatgggaaaatgaatccgttttcctttttccacacaacaagtagcccacaagagtaagcaatgagacacccagaatagcacctaaaatggccccgaatactattcctgtatttctattttctacaggacaaaaaaaatttaaagaaatataaaataattattcaaagaaccgaactctatgcatgtgaactttccatataacaaagaatgtttaacattttaaaattagataatggtgtgtttctctctctgtgtgtgtgtgtgtgtgtgtgtgtgtgtgtgtgtgtcttgtaaagtactatttgggatatatgggcaaacktatttgttgataaaaccacacttctaatttttaattacattgaaatacttctaagtcttagctctatagccgtgtcttgtgtcttgttcttattaacatcagtggcactgaaatgccatgtgcatactccattaagatctaatatcagtgttgaactttaatgatgaaatgaattttgcacttgtttctgtaaataattcaaaggttaaaagccaataggagtaagtgggtaatagaaaatg

SEQ ID NO: 383967 - DNA, 492 bp, Homo sapiens
aacaaactcactgccttgactaaatttacagtcagtataggagtcagacatgaaatctgtatattcataacmggtattgctctcagcttctacctagttttcttgccagaaagctcagattctcagttctgagtcttcctcttccttattcctccaaacttttctcaagaataatactggatgttagtcatccaaaaagggtcctgttccgcttttaaagggaagtctatttattctagagctctcactctcaaatcactcccaaatggtgtctttgtttaggttgaatctcagcaggacagtgtccatttgtctactcttattcctgaacagagagggttctcatccacaattacagttcttttagtccacattcacattcttaggatttgtttcctactgttaaataaattgccaggacagcatgatcaggaggtgtattcaacctcaattgcatgttgttggaaccagtcgtccctgcaaactgctacc

SEQ ID NO: 383968 - DNA, 510 bp, Homo sapiens
aagaggggttaaataatttttctaaggccatagagctagtaaatggtagagatggaatttgtacttaagtctttgtgatcccaaataccatgctttttcatttatagcatgtgatttcttccaagtaggcagtaaagattgaggaaattcaaactatgcttggtgagaggcaagttggtgcaacactggtagccaacacgatgatttcaaacgaaggatctttgtcatcatcttacctaagaacttttgtaagcataaagcaggaaaatgtataataaaacttaacacgtctttcacttgccctggatgaaggagtcattcaaatagatgtatgcttacactttacgttttaaaaagtttttctcatctttatcattccttcacaaaaaccttttcaccaaatttggaagattcactaaaagagamtggaaaaaaagtcacggtcttctcttttctctgatcagtgacagatttccagctgggtgatatatttttaaacaaatggttatt

SEQ ID NO: 383969 - DNA, 570 bp, Homo sapiens
gtgttttaaaatatctttagagatttaagtttgccaagggtcagttgtacgttgactaatacaactctcaagactcagtggcttaaagcaaaaactttttttctttttttattattacttaacaccatccatgtagcatgggtcagtcagggctgttttccactttgccttactttggggcccaagcagctactgtttggatcacctctgaaaaacagaaagaaaagagtgaaagggagagcatagtaaatcatacactggctcttgaaactttacctggaagtgactctgctcatctgtgaagcaagtcattgtgccacacctgacttccaagggtagagaagtgtgatgttactgtatacctggaaagtgtagaagtctttcatcaacarcactaatgatcacataagacttctattccctttgaaggttcctatcggttctagtatagagctttgaacatggggggaaatcagtaaatgctaactctttgcttgacctgaggtatattcattccataattctctcttgacttgattttgagtggtggttctcttggagatgaaaccc

SEQ ID NO: 383970 - DNA, 613 bp, Homo sapiens
aataggtttaatttgctttttacaaaaaaaggcctcaggaaattaaaaaatttgcctaattggaattctaaaaaacatagttttttttttcttaaaacaatacccattttatgtgattttaacatatccacttctgatggtagcttctctagggaagcaagacaaaaatatccaattacaccaagtaaaatttgccacctaaagtttatcttctgggtatggctggggagggattatagggcttggagcccacacatgcccctttggcaaatctgatctcattctatcttgtaagcattgtcagtggtgtcatctctgaaaagaaaacctagtggcagatgagttgagacagttccttcagtgtgggttattaatttatctttgtctgtagaatactggtttcctttatcaccatgctcttcctgtccctgcatctttcaaagtgctcctgggattttgcttatgctgtgtgatgcttatcagagtggtctctgccctatcttgtgcagtcagcgcagaaagggagccagggagattmtggggcaagccctgacacatttcccatgttcccatctttgcccatgttcccatctttgcccatgttcctatagtc

SEQ ID NO: 383971 - DNA, 635 bp, Homo sapiens
aattggttaagctctatgcccccaaacctggattctcttgtgtccttaaagcacgaataacttaaagcacattaccattattaaaactaccatggttattgctgttgttttaggagaaatatgcctcgataaagaaaggccacattttatggcctttgctgacatattcagcttaggatgaaccaagaacagcagctctctttttcctcactcatgtttaattactttttctgtcttgaaaattccatttgcgttaggccctctctattcacagcattttaattaatctgtagcatgttcctagccacattcctcaccactgcttctcctttcaatagataaagcgaataaatgtaacttmgagtcagaaacaggattctctcactcatgcgaaagcctgtgaaaatattattggaatactcacaaaaagaaaaggagaaagaaaagaaattgtattctaaggccaattgtctgctttatttttatagctcaatgccatttttatgatttttgaatagccgaagaggtctttctcctttcccctgtattttaacccactagtcatttatgagacctgcatcagctcacttcaccctgggcagtagctctatggatgtccatttctgacaattagc

SEQ ID NO: 383972 - DNA, 554 bp, Homo sapiens
ggatcaggagacctgtcccaactggcttcatgtaaaatatttatttaagattttctgcatctgtagtcaatgagatggaatccttttctcccacagaaccctccttgagctagtaaagtctgtacttgaatccatgctcttttgtctgaggcagatyagattggggaatatgataaatcaaagtgcttactcaaatattaaactctaatgaagtcttggcatttaaaaatgtgctattacaattaactagctggctccatccctcctggaatactatcttttctctttctccaggagtggtgactacattctgctgtagtcagatttttgactttctagaaggaatctccttgtgaggtagaaagggaagcccatctgaaggtcatttgcatattccaaactattagccactattgaaaatgaaaggactagattattgatgtctgaattgattggcagtaaatggtgtcaagatgcaagagcatgataagctcaagatgtaagagcatcataaactcaaaggagtatttagcatctgcatatcaaaattgtac

SEQ ID NO: 383973 - DNA, 516 bp, Homo sapiens
agtacccgagatatgcagatttttgattgayggattttaatgggaagaaggcttgaaagttgaaatcacttggtatcatctacttcggacccccagagaccagttggctacgtgggaatggaggctgtacataggttggatagctaggagtctccttcaggtcactcctaatggtccattctctctttctacccctcttccctgtttgcttggcaaatctgataaatatgctctagtttatagttgttctataagatttgctccaggccagagctggaccaagtgacttcctaaaggtttgcagctttggaattgggcagtcttaaatttctgtaaaagaatattgtcatcacatgagtagtccagaacctcatttttccccagatatgctttgggcaaagatcaccaaatgggcaagttcttcccactccctcatgtatcatccattcaatcccacctgttttgcacatcttggacaggttttgttcccagtctagactcttagagccaccactg

SEQ ID NO: 383974 - DNA, 516 bp, Homo sapiens
agtacccgagatatgcagatttttgattgatggattttaatgggaagaaggcttgaaagttgaaatcacttggtatcatctacttcggacccccagagaccarttggctacgtgggaatggaggctgtacataggttggatagctaggagtctccttcaggtcactcctaatggtccattctctctttctacccctcttccctgtttgcttggcaaatctgataaatatgctctagtttatagttgttctataagatttgctccaggccagagctggaccaagtgacttcctaaaggtttgcagctttggaattgggcagtcttaaatttctgtaaaagaatattgtcatcacatgagtagtccagaacctcatttttccccagatatgctttgggcaaagatcaccaaatgggcaagttcttcccactccctcatgtatcatccattcaatcccacctgttttgcacatcttggacaggttttgttcccagtctagactcttagagccaccactg

SEQ ID NO: 383975 - DNA, 509 bp, Homo sapiens
ttaatgccttcttctcttacaaaattcaaataattggaatttgccactgtgcttcctggtgtttacgtgtgcatgagggtctctgacagggtctctgagacatctctatttgcatgtgtaataacttgttgtaaaatctttgcattcagttgttcagctgaatctcccaggactttcaaagatctttgggaaagggaatgccattatgtgcagtcattagccccataaaagaagtcaccaaacagtgtcacctcatttcttcttcccaccacccttgcttcacctccctgacaatggtttctaggcacacacctccattctgttcttgcttctattggtttctccttcatcactcgtcaataagaaacaacaacaaaacccaggcatttggccaaatgacctttccacctgtcttatctttctgtctgatttcattctrtgatgacagaatggaaaatccttgaaggcaggtgctatacttattcataatttatattcaagaccaggca

SEQ ID NO: 383976 - DNA, 361 bp, Homo sapiens
atataaagagttgagaaattctcacctaaacttctcaataaaaatactgaaattaaacaaacactttttgatagtttttatggtagatatatgaaattgatgggactcagagaagaatctcgttctcagagtggggagactagctgtgatgctccttttagaatgatacttagtattcgacctgtccaggcattgttgcaaggaattggtgaggagaagaataaggaacctgggtgtctttcttcaactttgtcatggccccctgacttcttcagttctagccttaggattccttctgctgtcagaggaacagggaaggaytttcacagtgcatggtcatttagctaacatcccaggaagc

SEQ ID NO: 383977 - DNA, 559 bp, Homo sapiens
gcctaacctgccagacatcatagcctagcttagtttaaacatgcccaagccatttatattagcctacagtcaggcataatcatctaacacaaagcctattttatcataaagtattgactatctcatgtaatttattgaatactgaacatgaaaaacagaatggttatatgggtactcaaagtacagcttttactgaatgcatatcgcttttacaccattgtamagccaaaataacattaagttgaaccaataagagggactgtccatattctcttgtttctctcagataacaaaaagtcacaaagtcacttacatagaaaaactcagtcatatctaaaattaaaatatcccatatcgtctagtattcaatgctccaaactcaatttagagttgcagtttctcacgtctcttggctgagacttgcagcaatttaaaagcaaaaggaggccatggtcaactttctctctttcctcacctggcacttctcctcctcatgcccttcttactgaccaggacatctgagggaacagagaagcatgaagaaagcaaaggagctgtc

SEQ ID NO: 383978 - DNA, 633 bp, Homo sapiens
gctaggggagggatagcattaggagaaatacctaatgtagatgacaggttgatgggtgcaggaaactaccatggcacatgtatacctatgtaacaaacccacacgttcagcacatgtatcccagaacttaaagtaaaataaaaaaatataaatataaagaaatttgaagcataaaagcattttctttaaaacatacctggattgttaaatttcccaacatgcttattagggaaaaaacattttttgctatttgactgagtctaagatatttgaaagttgctcagaaccactttgtcaagatctaatcactttctacttaaaataatatcttagtttctctsatacaagttacaatggagttttcagtctgagttttcctgtttatcctcaaattctcctgattaatctggtgacttccattttaatggaatttcattgggattttcattaaaatataaactagaactactttattttcatatttttaactaaaaacatgtacagagatgggattccaaatggatactgggagttagaagagaaaaagaatttaatatcagtgatttacagttctttgtatcaaggattttagatgttaaaactattatatactgcagaagatttattggttga

SEQ ID NO: 383979 - DNA, 633 bp, Homo sapiens
gctaggggagggatagcattaggagaaatacctaatgtagatgacaggttgatgggtgcaggaaactaccatggcacatgtatacctatgtaacaaacccacacgttcagcacatgtatcccagaacttaaagtaaaataaaaaaatataaatataaagaaatttgaagcataaaagcattttctttaaaacatacctggattgttaaatttcccaacatgcttattagggaaaaaacattttttgctatttgactgagtctaagatatttgaaagttgctcagaaccactttgtcaagatctaatcactttctacttaaaataatatcttagtttctctcatacaagttacaatggagttttcagtctgagttttcctgtttatcctcaaattctcctgattaatctggtgacttccattttaatggaatttcattgggattttcattaaaatataaactagawctactttattttcatatttttaactaaaaacatgtacagagatgggattccaaatggatactgggagttagaagagaaaaagaatttaatatcagtgatttacagttctttgtatcaaggattttagatgttaaaactattatatactgcagaagatttattggttga

SEQ ID NO: 383980 - DNA, 559 bp, Homo sapiens
gcctaacctgccagacatcatagcctagcttagtttaaacatgcccaagccatttatattagcctacagtcaggcataatcatctaacacaaagcctattttatcataaagtattgactatctcatgtaatttattgaatactgaacatgaaaaacagaatggttatatgggtactcaaagtacagcttttactgaatgcatatcgcttttacaccattgtaaagccaaaataacattaagttgaaccaataagagggactgtccatattctcttgtttctctcagataacaaaaagtcacaaagtcacttacatagaaaaactcagtcatatctaaaattaaaatatcccatatcgtctagtattcaatgctccaaactcaatttagagttgcagtttctcacgtctcttggctgagacttgcagcaatttaaaagcaaaaggaggccatggtcaactttctctctttcctcacctggcacttctcctcmtcatgcccttcttactgaccaggacatctgagggaacagagaagcatgaagaaagcaaaggagctgtc

SEQ ID NO: 383981 - DNA, 527 bp, Homo sapiens
aataatcatagcttctctgtctcctccagtctaagtgtataagcaactatgaatataggtggctaaaacattatacagttgtgcatagcacacatgcttcaccaatgtccaaaatacttttcaatctcctttgtcattcaacttattttaatatcccgtctaggtactrgagattgaaatcagttggtttcttggttctgtaaaagaaatggcacaatagccacagacttgataagctttcattccagatgaatgatcttgtctagagagacagctttttctgaaggcaggttcacccaactctccataataaaaatctcctatactccagctggaactttggaaaattttcaggaaaattcaaacaccttgaggtgctgtgggaaggtcactttatgtagcaggacattttagttacgggggttattgttgcacagcatgaaacaaaaaagcaggagggagtgactttgttcagcattttctaccaaaaagatctaggctttcgtcacacagtggtcaacaagcag

SEQ ID NO: 383982 - DNA, 580 bp, Homo sapiens
ccagacaagaaagcaggcatatgatcagctggattctggcttatccaygcagcaggtcagctaccagagtttactcaagctctttaataaatttatactaactctcttgccccctgaaatttggactagaaatcaaactaaattaaagtgggcattgtcagcaattttcattttattgttgttttgggttaaatgtgtaaggcaaatcaaatcactggaactggttttgctggtttcagttacaatgtttcatcgtaactagcatttatactttttcccttttcccgctcattctgtctcttcattcgctttccttcattccgttcttaatttagtgattatttcaaataacatactaagaaaaagtgctgacacataaagctggaatcccatgtctgcctcttttcccccaacaaaaaattacgctgttcaattctttttaaaaatgtaacttctagccattcagccttcagacataataatataaatctatttcttcacccaattttaattcagttgcacagtgcatagtggaatgagcttggaaaccagacaaaaattagagtaataaaagcagaca

SEQ ID NO: 383983 - DNA, 450 bp, Homo sapiens
aagtttgttgactgaatgaaccaaatgtcaaaatatgaaataagagcagtaaatgctggggaaatttggaggaagtttgtccattgtgagttgggaagcaaaggaagtgaagacctcatgaaggtaaatagacctaatcctctgaataagattgaaactagcaagggacaggaatggatcaagttcttgggagcagatattgtgtctgyctggttcactgtatgtttctagcttgtagggcagtgcttaaacatagtaggcattcaataaatattgattatacgaatgaatggcttctatgtataaggaattttgctggtaaaaataaatcagaattgaccatggtatctattatgagaaagtgagataaggaggcaatcagatgacaggatggacaggcaggagggagatatggtcagcaagggaaaattaaagcagatttgggaagct

SEQ ID NO: 383984 - DNA, 553 bp, Homo sapiens
taaagggtccaatgagagctaggtagtagttgtcctcacaaaaacctatgacaacgtgacatttttgtttttcatcacagattaaagtccacaggtttctctgcttaagaggatcatgaagtgcttttgctataaacttagggttccagccttaggccagaaagggcaataataggaaagggaatgggatacaagaggaataatttgtgtaaatttgagtgaagactctacaaatttggaccctgaaaaggatcaagctacaatttaggcaggaggtgtaagcagccaaaaatagtgtcattttctttgtgtacctttgaaagactgggacatacwtgactagtgaaaaaagaaaacataatgtctttgaaatgtgcccatatgcatcaatcacctctgaagctcttaaacttcaagaccttccttggacatctttaaacaaattaactgtctggtccctagcctaatagcagcagtatttcagggcccactggaaaggctgagccttttctctcagtgaaaaaatggtgattgaagaacttttcagacagag

SEQ ID NO: 383985 - DNA, 573 bp, Homo sapiens
atcagtaatctcccagaaaataaacttcatgaggacagagcctctgttttgttacatagagcctagrctagtaccttaagaaatatttaaaagatacttattagtaaatttaacaaatatttgttgaatgaaggaaaagaagggagaccagcagttgccagtttggagaatcaagattggccagcattgtgatatccccagagacaagacaagagggccaatgaaaacctaccaaggccaattatgagaacacatgggagagaggtcctggggtgctgcagaaagaaaatagagaataaaagaaatttgggggtaatcattcctcaggtttgaagtataagtgaagtcaactcatttgtggatcaattttttttctaccttcatctgtattgatttatcacttctgttaagagtctaccctgaaacctaatcactttactttcagtaggctaatcctagattcaccctagaggtcatttttagttactcctaatcatactgccttctaacaagccaaataatttctctccatctttgatgtttatgcctttcaaatatttgtagagcgttatc

SEQ ID NO: 383986 - DNA, 617 bp, Homo sapiens
cacaaaaattagttcaatatgaaccttagactttaatataaaaatctaaaactgttaagcttttagaagataatatagggcagtaacttagggcaggcatcttagtctatgttgtgctgctataatggaatacctgagactgagtaacttataaagaacrgaattttatttctcacagttttggaggctgggaagccccagatgaagtcattgacatctgctgtctggtcagggcctttttggtgcatcctcacttggcagaaggtagaaggccaagaaaagggacaaattctctctacagccatttgtgggaaggtgcgtaatcccattcataacagtgaagccctcataatttactcacctcccaaagggctcaacacccaatactgttgcatgggggactgaattttcttatgaattttggcggagatgaaaacattcaaaccataacaataagcaaagatttcttaaataggataaacagcaatagtaatttttaagaaagagaaattatactttctcaaaattaaaaaacttttacttattaaaagacaacagtaagaaaataattaggcaagctacaggttgtgataaaatatcatacagttatattaaat

SEQ ID NO: 383987 - DNA, 617 bp, Homo sapiens
cacaaaaattagttcaatatgaaccttagactttaatataaaaatctaaaactgttaagcttttagaagataatatagggcagtaacttagggcaggcatcttagtctatgttgtgctgctataatggaatacctgagactgagtaacttataaagaacggaattttatttctcacagttttggaggctgggaagccccagatgaagtcattgacatctgctgtctggtcagggcctttttggtgcatcctcacttggcagaaggtagaaggccaagaaaagggacaaattctctctacagccatttgtgggaaggtgcgtaatcccattcataacagtgaagccctcataatttactcacctcccaaagggctcaacacccaatactgttgcatgggggactgaattttcttatgaattttggcggrgatgaaaacattcaaaccataacaataagcaaagatttcttaaataggataaacagcaatagtaatttttaagaaagagaaattatactttctcaaaattaaaaaacttttacttattaaaagacaacagtaagaaaataattaggcaagctacaggttgtgataaaatatcatacagttatattaaat

SEQ ID NO: 383988 - DNA, 592 bp, Homo sapiens
agcatttcatggcatagacgtaatacattttctttatccaatccacgtttatgggcacttagactgattccatggctttactgttgtgaatagtgttgagtatacaatttctgaaacatattgcttaagcagaggtgaatctctgtccatctgaattccagctgaggtattttctagtgaataagctggagccctgacaccagaaaggtctggttttgagtcctgtttttacccactcctggttgtatgatcttcagtaaatagtttcaaatttctaagcctcagtttcataaattttgacactgggataataagaaaagcgctaaccttataggactcttgaaaggattaaatactatactccatgtgtaatataakcaaaacacttaatccagtgtttggtgtataataaagcttttaatacatgctgattcctattactgtaacagggatatttaccacacagcttgggctggatctcatgtgtcttggtctatttccagaaaaaagaaaaatttgccacagttctgccataatctaagaagtccagaaatctagtagtttatttccctccaaggcgacaactatccca

SEQ ID NO: 383989 - DNA, 571 bp, Homo sapiens
aaaaaatgtccacctttgaaatgagtctttctctcagtcccatcaaggaaaaaatatagcatgctagtatagcagagtaattcagaacaatggcttgaaaagacctgtgatcaaatccaagctgtgcttcttgcaacttgtgtgatggtgtgaatgctggtgaccctcyaaacctcccctgcattagctacaaaatgaagagagtgcaaaggaaattcccttcatagggttgttgtgagggtcataggggaaatcaggggtaaagcatttagtttggcgtttggtacatggaaacactccagaattgtagttgttgtattgcgtcttttaagaagcaggcaccaagacagaatcagacatgcaaaaagtaattgagggatatgtctgtgaaagactaaggggagacctcaatgttgatctgatccctgagaaaggagttggggatgaaggattgggcagggaaactctcagactgcagcatagttctaagaaagttttggctaggctgatgggcagtcttcaaaccaaagctgtcctttagagaggtgcttctttccacaggaatgggcca

SEQ ID NO: 383990 - DNA, 598 bp, Homo sapiens
gtcctagtcctaaccaccatgttataccatatcccacttccaggatacatgacaaattggagaacttcaaygcagtgaaatacagaactgaaagtgctgtaacaattaagagctttcttggcaccagaagcagccttccatcagcttcagtgctcagcctgcattcccccaggcagcctgacctcctgcaaccaaccttgggaggaagtgaacactgaccgtgctgctgggacaggactgtgaaatcatcctccacagcatgctgccacatttcaggatagctgcgttgtgctctttcgcattctgcttcctctcttccaacctgacttcagtctctccctcgcatacataccactgcttgcctactgctttctgcctttactgcctccactatagaagtagaaagctgaattcactgctcaatctctgtgaaagctagtggtgtccacggaagcagctctggaccatgggacacaaagggagatctgatgggggatgcctgggaaagatatttcactttctgatgaaacagataggtgcaagaggagacatctctgataatgccatttccccttctccctgtcctgagaacagatgt

SEQ ID NO: 383991 - DNA, 504 bp, Homo sapiens
tgattgaaaactttgtgggcatgaacagagctgtcagctgtgtattttgctgtagaatcacatggtgatgatgctatataatytttgtgtttaccactttaatcattcatagagtaaacataacatagttaatggtatctttactgattgatgatagagtacacatttaaagttctgctactagaaataattcttggatgaatatctttttatatatactgaattatttctttagaagatagttcattttctgagtttggtcaagatgatgcagtggggctggaaatggcctatttggttctctatgatggtaatatcatgggaacattctttcttcttcacagaataaaactctctgtgagtccaggtcagtgcaagagagtctaagtctctatagactttctcagatgcaaagccaaaattcatcttaatttgtcacattgcagtattcttttgttcagctttagagaagaagatattttgctagagataatacttagaatc

SEQ ID NO: 383992 - DNA, 546 bp, Homo sapiens
ctatataaaacatgttgacccaatgactactgaataaatactcttttccctgagtgaaatgcctttttttcccttatctttatgatcaacagtcctttctgaagaatctgttcaaatgccatgttttgttttaaaatcttgccagattctttcatcttcttatttataccctacaacaacctacatgtgaattaactcctttctggctttatgtttctggtagccaaatgtctggtatgaaattctataatatgttgagattgtttgtttatgtgaaacttacaaaatgatgagatctaagactagtgatcacaaactcactcatcttcagtttccaagcatctggctagcagagttcctagcttgtaatcattattgaatccatgaatgaatgaaggagtgaagaataaatgagctagtatcagtgcctgaacacctttgtctggtccttgcagccccctcccaactgccttttcttccttctctcaagtatttcagttcttagttctttgctccaccaarcaaatcacctgcggctttgctcat

SEQ ID NO: 383993 - DNA, 488 bp, Homo sapiens
caaaagggagagatgctgagatttatgcccagtawgattagctatacatatattcagtaggttataggagcatcttgttaatatttatgagggagtctaacacatgcatagtgaatacacatatattacatacaacccatgttcactttgaggtagagacttaacatccaaatgcagtaaaattaggctctatacaccaaaaggtgaaacatagggcataaaggcacttagtgcacagtttctgtaaactggccagaatctgtctgtggttggtggacagttattaggatggaatgctttgcaaggctggccgtgtgtaagagtgaaactttgatacagacaggagggaggtggaccacaatgtcggatggtctgtcgaggttgcaggggaagtcttccagacatagttttttaggaactggtttttctttaattgtaggaaagtcttgaggtggttaatgagataggggagagttgaggcatgactg

SEQ ID NO: 383994 - DNA, 488 bp, Homo sapiens
caaaagggagagatgctgagatttatgcccagtatgattagctatacatatattcagtaggttataggagcatcttgttaatatttatgagggagtctaacacatgcatagtgaatacacatatattacatacaacccatgttcactttgaggtrgagacttaacatccaaatgcagtaaaattaggctctatacaccaaaaggtgaaacatagggcataaaggcacttagtgcacagtttctgtaaactggccagaatctgtctgtggttggtggacagttattaggatggaatgctttgcaaggctggccgtgtgtaagagtgaaactttgatacagacaggagggaggtggaccacaatgtcggatggtctgtcgaggttgcaggggaagtcttccagacatagttttttaggaactggtttttctttaattgtaggaaagtcttgaggtggttaatgagataggggagagttgaggcatgactg

SEQ ID NO: 383995 - DNA, 618 bp, Homo sapiens
tcatgactttacaagaaaaagctgaactgcttgatatgtaccacagattgaggtctgcagctgtggttgcctgctgtgtcagatcttgtaaacagataacataaacttagagtattgataaatacagtacagtactgtaaatgtattttctcttcgtgatgattttcttaatgacattttcttttctctagcttactttattgtaagaatatagtatatratacatatgacatacaaaatatgtgttaatagactgtttatgttattggtaaggcttctagtcaacaataggctatttgtagtgaagttttggggtagtcaaaagttatattcgaatttttgactgtatgggggacaggtcagtactgtaaactccatactcttcatgggccagttgtccaattcagtggcattaagtacattaacattgttgtgctaccatcaccaccgttcatttacaaaacttttcatcttgcaaaactgaaactctgtacccattaaacaataactctccaattccccctccccaagaccctgacagccgccattctattttctgtctctacggatttgactgctctaggtgcaggacctcatgtaagtgaacatacaatattt

SEQ ID NO: 383996 - DNA, 534 bp, Homo sapiens
tcaatactaaggcctgagatttccttgacctttcaagtgtgtaacatggctgctgcaggtccagccattacatctgcttctcttgaaggtgtaaggaaaaaaagacaaggagcaaaggtcagggtctctgttaggaaagcaaaatttccccagatattctcagcagttttctgcttgtgcttccatgtctagagctgtctctagttcctggaagttcctagcttcaagcatgtctaagaaagacttcatttgagtaccttgctaccttatagtcttccctagcttaataattttttctgtacctaatgatttcagagtgagatrgtgaggtgatcatgggcaaaattattagtctttctgagttctcttattccttttatatcattgaatgttcttttttgtggctattgttaggattagtgtttcaatgtgaatggcagattgaagcttcagagtgctttcactcatcttcagttgtttctccgagttgccttgagagagagaaagaggtagttttagccctattttgtaggt

SEQ ID NO: 383997 - DNA, 587 bp, Homo sapiens
gacaggctctccagagtactagccttccactctccctcccttcccatgctcacatattggctagaagatgcttaagtgggcaaggtcctgaagacattcttttgtgcctttgctcagacagaggacatgtgatgatctcagtcagtttcctttcatttcatgggggccgctgatgtctccgtgtagtgtatgtgatggttaaattataaaaacaggaaaagaccccaaagcctgcatgacctgcacagttttagctgtctgggtaggttcataacggctttagaaatgcaaacaaaattccccaaactaaaatgacttctgatggttctggtaaactgaatgtgacctttccagaaagaagactacaaacaggtgtgattatctttcactacaggagcagttcccaaacttgagtgtgcatcagaatcacctgaagggatagttmaaccactgatttctgggttccacccatagtttgtgatttaagaggttttgggaagggcctgagaatttgtatttctaataagttccaaggtgatgctgttgtcacttgcgggggaacctaacttaaagaaccatggcaccat

SEQ ID NO: 383998 - DNA, 513 bp, Homo sapiens
actcctacttagcactcagggatagcctgagccttccgaattgaaaacaagtaattgcaaaggagaataggatttatcacaaggcgaggtccaagtgaggactttgggggaccgaggcatcagggaccaagggctcagtttccagctggtcacccccacccccccataccttgtacattgatgtacacaacttttgttttcttctttcacttgctttgaccccataattcccatttttttttaaaaaagcaaatcaccactctgatggggrgtggggagaaaggtaggaaaataatagatgattgtttaggaagacaggcatacaagtggatccattctacacagtgcttgtagaaataaagtctatttggggtttaagctgaagaaaactgctcactgagactgcctgttgctataggtattataccctttttgcagttgttctaataatgtatttgtgtataacattccatatgtatttagaagcatatcagaactactcctgaataagtg

SEQ ID NO: 383999 - DNA, 513 bp, Homo sapiens
actcctacttagcactcagggatagcctgagccttccgaattgaaaacaagtaattgcaaaggagaataggatttatcacaaggcgaggtccaagtgaggactttgggggaccgaggcatcagggaccaagggctcagtttccagctggtcacccccacccccccataccttgtacattgatgtacacaacttttgttttcttctttcacttgctttgaccccataattcccatttttttttaaaaaagcaaatcaccactctgatggggggtggggagaaaggtaggaaaataatagatgattgtttaggaagacaggcatacaagtggatccattctacacagtgcttgtagaaataaagtctatttggggtttaagctgaagaaaactgctcactgagactgcctgttgctataggtattataccctttttgcagtkgttctaataatgtatttgtgtataacattccatatgtatttagaagcatatcagaactactcctgaataagtg

SEQ ID NO: 384000 - DNA, 632 bp, Homo sapiens
ccatagtgtttttcaggatggagtgggagtgagaaaggagtgtctcagaggagggatcagastgtactcggctctgtcgttggatagccagcgactccccatgatgtccaggtgacaagtgtgatgctaagttttgcagccaactggcaaaagcacagacacctttaaagagtacttgacctgcctaagagaatgattatttttgtccatgaaataagtagcaaaaaatatatagtaagactctagggattctcctgttctactcctggttttgccaactgaagtaacccttgaccttgggccacttttctcaccatcaccactttaggcttctgcaaaatgaagaggttgaagtgaaaccaaatcaccttcccatatattttttgtagttctaagtggggtgagaaaatgcaaaaggcctgctcgggggtttctccacggggatgtgggggcggggcaggagaaagaggggacaaggagataccaaagccagcttccagcgcgctccttgtaacaaggcgccacgtaaattttaagggcctggaggaaatcttctctttgataatgctgaccccggagagcaggcggtgttctaaaggagggagatgagcaagttccaagggggcgggtga

SEQ ID NO: 384001 - DNA, 632 bp, Homo sapiens
ccatagtgtttttcaggatggagtgggagtgagaaaggagtgtctcagaggagggatcagagtgtactcggctctgtcgttggatagccagcgactccccatgatgtccaggtgacaagtgtgatgctawgttttgcagccaactggcaaaagcacagacacctttaaagagtacttgacctgcctaagagaatgattatttttgtccatgaaataagtagcaaaaaatatatagtaagactctagggattctcctgttctactcctggttttgccaactgaagtaacccttgaccttgggccacttttctcaccatcaccactttaggcttctgcaaaatgaagaggttgaagtgaaaccaaatcaccttcccatatattttttgtagttctaagtggggtgagaaaatgcaaaaggcctgctcgggggtttctccacggggatgtgggggcggggcaggagaaagaggggacaaggagataccaaagccagcttccagcgcgctccttgtaacaaggcgccacgtaaattttaagggcctggaggaaatcttctctttgataatgctgaccccggagagcaggcggtgttctaaaggagggagatgagcaagttccaagggggcgggtga

SEQ ID NO: 384002 - DNA, 632 bp, Homo sapiens
ccatagtgtttttcaggatggagtgggagtgagaaaggagtgtctcagaggagggatcagagtgtactcggctctgtcgttggatagccagcgactccccatgatgtccaggtgacaagtgtgatgctaagttttgcagccaactggcaaaagcacagacacctttaaagagtacttgacctgcctaagagaatgattatttttgtccatgaaataagtagcaaaaaatatatagtaagactctagggattctcctgttctactcctggttttgccaactgaagtaacccttgaccttgggccacttttctcaccatcaccactttaggcttctgcaaaatgaagaggttgaagtgaaaccaaatcaccttcccatatattttttgtagttctaagtggggtgagaaaatgcaaaaggcctgctcgggggtttctccacggggatgtgggggcggggcaggagaaagaggggacaaggagataccaaagccagcttccagcgcgctccttgtaacaaggcgccacrtaaattttaagggcctggaggaaatcttctctttgataatgctgaccccggagagcaggcggtgttctaaaggagggagatgagcaagttccaagggggcgggtga

SEQ ID NO: 384003 - DNA, 422 bp, Homo sapiens
gcacctaccccatccctccaggacagagtttctcaatttctggaaaacatggaagccacatatgaaattttggtccccttttcccccccaaaaaaatgtgcctagtctagcacccatacaggtactaaatcagcaggtctggggtttgttttttgttttttgtttttttgagacargttctcactctgtcatgcaggcttgaatcggcagacctgaagtgggaaccaagcacttggatacccaccaaagattaaaaatcatggacctagtgggtcaaatctgtgagtgccattctatccagggaacttgtccagctctgacataactgaaaggctcactaggtaaatatatatccaacaaattcttcttttttcttttttcattttagaatcataaaatgttgcatcaattgggtaagcacc

SEQ ID NO: 384004 - DNA, 586 bp, Homo sapiens
ccctgatctctaaaaatatttaggcagaggaggacacaaacaattttaggtcatccttctcttgcctcgcaatacaactcttgaatctagttttatttttttctcctatgtttatggaactatttgtcataaatactttttaaaatattataataccctagattatacatagtgattatttcttattttatgtaatttttagcatactttttaaaatattggaatatcatattatgcataactatgatttttttctacattacacattaggcatacttcaacataaaaagatacgtgattcyggaaagataacaaacatctcacatcataatgtatactcatgcaaacatctcctagtgatgttacaaaataatagatgcatacaatcgagagctgggagggacattagagatcatttactcaacggattttcaaacgtatcttagctcaagaaccttttccacaaaagaaagcatcacagaaagcccccatgtgaaagaggtaaattctgagccaccctgattgaaacaggaagggagatcctgagctgctccacttctctgcttcccccaggccagcccagggc

SEQ ID NO: 384005 - DNA, 586 bp, Homo sapiens
ccctgatctctaaaaatatttaggcagaggaggacacaaacaattttaggtcatccttctcttgcctcgcaatacaactcttgaatctagttttatttttttctcctatgtttatggaactatttgtcataaatactttttaaaatattataataccctagattatacatagtgattatttcttattttatgtaatttttagcatactttttaaaatattggaatatcatattatgcataactatgatttttttctacattacacattaggcatacttcaacataaaaagatacgtgattccggaaagataacraacatctcacatcataatgtatactcatgcaaacatctcctagtgatgttacaaaataatagatgcatacaatcgagagctgggagggacattagagatcatttactcaacggattttcaaacgtatcttagctcaagaaccttttccacaaaagaaagcatcacagaaagcccccatgtgaaagaggtaaattctgagccaccctgattgaaacaggaagggagatcctgagctgctccacttctctgcttcccccaggccagcccagggc

SEQ ID NO: 384006 - DNA, 586 bp, Homo sapiens
ccctgatctctaaaaatatttaggcagaggaggacacaaacaattttaggtcatccttctcttgcctcgcaatacaactcttgaatctagttttatttttttctcctatgtttatggaactatttgtcataaatactttttaaaatattataataccctagattatacatagtgattatttcttattttatgtaatttttagcatactttttaaaatattggaatatcatattatgcataactatgatttttttctacattacacattaggcatacttcaacataaaaagatacgtgattccggaaagataacaaacatctcacatcataatgtatactcatgcaaacatctcctagtgatgttacaaaataatagatgcatacaatcgagagctgggagggacattagagatcatttactcaacggattttcaaacgtatcttagctcaagaaccttttccacaaaagaaagcatcacagaaagcccccatgtgaaasaggtaaattctgagccaccctgattgaaacaggaagggagatcctgagctgctccacttctctgcttcccccaggccagcccagggc

SEQ ID NO: 384007 - DNA, 633 bp, Homo sapiens
acgttagttcatttctctccagaccctgatttcctatgagaaaggaaagtgaatgacatttcaaaagggccttctgtgatttatgtttttgtatccatggaggtcttctcagagcctagcatttttctcataacctatggaagctccttttgtctgccttgaaagtatttattagctgaacaatttttttaggcaaattgaaaaaagaaatagtctaaaagtaaaagttaaatagagaggagttaggaaaaggaaaataattatttgtgaatttccagtagtaacaaatggtctcatctgaaaaaatacacatacacacayacactcacaccccgtaagtgtgtgcacatccatatgtatgtgggtatatgggtatgtatgaagagaatggcatttattattttagtacaccaaaatattcctacttttcctatactgtgttacagggaacacagatagactacttttatcttgtgcaaaaacaaacctttgcctaaaatgaattccagcatgaattgccatcagaacacaccccgccaggcccctaggatactcacagcacaatactagctctctgaagcatagaaagaaactaagtccctggccctgctttaaagagtttattgtcttcat

SEQ ID NO: 384008 - DNA, 633 bp, Homo sapiens
acgttagttcatttctctccagaccctgatttcctatgagaaaggaaagtgaatgacatttcaaaagggccttctgtgatttatgtttttgtatccatggaggtcttctcagagcctagcatttttctcataacctatggaagctccttttgtctgccttgaaagtatttattagctgaacaatttttttaggcaaattgaaaaaagaaatagtctaaaagtaaaagttaaatagagaggagttaggaaaaggaaaataattatttgtgaatttccagtagtaacaaatggtctcatctgaaaaaatacacatacacacacacactcacaccccgtaagtgtgtgcacatccatatgtatgtgggtatatgggtatgtatgaagagaatggcatttattattttagtacaccaaaatattcctacttttcctatactgtgttacagggaacacagayagactacttttatcttgtgcaaaaacaaacctttgcctaaaatgaattccagcatgaattgccatcagaacacaccccgccaggcccctaggatactcacagcacaatactagctctctgaagcatagaaagaaactaagtccctggccctgctttaaagagtttattgtcttcat

SEQ ID NO: 384009 - DNA, 632 bp, Homo sapiens
tgtgtgcacatccatatgtatgtgggtatatgggtatgtatgaagagaatggcatttattattttagtacaccaaaatattcctacttttcctatactgtgttacagggaacacagatagactacttttatcttgtgcaaaaacaaacctttgcctaaaatgaattccagcatgaattgccatcagaacacaccccgccaggcccctaggatactcacagcacaatactagctctctgaagcatagaaagaaactaagtccctggccctgctttaaagagtttattgtcttcatggagacactcgagacgtgcatataaaatctgatcatatcgttcccccatggaaaaccctagaatggttttccactgcacttaggatagaaagttaaaacattaagctgagcctcggtaagtctttctgtggcagaagggaacgcattgctctctgcatattcagygaggcatggtggcttcttcagctcctcaaatacaccaagctctttcagaccccaaacccttagcacctgctgttttctcttctgagagccttcttcctccccccttcaagtctgtgcttaaatgttacatactcaggaaagacttcctccaataaatcgggctattgttacct

SEQ ID NO: 384010 - DNA, 487 bp, Homo sapiens
attaggcatgtgtcctgtgccaaggaatcctgatgggctgaagtgagaattagacattatgggaaaatttcaatgaacaataccaggggcaggtaatcagtggttctccagggcttcakaggaagcaatggaaggggtagggagagaagtaatcacattaagatggtaaggtggtgtaattaaaagaggaaaaagtcacttaaatttactgagtactttttatgtgtcaggctcagaagccattttaaagcttaaacctcataacaacactgtgaggtggtcattattttgcctgctttaaagaggaagaaacaaaggcttaatgaagttaggtaacttgcccaggttcttgcagctagaaagtgctaatgccaggactctttccaaagcccaggtctcgttccaaagcgcaggtcttttccacatgccatagtatgttccttaaaagatttctaatgataatacaaaggagatatgaaaatgaaac

SEQ ID NO: 384011 - DNA, 542 bp, Homo sapiens
taccagttcatatagagcggctttaatgctaactcagattgttggactcttcctcttggacgggttcttagaaatgacctagttcaagcttttattgtgaagatgggaacagtgtggcccatagagggcatatgcattactcaaggtttcttattgcttgattttcatttcaatgagctttccatgttactatgctgtgtatgagtaaaggtgtgtgcacatgcacaaatgtgtgaacatattgggccagtgagttagctaatatttatttagtgcttataatgtgctatatttcatttaggagtcataacaagggtgagatacaaatgaggagaatgaggcttgagtagttaaataatttgcccagggtttcttgttctccctgactccaaaacccrtgcccttatatactgtattttacttcttctcttcctctaggagggaacaagattgggaaagtggggaaaaaggatgagaagtgctgaaaaatgggcaggtgtcaagtaaaatatttccaataaaacaagtgacactgttgtctg

SEQ ID NO: 384012 - DNA, 673 bp, Homo sapiens
atttacaggaatgggcagaagttccaaggaacctcagttttagtaagatctttctgactttgactctatacaaaaggagaatggacaggccaatcaaagtgagttgccatgggtgcatgctgggctgggattctkgctctgggagtaaagtcagtccttaaaccttggcagtcctcacaattgcttaagaaactcttgaaaacgtatatccctgaagatcctgatgcaatggaacagagacctgggacaccatgtttctaaaaagacccccagctgattctgataggcctctgagtcagttatgccatagattgcagcgaaggaacgtactgaggcagaacactgcaggagggtgagggaaggagcctgagagccagaacacctgggaggtggagatgatgccatcaacatgagaaaagaggtcccaaatattgatcttgagtcttctcctgagctgaggaaagagttacatcagtattgcagctcaggaagcaaacttttctcaagatgaagaggagacttggactctttatgaaagaattcaagagctaggataacctggtagcaacacaaagactccctgtgttgtactgcatactacatccaggttagtcctcatgttacaatgatgatgccattcctagtccaatgaaaaattcttccctatggaaga

SEQ ID NO: 384013 - DNA, 523 bp, Homo sapiens
cttcaaacaaatatgacagaggtgagtgcttgggggtgatgaaatactccaagtattttatgcctccaggaattctatttatgttacactaatctttgtatttgagtttgctcctattcgtgcgatgacttagcctgtgttttaatgattgcttgttcaaccattttggtatccggccaaaatgattagagcttgggaagaatgtttcagaacagttattttcgatagagcagggaatactccccgccttttttgagttttgttktattttattttatttttttttgtagtggtatcaggggaaggggcctggttaaattgttcactgtagagtgtgtttgactagttaacagctcttttcaattttctatgcttctctattttcttaagccttttttttctttttctactcgctaatctcctttaactttctttctttctcttttttcctagttctccttggattattctacagctattatgtgtacataatgaaccatctttagaaaataaaagtgacatc

SEQ ID NO: 384014 - DNA, 624 bp, Homo sapiens
ccaaatagctggtactacaagtgtgcaccaccatgcctggctagtttttttctttttgtatttttaataaagatggggtttcaccatgttggtcaggctggtctcaaactccagacctcaaatgatccacccgcctcagcctcccaaagtgctgggattacaggcatcagccaccgcacccggcagtatcttgttttttattttttttctttaactttctaagtatgaaggaagctacgattattctttccaaatctgtcaggtcattccattcctctgcaccaaaccctgcaatgatccccctctccgtgcaggaaraaaaacacccacagtcccttcaatacatccaatatgctgtgtgtgctgccctatggtctcacctcctccccactgctccctttcttcctgtgctcatttactgcccctcaggcctttcaccatttaaacagctgtgcccactagcctacctgaccactttgtaaggatggctcccaccacctgagtcactctttcatctaatatccatgcagctccacagctcttctttcagttttacacaaatactgtattttcattgtggttgccctgactgctgggttcaatacttcagatcccacacctagc

SEQ ID NO: 384015 - DNA, 612 bp, Homo sapiens
gctgccctatggtctcacctcctccccactgctccctttcttcctgtgctcatttactgcccctcaggcctttcaccatttaaacagctgtgcccactagcctacctgaccactttgtaaggatggctcccaccacctgagtcactctttcatctaatatccatgcagctccacagctcttctttcagttttacacaaatactgtattttcattgtggttgccctgactgctgggttcaatacttcagatcccacacctagcatgtccagctccccacatmctgtttcatcatattagatcacttaacatcttaaaatacactacatattttgctcacttattgtgtttactttatttttcctcccactagaatataagaccaaaaataaagatgattgtctgttttgcttttttgtctccctgatgtatctcaagtatctagaagaatggcacagagtaggtgctcatttttgttgttaaatcaaagagtgaaggaatgaaagttaatcctgaatcttgtattctgtcctatcattattttaaatatcttaaggatgctcttacaaataagtactaaaaaatagcaggagaaatctatgccatccaagaaa

SEQ ID NO: 384016 - DNA, 542 bp, Homo sapiens
agcaactggcatagtgacagacaagaatggatgctccatatrtctttgtttagaatgatataaatgcaggggttgatgaatcatattcttttaataatcttataagaagcagtaatgagaagccattttgacaacaggcttttaaatcagacaccctgggtttagatgtgaatccgatatttacttcctatggaagttgggacaagttgctcaaacttgaagtgcctcagcttcctcatatatgtaacagacaatacttacctcacagagatgtagtgataattcaataagttattgcttagaatagtgagtggcatgtaataattgccatatacatgttatatgtgtttgattgttatttttaataattgtttgttgaattgtgattcctgtgtgtgtgtgtgtgtgtgtgtgtgtgtgtgtgtgtgtcttgtggaggtagtgatggcagtgggaggctgttctcactagtgttgctttcagaattcgttagcactaatttgccagccaattacctgggaagtatggcatctggttgaata

SEQ ID NO: 384017 - DNA, 594 bp, Homo sapiens
atttgttaaaaatctcctgagattgaggcatgatgcttggttctacgatggagaggcaacaaaaacagtctttactctcaaggggctcatggtcttgtagtagaattaaaatttacaagcaagtaatagtaaatcaatgtgaaaactacattaataaatgtatacaatttattaagggacaaattaactctacagggttttataataagctgacatgaaaatgactaatggtttgccaggcagaggagaatgagacagacattccaaaaaagaaagaatatccacaaatccatggatgtccaagtgtgagaagactggtccgcccagatcatgtgggcacttatagscttcaatcactgtcttcacctccagcctacagatgtgtggctgttaaaatgggttcctgggaaccccagacgtcctgccagtgttgcaaacataaccctgtgaggcccagcatttgcaagaccagcaaagagaggtgataagcagacaaaatccaggcctctcatcatattaactgtgtgacattgggtaagggtccaaatctctctgtgcctcagtttccacatatgtgccattgggaaaataaga

SEQ ID NO: 384018 - DNA, 594 bp, Homo sapiens
atttgttaaaaatctcctgagattgaggcatgatgcttggttctacgatggagaggcaacaaaaacagtctttactctcaaggggctcatggtcttgtagtagaattaaaatttacaagcaagtaatagtaaatcaatgtgaaaactacattaataaatgtatacaatttattaagggacaaattaactctacagggttttataataagctgacatgaaaatgactaatggtttgccaggcagaggagaatgagacagacattccaaaaaagaaagaatatccacaaatccatggatgtccaagtgtgagaagactggtccgcccagatcatgtgggcacttataggcttcaatcactgtcttcacctccagyctacagatgtgtggctgttaaaatgggttcctgggaaccccagacgtcctgccagtgttgcaaacataaccctgtgaggcccagcatttgcaagaccagcaaagagaggtgataagcagacaaaatccaggcctctcatcatattaactgtgtgacattgggtaagggtccaaatctctctgtgcctcagtttccacatatgtgccattgggaaaataaga

SEQ ID NO: 384019 - DNA, 623 bp, Homo sapiens
ttctaaaaaattttaatataacccctataggtccattctttcaacaaatatgtaatgagtatctttttgttccaggcaatgtgctcgggatagggcagcaacacatttaacaaatacttctgccatcatgggctttcttytgaatggggtaaattaaaaagttatatatatatatatgtgtgtgtgtgtgtgtgagagagagagagagagacattatattgtgttaaaatatctgagaaaaataataaaaatgttggagaaataatgctgtgagtggggtgttcaacaccaagtagggctgatagagaaggccttggtagaaggtgatgtctgggagaagtcacgaagcaggtgagggaaggagttagtagattcctgggcatggtgggagcaggccctgtgtgttgaggagctgccagaaggccaaggaaagcaggaacgaatgacatgaagaagcatcagggagggagggaccggtagccaaaggtgagaggctatacagattgaggtaacattggtaacttggaagactcagggttttattccttgaagatggggaagatgggaaattacaggagggtttggagcagaagcatgacatgggtgattaaggttttatgcaa

SEQ ID NO: 384020 - DNA, 567 bp, Homo sapiens
tagcaggatttgcagcaggaaagagttccgtgatcatagggtgccaagtgaagagatgggaggagactctcaaatctatttccccaaaaagttctgggttcagtatttttggtcaagatatgccagaagcagcatggattgcaaagctttttattttgtgccatatcattgtcaggttggtgtggtcacctgctttgggtccatcttgtcccttggtgagacccctatggccaaatgactttcagtcaaaagacatgtagtcaattaaacattctgggccagatgggaatggaagtgggcagacactcawtaatgcttaaaaaaccttttcagcatataagagccaaaaagtaaggttatagaaatgaattctggtcttagatactgacttgtagccatttagcaatacgaaacataagcatttggttaaacccttttgagttaaggaattcagagtggcaaaattcctcaacttgttggctgtttaggtaactctgtgccatccttgatttggagcatctgaactaattgtatccctcaaaacaggcccttacaatctcacatgcc

SEQ ID NO: 384021 - DNA, 575 bp, Homo sapiens
tgtaatcttttcaacctattccttaaaatctctcctgctcatctatctatctatctatcaatctatctatctatctatctatctatctatctatctatctwtctatctatctatctatctgctgtttatctggagaaccataacaaatacagtatccttaatttcatttcagagataaagtttagaaaaataagttgctttcccaaagtcaaatagctgataaatgatgggtccagtagttgaagctggactttttaaaaaatatttcttctgtaggatgtcaactaatgcctcaaatcatatctatctgagagatgaggcacttatattcttacttgctcatatcttcccccaaatactttgtaagccaaacaatactctactgcgtatcaaaggggtaaaactcatgggcacatgatccttccctcctcctctcttctgaagcatcaaggttgtgtttttgggtaaaatttccattgatgagattgaaggtccattgatggtttctccaaagaggcagtccaacacaatgagctcttcaaaacctcatgctccaaggggcacaaaaaccagtt

SEQ ID NO: 384022 - DNA, 594 bp, Homo sapiens
atttcttttcagataatttcaaaccaaagtttatcataaaagccaaagtagatattttatttgtaagcttatttactgaaagaaaaatctaaaattgtttctctaatattgttacttttttattcaacaactacagtagagaaggcactattttagaaatggcatatgcataatctaaactgatttcacaaaaaccctctgtgcattttaaagagaaggaaatagagcccagagaggttaaagtgctacagtgactcatgtgtagacctgtggttttatttggggctaaatatctctaaaacctacagtatttatattccacttgcttgaaaatgatagattatcttgtgaattagaattacttttatgattttgcatgtatcttctacctttccacttcctttrttactcgatgaaaatgagaatatcagaaaagaaggacatttatattttcctcctagagtgtttgccacagctatgtcattccaggctttatagaaaaagtagatcatgccatgcaccatcgttcgtcagggaaaggaccaagagtcttcagtaatgcccaggatgctaatgttcggggtgctgatgatg

SEQ ID NO: 384023 - DNA, 552 bp, Homo sapiens
tgcttcatatttgagcaagaacattcctacagttcttgcaaattgctagagaaaatggccttgcagagasagcacaatttcaggataggtgtagtacagacagcttatgtatgtgcttctggaacaatcttaccatgggatcttggacaagtaatttattgtcttttgacctgctttcccaactgtaaagcagtgagacacaatcatcccaaaggtcacctttcctccaccatgataggtgcgtctaaaattatggcatctccatgcaaggattcttgttgtaaccacagttgacctgacgatttttactcttgtgaggcccatctaattggcaactgctgggtaagtacagcaaaaacagtaggaagaagatagtaaggcaagtttctcacaggtaatggtgatcacacagcatccctccccacggctcaggtaatacacacagctggattgccctgtgggcttctgtgtttatgtagcctggaaaggatgcaaatcaaccggctcacacaaagaaagaccaggagtctttggactcctgttgaactctaa

SEQ ID NO: 384024 - DNA, 557 bp, Homo sapiens
ttgtgaatcttctttttagaatattaaagctattaacaaaagatgagatctacagaggcagaaaggggctttattttctgacagtgacctatagattggagacgagtagcctttgggataaagtgaaagtgcactcccaggaagggttggagagttagagattataaaggtaaaaagcgaaaggccgaggaaggggcctgggggagtgaggaacagagccttgaatggatgacctgtaagtgtaaaaccacaggtctctctttgttggctgactcttggtggacaattgttggtctgtttgggaatttccagctgtagcctatttcagtttggcttgattgcaggaagggatgtcttgtgacatttttgcaacattttccgagcgcacagtatgcatgatgaccccctcatmctgctgtggctgcctggttctgctttaccttgagcatctcagccacagagagtccatttagtctataggttggagcgtaatttgaaaaaaatcaaatatagaaacttgagaattaagacttaactgaataacgttaaagaaagca

SEQ ID NO: 384025 - DNA, 557 bp, Homo sapiens
ttgtgaatcttctttttagaatattaaagctattaacaaaagatgagatctacagaggcagaaaggggctttattttctgacagtgacctatagattggagacgagtagcctttgggataaagtgaaagtgcactcccaggaagggttggagagttagagattataaaggtaaaaagcgaaaggccgaggaaggggcctgggggagtgaggaacagagccttgaatggatgacctgtaagtgtaaaaccacaggtctctctttgttggctgactcttggtggacaattgttggtctgtttgggaatttccagctgtagcctatttcagtttggcttgattgcaggaagggatgtcttgtgacatttttgcaacattttccgagcgcacagtatgcatgatgaccccctcatactgctgtggctgcctggttctgctttaccttgagcatctcagccacagagagtccatttagtctataggttggagcrtaatttgaaaaaaatcaaatatagaaacttgagaattaagacttaactgaataacgttaaagaaagca

SEQ ID NO: 384026 - DNA, 573 bp, Homo sapiens
cacacgctggtcctgaattttagttaactgactgcagccctggatggcaccaagggaaagaaaaagtcacagatttaattgggaaacatggcaggaagaccaaagtactgcacggtccctgcccgtggaagtcacccatgcagaggggtgggcagagatccataaaccatttgtttagagataagtatacagaaagtagggcgggaaggaagagagmgagggaggagaggaagaaagcaacagttactcatccaataaataactgggcccttttaatgtgcagaacagcctgagttcatgcatagaagagacataggaggaaatcaagtgttggagccaaaccacagcacaacattacagttaaagcatggcacaaaatcatagcacaattctataaatctccttaggcaaaatatgataaaatgtcaaaagataaaggccatgagatttaacagctatctcaaaggggcagcagtttgtcagaggggaaataatcaggcagctttaaatgggtagagtgcttttgtgtttgtgtttttattttcactgacagagaataggacagtggattcc

SEQ ID NO: 384027 - DNA, 633 bp, Homo sapiens
gctttttaataatagccattctgattgatgtaacatggtatcttggtgtagttttaatttgcatttctctgatgaatagttatgttgaacatttttttcatgggtggttggccacttatatttcttttgagacatgtctgttcatgtcctttgccaagtttttaatgaagttgtttgtttttttcttgttgagttgtttgagtttcttatagactcaggatattaatcctttgttggaggcataatttgtcaatattttctccaattctgaaggttgtctgtttatgctgttatttctttgctgtgcagrcactttttagtttgattaaatctcatttgtctatttttgttttgttgtgtctgcttttggggtcttcaccataaattctttgcttgggccgatgtccagaagagtttttcccagattccagaatttttatagtttcaggtcttatgtttggttctttaatacatcttgagttaatttttgtatatggtgagagatagtggtccagttttattcttctgcatgtggctagccagtattcccagcaccatttattgaatagagagttctttccccattgtttatttttgttggttttattgaagatcagttggttttaagtatgt

SEQ ID NO: 384028 - DNA, 633 bp, Homo sapiens
gctttttaataatagccattctgattgatgtaacatggtatcttggtgtagttttaatttgcatttctctgatgaatagttatgttgaacatttttttcatgggtggttggccacttatatttcttttgagacatgtctgttcatgtcctttgccaagtttttaatgaagttgtttgtttttttcttgttgagttgtttgagtttcttatagactcaggatattaatcctttgttggaggcataatttgtcaatattttctccaattctgaaggttgtctgtttatgctgttatttctttgctgtgcagacactttttagtttgattaaatctcatttgtctatttttgttttgttgtgtctgcttttggggtcttcaycataaattctttgcttgggccgatgtccagaagagtttttcccagattccagaatttttatagtttcaggtcttatgtttggttctttaatacatcttgagttaatttttgtatatggtgagagatagtggtccagttttattcttctgcatgtggctagccagtattcccagcaccatttattgaatagagagttctttccccattgtttatttttgttggttttattgaagatcagttggttttaagtatgt

SEQ ID NO: 384029 - DNA, 633 bp, Homo sapiens
gctttttaataatagccattctgattgatgtaacatggtatcttggtgtagttttaatttgcatttctctgatgaatagttatgttgaacatttttttcatgggtggttggccacttatatttcttttgagacatgtctgttcatgtcctttgccaagtttttaatgaagttgtttgtttttttcttgttgagttgtttgagtttcttatagactcaggatattaatcctttgttggaggcataatttgtcaatattttctccaattctgaaggttgtctgtttatgctgttatttctttgctgtgcagacactttttagtttgattaaatctcatttgtctatttttgttttgttgtgtctgcttttggggtcttcaccataaattctttgcttgggccgatgtccagaagagtttttcccagattccagaatttttatagtttcaggtcttatgtttrgttctttaatacatcttgagttaatttttgtatatggtgagagatagtggtccagttttattcttctgcatgtggctagccagtattcccagcaccatttattgaatagagagttctttccccattgtttatttttgttggttttattgaagatcagttggttttaagtatgt

SEQ ID NO: 384030 - DNA, 539 bp, Homo sapiens
catttcttttctttaaaaatgctaaaaatgggcccccaatcttttctggcttgtaagatttctgctgaaagtctgtgttagtctgttgggttcccctttaaggataatrtggccattttctttatctgtctttaagattttctttttttgcattgaccttggatagtctgatgactatgtaccttggtgatgttcatcttatatagcaactctcaggacttctctggatttcttgtatctgcatattgacctctctagccagattagagacattttcctgaattatattctcaaatatgttttccaagttgcttacttttcttctctctctcaggaatgccaacaagtcataggtttcattgctttacataatcctatatttctcaaaagctttgttaattttttaaaaataattttttcttcatttttgtctgacttggttgatttgaaggactagtctgtgatttttttttcttctgctttgtcaagtctgttgttaatgcttccaactgtagtttgaaattcttttagtaaatttt

SEQ ID NO: 384031 - DNA, 447 bp, Homo sapiens
tttccaagttgcttacttttcttctctctctcaggaatgccaacaagtcataggtttcattgctttacataatcctatatttctcaaaagctttgttaattttttaaaaatawttttttcttcatttttgtctgacttggttgatttgaaggactagtctgtgatttttttttcttctgctttgtcaagtctgttgttaatgcttccaactgtagtttgaaattcttttagtaaattttccaattccagaagttctgtttggttatttcttaatataactatgtggtctttcaagtctttgatcattttgctggcttgtttgtgttggattttaacttgtctcttgtatcttgttgagtttctttgccatccacattttgaattctatatctgtcatttcagacatttcattctggtaaggatcattgctagaaagctagtacaatc

SEQ ID NO: 384032 - DNA, 551 bp, Homo sapiens
aatgttattatgcatatttaagggctacaacatgatgttataacatacatttatatagtaaaatcattactagagtagatcacattaacatgttcttcttttcatatagttagctatttttcctctgctatgacaagagcagctataatctactcatttggcaaatatccctaatacaatacactgtttttaactagagtcatcatattttacattaatctcgggacttgttcatcctacatagtttctactttgtatcctttgacctacttctcccttttttctcccccaaacccgctaaccacggttttattgtggttcagtgtgctatctttatatatttgaccctattttttaagattgtacatataagtaaaatcatgcagtatttttctcygtgtgtctgatttattcttctagattcatccatgttctggcaaatgaaagaatcctctcctttttaaagctgaataatattctattatactattacacattacatatgtataagagtttattttttaacttttattttaaattcaggggtacgt

SEQ ID NO: 384033 - DNA, 588 bp, Homo sapiens
tagtagaatactacagactgagtggcttataaacaacagaaatttatttcacgtagttccagaaactgagaagtccaagatcaagatgctgaaagaycctgtgtctggtgacaggcacacttcctcatacacagagatcttctcactctaacctcacatggtagaaggagtgaagtgtctcactggggactcaggttttataagggcactaatcttattcttgagggccctgtccccatgatctaatcacctcttgaagtcctcacatcctaatagtatcaccttgggggtgagaatttcaacatataaatctggggggacataaacattcaaaccaaagtaaggcaccacaatttataggtcttaactaaattagactagagccagtccacaggttcaagccctttgtgtgaagggaatacaggtcaccttgcgaaaggatccaaagacaaaccatgcatttgtacagtgtattctcttcttagctttctccaaagaaacctgcctccatttaccatggtgactatgcactgggcaaaggggaaatatcaatacattttaaggattgctagacattggctgtgagct

SEQ ID NO: 384034 - DNA, 588 bp, Homo sapiens
tagtagaatactacagactgagtggcttataaacaacagaaatttatttcacgtagttccagaaactgagaagtccaagatcaagatgctgaaagatcctgtgtctggtgacaggcacacttcctcatacacagagatcttctcactctaacctcacatggtagaaggagtgaagtgtctcactggggactcaggttttataagggcactaatcttattcttgagggccctgtccccatgatctaatcacctcttgaagtcctcacatcctaatagtatcaccttgggggtgagaatttcaacatataaatctggggggacataaacattcaaaccamagtaaggcaccacaatttataggtcttaactaaattagactagagccagtccacaggttcaagccctttgtgtgaagggaatacaggtcaccttgcgaaaggatccaaagacaaaccatgcatttgtacagtgtattctcttcttagctttctccaaagaaacctgcctccatttaccatggtgactatgcactgggcaaaggggaaatatcaatacattttaaggattgctagacattggctgtgagct

SEQ ID NO: 384035 - DNA, 597 bp, Homo sapiens
tagatgaatggataaggcagatgtgatatacacatacaatgaaatgtttgttattcagccataagaaagaaggaaatcctgccatatgtgacatgaatgcaccttgaagatattatgttaagtgaaataagccagtcacagaagtacaactactatacaataccactcatacaaggtagctaaaatagtcaaactcatagaaactaaaagtagaatggtggttgcctaggggagggagaaatggggagttgtttttcaacatgtatgaagttttatttttgcaagatgattaagttctagagatctgttatacaacattgtgcttataattcacagtactgctcacataaaaaatgttaagagggtagatctcattatgtgttcttaccaaaataaaaataaacaaataaataacacaggaacaaaaatcacaaacaaacraaaagggtcacctcaggcaagtggcaatgaatacctaaggtagccccatgcttgggggcttcccaaagagcatcacacgttattttaaacagagttgctcagatgtgacttttcccaagatgttattactttcatatgacccattatcacaggcag

SEQ ID NO: 384036 - DNA, 597 bp, Homo sapiens
tagatgaatggataaggcagatgtgatatacacatacaatgaaatgtttgttattcagccataagaaagaaggaaatcctgccatatgtgacatgaatgcaccttgaagatattatgttaagtgaaataagccagtcacagaagtacaactactatacaataccactcatacaaggtagctaaaatagtcaaactcatagaaactaaaagtagaatggtggttgcctaggggagggagaaatggggagttgtttttcaacatgtatgaagttttatttttgcaagatgattaagttctagagatctgttatacaacattgtgcttataattcacagtactgctcacataaaaaatgttaagagggtagatctcattatgtgttcttaccaaaataaaaataaacaaataaataacacaggaacaaaaatcacaaacaaacgaaaagggtcacctcaggcaagtggcaatgaatacctaaggtagccccatgcttgggggcttcccaaagagcatcacacgttattwtaaacagagttgctcagatgtgacttttcccaagatgttattactttcatatgacccattatcacaggcag

SEQ ID NO: 384037 - DNA, 605 bp, Homo sapiens
tgaaattaggccaagtaatatcctacaatgacctctaagtgttcaagtgaaagaaagagtcccatgtccctcaccttttttttcataatttcaacattcactttagattcagttcaggtggcacatgtgcaggtttgtcacatgggtatattgtgtagtggtcaggtttgggatacgaatgatcttatgacccaggtagtgagcataacacccaataggtagtttttcagcccttgtccccatctctgtctcccacctctagtggaagggagtcctcagtatctactgttcccaactttattccatgtgaacccaatgcttagctcccatttacaaatgagaacaygtgctatttggttttctgatcctgaattaattcacttaggataatggcctccagctacacccatgttgctgcaaatgatattattttttcatttttgtggctgcatagtattccactgcatgtatgtactatattttctttattcaatccaccattgatgggcatctaggttaatatctttgctatagtggatagtgctgcaatgaacatatgagtgtatgtgtcttttggtagaatgataacttttcctttgggtata

SEQ ID NO: 384038 - DNA, 577 bp, Homo sapiens
aacattgttgaaatgacaagaaaagatatagaatattttataaatttagttgataaatcagtggcaggagtggaaaagattagctccaattttgaaagaagttctgctttgggtaaaatgctgtcaaccaacatcacatgatacagataaatcttttatgaaaggaagagttaaytgatatgtcacacttcactattgtcttattttaagaaatttccatagcccctcccaccttcagcaatcactaccctgcttattcagcaaccatcaacactgaggcaagatcctccatagcaaaaaaggttatgactctctgaaggttcaggtgataatttatatttttcagaaataaagaattttaataaagatatgtacattttagacataatgctattacacattaatagaatatagtatagtgtaaccctaacattttacacactggtaaaccaaaaactgtgtgtgactctcttgtgatatttgcttttttgagatggcctggatccaaacccacattatctctgaagtatgcctgtgcatgcaaaaggttggcaacacagagcaggcacttggtaaa

SEQ ID NO: 384039 - DNA, 560 bp, Homo sapiens
agtgccaagtaacactacaggtcactctttgactggaaaagaatgttgctaattatactcatgattgtcttatgttatttgctaattctaggatgcaaacccggaataagaacaatgactgcctcgcctaacagacctgttgctgccacatctgtacatgttagtcaacagaacccactgcagaaaaaacagaaaagggggagatgtgggagtttagtcaggctggtgggaaaaattttaagatgaagttataggatataaacacaaatcttcttgaaaggctggaaggtttttgcaaaagtctcaggatagggttatggttgaaagcagcctaatccttaccttgagtaaataacttagagcagatacataggaatgtaaaggagtttatctaaataacttatttactcatgtggtcctaaaactaacctttgaycattcacgggcatgatggctctctgggggtggggggaggcaaccaggttgattaccttctaatggtgttgactcaaagtctttgtcatttaatgtgtgctgaataaatgctagcagggccagtg

SEQ ID NO: 384040 - DNA, 560 bp, Homo sapiens
agtgccaagtaacactacaggtcactctttgactggaaaagaatgttgctaattatactcatgattgtcttatgttatttgctaattctaggatgcaaacccggaataagaacaatgactgcctcgcctaacagacctgttgctgccacatctgtacatgttagtcaacagaacccactgcagaaaaaacagaaaagggggagatgtgggagtttagtcaggctggtgggaaaaattttaagatgaagttataggatataaacacaaatcttcttgaaaggctggaaggtttttgcaaaagtctcaggatagggttatggttgaaagcagcctaatccttaccttgagtaaataacttagagcagatacataggaatgtaaaggagtttatctaaataacttatttactcatgtggtcctaaaactaacctttgaccattcacgggcatgatggctctctgggggtggggggaggcaaccaggttgattaccttstaatggtgttgactcaaagtctttgtcatttaatgtgtgctgaataaatgctagcagggccagtg

SEQ ID NO: 384041 - DNA, 497 bp, Homo sapiens
tagttagtcgcttacttcaagtacaatttgtcccttgatgacccctagatgtatattttcagccttaatctccctcttaagcatcaaacttatatattcawttgcttatctgacatgatcatattgatgtctaacaggtttcccaaacttaacaggtctaacacaattaacgatttttgcaaacctcccccaacaaaacaaaacacaacaaaaaaatacctgtttctttcttactctttcttgtcttggaaaagactatcaggagtcattgttgattctcttgtttcttctccctctatttctgatccatcatcaaatcctgttgactctatttccttgttcatttccttcctctcctctgtaactaccacagcccaagctattgccatctttcacctagtctcctgcaatagcctcataactcatcttacagtgtccagttttgccccactcttctctaatctccacccagtagtcaaagtaagtctcataaaatg

SEQ ID NO: 384042 - DNA, 512 bp, Homo sapiens
ttaagtaaataagataagcaatggttcaaagaccaggtatgtaaggtacttgctgttagtgatagagaagttggcttatggtctagctgtagatgtagctgattgagcaccaaattattgttattttcaatcaaacaaagccagcaatatttataaatgtttactaaacatcaagcattattttaaaagttctccccttgcattaactctttgttcctcaagttagatgttattgtttgtattttgtaggtaaggaagcttaaaaatcccttcctttctcttctttaataatctgactcctttgatgtctcttttgctggtctctttcttttgccctgccctttaaagcaatggttccctaaattctcttgyctttttcccagtgtagtctccatggaaaatttgatttacattgtggtttcctataagtttgggtaatgagatagaaaatgctaaagacacgagtattgagcatgaaaaccaatgacaaatgaaggaatacttcatttgga

SEQ ID NO: 384043 - DNA, 562 bp, Homo sapiens
cccctgcttgcactcattctctctcctgctgccctgtgaagagatgccttccaccatgattgtaagtttcctgagctctcaccagccgtgcataatcrtcagtcaattaaacctcttttctttacaacttacccttcttgggtatttcttcacagcaatgtgagaatggactaatacaacatctgtttcaagaaattcattctggatatcctttcaaattgaacctttattcccatgctcctcctcagtagcgtggctaacgaactcaccaaaaacactaaggcaactagtcttgtattgcttaattagggcaggggatggaaggacatttgtgctgtctaccttccaatcccttgcccagggtagacactgctcattaatcatggcactgtttgctgcagggcccaactggcatctcagaatctttcttaaatgctccacacaagccactgctcatcaatcagagctagcatttcacatcaaacctagttacctttcccagcttaaaggctgctgactttatcccatatggaaaatggtttgtgattactacttctttttt

SEQ ID NO: 384044 - DNA, 562 bp, Homo sapiens
cccctgcttgcactcattctctctcctgctgccctgtgaagagatgccttccaccatgattgtaagtttcctgagctctcaccagccgtgcataatcgtcagtcaattaaacctcttttctttacaacttacccttcttgggtatttcttcacagcaatgtgagaatggactaatacaacatctgtttcaagaaattcattctggatatcctttcaaattgaacctttattcccatgctcctcctcagtagcgtggctaacgaactcaccaaaaacactaaggcaactagtcttgtattgcttaattagggcaggggatggaaggacatttgtgctgtctaccttccaatccyttgcccagggtagacactgctcattaatcatggcactgtttgctgcagggcccaactggcatctcagaatctttcttaaatgctccacacaagccactgctcatcaatcagagctagcatttcacatcaaacctagttacctttcccagcttaaaggctgctgactttatcccatatggaaaatggtttgtgattactacttctttttt

SEQ ID NO: 384045 - DNA, 603 bp, Homo sapiens
caccaggaaaaggcaagctgtgtcagcatgccataactttctttttgaagaggaagaagagatgaatctgtccagttgttatggcaaagggaatttagaaaggtggatgcaagcatcccacatgaaatttgggaagcagagaaaaaagatggccttctgatctttaacagtgcttttcatggtgaagaaatattcagaagctttagtgcctatatgctcgtgaagacatagacttttgactttctaactcaatgttttcctttcagttatgttttatattgtagtctgataatgttttctactaattgcacattggtctccaattcctttcaaacaattctatgctttatttgagaagccttgcctcttttttttttaagcatcatctcctcatatgtaaaagtgaggttttaaaaaaaakgtaagaaaaattatccaaaaatcgacatattacttggaaatgtataatgttctgctatataattttctgtgcctttcaaggtacagaaatcaatcagagttctatgtcatttgggtggattcctgtgcacaagaatttttcataatatatcaaaattaaagatactcatgttaatttgtctc

SEQ ID NO: 384046 - DNA, 603 bp, Homo sapiens
caccaggaaaaggcaagctgtgtcagcatgccataactttctttttgaagaggaagaagagatgaatctgtccagttgttatggcaaagggaatttagaaaggtggatgcaagcatcccacatgaaatttgggaagcagagaaaaaagatggccttctgatctttaacagtgcttttcatggtgaagaaatattcagaagctttagtgcctatatgctcgtgaagacatagacttttgactttctaactcaatgttttcctttcagttatgttttatattgtagtctgataatgttttctactaattgcacattggtctccaattcctttcaaacaattctatgctttatttgagaagccttgcctcttttttttttaagcatcatctcctcatatgtaaaagtgaggttttaaaaaaaatgtaagaaaaattatccaaaaatcgacatattacttggaaatgtataatgttctgctatataattttctgtgcctttcaaggtacagaaatcaatcagagttctatgtcatttgggyggattcctgtgcacaagaatttttcataatatatcaaaattaaagatactcatgttaatttgtctc

SEQ ID NO: 384047 - DNA, 535 bp, Homo sapiens
aacaacatagattgtttacatacaaatttgctttgagaaaatttcagcttgctgggtaaaaataacccaaagtattttcatttatttaaatggcttaccattaatgatttattccaatatagaacaccgatcatatatatatatatatacacacacacatatatatacacatatatatgtatatacacacacacacaaattggtgttttttatatatatacacacacatatataattatatatgtatgtatgttatataattatatatttacacatatacttggtacacacacacacacacacacacacagatatatatattcccaaatagttaaaaagttatttttagttcttgattaaactgttttcatacatgcttttttctgggtcacaagrcatctgctcacatctttaaaattagggggaaaatggaatgcgtgcatgtatgtgtgtgcatgtgtgtatgttaaagagtattgcatcctcacatacaattgaaaaggctgccagttctgccagttataggccaaaattt

SEQ ID NO: 384048 - DNA, 548 bp, Homo sapiens
gggcaacagatcaggagacaattgtcattgaaaagatagtttgttgctcactgttctcaagaggagggggcayggtgccatgggggccacaggagaagcaccagggtcaggctggaggcagacacggcgggggtcactttaggcaagagcctttattgtggtttctgctggaagaaacagccaaggcaggataaaatggtgaaggattgtctagtttgaataattccaggctctgagtcatagtagctgtttcgagttgcctaatccctggccctgggatgtttaaggtgggtggatagtggcccagagcctgacaagaaaggtagtttggaggtgtggaccatggattgtttggtcctttgaaaggtgtacttaggggtgaattgtttactatccctaggaattggctaaccctgggagaggtagcccttcaggatcagcaagaccccatacatcaaagcatcaaaatacggaaaacaaaaagtcatggttaatacaattaagtttgactttttatcttgtttcttctttggactgggaccaaaact

SEQ ID NO: 384049 - DNA, 522 bp, Homo sapiens
tactgtatatggctaccattcactggctaaactaggggtcaattgtaaactaaatcttagcatamaaacaattttatttatcccagatgaattatctggttcaatacttgttacaatacttagacattctgaaaacaaaagaaattatacaatttacttgtttagtatatgttggcctgtgcctttgtcagctattaactctgagctcagctggaaaggcgatcaagcctactccacttcatgaaaccagaattgctgattgctgttcaagctttgtcattgataagtgatgctctaagaagcaagagggagagagaggatggagagtgtgacagtaaggagctcttgatgaagagctgcctgagtattctcttatttacattcaaacaaatccaaaatctatttgctcaggcatgttgatttccatagctcttatttccaagttcttcttatttccaagttattactaaacatgtattaagttcccacagtgcatgaactcaaagcatgtaaaaaaaaaaa

SEQ ID NO: 384050 - DNA, 628 bp, Homo sapiens
ccatcagagtttctttatccactcattcactaatggatacaaaggctgttttcatatctcggctattttgaagagtgtgaactttatcttttaaatatcttttaaaaatctgtcaatttctctctattccctccaccaagacctagtttcaaactccaatcttttcttagacagacaactggctgcagaatgcctcccaatgggtctctctcatccgtttttgrcccttcctgatgattcttcacactatagccagactaaacttttaaaaatacaaatctgattatgggtaatttctgaataaattatgggtaatttctgaataaaatgtataatgctctcactcaagatgaagaaaaaaattaacatggcatacatggcttttcacaacctgacatcttacatctaccttatttctcatctgactccttgcctcctctttccctgagttccaattaagttgatattttttagaatcaaacagcataacatgttttttcctaattcattctgttccttttacctattctgccctacctgttatttagattcagttcaaaattcatttcctgaaggaatcctccttgtacttctacatactctcatacttcttatactttcaaatcat

SEQ ID NO: 384051 - DNA, 566 bp, Homo sapiens
  misc_feature (1)...(566): n = A,T,C or G
cacctggttggtctcagtgccattgcttctactgccctggtatataattgacataactggtagacttgtgtgtcccaaagcacaaagctgagcttcactcagaaactttggaggagtaatttcttatttgagtacaattattcagagcatgcctattattacatattgggcagaagtgggggaaraaggagttacgaagattgtcccactaattagtaacacaactattcaatgcttatgaaatttttctttcctgtgtgagcttgcaccagtcgtcacccatctgccatcttctacgagatataataaggttagggagatatttgtgtcttacttttgttttaagtaatccagaattccaaggccaaaatctaaaagaggacagggatagatacaggtagaggtgacaattgtcattgttattgttctcattttacagatgtgaaggcttagactggaagactttaaatacttgtccaaagttttagtgttggagtaaaaggaagagtcttgaattgaaccctaaacagctaacctttaaactcttgcccttaaacaaaagagnn

SEQ ID NO: 384052 - DNA, 566 bp, Homo sapiens
  misc_feature (1)...(566): n = A,T,C or G
cacctggttggtctcagtgccattgcttctactgccctggtatataattgacataactggtagacttgtgtgtcccaaagcacaaagctgagcttcactcagaaactttggaggagtaatttcttatttgagtacaattattcagagcatgcctattattacatattgggcagaagtgggggaagaaggagttacgaagattgtcccactaattagtaacacaactattcaatgcttatgaaatttttctttcctgtgtgagcttgcaccagtcgtcacccatctgccatcttctacgagatataataaggttagggagatatttgtgtcttacttttgttttaagtaatccagaatyccaaggccaaaatctaaaagaggacagggatagatacaggtagaggtgacaattgtcattgttattgttctcattttacagatgtgaaggcttagactggaagactttaaatacttgtccaaagttttagtgttggagtaaaaggaagagtcttgaattgaaccctaaacagctaacctttaaactcttgcccttaaacaaaagagnn

SEQ ID NO: 384053 - DNA, 566 bp, Homo sapiens
  misc_feature (1)...(566): n = A,T,C or G
cacctggttggtctcagtgccattgcttctactgccctggtatataattgacataactggtagacttgtgtgtcccaaagcacaaagctgagcttcactcagaaactttggaggagtaatttcttatttgagtacaattattcagagcatgcctattattacatattgggcagaagtgggggaagaaggagttacgaagattgtcccactaattagtaacacaactattcaatgcttatgaaatttttctttcctgtgtgagcttgcaccagtcgtcacccatctgccatcttctacgagatataataaggttagggagatatttgtgtcttacttttgttttaagtaatccagaattccaaggccaaaatctaaaagaggacagggatagatacaggtagaggtgacaattgtcattgttattgttctcattttacagatgtgaaggcttagactggaagactttaaatacttgtccaaagtyttagtgttggagtaaaaggaagagtcttgaattgaaccctaaacagctaacctttaaactcttgcccttaaacaaaagagnn

SEQ ID NO: 384054 - DNA, 556 bp, Homo sapiens
ctctcaatgagaggagcaccaaagaatttatagccatttttaactgctacatggagatatcaaaagtagactttttataactatgattataatgatgtcagtgaaaatggtgaagtaaggaattttgaaagctcacttctccaaaaaaacaaacaaacaaaaggtcagaactgtcataatcaacttttttagaactctgkaaattaaccaaaggctagcagccctgaggagtgcttattcaagaaaaatggcttagtcttagtaagcacagtaagctctgtagaattttagaataccccagtcctacacttccccttcccatctcagtcgtaatctattcttctgaaaattatagcctagattctctatactggataaaacagaatagaccttattcataaacaattatatttacttgttttgatgtatatgatgactacctggaagacaagctcaaatgtctgtctttatttcacctggatggaactggaccagtgctaatgctaaagctgttatctaagggtcatttgtcaaagaaaaatttataggcaaatgt

SEQ ID NO: 384055 - DNA, 579 bp, Homo sapiens
gttatgaaatgattaaacaaaaaaagtttggcttggttcaattgtttcagtgagaggttcacaggtaccataagccgttgaagttgaacatgcaataataacaggaaggcaagttctcaaatgttaaagtacattcagccaggttcttcttcacatcaagtacttggrcaagcagtggcaaggtgctgtgggtagacctgggcctcagaaatcaccaagaagggcaatagtgaggtcagcagcaaaatccacatagaatgaacaatttgcctcaatgataattctcctctcagtaaatcatttctgcttaggctatattccaccaattttgaatcttttcgatgcaatccacacttttctaggaaatccaatcatcagaaatgtctcatagcatatgagtcatagagcatttatcatataataaactggaacttatttttccagttaattagggaatattcaaataaatttgtaaatcaggggtgaacaaatttcttctgtaaagggccagatagaaaatattttaggctctgcaagccaggtaaactcaattctgttttcacagcacaaaagcagtat

SEQ ID NO: 384056 - DNA, 579 bp, Homo sapiens
gttatgaaatgattaaacaaaaaaagtttggcttggttcaattgtttcagtgagaggttcacaggtaccataagccgttgaagttgaacatgcaataataacaggaaggcaagttctcaaatgttaaagtacattcagccaggttcttcttcacatcaagtacttgggcaagcagtggcaaggtgctgtgggtagacctgggcctcagaaatcaccaagaagggcaatagtgaggtcagcagcaaaatccacatagaatgaacaatttgcctcaatgataattctcctctcagtaaatcatttctgcttaggctatattccaccaattttgaatcttttcgatgcaatccacacttttctaggaaatccaatcatcagaaatgtctcatagcatatgagtcatagagcatttatcatataataaactggaacttatttttccagttaattagggaatattcaaataaatttgtaaatcaggggtgaacaaatttcttctgtaaagggccagatagaaaatattttaggctctgcaagcsaggtaaactcaattctgttttcacagcacaaaagcagtat

SEQ ID NO: 384057 - DNA, 617 bp, Homo sapiens
atatacttaagtaaaacattgggaattccttgaaatactctaagaatgagaactcctaaaaggtctggactttccacataggtgagtgtagcactgaaactctctgtatttgggtattaatattaataatactaattggattcagaagcctggaatattttgaatatttcattttatatgaaaggcattgctgatacaagttacatagatttcataagtattgtctaataagtttcttgttttatttatgttactcagtattacatttgtatttgaatagatcttaataattctctacattcagacaactgtatcttgacacatattacaaatacaaaggttttatcatgtgaatcacatattttcataacatttatcagactggctgctcagaagaaaaatgagcccatatctkgcagtcaggagaaggaattccagtccctgccatttacccatctgactgcctctgtatgtcatctcatttctctggcctctgggttctgattggcctcttagaatgtcttagaatgatcatcactgttctatacattcaataaaaattaagtgagtgaattaggtgttgggaatgcaaaagagatgcactggtagcagttttt

SEQ ID NO: 384058 - DNA, 617 bp, Homo sapiens
atatacttaagtaaaacattgggaattccttgaaatactctaagaatgagaactcctaaaaggtctggactttccacataggtgagtgtagcactgaaactctctgtatttgggtattaatattaataatactaattggattcagaagcctggaatattttgaatatttcattttatatgaaaggcattgctgatacaagttacatagatttcataagtattgtctaataagtttcttgttttatttatgttactcagtattacatttgtatttgaatagatcttaataattctctacattcagacaactgtatcttgacacatattacaaatacaaaggttttatcatgtgaatcacatattttcataacatttatcagactggctgctcagaagaaaaatgagcccatatctggcagtcaggagaaggaattccagtccctgccatttacccatctgactgcctctgtatgtcatctcatttctctggcctctgggttctgattggcctcttrgaatgtcttagaatgatcatcactgttctatacattcaataaaaattaagtgagtgaattaggtgttgggaatgcaaaagagatgcactggtagcagttttt

SEQ ID NO: 384059 - DNA, 600 bp, Homo sapiens
caggctgctggattcgaatcccagttctgctccttaccagctgtgggaccatgggcaaattcctaaacatctcttttcttcagtttcctctcagaatagtgcttggcactgtgagtacatattcactaccattaaaataccaacaaatctgtattgttttatataaatttatgtttactaacaaaatataactatgctgcaaaagttcctgtcttgtacttcagatatttccaggartgtcagatagaagaaaggagactatattaagcagggtatggtacttaaaaagatccaaggagatgcgtgtgtttgcatgttgcaggggagtggggtgggtaggatcaaccccgtgcaacaaatatatcattccctttttgcatgaagtcaaatgggaaatttacataaaatacattgtatacaaatttattacataagtatatttttccacagggaatatcctttcatcaattctcaaaagattaggtatttctagcttacttatccgtaagcatttttataaagaatattttgtcacatacctaccttgagcaactaattaaaagcaatgaatcttgctcataaattaaaatatagtttggt

SEQ ID NO: 384060 - DNA, 608 bp, Homo sapiens
gtaagtaggctgcaattcatttcaggtaacttttcttttttcttttatttgcttttgttttatcttcttttcttttttttttgtttttactttttaatttctttttgagggagagtgcaaacgaaattcctcactaccacaaattatgccttgggttttccacattaggggaagtcacaggggtcagaacatccagagtgcaatggataagcccactctgggtaaaccacctttgtaatcacaatatctcacctgcctagtaagtatccccagatcacctcccatgcaatatgtaagatatatacacatgcatatatttatatatgtgtgtgtaaatktatgcacatacatacatataattttgtttttaaacacatttttttaccaaatgtcataattctatacctaatatcacaatttactttttccacttttcaatatgtgctggagatctttccatgctggcatatacatgactggtatatatataaatctatgtaattattctacagtacaaatatactgcagttcaactaacaatggatgtgtaggttgagtgtagttttgttaactatcaaatctttgtatttgcatctttaggcaagtgg

SEQ ID NO: 384061 - DNA, 608 bp, Homo sapiens
gtaagtaggctgcaattcatttcaggtaacttttcttttttcttttatttgcttttgttttatcttcttttcttttttttttgtttttactttttaatttctttttgagggagagtgcaaacgaaattcctcactaccacaaattatgccttgggttttccacattaggggaagtcacaggggtcagaacatccagagtgcaatggataagcccactctgggtaaaccacctttgtaatcacaatatctcacctgcctagtaagtatccccagatcacctcccatgcaatatgtaagatatatacacatgcatatatttatatatgtgtgtgtaaatttatgcacatacatacatataattttgtttttaaacacatttttttaccaaatgtcataattctatacctaatatcacaatttactttttccacttttcaatatgtgctggagatctttccatgctggcatatacatgactggtatatatataaatctatgtaattattctacagtacaaatatactgcagttcaactamcaatggatgtgtaggttgagtgtagttttgttaactatcaaatctttgtatttgcatctttaggcaagtgg

SEQ ID NO: 384062 - DNA, 520 bp, Homo sapiens
tttagcaattttatgataatatttttctaacttttaaactgcttttgacatagtgttgaagttcatttaaaaggattttttcccctaccttaaacacatcaaagcagggcttcaggcagaggaatgactcagggagttccactcctgtgaaagtcaatttggaaaaggtaaattcacaaagtgaaagtgaacttaccaagagcattatcagaagaagcaaacaccaattgaaactataaacaacagagcatttttactyaatttaatttacccaaaattactatagacatgacacaattgtgattaagaacttctaactgtagaatggatctactttacctcactgatttttagtgctaattgagctatttttcttactttattgttccttatttgcttattattggctctgacagtcagtgctgcaaagctggggtctgcactttccagtcaagctcctcgctgggtcttctggaagctggaggtgcctgctcacccacctactgtggtggttctcaac

SEQ ID NO: 384063 - DNA, 520 bp, Homo sapiens
tttagcaattttatgataatatttttctaacttttaaactgcttttgacatagtgttgaagttcatttaaaaggattttttcccctaccttaaacacatcaaagcagggcttcaggcagaggaatgactcagggagttccactcctgtgaaagtcaatttggaaaaggtaaattcacaaagtgaaagtgaacttaccaagagcattatcagaagaagcaaacaccaattgaaactataaacaacagagcatttttactcaatttaatttacccaaaattactatagacatgacacaattgtgattaagaacttctaactgtagaatggatctactttacctcactgatttttagtgctaattgagctatttttcttactttattgttccttatttgcttattattggctctgacagtcagtgctgcaaagctggggtctgcacttyccagtcaagctcctcgctgggtcttctggaagctggaggtgcctgctcacccacctactgtggtggttctcaac

SEQ ID NO: 384064 - DNA, 609 bp, Homo sapiens
caccatttgtttttgtcacttgaggtcagtgggctggcttagttcaggtctgctgtatgtttcatccttagaccagtggctgtgtgggcatactcttctaatgacttgtgcagagtcaagaagccaagtcaaatcatacaagcacagctaaagcctccgctcatgtcacatccactaacattccgttggccaagcaagtcacatggccaaacctaccatcaagtacatgaggaaacatattcctcgtaaaatagtgggagaggatgcaaagtcacaaaagtaaggatctatcattctataactgtgaaagaagttcagaattagaagtgataatacagttcaccacactacttattctttcttccccaagtcataccagagagttcttttaagtaaataaatytaaataaacatgtcactcctcttcccatccaccttaatggcttcactaccattacaataaatgtgccctatagagccctgcaggacccgagctgagctgctcattgcatctacctcacctcttaggatctttctcctctacttcccagctccagccatactaacttcagttataacaaactctttcccaactaagctatttgctta

SEQ ID NO: 384065 - DNA, 609 bp, Homo sapiens
caccatttgtttttgtcacttgaggtcagtgggctggcttagttcaggtctgctgtatgtttcatccttagaccagtggctgtgtgggcatactcttctaatgacttgtgcagagtcaagaagccaagtcaaatcatacaagcacagctaaagcctccgctcatgtcacatccactaacattccgttggccaagcaagtcacatggccaaacctaccatcaagtacatgaggaaacatattcctcgtaaaatagtgggagaggatgcaaagtcacaaaagtaaggatctatcattctataactgtgaaagaagttcagaattagaagtgataatacagttcaccacactacttattctttcttccccaagtcataccagagagttcttttaagtaaataaatttaaataaacatgtcactcctctycccatccaccttaatggcttcactaccattacaataaatgtgccctatagagccctgcaggacccgagctgagctgctcattgcatctacctcacctcttaggatctttctcctctacttcccagctccagccatactaacttcagttataacaaactctttcccaactaagctatttgctta

SEQ ID NO: 384066 - DNA, 545 bp, Homo sapiens
ttctatagaaagtgtgtatcaagaaacagaagtagagtatcaagcaaggatacagtgaccaagttaaaaaaaaaagttaytgtctgtgttcaggatcaagacaggcatttactgtgccagaaaaaggtacaaggtcggagacaaactagaaacaacactaacatgatgctgagctcagtaattgcatattttaaagccaaattaggtagcgttatagatatcttccttatgtctaggtaactgtagaccttcaagggtacaaatccaggaagatccagatgggcatattttgtagagagagccaaactgacttattgaatgctactaaaattaaagcaattttaaaatttaacataagcacctaaaagagttttctagagggcccataaccaaaattctatctctcatagacaaagcaaatgacagagcctatgcataaataattacagcatttatatttttgcttcaattctagctttgtttataaaattttagcatttctcaaaatcacccagagagcttattaaaacaaacatttatgggcc

SEQ ID NO: 384067 - DNA, 560 bp, Homo sapiens
tctgcctccttcacaaatagggtctcattatgtgttctctgaaacttccttacatttgtcattccattgatgtaaacgtactattagtcaattcaacattcaaggtgagttcataacactgacttacagaagagcattacagtgttttttgtatcattctcaatcatatcctcatttttttgccaacattgtacattgaaatactcacaatgatgcatagatccttttcctgagaggttacaatgcagggtgaaataagaatactttctggtaatatattacatgtcacacagtgatttcaaagcactttgttaacaaagaaagattattatcatcaatttaacggagactgaaacacacaagttmaattactttttcaaagttgaacagaaaggaagttactacattatgaagataattcatattcttgtcattatggtgtttaattctatctactggaatacacttcctttcaggctgtcttctatatgacaatttactgcccacttggcagagcagaggctcaaattcatgaatatgagaatccacatgtatgtagg

SEQ ID NO: 384068 - DNA, 567 bp, Homo sapiens
agcaagtggctgcagtgctgccacttcatgtgggacccactgctcttgctggcaggtcagtcatctatgcattgatccccttatgacagatgagcccacccatatcaaggaaacccaggggagacctttaccagggccccaagttggagactagtcagtgtcattttgactcctgcagacaggtgagtgttccccctgccctgcctttgatattgaaggaaatcacctacaccccagactgctggtttgcttaagtccattttttttttctggggtttccagattcccaacttgacagatgactccctgcagcaacagacaagtggtcacctaaacattttggtgtctccacttctgcgtgagttctctgttggcttgggaactccagggcaccctttgtgcaattctatttaccccttccytctcttctttcattaaaaaaacatgagataaaagaagatttgaaatcaaaattaccatgaaaactaccttacacaagttctggtctgtagctttccctggattacttatcaaggcaaacaaagtttagccttgtagacaggtctt

SEQ ID NO: 384069 - DNA, 519 bp, Homo sapiens
gtgaattctttccagaagactttcatttttttattttttatttttttgcccagatccatcaggggaatcactgtctatgcaaattatagctttattaaatgtatttcttaaataataagacttgaaattcaatattactcttatccatgggcttcagaatggctgctgttttagcaggcatgaagatgccattcatctttttgtacatctccatcagagcttttaggtgaccaggagcattgttaatgagcaataattaattgaaaggaatcttttttaatgagcagtaggtctcaacagtgggcttaaaatattcagtaaacygtgctgtcattgggctttgttattccatttatacagcataggcagactaaattcaacatcattcttaagggtcctaggattttcagaatggtgaataagctttaatttcaaataaccagcttatctcctaacaagaaagtcaacctatcttttaagcttggaagccaagcactgacttccctgtagctatgaaac

SEQ ID NO: 384070 - DNA, 548 bp, Homo sapiens
acatgctgtcttccctgtcatgactctttcttaagatgactttcaatacagccattagcactcatccacacaggacaaactgagacctcacatgctgaagaaatgtagtagcaagtgtagatacgacgccatgtgctattgtggacaagcagggtcaactggtagccacaacaatgtcagaaaagggatttaaaataaaataraaccccctctgtttctcttatacaaaaacattcactgtatgtccacataatagaatgtctcataacaacattgcaacacctcaaccacaacactttaagaaatgtgtaagacagcagaagacaggtatatttgttgagccaggaactatgcaccaagttgtatacaccttaactcttacaacatttatagctctatgtgtaggtgccacactttctcatttaaagaagataaaacaatactggaattggttaaagaaacttggtatcgctttttgggagaagcatggaacaaggcccaatgcagagcgataccaggaataaatggcagagaaaagagatgccata

SEQ ID NO: 384071 - DNA, 496 bp, Homo sapiens
atgtgctattgtggacaagcagggtcaactggtagccacaacaatgtcagaaaagggatttaaaataaaataaaaccccctctgtttctcttatacaaaaacattyactgtatgtccacataatagaatgtctcataacaacattgcaacacctcaaccacaacactttaagaaatgtgtaagacagcagaagacaggtatatttgttgagccaggaactatgcaccaagttgtatacaccttaactcttacaacatttatagctctatgtgtaggtgccacactttctcatttaaagaagataaaacaatactggaattggttaaagaaacttggtatcgctttttgggagaagcatggaacaaggcccaatgcagagcgataccaggaataaatggcagagaaaagagatgccatatgcaaaagatagcaatgaaaatggattgttcaagaggtgcatgcctaaagcacagatgagaagaaactgtttgagaac

SEQ ID NO: 384072 - DNA, 567 bp, Homo sapiens
attgacttatggaagtgtggtagaccaaggagaagtggggcagatacaaaacatgtccatgtcaatggtgatggagaagaaaggaagagtgctggtaactcagcatgcagaggtttgtgggttttgcttgctatgaaagggttaatctgatttctcatgtgtttaagtccctcaaacctttggatcctctatttgaatggccatttggtactatcaattggaccaactggccctcctgctattacaataagagaagatttaaaccaggatcaaaacgaaaaatgtgagacttgctcacacattcgagatactgacaggcctgaagtctgtatatttttgtcatgcaaaagaatactttttgaattccagttatgatggagtcatgtcctattttcaggtgctcawtataacatgagaaaacgtgaagaaacacgttatatgactatagacaaattcccgggaaatttatagtagtttcttattgtttaaaggcaatgaagtcccctgtaaactctctgtgaaagagaaacatatgcattctgaagtgtcaaagtaagagcatgctat

SEQ ID NO: 384073 - DNA, 561 bp, Homo sapiens
tgaacatgattgttattgacttatggaagtgtggtagaccaaggagaagtggggcagatacaaaacatgtccatgtcaatggtgatggagaagaaaggaagagtgctggtaactcagcatgcagaggtttgtgggttttgcttgctatgaaagggttaatctgatttctcatgtgtttaagtccctcaaacctttggatcctctatttgaatggccatttggtactatcaattggaccaactggccctcctgctattacaataagagaagatttaaaccaggatcaaaacgaaaaatgtgagacttgctcacacattcgagatactgacaggcctgaagtctgtatatttttgtcatgcaaaagaatactttttgaattccagttatgatggagtcatgtcctattttcaggtgctcattrtaacatgagaaaacgtgaagaaacacgttatatgactatagacaaattcccgggaaatttatagtagtttcttattgtttaaaggcaatgaagtcccctgtaaactctctgtgaaagagaaacatatgcattctgaagtg

SEQ ID NO: 384074 - DNA, 630 bp, Homo sapiens
tattggtttctcttaatcctgcttgtatttttatacgtagtcatttattaatctctcctcagttactcatttgagtacaccatctgtttcctgatgggaccctgagtgataccctgaggtgggcaatgctgatgcttcccagaggtatagcctcctccagttgtccaatcaactggcctaaattgacactytgagatgcaaattgagagacaaatgagaaaatactcccaatagcaaagtaaatcaatctgggctctaggaagtcctgtagtgggaaggatggacaggaggaaagggagtgacagattgtcatcccatatgcacataccaggcatcattagaatagcaattttatagcttgctttttcacttaacatatgatttaaccattttgtcatattcttagggattcattgtaaacataattttgactacatattattccaaatgaaggactatgttttaaagattcataaattctggaaatacaaaaaacatctttcaattttatttgctgctctctttctcccattcctagcatgcactgtacagttgtacatgttgcagatctcgtgcaaagcagactcagtagctgaatgaatgcataaactgaagttttctccaaagata

SEQ ID NO: 384075 - DNA, 630 bp, Homo sapiens
tattggtttctcttaatcctgcttgtatttttatacgtagtcatttattaatctctcctcagttactcatttgagtacaccatctgtttcctgatgggaccctgagtgataccctgaggtgggcaatgctgatgcttcccagaggtatagcctcctccagttgtccaatcaactggcctaaattgacactttgagatgcaaattgagagacaaatgagaaaatactcccaatagcaaagtaaatcaatctgggctctaggaagtcctgtagtgggaaggatggacaggaggaaagggagtgacagattgtcatcccatatgcacataccaggcatcattagaatagcaattttatagcttgctttttcacttaacatatgatttaaccattttgtcatattcttagggattcattgtaaacataattttgactacatattattccaaatgawggactatgttttaaagattcataaattctggaaatacaaaaaacatctttcaattttatttgctgctctctttctcccattcctagcatgcactgtacagttgtacatgttgcagatctcgtgcaaagcagactcagtagctgaatgaatgcataaactgaagttttctccaaagata

SEQ ID NO: 384076 - DNA, 621 bp, Homo sapiens
ataaaaggtatacatttgtataccttttataggtatacattttaaaggtatacatttgtataaaagggaatrttcttagtacacatacatatacttatttttcttatttaattcatacatattccttccaagcctccaagatcctgggatttatattaaaagtttaagatagtcaataaatagttttcaaaagcagtggttatatttgtatgtgtattgtctgttttttcattaggtaacaaacaaaaaataaacgataataaaatgtttatccagttgcattttatgttggatactaacttctcagagttttcagtggtgaaaaccacacaccctctttccctgtcactactcatgcagatctaggctccatcctcatccgtgtcccaaatggcatctcagaagcagaaaggtcagaaacaaaaggcaccaagttcatgagatttaaaggcaagttatcaggagttggactggagccccaaaccatataggctataaggtcagaacttaactgtttttccattttattgctcaaggacaagagaacatgatgcatgagactccagcaccataaaccgtctactgaggtggccatttcatcacgtatggttgcaagctgag

SEQ ID NO: 384077 - DNA, 621 bp, Homo sapiens
ataaaaggtatacatttgtataccttttataggtatacattttaaaggtatacatttgtataaaagggaatgttcttagtacacatacatatacttatttttcttatttaattcatacatattccttccaagcctccaagatcctgggatttatattaaaagtttaagatagtcaataaatagttttcaaaagcagtggttatatttgtatgtgtattgtctgttttttcattaggtaacaaacaaaaaataaacgataataaaatgtttatccagttgcattttatgttggatactaacttctcagagttttcagtggtgaaaaccacacaccctctttccctgtcactactcatgcagatctaggctccatcctcatccgtgtcccaaatggcatctcagaagcagaaaggtcagaaacaaaaggcaccaagttcatgagatttaaaggcaagttatcaggagttggactggagccccaaaccatataggctataaggtcagaacttaactgtttytccattttattgctcaaggacaagagaacatgatgcatgagactccagcaccataaaccgtctactgaggtggccatttcatcacgtatggttgcaagctgag

SEQ ID NO: 384078 - DNA, 521 bp, Homo sapiens
cacaagccacatgttcacagaagggtaaagtgatcaccagagctaacttaatgtacagacagagtaagtgctgcctgagcactaggaattagctgtgccccaggaatcagcctgatcaaaggctgatcaaagttatctttaccacaaatctgcctcaatgtataaaagtctgtcatcaaaaaagtatcagtttaaataaaaacattgtgcctccaaggattcctttaaaaagtcatctttttttttattggaaaaaaacattctcaaacagccaaagatagataaaaacatagtgaaaatgttgttaggaaagatcggcaggctttcacccaggaggcatcccgagaagtggcgttcattgttctgggggatctgctctggacctgaaactgactttcagccctgccagtgccaaagcctgatytctgtcagcagattgtgctcccatcactcacagaacactcacatccactaaatttgtaggattgatgtttggaaacagaatgctgatttaggtcgca

SEQ ID NO: 384079 - DNA, 587 bp, Homo sapiens
gggcatcctcgtcttgttctgggtgtcagggtgaaggctttcaacttttccctgttcagtataatgttggctacgggtttgtcatagatggcttttattgccttaaggtatgtctctttcatgccgattttgctgaagggttttaatcataaagggatgctggattttgtcaaacggtttttctgtgtctcttgagatgatcatgtgatttttgtttctaattctgtttatgtggtgtatcacatttattaacttacatatgttaaaycatccctgcatccctgttatgaaacccacttgatcatggtggattatctttttgatatgctgttggattcaatttgctagcattttgttgaggattttttgcgtatatgttcatcagggataccggtctgtagttttctttttttattatgtccttttctggttttggtatttgggtaatactggcttcatagaatcatttaaggaggatttcctctttgtttattttttgaaatagtgtcaaaaagattggtaccaactcttctttgaatgtttgatagaattcagctgtaaatccatctattcctggattttttttt

SEQ ID NO: 384080 - DNA, 587 bp, Homo sapiens
gggcatcctcgtcttgttctgggtgtcagggtgaaggctttcaacttttccctgttcagtataatgttggctacgggtttgtcatagatggcttttattgccttaaggtatgtctctttcatgccgattttgctgaagggttttaatcataaagggatgctggattttgtcaaacggtttttctgtgtctcttgagatgatcatgtgatttttgtttctaattctgtttatgtggtgtatcacatttattaacttacatatgttaaaccatccctgcatccctgttatgaaacccacttgatcatggtggwttatctttttgatatgctgttggattcaatttgctagcattttgttgaggattttttgcgtatatgttcatcagggataccggtctgtagttttctttttttattatgtccttttctggttttggtatttgggtaatactggcttcatagaatcatttaaggaggatttcctctttgtttattttttgaaatagtgtcaaaaagattggtaccaactcttctttgaatgtttgatagaattcagctgtaaatccatctattcctggattttttttt

SEQ ID NO: 384081 - DNA, 433 bp, Homo sapiens
aaccatcagatcttgtgagacttacataccaccacaacaacagtatgggggaaactgcccccatgattcaattatctcccaccagatcactatcacaacatgtgggaattgcaggagcaacaattaaagatgagattctggtggggacacagccaaaccatatcaacagggtcttgctatgttgcccaggctagcttcaaattcttgatctcaagcratcctcctgcctcagcctcccaaagtgttgggattacaggcatatgccactgtgctcaggcatcatccttttattctgattctatactcttttatactctttcttgtttattgatctccctcattgaagatattgttgactattaaagtatagatattgtatgtaggaacctaactctgaaacatgctttgtagcattacaatatggagtggtctg

SEQ ID NO: 384082 - DNA, 586 bp, Homo sapiens
tctgaggattgagaatttatatcatttagtgaattctaaatgcaaagataaagctcaatgcatatattgtgatttcagatactgaaatataatgatcagacttttgattgtggtggtaaagttatgtttaattgaaaaaaacatgaaaagaagacctccaagaacttttagatagcagtgcccygaacaccacagaagcctgcatgatggccaagttgggaagcatactctctaatgattgaaactaatccctgcatgttccagaaatgactaccaaatataatcagaagcatctattgtattattgcaggaagaaaaacaaattcacacttgaccaaccaaaggtgcaatgagatccataaatcaatatgagtctgggctctgttcttccgcatttgagcacagctctctggcaattcttatgatttatggaggttatctttttgccctacctgttcatgtagtaaacagattttcactgagtgcacaaggatgcgaacatctctttcttctccccctgcaatcccctccatggtagcaaaaatcatagaatattaaaactggctgccttctagttcagaggctc

SEQ ID NO: 384083 - DNA, 543 bp, Homo sapiens
gttggctggcctccacctagtaggtggcactttcaagagtgcaccagctgcggtagtaaggtagtaagtatttcggtttctcagatatgtgggcccttaaagctcccaagaacctctcttttgtgtttggtgccaggttggatagataaataccatcaggtgaaggcagggttaggtaggtctgggctcaractctctttgggaggggcttgccatggccactgttagggatgagagtgtggttctcaggccaatgggttatgttccagaggggatcttgactgcctctgctgtgtcatattgttcactggggaagtgggggatacccagtagcaagaggccttacccagctcccatgcaagaggcctcaccaaatggtgaggctggtcttgctcctgcagtgcccagctcagaccttgccccaagctgtgaccttccccactgagaaagcaagcatggcttttagacctcacccgaccccatctgcccactctatcagtggctcctgcactcatatctgtagaagctccttcttgtccctag

SEQ ID NO: 384084 - DNA, 468 bp, Homo sapiens
ttcagctgactaaacagaagcagtctcagaatcttctttgtgatgtttgcattcaaatcccagagttgaactttcctttcmaagttcacgtttgaaacactctttttgcaggatctacaagtggatatttggaccactctgtgtccttcgttcgaaacgggtatatcttcacatgacatctagacagaagcattctcagaagcttctctgtgatgactgcattcaactcacggagttgaacactccttttgagagcgcagttttgaaactctctttctgtggcatctgcaaggggacatgtagacctctttgaagatttcgttggaaacggaatcatcttcacataaaaactatacagatgcattctcaggaactttttggtgatgtttgtattcaactcccagagttgaactttcctttggaaagagcagctatgaaacactctttttctagaatctgcaagtggac

SEQ ID NO: 384085 - DNA, 436 bp, Homo sapiens
tttgcattcaaatcccagagttgaactttcctttcaaagttcacgtttgaaacactctttttgcaggatstacaagtggatatttggaccactctgtgtccttcgttcgaaacgggtatatcttcacatgacatctagacagaagcattctcagaagcttctctgtgatgactgcattcaactcacggagttgaacactccttttgagagcgcagttttgaaactctctttctgtggcatctgcaaggggacatgtagacctctttgaagatttcgttggaaacggaatcatcttcacataaaaactatacagatgcattctcaggaactttttggtgatgtttgtattcaactcccagagttgaactttcctttggaaagagcagctatgaaacactctttttctagaatctgcaagtggacgtttggagggctt

SEQ ID NO: 384086 - DNA, 410 bp, Homo sapiens
ggaaacgggataatttcagctgactaaacagaagcagtctcagaatcttctttgtgatgtttgcattcaaatcccagagttgaactttcctttcaaagttcacgtttgaaacactctttttgcaggatctacaagtggatatttggaccactctgtgtccttcgwtcgaaacgggtatatcttcacatgacatctagacagaagcattctcagaagcttctctgtgatgactgcattcaactcacggagttgaacactccttttgagagcgcagttttgaaactctctttctgtggcatctgcaaggggacatgtagacctctttgaagatttcgttggaaacggaatcatcttcacataaaaactatacagatgcattctcaggaactttttggtgatgtttgtattca

SEQ ID NO: 384087 - DNA, 544 bp, Homo sapiens
gaactttcctttcaaagttcacgtttgaaacactctttttgcaggatctacaagtggatatttggaccactctgtgtccttcgttcgwaacgggtatatcttcacatgacatctagacagaagcattctcagaagcttctctgtgatgactgcattcaactcacggagttgaacactccttttgagagcgcagttttgaaactctctttctgtggcatctgcaaggggacatgtagacctctttgaagatttcgttggaaacggaatcatcttcacataaaaactatacagatgcattctcaggaactttttggtgatgtttgtattcaactcccagagttgaactttcctttggaaagagcagctatgaaacactctttttctagaatctgcaagtggacgtttggagggctttgtggtttgtggtggaaaaggaaatatcttcacctaaatactagatagaagcattctcagaaactgctttgtgatgattgcattcacctcacagagttgaacattcctattgatagagcagtttggaaac

SEQ ID NO: 384088 - DNA, 547 bp, Homo sapiens
ggaaacgggataatttcagctgactaaacagaagcagtctcagaatcttctttgtgatgtttgcattcaaatcccagagttgaactttcctttcaaagttcacgtttgaaacactctttttgcaggatctacaagtggatatttggaccactctgtgtccttcgttcgaaacgggtatatcttcacaygacatctagacagaagcattctcagaagcttctctgtgatgactgcattcaactcacggagttgaacactccttttgagagcgcagttttgaaactctctttctgtggcatctgcaaggggacatgtagacctctttgaagatttcgttggaaacggaatcatcttcacataaaaactatacagatgcattctcaggaactttttggtgatgtttgtattcaactcccagagttgaactttcctttggaaagagcagctatgaaacactctttttctagaatctgcaagtggacgtttggagggctttgtggtttgtggtggaaaaggaaatatcttcacctaaatactagatagaagc

SEQ ID NO: 384089 - DNA, 341 bp, Homo sapiens
aacagaagcagtctcagaatcttctttgtgatgtttgcattcaaatcccagagttgaactttcctttcaaagttcacgtttgaaacactctttttgcaggatctacaagtggatatttggaccactctgtgtccttcgttcgaaacgggtatatcttcacatgrcatctagacagaagcattctcagaagcttctctgtgatgactgcattcaactcacggagttgaacactccttttgagagcgcagttttgaaactctctttctgtggcatctgcaaggggacatgtagacctctttgaagatttcgttggaaacggaatcatcttcacataaaaacta

SEQ ID NO: 384090 - DNA, 539 bp, Homo sapiens
ggaaacgggataatttcagctgactaaacagaagcagtctcagaatcttctttgtgatgtttgcattcaaatcccagagttgaactttcctttcaaagttcacgtttgaaacactctttttgcaggatctacaagtggatatttggaccactctgtgtccttcgttcgaaacgggtatatcttcacatgacatcyagacagaagcattctcagaagcttctctgtgatgactgcattcaactcacggagttgaacactccttttgagagcgcagttttgaaactctctttctgtggcatctgcaaggggacatgtagacctctttgaagatttcgttggaaacggaatcatcttcacataaaaactatacagatgcattctcaggaactttttggtgatgtttgtattcaactcccagagttgaactttcctttggaaagagcagctatgaaacactctttttctagaatctgcaagtggacgtttggagggctttgtggtttgtggtggaaaaggaaatatcttcacctaaatactag

SEQ ID NO: 384091 - DNA, 354 bp, Homo sapiens
cagagctgaacattccttgcgatgtagcagtttagaaacacactttatgcagaatctgcaagtgcatatttggacctctctgaggaattcgttggaaacgggataatttcagctgactaaacagaagcagtctcagaatcttctttgtgatgtttgcattcaaatcccagagttgaactttcctttcaaagttcacgtttgaaacactctttttgcaggatctacaagtggatatttggaccactctgtgtccttcgttcgaaacgggtatatcttcacatgacatctagacagaagcattctyagaagcttctctgtgatgactgcattcaactcacggagttgaacactcct

SEQ ID NO: 384092 - DNA, 354 bp, Homo sapiens
cagagctgaacattccttgcgatgtagcagtttagaaacacactttatgcagaatctgcaagtgcatatttggacctctctgaggaattcgttggaaacgggataatttcagctgactaaacagaagcagtctcagaatcttctttgtgatgtttgcattcaaatcccagagttgaactttcctttcaaagttcacgtttgaaacactctttttgcaggatctacaagtggatatttggaccactctgtgtccttcgttcgaaacgggtatatcttcacatgacatctagacagaagcattctcwgaagcttctctgtgatgactgcattcaactcacggagttgaacactcct

SEQ ID NO: 384093 - DNA, 517 bp, Homo sapiens
agtttagaaacacactttatgcagaatctgcaagtgcatatttggacctctctgaggaattcgttggaaacgggataatttcagctgactaaacagaagcagtctcagaatcttctttgtgatgtttgcattcaaatcccagagttgaactttcctttcaaagttcacgtttgaaacactctttttgcaggatctacaagtggatatttggaccactctgtgtccttcgttcgaaacgggtatatcttcacatgacatctagacagaagcattctcagaagcttctytgtgatgactgcattcaactcacggagttgaacactccttttgagagcgcagttttgaaactctctttctgtggcatctgcaaggggacatgtagacctctttgaagatttcgttggaaacggaatcatcttcacataaaaactatacagatgcattctcaggaactttttggtgatgtttgtattcaactcccagagttgaactttcctttggaaagagcagctatgaa

SEQ ID NO: 384094 - DNA, 517 bp, Homo sapiens
agtttagaaacacactttatgcagaatctgcaagtgcatatttggacctctctgaggaattcgttggaaacgggataatttcagctgactaaacagaagcagtctcagaatcttctttgtgatgtttgcattcaaatcccagagttgaactttcctttcaaagttcacgtttgaaacactctttttgcaggatctacaagtggatatttggaccactctgtgtccttcgttcgaaacgggtatatcttcacatgacatctagacagaagcattctcagaagcttctctgwgatgactgcattcaactcacggagttgaacactccttttgagagcgcagttttgaaactctctttctgtggcatctgcaaggggacatgtagacctctttgaagatttcgttggaaacggaatcatcttcacataaaaactatacagatgcattctcaggaactttttggtgatgtttgtattcaactcccagagttgaactttcctttggaaagagcagctatgaa

SEQ ID NO: 384095 - DNA, 534 bp, Homo sapiens
atttggacctctctgaggaattcgttggaaacgggataatttcagctgactaaacagaagcagtctcagaatcttctttgtgatgtttgcattcaaatcccagagttgaactttcctttcaaagttcacgtttgaaacactctttttgcaggatctacaagtggatatttggaccactctgtgtccttcgttcgaaacgggtatatcttcacatgacatctagacagaagcattctcagaagcttctctgtgatgactgcattcaactcasggagttgaacactccttttgagagcgcagttttgaaactctctttctgtggcatctgcaaggggacatgtagacctctttgaagatttcgttggaaacggaatcatcttcacataaaaactatacagatgcattctcaggaactttttggtgatgtttgtattcaactcccagagttgaactttcctttggaaagagcagctatgaaacactctttttctagaatctgcaagtggacgtttggagggctttgtggtttgtggt

SEQ ID NO: 384096 - DNA, 638 bp, Homo sapiens
tctgcaagtgcatatttggacctctctgaggaattcgttggaaacgggataatttcagctgactaaacagaagcagtctcagaatcttctttgtgatgtttgcattcaaatcccagagttgaactttcctttcaaagttcacgtttgaaacactctttttgcaggatctacaagtggatatttggaccactctgtgtccttcgttcgaaacgggtatatcttcacatgacatctagacagaagcattctcagaagcttctctgtgatgactgcattcaactcacggagttsaacactccttttgagagcgcagttttgaaactctctttctgtggcatctgcaaggggacatgtagacctctttgaagatttcgttggaaacggaatcatcttcacataaaaactatacagatgcattctcaggaactttttggtgatgtttgtattcaactcccagagttgaactttcctttggaaagagcagctatgaaacactctttttctagaatctgcaagtggacgtttggagggctttgtggtttgtggtggaaaaggaaatatcttcacctaaatactagatagaagcattctcagaaactgctttgtgatgattgcattcacctcacagagttgaacat

SEQ ID NO: 384097 - DNA, 521 bp, Homo sapiens
tttgaaacactctttttgcaggatctacaagtggatatttggaccactctgtgtccttcgttcgaaacgggtatatcttcacatgacatctagacagaagcattctcagaagcttctctgtgatgactgcattcaactcacggagttgaacactccttttgagagcgcagttwtgaaactctctttctgtggcatctgcaaggggacatgtagacctctttgaagatttcgttggaaacggaatcatcttcacataaaaactatacagatgcattctcaggaactttttggtgatgtttgtattcaactcccagagttgaactttcctttggaaagagcagctatgaaacactctttttctagaatctgcaagtggacgtttggagggctttgtggtttgtggtggaaaaggaaatatcttcacctaaatactagatagaagcattctcagaaactgctttgtgatgattgcattcacctcacagagttgaacattcctattgatagagcagtttggaaac

SEQ ID NO: 384098 - DNA, 544 bp, Homo sapiens
gaactttcctttcaaagttcacgtttgaaacactctttttgcaggatctacaagtggatatttggaccactctgtgtccttcgttcgaaacgggtatatcttcacatgacatctagacagaagcattctcagaagcttctctgtgatgactgcattcaactcacggagttgaacactccttttgagagcgcagttttgaaactctctttctgtggcatcygcaaggggacatgtagacctctttgaagatttcgttggaaacggaatcatcttcacataaaaactatacagatgcattctcaggaactttttggtgatgtttgtattcaactcccagagttgaactttcctttggaaagagcagctatgaaacactctttttctagaatctgcaagtggacgtttggagggctttgtggtttgtggtggaaaaggaaatatcttcacctaaatactagatagaagcattctcagaaactgctttgtgatgattgcattcacctcacagagttgaacattcctattgatagagcagtttggaaac

SEQ ID NO: 384099 - DNA, 489 bp, Homo sapiens
gtccttcgttcgaaacgggtatatcttcacatgacatctagacagaagcattctcagaagcttctctgtgatgactgcattcaactcacggagttgaacactccttttgagagcgcagttttgaaactctctttctgtggcatctgcaaggggacatgtagacctctttgaagatttygttggaaacggaatcatcttcacataaaaactatacagatgcattctcaggaactttttggtgatgtttgtattcaactcccagagttgaactttcctttggaaagagcagctatgaaacactctttttctagaatctgcaagtggacgtttggagggctttgtggtttgtggtggaaaaggaaatatcttcacctaaatactagatagaagcattctcagaaactgctttgtgatgattgcattcacctcacagagttgaacattcctattgatagagcagtttggaaacactcttgttgtggaatgtgc

SEQ ID NO: 384100 - DNA, 454 bp, Homo sapiens
tttgaaacactctttttgcaggatctacaagtggatatttggaccactctgtgtccttcgttcgaaacgggtatatcttcacatgacatctagacagaagcattctcagaagcttctctgtgatgactgcattcaactcacggagttgaacactccttttgagagcgcagttttgaaactctctttctgtggcatctgcaaggggacatgtagacctctttgaagatttckttggaaacggaatcatcttcacataaaaactatacagatgcattctcaggaactttttggtgatgtttgtattcaactcccagagttgaactttcctttggaaagagcagctatgaaacactctttttctagaatctgcaagtggacgtttggagggctttgtggtttgtggtggaaaaggaaatatcttcacctaaatactagatagaagcattctcagaaa

SEQ ID NO: 384101 - DNA, 427 bp, Homo sapiens
aacagaagcagtctcagaatcttctttgtgatgtttgcattcaaatcccagagttgaactttcctttcaaagttcacgtttgaaacactctttttgcaggatctacaagtggatatttggaccactctgtgtccttcgttcgaaacgggtatatcttcacatgacatctagacagaagcattctcagaagcttctctgtgatgactgcattcaactcacggagttgaacactccttttgagagcgcagttttgaaactctctttctgtggcatctgcaaggggacatgtagacctctttgaagatttcgttggaarcggaatcatcttcacataaaaactatacagatgcattctcaggaactttttggtgatgtttgtattcaactcccagagttgaactttcctttggaaagagcagctatgaaa

SEQ ID NO: 384102 - DNA, 547 bp, Homo sapiens
ggaaacgggataatttcagctgactaaacagaagcagtctcagaatcttctttgtgatgtttgcattcaaatcccagagttgaactttcctttcaaagttcacgtttgaaacactctttttgcaggatctacaagtggatatttggaccactctgtgtccttcgttcgaaacgggtatatcttcacatgacatctagacagaagcattctcagaagcttctctgtgatgactgcattcaactcacggagttgaacactccttttgagagcgcagttttgaaactctctttctgtggcatctgcaaggggacatgtagacctctttgaagatttcgttggaaacggaatcatcttcacataaaaactrtacagatgcattctcaggaactttttggtgatgtttgtattcaactcccagagttgaactttcctttggaaagagcagctatgaaacactctttttctagaatctgcaagtggacgtttggagggctttgtggtttgtggtggaaaaggaaatatcttcacctaaatactagatagaagc

SEQ ID NO: 384103 - DNA, 577 bp, Homo sapiens
attccttgcgatgtagcagtttagaaacacactttatgcagaatctgcaagtgcatatttggacctctctgaggaattcgttggaaacgggataatttcagctgactaaacagaagcagtctcagaatcttctttgtgatgtttgcattcaaatcccagagttgaactttcctttcaaagttcacgtttgaaacactctttttgcaggatctacaagtggatatttggaccactctgtgtccttcgttcgaaacgggtatatcttcacatgacatctagacagaagcattctcagaagcttctctgtgatgactgcattcaactcacggagttgaacactccttttgagagcgcagttttgaaactctctttctgtggcatctgcaaggggacatgtagacctctttgaagatttcgttggaaacggaatcatcttcacataaaaactatacagatgcattytcaggaactttttggtgatgtttgtattcaactcccagagttgaactttcctttggaaagagcagctatgaaacactctttttctagaatctgcaagtggacgtttggagggctt

SEQ ID NO: 384104 - DNA, 568 bp, Homo sapiens
atttggacctctctgaggaattcgttggaaacgggataatttcagctgactaaacagaagcagtctcagaatcttctttgtgatgtttgcattcaaatcccagagttgaactttcctttcaaagttcacgtttgaaacactctttttgcaggatctacaagtggatatttggaccactctgtgtccttcgttcgaaacgggtatatcttcacatgacatctagacagaagcattctcagaagcttctctgtgatgactgcattcaactcacggagttgaacactccttttgagagcgcagttttgaaactctctttctgtggcatctgcaaggggacatgtagacctctttgaagatttcgttggaaacggaatcatcttcacataaaaactatacagatgcattctcrggaactttttggtgatgtttgtattcaactcccagagttgaactttcctttggaaagagcagctatgaaacactctttttctagaatctgcaagtggacgtttggagggctttgtggtttgtggtggaaaaggaaatatcttcacctaaatactagata

SEQ ID NO: 384105 - DNA, 454 bp, Homo sapiens
tttgaaacactctttttgcaggatctacaagtggatatttggaccactctgtgtccttcgttcgaaacgggtatatcttcacatgacatctagacagaagcattctcagaagcttctctgtgatgactgcattcaactcacggagttgaacactccttttgagagcgcagttttgaaactctctttctgtggcatctgcaaggggacatgtagacctctttgaagatttcgttggaaacggaatcatcttcacataaaaactatacagatgcattctcaggaactttttggtgatgtttgyattcaactcccagagttgaactttcctttggaaagagcagctatgaaacactctttttctagaatctgcaagtggacgtttggagggctttgtggtttgtggtggaaaaggaaatatcttcacctaaatactagatagaagcattctcagaaa

SEQ ID NO: 384106 - DNA, 577 bp, Homo sapiens
attccttgcgatgtagcagtttagaaacacactttatgcagaatctgcaagtgcatatttggacctctctgaggaattcgttggaaacgggataatttcagctgactaaacagaagcagtctcagaatcttctttgtgatgtttgcattcaaatcccagagttgaactttcctttcaaagttcacgtttgaaacactctttttgcaggatctacaagtggatatttggaccactctgtgtccttcgttcgaaacgggtatatcttcacatgacatctagacagaagcattctcagaagcttctctgtgatgactgcattcaactcacggagttgaacactccttttgagagcgcagttttgaaactctctttctgtggcatctgcaaggggacatgtagacctctttgaagatttcgttggaaacggaatcatcttcacataaaaactatacagatgcattctcaggaactttttggtgatgtttgtaytcaactcccagagttgaactttcctttggaaagagcagctatgaaacactctttttctagaatctgcaagtggacgtttggagggctt

SEQ ID NO: 384107 - DNA, 544 bp, Homo sapiens
gaactttcctttcaaagttcacgtttgaaacactctttttgcaggatctacaagtggatatttggaccactctgtgtccttcgttcgaaacgggtatatcttcacatgacatctagacagaagcattctcagaagcttctctgtgatgactgcattcaactcacggagttgaacactccttttgagagcgcagttttgaaactctctttctgtggcatctgcaaggggacatgtagacctctttgaagatttcgttggaaacggaatcatcttcacataaaaactatacagatgcattctcaggaactttttggtgatgtttgtattcaactcccagagttgaactttcctttggaaagagcagctatgaaacactctttttctagaatctgcaagtggacgtttggagggctttgtggtttgtggtggaaaaggawatatcttcacctaaatactagatagaagcattctcagaaactgctttgtgatgattgcattcacctcacagagttgaacattcctattgatagagcagtttggaaac

SEQ ID NO: 384108 - DNA, 349 bp, Homo sapiens
aggtttgaatcactctttttgtaggatctgcaagtggatatttggaccactctgtggccttcgttcgaaacgggtacatcttcacataaaatctagacagaagccttctcagaaacttctctgtgatgattgcattcaactcacagakttgaaccctcctatggatagagcattgttgaaactctctttttgtggaatctgcaagtggatatgtggacctctccgaagatgtctttggaaacgggaatgtcttcacataaaaactaaacagaagcattctcagaaacttctctgtgatgtttgtgttcaactcccagagtttcacattgcttttcatagagtagttctg

SEQ ID NO: 384109 - DNA, 349 bp, Homo sapiens
aggtttgaatcactctttttgtaggatctgcaagtggatatttggaccactctgtggccttcgttcgaaacgggtacatcttcacataaaatctagacagaagccttctcagaaacttctctgtgatgattgcattcaactcacagatttgaaccctcctatggatagagcattgttgaaactctctttttgtggaatctgcaagtggatatgtggacctctccgaagatgtctttggaaacgggaatrtcttcacataaaaactaaacagaagcattctcagaaacttctctgtgatgtttgtgttcaactcccagagtttcacattgcttttcatagagtagttctg

SEQ ID NO: 384110 - DNA, 277 bp, Homo sapiens
gagcattgttgaaactctctttttgtggaatctgcaagtggatatgtggacctctccgaagatgtctttggaaacgggaatgtcttcacataaaaactaaacagaagcattctcagaaacttctctgtgatgtttgtgttcaactcccagagtttcacattgcttttcatagagtagttctgaaacatgcttttcgtagtgtctgcaagtggacatttggagcgctttcaggcctgtggwggaaaaccaattatggtcccataaaaactggagagaa

SEQ ID NO: 384111 - DNA, 277 bp, Homo sapiens
gagcattgttgaaactctctttttgtggaatctgcaagtggatatgtggacctctccgaagatgtctttggaaacgggaatgtcttcacataaaaactaaacagaagcattctcagaaacttctctgtgatgtttgtgttcaactcccagagtttcacattgcttttcatagagtagttctgaaacatgcttttcgtagtgtctgcaagtggacatttggagcgctttcaggcctgtggtggaaaacsaattatggtcccataaaaactggagagaa

SEQ ID NO: 384112 - DNA, 528 bp, Homo sapiens
gaacattccttgtgatgtagcagtttagaaacacactttctgcagaatctgcaagtgcatatttggwcctctctgaggaattcgttggaaaccggataatttcagctgactaatcagaagcagtctcagaatcttctttgtgatgtttgcattcaaatcccagagttgaactttcctttcaaagttcacgtttgaaacactctttttgcaggatctacaagtggatatttggaccactctgtgtccttcgttcgaaacgggtatatcttcacatgacatctagacagaagcattctcagaagcttctctgtgatgactgcattcaactcacggagttgaacactccttttgagagcgcagttttgaaactctctttctgtggcatctgcaaggggacatgtagacctctttgaagatttcgttggaaacggaatcatcttcacataaaaactatacagatgcattctcaggaactttttggtgatgtttgtattcaactcccagagttgaactttcctttggaaagag

SEQ ID NO: 384113 - DNA, 552 bp, Homo sapiens
cagtttagaaacacactttctgcagaatctgcaagtgcatatttggtcctctctgaggaattcgttggaaacsggataatttcagctgactaatcagaagcagtctcagaatcttctttgtgatgtttgcattcaaatcccagagttgaactttcctttcaaagttcacgtttgaaacactctttttgcaggatctacaagtggatatttggaccactctgtgtccttcgttcgaaacgggtatatcttcacatgacatctagacagaagcattctcagaagcttctctgtgatgactgcattcaactcacggagttgaacactccttttgagagcgcagttttgaaactctctttctgtggcatctgcaaggggacatgtagacctctttgaagatttcgttggaaacggaatcatcttcacataaaaactatacagatgcattctcaggaactttttggtgatgtttgtattcaactcccagagttgaactttcctttggaaagagcagctatgaaacactctttttctagaatctgcaagtggacgttt

SEQ ID NO: 384114 - DNA, 529 bp, Homo sapiens
tgaacattccttgtgatgtagcagtttagaaacacactttctgcagaatctgcaagtgcatatttggtcctctctgaggaattcgttggaaaccggataatttcagctgactaatcagaagcagtctcagaatcttctttgtgatrtttgcattcaaatcccagagttgaactttcctttcaaagttcacgtttgaaacactctttttgcaggatctacaagtggatatttggaccactctgtgtccttcgttcgaaacgggtatatcttcacatgacatctagacagaagcattctcagaagcttctctgtgatgactgcattcaactcacggagttgaacactccttttgagagcgcagttttgaaactctctttctgtggcatctgcaaggggacatgtagacctctttgaagatttcgttggaaacggaatcatcttcacataaaaactatacagatgcattctcaggaactttttggtgatgtttgtattcaactcccagagttgaactttcctttggaaagag

SEQ ID NO: 384115 - DNA, 552 bp, Homo sapiens
cagtttagaaacacactttctgcagaatctgcaagtgcatatttggtcctctctgaggaattcgttggaaaccggataatttcagctgactaatcagaagcagtctcagaatcttctttgtgatgtttgcattcaaatcccmgagttgaactttcctttcaaagttcacgtttgaaacactctttttgcaggatctacaagtggatatttggaccactctgtgtccttcgttcgaaacgggtatatcttcacatgacatctagacagaagcattctcagaagcttctctgtgatgactgcattcaactcacggagttgaacactccttttgagagcgcagttttgaaactctctttctgtggcatctgcaaggggacatgtagacctctttgaagatttcgttggaaacggaatcatcttcacataaaaactatacagatgcattctcaggaactttttggtgatgtttgtattcaactcccagagttgaactttcctttggaaagagcagctatgaaacactctttttctagaatctgcaagtggacgttt

SEQ ID NO: 384116 - DNA, 583 bp, Homo sapiens
tcagctgactaatcagaagcagtctcagaatcttctttgtgatgtttgcattcaaatcccagagttgaactttcctttcaaagttcacgtttgaaacmctctttttgcaggatctacaagtggatatttggaccactctgtgtccttcgttcgaaacgggtatatcttcacatgacatctagacagaagcattctcagaagcttctctgtgatgactgcattcaactcacggagttgaacactccttttgagagcgcagttttgaaactctctttctgtggcatctgcaaggggacatgtagacctctttgaagatttcgttggaaacggaatcatcttcacataaaaactatacagatgcattctcaggaactttttggtgatgtttgtattcaactcccagagttgaactttcctttggaaagagcagctatgaaacactctttttctagaatctgcaagtggacgtttggagggctttgtggtttgtggtggaaaaggaaatatcttcacctaaatactagatagaagcattctcagaaactgctttgtgatgattgcattcacctcacagagttgaaca

SEQ ID NO: 384117 - DNA, 563 bp, Homo sapiens
agtctcagaatcttctttgtgatgtttgcattcaaatcccagagttgaactttcctttcaaagttcacgtttgaaacactctttttgcaggatctacaagtggatatttggaccactctgtgtccttcgttcgaaacgggtatatcttcacatgacatctagacagaagcattctcagaagcttctctgtgatgactgcattcaactcacggagttgaacactccttttgagagcgcagttttgaaactctctttctgtggcatctgcaaggggacatgtagacctctttgaagatttcgttggaaacggaatcatcttcacataaaaactatacagatgcattctcaggaacyttttggtgatgtttgtattcaactcccagagttgaactttcctttggaaagagcagctatgaaacactctttttctagaatctgcaagtggacgtttggagggctttgtggtttgtggtggaaaaggaaatatcttcacctaaatactagatagaagcattctcagaaactgctttgtgatgattgcattcacctcacagagttgaaca

SEQ ID NO: 384118 - DNA, 375 bp, Homo sapiens
tgtgatgactgcattcaactcacggagttgaacactccttttgagagcgcagttttgaaactctctttctgtggcatctgcaaggggacatgtagacctctttgaagatttcgttggaaacggaatcatcttcacataaaaactatacagatgcattctcaggaactttttggtgatgtttgtattcaactcccagagttgaactttcctttggaaagagcagctatgaaacactctttttctagaatctgcaagtggacgtttggagggctttgtggtttgtggtggaaaaggaaatatcttcacctaaatactagayagaagcattctcagaaactgctttgtgatgattgcattcacctcacagagttgaac

SEQ ID NO: 384119 - DNA, 426 bp, Homo sapiens
gttggaaacgggagaatcttcacagaaaagctaaacagaagcattctcagaaacttctttgtgatgcttgcattcaactcacagagttgaactttcctttcgagagagaagctttgaaacactctttttccagaatctgcaagtggacatttggagggctttgaggcctgtggtggaaaaggaattawcttcccgtaaaagctagatagaagcattctcagaaactactttgtgatgattgcattcaagtcacagagttgaacattccctttgacagagcagtttggaaactctctttgtgtagaatctgcaagtggagatatggaccgctttgaggcctatggtagtaaaggaaatagcttcatataaaagctagacagtagcattcacagaaaactcttggtgacgactgagtttaactcacag

SEQ ID NO: 384120 - DNA, 532 bp, Homo sapiens
gcatcataaaacaatagactttatcccagtttctgtggatccaggatatgggtgcagattatctgggtaccaaagcctcaaggtctttcacaaggctgcagtcaagctgtcagtcagagctgcagtatcacctgaaggctcaactgagattaaacctgcagccaagctcattaatgtgattgtttgtattatttagttctttatggkttgctgtactaaggactttcagtttcttactggctggttggccagagactgctctcagttccttccctcacggacctctcgaaaaggcagcttacaaaatggcagctggcttgcaaccaagtgagcaagagagggcatgcaagatggaagctatttataacctaatctcagaagtgatgcctcatcactttgccatattctactcattagaagcaagtcagtaagtccagaccatacgcaaggggaagagattacacaagagtgtgaatcccagaaggcagggaccattgggggcattttagaggctgcctaccacaactgatcc

SEQ ID NO: 384121 - DNA, 510 bp, Homo sapiens
atcccatcatcagctcatcctgctttgtaacagttagctgacagtttaataaattaaaatttattaaacaagtgaataagtagtactatcaagatttgaaactgaattactttctgaaagtatgcaagatttatgttgattcaggcataaatagcccagcaagataattttattccacacgactaacaattttaactgagtaaaaatgagggggaaagatggtatgaccacgtagctcgatgaatcccaaccctggttttgtttgtcaaagatgctccgaaatttttcaagggctgttgttttaaaaaaaaaacaccttatttcaattcaccttcttttacatatataacatcctacrtaacacatcttttgaggatagagaaggagaataaatacagggctgcacttccacgaaggttgggaatcaccatgtgctgggtgcaggcaacagaggatgtttgtggagatgctcacaatgaacagaagagacggacgtgatggaacagaaac

SEQ ID NO: 384122 - DNA, 473 bp, Homo sapiens
gatagaaaattgaggtggaagaaaaaacagatggattttttctctgtttctactacaaacccagtggggaacttcccaagagcaaaaccatgtgacagctacaatgattcagcactcaaatgtaatatatgccatttatttaaatacttatttaaagggaataaactagagtaataattaaataagatcaggcaatataatcttcagtattccaatgttaaaactacctaggtattatcaagttttcaaagaaatgcaatagttgtaaggctgtaaaatgcataaaacagaatatattttgctttttaaccccagcaaaaaaagcaggggggaggagaaatgctatctcttgtaacacaaagctaattacaacggtatcaaagattaccaaaattagaaatactgtcataatmtgaacagtaaaatgaatttatttgttcatctttccaaaatataacatgccaagttatcaa

SEQ ID NO: 384123 - DNA, 563 bp, Homo sapiens
ttttacacaaaaatggagagctttctgacttggtgatgggcatgtgaatgtgtagaggcatgcatatatgcaattttacaccttttagtaacgtattagcatgaaataggatggaatttgacacttcctgttaatytcctttgtgagatggccacagaatgcttgaaaacttgtttctcctcctatgccttcagcactggcagcatgctatcatttcatagctgctccttaggctgccagttttttgtttgtttgtttgtttgttttgagagggagtctcgctctgtcccccaggctggagtgcagtggcgcgatctcactgcaagctccgcctcccgggttcacaccattctcctgcctcaggctgccagttttgaccaaattacttccattggctgactgcagtggccttgagaaaatcatattattgatgagttgccagacaagttacttttatcactcaaggaacaaccaaatgttggagtaataaatcacaaggaatacaaggaatatttggggtaaaaactccaaaaagtttgagttttgaaagacttaatcagtgg

SEQ ID NO: 384124 - DNA, 503 bp, Homo sapiens
aatccccctcaaattaatctatagatttaatgtaagatttctaacccttggcattattgacacttaggacaactctttgttatatggagccatcctgtgcattaaaaaatgtttagcaacatcctcggccccactagatgccagtagctccaccctactctagttgtaataaaaaatgtctccagacattgccaaatgwcccttcggtgcaaatttgcccctgattgagaaccattcaacagtggttacaatctccatcaaattcccagcaggactttttaaaaaagtttttgggtttttgttgttgtcgttttctaagaaaaactgacactaaaattcgtacatagaggccgtagaggcctggcatggtggctcacacctgtaatcccagcacttggggagactgaggcggacagatcacttgaggccagcagttcaagaccagcctgaccaacatgaaaaaaacccatttctactaaaagtacaaaaactagctgggtgtg

SEQ ID NO: 384125 - DNA, 503 bp, Homo sapiens
aatccccctcaaattaatctatagatttaatgtaagatttctaacccttggcattattgacacttaggacaactctttgttatatggagccatcctgtgcattaaaaaatgtttagcaacatcctcggccccactagatgccagtagctccaccctactctagttgtaataaaaaatgtctccagacattgccaaatgacccttcggkgcaaatttgcccctgattgagaaccattcaacagtggttacaatctccatcaaattcccagcaggactttttaaaaaagtttttgggtttttgttgttgtcgttttctaagaaaaactgacactaaaattcgtacatagaggccgtagaggcctggcatggtggctcacacctgtaatcccagcacttggggagactgaggcggacagatcacttgaggccagcagttcaagaccagcctgaccaacatgaaaaaaacccatttctactaaaagtacaaaaactagctgggtgtg

SEQ ID NO: 384126 - DNA, 503 bp, Homo sapiens
aatccccctcaaattaatctatagatttaatgtaagatttctaacccttggcattattgacacttaggacaactctttgttatatggagccatcctgtgcattaaaaaatgtttagcaacatcctcggccccactagatgccagtagctccaccctactctagttgtaataaaaaatgtctccagacattgccaaatgacccttcggtgcaaatytgcccctgattgagaaccattcaacagtggttacaatctccatcaaattcccagcaggactttttaaaaaagtttttgggtttttgttgttgtcgttttctaagaaaaactgacactaaaattcgtacatagaggccgtagaggcctggcatggtggctcacacctgtaatcccagcacttggggagactgaggcggacagatcacttgaggccagcagttcaagaccagcctgaccaacatgaaaaaaacccatttctactaaaagtacaaaaactagctgggtgtg

SEQ ID NO: 384127 - DNA, 503 bp, Homo sapiens
aatccccctcaaattaatctatagatttaatgtaagatttctaacccttggcattattgacacttaggacaactctttgttatatggagccatcctgtgcattaaaaaatgtttagcaacatcctcggccccactagatgccagtagctccaccctactctagttgtaataaaaaatgtctccagacattgccaaatgacccttcggtgcaaatttgcccctgattgagaaccattcaacagtggttacaatctccatcaaattcccagcaggactttttaaaaaagtttttgggtttttgttgttgtcgttttctaagaaaaactgayactaaaattcgtacatagaggccgtagaggcctggcatggtggctcacacctgtaatcccagcacttggggagactgaggcggacagatcacttgaggccagcagttcaagaccagcctgaccaacatgaaaaaaacccatttctactaaaagtacaaaaactagctgggtgtg

SEQ ID NO: 384128 - DNA, 546 bp, Homo sapiens
ttcaaacacttcattgtttccaatcaggctttgtttttacgatgtgggttgaaaattcttcttttcaaagcagtgctgccttcagtgattaagctggcatgaatttcagtctgactccatttctttccattccgctgacagatatgccaaagaggtaacagtccctctaaagccaatcattaaaaaaaatttttttaactgagtatttttccccaaaccaaatcgaatatgaaacactaacagcctacaacagataaaagtagaatgycataaaggaagtgggaaagggcctgcctgctatggccctacctcatgaaggacagcagccccaagttacagcttcaagaccaatgctctgaagtattacaagctacattatgatttctgcacagcatgatggcaaaaaataaaaaagaaaacaatcatgaagcacttgtaagtaaatagaaaattgggctatacttaaaaacacttttaaaatctcaatttaaaaaatggacaactataacatgattccctttaaataatttccctttaaaactccat

SEQ ID NO: 384129 - DNA, 539 bp, Homo sapiens
ggtctttgtttgcatgcatgtcacatatttaccagtcctgatgtactttgttttaatttctagaaaagaaaaatgaaatccacataaattaagtaacttgccccgctaacttaatgactaaaccataactttgacctactgcttctgactaatgtggcaggcaccctttttacataccatactatacatctcaaattgatcaagacactagttctaatttattgaaaaaacaagagcttaattatcttaactttttcatgagtttttcctattcttaattgctgttttatcctgtttacaacctgtaactctaaattccaaatatttgcttgggcattgattaccggtaaaagtttgtttacctaaatgaactaaagaatatgctaagacaatacgacaaggaaaactgacctattttgattaggttttctggagagtttatagtgtaatttgggaggcagtattaataacaataaaaacaataygtaaagcataggcaaagtgctaagtgattagtaccaacagtggtacctgtgact

SEQ ID NO: 384130 - DNA, 626 bp, Homo sapiens
acattatatttcagtatgtacctatatcattcaattctttaaaaagattttaaatatctacatatatacctatctaagcattttcctacttggacatataaaatgtttgcaatatttcayatgtaatatatgtgtgtgtatatatatatatataatatatagcacatatatgtgttacaagcacataataaaatgaaagatataattttatataaatactgtctctaacttctatgagttcctcaaggagggaaactattccttttcatcttattcacctatcacaatgagcacacagatgctaaacaataatttgttaaatgaatgaatgaataaaaatggcattcaaagattttaagtagtgatataattacgagttttctttctactataaaagcctgttgcaatgattacattttacttatatttaaaacaaaacacatacttccaataagagaaagtgtttatttaaaaaagttttttcaaactttctccccatgttccaagataatgtaaaaaccatacaccaaagcattagttatacttcatctcatattaatcttatgcttgcttagttcttagttgtccattttctggtttttaataattattttacaatctgccat

SEQ ID NO: 384131 - DNA, 408 bp, Homo sapiens
ctgcagcatttacctccttggctcaagctatcttcccacagtaacctcggaaggaactgggattacaggtgtttggcaccagctattgttttagtattatgtttatttttggtacaaaagaggtcttgctatcttgtccaggctggtttcgaactcctaggctcaagtaatcctcctgccagtctcccaaaatgctgagattacaggcatgagccaacrtgcctggcctaaaattcacttttgatttaaaaaaaaaaacaaaacccgcaaatatccactcaaaataaagtgtagcaacatttaagtagtctatcctaaactaataacaacgatgatgtttaaaggcaagttactggaaaaagtcatgtcaaagtcagcacagggaaattttgttatgattctccatac

SEQ ID NO: 384132 - DNA, 623 bp, Homo sapiens
tgtttatctggacttattgcataaagaaatatacctcaagataatataggacctatctatgcayattattttgtaaacaaatgtcataatgtggacactggctttgtgtgctacctaatttatagtataatacatacaactaaatattgttgtacagtagatggtagattagcacctttgtgttcaaaaatgaggtttaccatcaagaataacgtatagttgagataatcaaatatctgcctttgccctaggaacaccagaggaccctcactctcagggtgaatgttgggttatactgacctaaatactaagtgtgcaatcagggattatcccaacatctgtttaggaaagacagatgttgtcattatagaccttcattcatgtgctcctccatagttaaaaagaatgattcccatacattgaattcataaaagcaagcaagaaacaggcagaaaaagaaaaatggaagtctccagaatattttgaataagaagtttcaagaccagaggaaaaaagaagaaaatagaatggggagttagggggtgtggcagtggtgagaggaaaaaaaaaaggtattgtgaagaggtctacagctacataaaaagcctttgtatagtttgtct

SEQ ID NO: 384133 - DNA, 623 bp, Homo sapiens
tgtttatctggacttattgcataaagaaatatacctcaagataatataggacctatctatgcatattattttgtaaacaaatgtcataatgtggacactggctttgtgtgctacctaatttatagtataatacatacaactaaatattgttgtacagtagatggtagattagcacctttgtgttcaaaaatgaggtttaccatcaagaataacgtatagttgagataatcaaatatctgcctttgccctaggaacaccagaggaccctcactctcagggtgaatgttgggttatactgacctaaatactaagtgtgcaatcagggattatcccaacatctgtttaggaaagacagatgttgtcattatagaccttcattcatgtgctcctccatagttaaaaagaatgattcccatacattgaattcawaaaagcaagcaagaaacaggcagaaaaagaaaaatggaagtctccagaatattttgaataagaagtttcaagaccagaggaaaaaagaagaaaatagaatggggagttagggggtgtggcagtggtgagaggaaaaaaaaaaggtattgtgaagaggtctacagctacataaaaagcctttgtatagtttgtct

SEQ ID NO: 384134 - DNA, 623 bp, Homo sapiens
tgtttatctggacttattgcataaagaaatatacctcaagataatataggacctatctatgcatattattttgtaaacaaatgtcataatgtggacactggctttgtgtgctacctaatttatagtataatacatacaactaaatattgttgtacagtagatggtagattagcacctttgtgttcaaaaatgaggtttaccatcaagaataacgtatagttgagataatcaaatatctgcctttgccctaggaacaccagaggaccctcactctcagggtgaatgttgggttatactgacctaaatactaagtgtgcaatcagggattatcccaacatctgtttaggaaagacagatgttgtcattatagaccttcattcatgtgctcctccatagttaaaaagaatgattcccatacattgaattcataaaagcaagcaagaaacaggcagaaaaagaaaaatggaagtctccagaatattttgaatragaagtttcaagaccagaggaaaaaagaagaaaatagaatggggagttagggggtgtggcagtggtgagaggaaaaaaaaaaggtattgtgaagaggtctacagctacataaaaagcctttgtatagtttgtct

SEQ ID NO: 384135 - DNA, 625 bp, Homo sapiens
aaaaaaacaaaacaaaacaaagggaaggtcgttttgttttttccccaagtattaaccaagcactgtccagagccttcttcatatgagctttgccgtcctaaaaaattttctttgttatgcctcttccttgctcctgaacctgagtgatttgcttagctaatcaagcttaaataatatgtaacaggcaagaaaaagaaatcactaaaatatagaaatggctgcagctgttttctgcattataggagaatagcagaattcatctctggagtagatgytcttttgtttaggaaaacacactgatgaaatttttagattattcaaaattaggtccccaagactggtccagggtggaagtggagacagaagaacaaaattactctgaagtatcaagtgtcaagaagtttgcctttgagccttgctggttttaggggtagaagtagtggtgtattctagaaataggagaatatggaaattgagacaaacacattatatacaaacactcacactcacagacacacagagacatcaggaaattgtggccagctggattctgagcaagaataaggctttctaaaaaatgtcttgggatagagatggctaaaaaattttaatagtcatatttatc

SEQ ID NO: 384136 - DNA, 612 bp, Homo sapiens
accagagtttctgatttctaataatttacagccttggtggaaaaagaatcacatattaaagtgagttaacattttaaaactagtgcaacatcaaggctgaaaatattattatacaaataatacaaagtgaatatttaccattgatctgttaagaaatggaaacattccagtgtcctgctgagccataatggaacctgaggcaaaggaaatatcagtgatactaaccctgtcttgatttaaaattttggtattttrttcattaagtagttttgcattaatttagattttaaatatcatcttaaagtgttatttatcttgattactgagctttttggaggccccttaaattttttgcttagaaagtgtgtctcactagtcctgttcctgaggaattcatcattgaaaggatagcatccatctagaaaaatctcagttgggcacaatgactgtcaaagagattttggcttgcttactatcagcataatttattttctcatgtgagaaaaaatatttatgttgttataacaaatcaattaataagacattgatagaaaataatgatataaatcctatacacattgggtttataaatgtgtcctatatgaataacag

SEQ ID NO: 384137 - DNA, 587 bp, Homo sapiens
tagactaaatgaggttcttgagttatgttaacacctatgaaaatcaattgctaaaattcagttttcataatttctcaagggctccatcacttactagctgtgtggtcatggggcaaatgttctaatctctccagtgrtactggaggatactaataatgcctatgaaatagggttcatttcatgatttaaaaaaggtgctatgttcaatataagatgtgtaaatctaattttttattattgctccttgcaaggaaataatcaatgacagattataactttattttatatcttaggaagaccttcacatcaactctttacagccagggatggagttttatgaagatggtttaggcaaacgtgttaagttagctgggctatttaagataccctgagatttaaaaaacaaacagcaacaacaacaaaaacaaaaaccatgtaaacaaaaataaaaaacaaccaaaaacaaaaacatgtaaacgattcataatgtccatttgtaagaaacactttatgtcccagctatcaaagcatagataatatatgagtcatctaaccaaggtgtgaaacaagcttgagagtacagttaa

SEQ ID NO: 384138 - DNA, 408 bp, Homo sapiens
gtgcctggtgcacctaggtgcctcatggtgtcattgccttcaccaaacctaggattagcatctcctgtggacactcagagtgaaaaattaataaagcatgttcaacagagaaacagggaatgcttggataaatgaatctttaaataaatgcatcctccttattatgaatcaaaacttacctgccctgtgcaatttcctttagtggacagactattcagatgtgccagtttattcaacagtgtctataagaaacagtgtcccaaagacacaactcttaatatactgactttatatgtgatacatattcttagaggcattctaaagcaaaatgctaaaacccagarggatgatgatattcagggtggaaattataggcatcatggaaggctgatcaaagaaatggatttt

SEQ ID NO: 384139 - DNA, 616 bp, Homo sapiens
gatgcccccatctgcagctgtggctgggtggctgcagctgcactcaggggaggtgctttttccgggccctcccatggctgcccatggaccaatcagcatgcacttccttccttttaggccataaaaaccccccacccagccagacttggacagactagggactaccagctgcaacttggaaggaggcaggaatcccacctcttcccacctcctgctggctctgtgaagcactgagccccagcagtacttcttccactgcagccaacatcttcacagtggccactctagatgggccacctctgccatcaaaattttctcttaaaggtcactgagaaataaacaatagcataacagagagtgaatgtgatttccacaactctctctgtagatagaaacttaaaattcttataaaggcattctttcatagggtacggatatagatatgcaacagatgtggaatacctctgtctatatatagatatatatttatacctacagtttagatacatagacaygtacatacacacatatgtatacctcatttttaagttaaatcttagacatttaaaacagtttttatgcaatgtgaaatttatctttccaaggatcttagaag

SEQ ID NO: 384140 - DNA, 593 bp, Homo sapiens
atataaatcccaataatggatttctctaaagccaaaccctcttcaactttcgtggtaattctcttaagaaagcattaaataaaagcatttcacttctagttgaaaatcaatggtacttcagtgaagcatgcatcttccaagtattatggagtcaagaatcatacagttctgctagtaagacatggggccctggctttggtgataataacttcgtgcaacagtgcaacacaggagtctttgggaaaaatcatgyaaaataaagaattgaaaattgagtgtgaatgtgctctagttctctttgaaatgccaacctgatacataaaattataaataatgaaaatggtgtgataggaataggaatgagagtagtaataagtagaaacaatacttactgtctactatggaccagacactaaatacatgatatgcatcatctcatttgattctcttaagaatcctgtaacttggtattattacctacatttctggagtaggtctgaagaaggaacaactacgtgtggagacattcaataaatttaagatgggttaaaatattttattatacactaatgtatggccatttcaacaatcaa

SEQ ID NO: 384141 - DNA, 589 bp, Homo sapiens
gttaccatgttttcttctttccattcagtagttcagcacatctttattgactgttgcatgccatgacctttgatctggccaaccagatgaaagagatttcaaattttcaacggcattgtctacatggactcttgtttctccatgacttattttgagaaaaataagtgagacttttctttcttttgtatacattggagatgcatatctttgcatttcattggagcaaagtgattcagtaatacaaaaggtagtttttctgttaaactcaggggattgtaatcatttaacatactctagaagttaaggaaatgcatgatttaacatggagatgaaagagataggaattatagtcagaaaaacgattttcttaatcttagtgggtttccaattcctcttctgtaaaacggtaacaatagtacaacttttaaatattgttataatgttatatgagaattttaaaagataataggtgttaaaaatgccaggcattaytctcatatgtgataggctgtcatttatttgttgattactgtgtggagatgatgtactaagcactctacctgcatttcctcatttgctatttccccca

SEQ ID NO: 384142 - DNA, 536 bp, Homo sapiens
atattttctgaatctgtgatgtcatttattataagatgcaccatttgtttgtttcattaaggaagaaaaatcactgccaattataactgttaaatttatagtgataaatgttcagttatctattgctgcataataagccacaccaaattttgtagcttaaatcaacaatgttttcattactataattcacggttttgggagctgactgggttggctggctcagggtttctcatgaagttgtcatgagatgcaggctagggatggggtcatctcgaagtcttcactatcacggatggtgattaatgctagctgtcatctargacttcagctgggcttattggtcaggacacatacatgtggcctctacatgtagccctggcctctttacaacatggtagctgagttgcgagatcaaagatcccaagtgagacagctaagcagaagctatatctctctttataatctatttcaagtcacatagcctcacttgcaccttacactgccagttgaggcagtcacaaaagttcaaccagttt

SEQ ID NO: 384143 - DNA, 618 bp, Homo sapiens
agcaacagttttgagtgttttatgagttaggcattgtactttataaatcttaacttttttcctattgaaacttacttagattcagagagaataagtaacttgcataaggtcacacaggtagtaagggcatagagtgggattttctccaaccacgttttcctatagctacctctcatttgttttttatgcttcacatcaaacgttgctaccctctattgtagatagtttttattataaggccctggtttattttcctcaaagtacttatcattaataatgttatttttcctctgatttgtatgtttacttttcctgtttgcattactaaaacataacatccatgaagggcacagacttyatgtatattatgcttattacagtatcatcagcacctagaacaatatcaagtaactaactggtaattgatgaatatctcattaaaaaaagaatgtatggaataaagaacacagtatctgtgctcaaagaactgaccatctatagagtcaattctaagatatgcgcaggaattctagttaacaatccagcatggaagaagcttggaagttgcaactccattctaacaacttataaaaagctgaaaaaactaaaaaattcata

SEQ ID NO: 384144 - DNA, 487 bp, Homo sapiens
gtaaattgagtactttgggtggttatgatgtgttgatgaaggttcatccaytgcaacaaaggcaccactctgttggagaatgttgacggtgtggaaggctttgcatgtttgggtgctggggatatatgggaaatctctataccatttgctcaattttgctgtgaacctaaaatcactaaaaaatgaagtctattaaaaaagaaatgcaaaaaatgtgtattgcataaatggtgcgttttgatgtgtttaagaatttaattctatggaaacaaaaaggaaacagagttcacacccacctgtatttagagatggcctcagacagaagccgagatgaagctcagccttgaacatataaattgtttgaagaaaaagtatctttaactttgtcccagtcatttaagctcaaccctggtgattccagaaatgaaagagtgccccttcaaagggagagctatgaaaccccatagccttggtaaaaacacatcaa

SEQ ID NO: 384145 - DNA, 487 bp, Homo sapiens
gtaaattgagtactttgggtggttatgatgtgttgatgaaggttcatccattgcaacaaaggcaccactctgttggagaatgttgacggtgtggaaggctttgcatgtttgggtgctggggatatatgggaaatctctataccatttgctcaattttgctgtgaacctaaaatyactaaaaaatgaagtctattaaaaaagaaatgcaaaaaatgtgtattgcataaatggtgcgttttgatgtgtttaagaatttaattctatggaaacaaaaaggaaacagagttcacacccacctgtatttagagatggcctcagacagaagccgagatgaagctcagccttgaacatataaattgtttgaagaaaaagtatctttaactttgtcccagtcatttaagctcaaccctggtgattccagaaatgaaagagtgccccttcaaagggagagctatgaaaccccatagccttggtaaaaacacatcaa

SEQ ID NO: 384146 - DNA, 644 bp, Homo sapiens
aattgttttactctttccaagatttaaagtcctgggagaggcttgtatttcttattcttggtactttgatttattcctgcaccaagacaaagaccaagacaaactctgacctttcctcagattgaaagaaaattcctcaaaaagaaaaaaggggaaaaaaaagaaaaggaaaaaaaagagaagaagagaagaaaaggaaaaaagagaacaaaaaagagaaagaaacgatatgtgagtattgttgaaaccacaataaggaacaactgggaaacaacaatacttccttctaggatcaagtaaaatgaatcagcatttgcttttgttccagatatctacagctgtgtcacaaatcactggaaatcatagagacttaaaacaataacaattatctcattatatttcaagrtttttgtaagttggacagttgggaagggctcagctgggcatttctggctccatcttgtttgattggtgtcagaagggccctggtgctagaacaacagggagctgaaggagctgggagctgtatgaacttttcatttcttcaaataattttatgtctgttctcttcttgtgatctccccatgtaagctagtttgaactttctcacagcatagcgacttgaagacagattgctcatatgg

SEQ ID NO: 384147 - DNA, 581 bp, Homo sapiens
tcccagggtctaacacagtgtcaggaggacagcaagggctcactaggtattgaactaatgtggagatatgggggaattcaggccagctgcttaaaaaaggggggcttttctgagaaaggaatcagcatgttctcttctgaaaggattggcccagatgaagcttggggagattgttgaactctatccttaggaaaaaaggtttaacaaagcaarggggagcagagacaggctctttgtcatactctcagtaagagaaaagaaatctgtaagatttcttaagctttgcaattcctctatgtttgttattcttgcttttctctgtttccctgtagtgattaataataatttttaaagaaaatgtcatgtgtacctgtctttggggactggaggacggaggaagctagaaagacagctactttgtgcaggaaggctggagaggagaggaccctccggggacagacttggaattggcagctttgagcagggagtgggaagagtccctggggcctgctctgaggaaaaacaggggagtgccaagcctgggctgcacagggttcgaggcttcaaagggcgaagcctgt

SEQ ID NO: 384148 - DNA, 581 bp, Homo sapiens
tcccagggtctaacacagtgtcaggaggacagcaagggctcactaggtattgaactaatgtggagatatgggggaattcaggccagctgcttaaaaaaggggggcttttctgagaaaggaatcagcatgttctcttctgaaaggattggcccagatgaagcttggggagattgttgaactctatccttaggaaaaaaggtttaacaaagcaaaggggagcagagacaggctctttgtcatactctcagtaagagaaaagaaatctgtaagatttcttwagctttgcaattcctctatgtttgttattcttgcttttctctgtttccctgtagtgattaataataatttttaaagaaaatgtcatgtgtacctgtctttggggactggaggacggaggaagctagaaagacagctactttgtgcaggaaggctggagaggagaggaccctccggggacagacttggaattggcagctttgagcagggagtgggaagagtccctggggcctgctctgaggaaaaacaggggagtgccaagcctgggctgcacagggttcgaggcttcaaagggcgaagcctgt

SEQ ID NO: 384149 - DNA, 565 bp, Homo sapiens
aagtatgccatacaattacaaatgatgactcatatacttttctttataacattcccctggcctagaatgcctttccctgtctctccaagagaaaaattccttctcagtttgaaatacttagctcaaagaccacctccattcactaaagcttttgttttctgctttcccgcaggcactattatcttccatattctatgcacatcccactttaaaaarctttaaaattttctctaaaagttcttaactacatattaaccatcacaccagttggaaagaggatctgcattacttagaaattctaaattaggaaattatgtaaaatatttctgaactagagttcctttaaatgtctagcaggagcaaatgccagtcctctttcaagaaatgaacccttaaaataagccttttgagaattcaacatcccacatagactatcttccatagcctatgacacatattcttgttgtgggttagtttcctcactagatggtgacttctttgagaggaaggatttgctgttaatcaacacagtttcacaagtgcctagcacagcacatgttataac

SEQ ID NO: 384150 - DNA, 493 bp, Homo sapiens
catattaaccatcacaccagttggaaagaggatctgcattacttagaaattctaaattaggaaattatgtaaaatatttctgaactagagttcctttaaatgtctagcaggagcaaatgccagtcctctttcaagaaatgaacccttaaaataagccttttgagaattcaacatcccacatagactatcttccatagcctatgacacatattcttgttgtrggttagtttcctcactagatggtgacttctttgagaggaaggatttgctgttaatcaacacagtttcacaagtgcctagcacagcacatgttataacactggtaaataacacataagaggtgagtagcagaatgtgaaaatacataggtagttgttggtcctcagttatgtgatggtagataaaggtggaagtgcaagtctaggtaggtgtggaagtggcctccctgttccacgtcactgattgtacatggaaatcttccattttgttgcct

SEQ ID NO: 384151 - DNA, 528 bp, Homo sapiens
ttcttaactacatattaaccatcacaccagttggaaagaggatctgcattacttagaaattctaaattaggaaattatgtaaaatatttctgaactagagttcctttaaatgtctagcaggagcaaatgccagtcctctttcaagaaatgaacccttaaaataagccttttgagaattcaacatcccacatagactatcttccatagcctatgacacatattcttgttgtgggttagtttcctcactagatggtgacttctttgagaggaaggatttgctgttaatcaacacagtttcacaagtgcctagcacagcacaygttataacactggtaaataacacataagaggtgagtagcagaatgtgaaaatacataggtagttgttggtcctcagttatgtgatggtagataaaggtggaagtgcaagtctaggtaggtgtggaagtggcctccctgttccacgtcactgattgtacatggaaatcttccattttgttgcctagggctataaagaaattaaactagg

SEQ ID NO: 384152 - DNA, 596 bp, Homo sapiens
agtattgaaactactttgaattgagtacatcccacaaataagagtttaagaatttggaaaacataaatcaactgaaaaagtacgcatagttaacaccaattacgttttgataatacttgtagtgatatgtctgtagtgatataaggtgatatcagtagtgttatggggtacatgtgataggagtatatgtatagcagatgcttgaatcaaacatgtaagtaagctaaggtttcccaacttgaatatagaccctatttagttgaacattcagatattgctcccaattaccagacagaccactggtgtgtcttataccaaacaaaggcatatatgaggaaatctgtgagcwgcaggcatctcaaacctaacaatgcatttttctagtcctccttagccaccttgccttgacaagcatgtctccatggaaccaagagaaattagagctaatgagccaataactttatttcccatcctcactccctatcatggcttgagctaagcaaactatgctgggtgtgaataaaattgtgatatgtgtgtagagtttcccattagcatgcacgtcagagaaccagaccagcacaggtctacaggtc

SEQ ID NO: 384153 - DNA, 596 bp, Homo sapiens
agtattgaaactactttgaattgagtacatcccacaaataagagtttaagaatttggaaaacataaatcaactgaaaaagtacgcatagttaacaccaattacgttttgataatacttgtagtgatatgtctgtagtgatataaggtgatatcagtagtgttatggggtacatgtgataggagtatatgtatagcagatgcttgaatcaaacatgtaagtaagctaaggtttcccaacttgaatatagaccctatttagttgaacattcagatattgctcccaattaccagacagaccactggtgtgtcttataccaaacaaaggcatatatgaggaaatctgtgagctgcaggcatctcaaacctaacratgcatttttctagtcctccttagccaccttgccttgacaagcatgtctccatggaaccaagagaaattagagctaatgagccaataactttatttcccatcctcactccctatcatggcttgagctaagcaaactatgctgggtgtgaataaaattgtgatatgtgtgtagagtttcccattagcatgcacgtcagagaaccagaccagcacaggtctacaggtc

SEQ ID NO: 384154 - DNA, 470 bp, Homo sapiens
aatttgagtggggttggattgtgcagagctttatcctcaaagcattgggaagtcattaagtattaaggaaataaggatcaaattttcctttgtaaaatgtcctgcttggttgcactggggaaaacaaagtaggtgtggggaaagcagttataaacctcttgcctcagcccacatgagttgaagagacatgcatcaaccaaagagagtttcagagggaaaaaaattcaacaagactggttattgattaagtgtgggttgtgacaaaccgcaagagattagggacaactcccaggcttctcattttctctgacaaaagaagggagaaaccctctttaattttgcaactcacataggatcccaaagcagtactatccgtccatcaaatctaaatttttcccaaaggaggccactrtttttttttcctatgtgccaggttagtgttaaagttgtcatcacgcaataatgcattc

SEQ ID NO: 384155 - DNA, 545 bp, Homo sapiens
aggaaacacaagaggagagcaatggtcattttgggaatggaagatgagtctaattttggacaagttgactttgagtcatatataaggaaasgcagagagctgcacagctccagggaggatcattcacatagaccatgactgctagttctactatgtcatgtatttgcaagtgaatatatttagtatgcagatgtatatgcatgtgggcagctcagcatcaagaaccaggctacagatttaaattcagaatatcagattatagtctctggaagatgaaagacagtaaataagtatttattggctatgtgtcaaattgatgatgatgaaagctttggatatgggtgagataattcaaaaaacatatatagagaagaggtgtgtattacataaacctttaaggattaggcaatagaagaaaaagccataaagaggattgtgaagaatgtaccagagtagtaggaagaaaaccaaaagagttttgtctcagaaatcaaagaacaaataagtttaaagagaatccagttatcagtgtcaaatactgccga

SEQ ID NO: 384156 - DNA, 559 bp, Homo sapiens
catcaaaacctgcgcaactctgtccatgcctcttggaatgctcatcctaggagaagtcaactgccatgtaagaaatcctgagaataccattctttagagaagttcaagctagtcacggggagatactatatacagagagagggatgacctgctagtcccagttgtgtcagccatcccaactgaggcaacagacttttaaattaaaaagccatcttggacattccagcccaaggagacacaatgtagagaaaaatgaagatgaaytggacaaaactaaggttcttgacatatgagtaccattgagctggcccagataaattgagatacttgagtcatcttggctgaggttccagtcatcacagagcagggatgagatcatcctgctctacctttctgaattgtgagcataataaaaatgagtgttttacaccactaaatgttgaggtggtttgttatgcagcaatagataaacagaacattttagttaaagcctttgatacgacttcatgattgagtgcccttcaaaatcagaattgttagtcatggaaataacacagca

SEQ ID NO: 384157 - DNA, 615 bp, Homo sapiens
agaaagttcctgcagctcttccaggctggtgctgcatgctggtggctctacaggactggagtctcagagccatcctatttccccaggtccactaggctttgcccttgtggcagctctctgcagtagcctggaccccataattccactgagcattgcctgaggctggggggatggatcttttggtggcagctatatcactgtagcgcatctctgccatagtcctgaggctgctggagacatcctttgaaatccatgtcagggaagccatgccttcacagcttatcccctctgtatgcctgcacaatcagcaccatgtggttgctaccaaggctcaccrcttgcaccctttggggcacagtggcctgggatgcacctggactgcacttgggcacatttgaaccacaattggggtggtgctggaacgtggggagtaaagacccaaggcagcccttggcagtgatccctagagtcccacagatgccctgggctcatccatttaaaccattctgcctcaaggccctagcattgtggggctttgatagaagaggcaacctccttgaagatctccaaaatgcctttggggtcattctcctactgttttgatgaatagcagat

SEQ ID NO: 384158 - DNA, 615 bp, Homo sapiens
agaaagttcctgcagctcttccaggctggtgctgcatgctggtggctctacaggactggagtctcagagccatcctatttccccaggtccactaggctttgcccttgtggcagctctctgcagtagcctggaccccataattccactgagcattgcctgaggctggggggatggatcttttggtggcagctatatcactgtagcgcatctctgccatagtcctgaggctgctggagacatcctttgaaatccatgtcagggaagccatgccttcacagcttatcccctctgtatgcctgcacaatcagcaccatgtggttgctaccaaggctcaccgcttgcaccctttggggcacagtggcctgggatgcacctggactgcacttgggcacatttgaaccacaattggggtggtgctggaacgtggggagtaaagacccaaggcagcccttggcagtgatccctagagtcccacagatgccctgggctcatccatttaaaccattctgcctcaaggccctagcattgtggggctwtgatagaagaggcaacctccttgaagatctccaaaatgcctttggggtcattctcctactgttttgatgaatagcagat

SEQ ID NO: 384159 - DNA, 537 bp, Homo sapiens
atgggtattgttttaagccattagctatgaatgagtattgttttaagccattaggtttttggtaacctgttacatagcatagaaaaacataacatagggattacaaaaattctaaataggaaaaaggaaattgggtgttttaaaaaagggattatgatgtcagactatgaaarggaggctaaacttggacagaagtgataacggaaaggaggtaatagacaggacaaatattacagggttatggattagaaaattcaatgatactaggtagcttctgaagtgagcattcggagaagatgaattggaaagaagagcttggtcaaattaagggtaagacaaatgtggggttatacaggtacagttattggtgtaatatcagagtagaacatatgagaggctaaagtaatgtggaagtattaggtttgtacaaaggtaactgcagtttttgccattaaaattaatggcaaaaccagcaatcacttttgcacaacctaacagaagtttttggaatcaaggaccaagatgtgagaggccagc

SEQ ID NO: 384160 - DNA, 608 bp, Homo sapiens
ggctaaacttggacagaagtgataacggaaaggaggtaatagacaggacaaatattacagggttatggattagaaaattcaaygatactaggtagcttctgaagtgagcattcggagaagatgaattggaaagaagagcttggtcaaattaagggtaagacaaatgtggggttatacaggtacagttattggtgtaatatcagagtagaacatatgagaggctaaagtaatgtggaagtattaggtttgtacaaaggtaactgcagtttttgccattaaaattaatggcaaaaccagcaatcacttttgcacaacctaacagaagtttttggaatcaaggaccaagatgtgagaggccagcatgttggttaaatctgttctatttatattgagaatttttaaaaatgaggaccagagtggtattgaaaaaggatatacacagtcatccataaatgagaagaaaggactgaaatgataactagcaacaccaaaaagcagaagtaaatgatgacatctcattacacacaccttaaagaaattgaggtctttgaagaaagaaaactgtttgaaagaagcaatcggggctaggagggtaaaaaaacccatta

SEQ ID NO: 384161 - DNA, 564 bp, Homo sapiens
cattgcacttgtggtagccaggagtatgctgggtgggaggaactgcttacgccactgtcttcatattttagatggagttatcaccacaagaatgatatttctgcctcttatttcttctctatattttcagccttttcctctggaatagaaatactcacaggtccacatttctttacatagtaagataatccattaaatgactaaagaacggtggaattgttcttcttattccccccaaactttacatggaaattttttactctttcttatttatttatttatttattttttgagacagagtctctcactctgttgcccaygctggagtgcagtgttatgatctcagctcacctctacctccccggttcaagtgattctcttgcctcagcctcccgagtagcttggactacaggtgcacaccactatgcccagctaatttttgtatttttagtagagaaggggttttgccatgttggccaggctggtctcgaattcctgacctcagatgatctacccgcctgagcctcccacatttctggaattacaggcataagtcaccatgcc

SEQ ID NO: 384162 - DNA, 564 bp, Homo sapiens
cattgcacttgtggtagccaggagtatgctgggtgggaggaactgcttacgccactgtcttcatattttagatggagttatcaccacaagaatgatatttctgcctcttatttcttctctatattttcagccttttcctctggaatagaaatactcacaggtccacatttctttacatagtaagataatccattaaatgactaaagaacggtggaattgttcttcttattccccccaaactttacatggaaattttttactctttcttatttatttatttatttattttttgagacagagtctctcactctgttgcccatgctggagtgcagtgttatgatctcagctcacctctacctcccmggttcaagtgattctcttgcctcagcctcccgagtagcttggactacaggtgcacaccactatgcccagctaatttttgtatttttagtagagaaggggttttgccatgttggccaggctggtctcgaattcctgacctcagatgatctacccgcctgagcctcccacatttctggaattacaggcataagtcaccatgcc

SEQ ID NO: 384163 - DNA, 567 bp, Homo sapiens
attttatattcttctaaatgaatcttcataaaggaaggataaattaaaacattatcaaaaaagcaaacactaaggaaatttgttaccactataccagccttaaaaagggtctttaagggaatgctaaacatagaaatgaaagattgatacctgctaccacaaaaaacacagaagcacatagcacacagacaatataagacaattatatgatcaagtttacaaaacaaccagcttacaacacaatgactggatcaaaatcttgcatatcaatmctaatgttgaatgtaagtggtctaaacaccagcttaaaaggcacagagtggcaaggtgaataaaaaacatgacccaactgtctgctgtcttcaagaaacccatgtcacatgtaacatcactcacaggcttaaagtaaatggatggagaaacaaaaaagagggaaaaacataaaagagcaggagtcatcattctcataccagataaaacaggctataaaccaacaacgatcaggaagaccaaagaagggcgttaaacaataataaagggttcaattcaacaagatgacttaactat

SEQ ID NO: 384164 - DNA, 567 bp, Homo sapiens
attttatattcttctaaatgaatcttcataaaggaaggataaattaaaacattatcaaaaaagcaaacactaaggaaatttgttaccactataccagccttaaaaagggtctttaagggaatgctaaacatagaaatgaaagattgatacctgctaccacaaaaaacacagaagcacatagcacacagacaatataagacaattatatgatcaagtttacaaaacaaccagcttacaacacaatgactggatcaaaatcttgcatatcaatcctaatgttgaatgtaagtggtctaaacaccagcttaaaaggcacagagtggcaagstgaataaaaaacatgacccaactgtctgctgtcttcaagaaacccatgtcacatgtaacatcactcacaggcttaaagtaaatggatggagaaacaaaaaagagggaaaaacataaaagagcaggagtcatcattctcataccagataaaacaggctataaaccaacaacgatcaggaagaccaaagaagggcgttaaacaataataaagggttcaattcaacaagatgacttaactat

SEQ ID NO: 384165 - DNA, 556 bp, Homo sapiens
gaataaaagttaagctcagtatcaatctcaattgataatatactggtactatgtgctaacctatctgacctaccttaaccaaatggtagttgttaaattttaatgttaattaaaattacttgccatgtttgttagattgcagaatttcagaattattgatttgggtccaaaataaccaaaacttttctcattgcagagctatcaaaagatgaaagaaattgcctctggagactttgtattctcaattattttagctttcaaaaatgcaaactcttgtgagaatagatccaaataaacaatctgcaaatagcaaaggatatatatatatatatatccatattttttaaagcactttagaagtaaccacttatatataattgatgtactatttatagataattaatgcagcttaatataacctcagagtcctcaaaatattagggctcgggaccccttcacatgtttaaatcctattcaggacctcaaagagctttttaaaatgtggattatagctatcaatattaaccatatamaaattaaagcaaacaatgtaaat

SEQ ID NO: 384166 - DNA, 570 bp, Homo sapiens
atcttctccctgtgtcctcacattatcttccctctgtatacatttgtgtccgggtctcctcttcttataaggacaccagccatatcatatgaaggtccaccctcatgacctaattttggcttaaatgcctctttaaagaccctatcttcaaatcaggtcacattctgaggaactgaggatttagaacttcaagttgaatttttgagggagtacaatttagcccacaacagagagacagcctgtttgatggatatgatttttgaggaactgtatrtcatcactcagcatttgtttcaaaatgttcttacaggtttgtcattttcttacaaatcactagaatatcataaaagctatatatatatgattcctacttttataagcctaggtaatattactggattattatcttcaaaattgtttaaaaatatgcaccctattccagcatgggtttattctctgattcatcactgtagccaacatgcctacactccttgaaagacaacatcatgcgtcacttacgttgttcctgcagggccttcatatagaacagaagctcaagcttctgctgaa

SEQ ID NO: 384167 - DNA, 570 bp, Homo sapiens
gttttgagcatccatattgtgtttgataagattatatctatttagctctattgaatagcggcaactttgatgttatgaatgtgttcaatgtaattcaaattatcatgcaggcaaatacatttgaaagaatagcattaattctgtatggcactaaattattgttacrcttgtttgcaatatgtacctttgctgaattcacaggactgtaagtaacaaaactatttcatcaacaaagtgtgaagcaacaaatttaaagatatgaatgtggaaaattttatattacaccaccaaattactttgagaagagaaataaaaagaaatataatttgcgacagtccaagcatacttgaatgctgtttatattgttccgtgtgtaataagttcttttcagctctaactgagaaaaacctattgttttcatggctcagttttctgacaaatctgtaatgactttgaaggtttatctaaacattcctaaataattttcaagtcatttatattcttgtgctactaaagatagtcccattagtatagtgactttatcacaatggtggcaacccagtggcagct

SEQ ID NO: 384168 - DNA, 570 bp, Homo sapiens
gttttgagcatccatattgtgtttgataagattatatctatttagctctattgaatagcggcaactttgatgttatgaatgtgttcaatgtaattcaaattatcatgcaggcaaatacatttgaaagaatagcattaattctgtatggcactaaattattgttacgcttgtttgcaatatgtacctttgctgaattcacaggactgtaagtaacaaaactatttcatcaacaaagtgtgaagcaacaaatttaaagatatgaatgtggaaaattttatattacaccaccaaattactttgagaagagaaataaaaagaaatataatttgcgacagtccaagcatacytgaatgctgtttatattgttccgtgtgtaataagttcttttcagctctaactgagaaaaacctattgttttcatggctcagttttctgacaaatctgtaatgactttgaaggtttatctaaacattcctaaataattttcaagtcatttatattcttgtgctactaaagatagtcccattagtatagtgactttatcacaatggtggcaacccagtggcagct

SEQ ID NO: 384169 - DNA, 547 bp, Homo sapiens
tttgggcctcactttcctgcgaatcttgtctccagtctgaactagggggtccttttgtttctgtttacttttgcccactamacatatctttaacacacctattattttgctatagtttagttgccttttaacatcttagtttagttttgtttttttacaaacagggtctcactgtgttgcacaggctggggtgcagtggctattcacagcctggatcatggtgcactgctgtctcaaactcctggcttcaagcaatcttccccccctcagccttctaagtagctgcgactatagatgtgtgccactgcacctggctttttctcaataggttttaacttgaaagcaggaactgtgcagcaatggacacagtagttactcaataaaatgttgtgcagtgagtagatgaactgcctctgtatcgaacctctcaaacttcatattttcaagttgtgttctgcattaaattctttcatgttgctcatgcttcctttgctgacatttaaaatgtctccttttcccaatttcatgtattaatttcccttcttcc

SEQ ID NO: 384170 - DNA, 518 bp, Homo sapiens
catgataattatttatacacttgatatttagtaatgcaaaataataagaaatcgaatgccagtgctttagattgatgtcaacwgtattgtgtacccttaaaaaagtcagacttactagaagcatattttaaatgtgttgtttttaagtaaatatatgcacatttctttattcactaagcttgcctagtcttattaattcaaaactatgtaaattattgttaaataatttaatatcttcatatttgatttattttctttatattgcatccaccctgtctttgatgggatatagcttaccttgctaaaactgacaaaattcaatcattttaattaacttctcttatttttattttccctcaatcacagaaatccttgaaaatggctttaggaatatattgaaattgttctttaaaaactcagttaggtctatctgttgtatacatgtatacaggttgccaaaaggaatttactacaatgtaactgaaagttggtataatttgtccgttcttcttttaact

SEQ ID NO: 384171 - DNA, 478 bp, Homo sapiens
aattattcatatataaggcctccttgtataccacttaaaaggtaaggttacattaaatatcagtaagatctcattatagctgacaaagtttccatatttatttctataatcatcctataatacatgaaattctaatggttaataccagccatattgttactttatttattattgttggatatattatttctagaggaaaagaaattttacagactgagttaataatagcggtggacaactgttttgtaattggtaggacctctataataatatagaaacaaggctgataaggtggctgatgtgttgggctaccatatcagtaacttatattctgatcttgactttacattttttgtcttatcttaatgmacgttcataagttatgagcatttcgctttttccttctcataaagcatttttttttcatgggtgttataagtgttgtgagggctaccaaatgagtaaaaatcattgctat

SEQ ID NO: 384172 - DNA, 554 bp, Homo sapiens
tgtgttctcattattcagctcccacttataagtgaggatatgtagcacttggttttctgtccctgtattagtttgctgaggataatggcttccagctccatccctgtccctgcaaaggacatgacctcattcctttttatggctgcatagtattccatggtatatatgtagtatattttctttatccagtctataattgatgggcatttgggttgattccatgtctttgctattatgaatagtactgcaatgaacacacatgtgcatgtatttttataatataatgatgtctattcctttgggcatatgcctagtaatgggattgctgggtcaaatgctaagcattttaagtaatatttttttaattagtaaagtaatgtattcaatgcaaaaagagaaaaagacaaatacagtcacgcactacmtaataacattttggttagcaatgaactccatatactatagtggtcccataaaattataatggacctaaaaaattcctacagccaaatgatgtagtgcaatgccttattcatgtgtttgtggtaatgctg

SEQ ID NO: 384173 - DNA, 591 bp, Homo sapiens
ttgtggtaatgctggtagaaacaagtctactgaactgccagtcacataaaaaaattaaaaatttaaagatagaaaagtgtttataggaaaagaatataaagaaagagaatattttatgctgctctaraatgtgtttccatataaagctaacagttattacaaaatagtcaaaaagttaaaaaaaaacctttgaaagtgtataaagtaaaaagtttcagtaagctaaggttaatttattattgaagaaagaaaaatgttttttataaatttagtgtaacctaagtgtacaacatttataaagtctacagtggtgtgcagtaatgtcctaggccttcacattcactcatcactcactcagttaatcacacagagcatcttccaatgcctgctgcattaatggtaaacgccttatatgggagtaccatgtttaatcttttatatcctatttttatgtacttcttctacatttagatacccaagtacttacgactgtgttatagttgcctatcattttactgtaattgcttatagtataattgcctacctgtgcaggtttgtggccaaggagcaataggctatccatgtagccta

SEQ ID NO: 384174 - DNA, 593 bp, Homo sapiens
atgggatgctgaaagtggatggaagtgggaggtgacctctccacatcctctgggggtcagaatgttttggagaaaacaaaacaaattttccagtttttccaataaagtgttagacctcagttgagaaaaagaaccagttaagaaggtcaaggatacgatgagagtgaactatagaaacagcaaggattttgaagcctgggaacccctatagataccagattgaaaacatgtcctctacatcttcagaggagcagaatctatggactctcataagagaggatggtctcatatctacccaccctgcacctcaacttatttcataatggtgcataaactcctttgaacttattcgaattgacttagagtaggtttttctgtaatgcaatagaatatggcttaagatcttttaaaaacccrttacaaaaaagaaaactttgctcttttaagtattcaaactcaaaaaatatgtatagttttttctagtatattttagtttgctacttacattttcaattaacctcacaatatctccatattttagttattattggcttccacttttcattcattcaccataaaaatgtgttaggtga

SEQ ID NO: 384175 - DNA, 585 bp, Homo sapiens
aggctatttaaatttaaaataattgacacaaaattataaacttaaatgtgcttgaaattttaaatctttagcttgaattgaaagtgactagacttaaggaggctgaatataggttcagtgctgaaagaataagcacaatcaaataagaaacatgatattctagaaatatatggtggaacwttctatctagaagagaagtaggcagtaagatgtttcattgttttaagcactgggattttagcaaatttctttaacaattatttgtcaagctgctgctttgtgccaagcactttctgataaataggactatacaagtgaacaaaatgccccttggaacatacattttagtaaagaataggaaacaacattaagaaacaaaataaataagccaattatacattaggttgactcatagtttcctatggctgttgtaacaatttaccacaaatttggtgacttaaaggaataaggatttcttctcttatagttcagaaggccagacatcagacacaagactctagggaacaatctgcctccgtgtcttttctagtttatagaggtcagctgcattccttgactggtaac

SEQ ID NO: 384176 - DNA, 585 bp, Homo sapiens
aggctatttaaatttaaaataattgacacaaaattataaacttaaatgtgcttgaaattttaaatctttagcttgaattgaaagtgactagacttaaggaggctgaatataggttcagtgctgaaagaataagcacaatcaaataagaaacatgatattctagaaatatatggtggaacattctatctagaagagaagtaggcagtaagatgtttcattgttttaagcactgggattttagcaaatttctttaacaattatttgtcaagctgctgctttgtgccaagcactttctgataaataggactatacaagtgaacaaaatgccccttggaacatacattttagtaaagaataggaaacaacattaagaaacaaaataaataagccaattatacattaggttgactcatagtttcctatggctgttgtaacaatttaccacaaatttggtgacttaaaggaataaggatttcttctcttatagttcrgaaggccagacatcagacacaagactctagggaacaatctgcctccgtgtcttttctagtttatagaggtcagctgcattccttgactggtaac

SEQ ID NO: 384177 - DNA, 532 bp, Homo sapiens
cattttcctgtgggattcacaggtgacctgacaggcattgtccttgagcagcattttacatttttttctacagggcatctcagaagaccttgggcttggtcctgtttccttaatggtgctactttttaggcttaggattccccaagatattctaagttctgaatccaccataycttgtagttcaggcttgttttcagtggcttatgtcttcagcttagaatggagaagatatacttccccggcactgtcctgaagctgtaagaagtgcttcggtagttctttattctgtagtccctacatggtattacttgcaatgttctggatcaatatgaggatttcaattccactgcttacccttccagaccacagacaagcctacagtccttgtgtaggcatcaaaggtctaagctgtataaacaaatgtcaacatctgagccacccttcctatgggttcctgcactgccttttctacccacagcttccctctttatttcaagcaattggtgcttcttttactttataaatacagcta

SEQ ID NO: 384178 - DNA, 511 bp, Homo sapiens
agcactcatgaagggattaatgctctgattttaaaaaaggaagaggagatatttctctgtacgcaccaaggaaaggctacrtaacagcacaaccaggaggaaagccttcaccaagaactccacaatgcaggcacccccatctcagactttcagccttcagaagtgtgagaaataatttgttgtttaagccaccccatctataataatttgccacagtagaccaaatagactaagataattgtaaagggcaaaagaacatagacttatgttatagttttaaacacaagtcatatcaggtcttcacatgttgtgtctcagtgaggctcttgtttttcctaaaggagccgggtccttagaaggacttcccttttttttttttttttttttttgagatggagtcttgttctgttgcccatgctggagtggcatgatctcggcttactgcaacctccacctcccgagttcaaacgattctgccacctcgagtagcttgtactacaggcatgcacta

SEQ ID NO: 384179 - DNA, 511 bp, Homo sapiens
agcactcatgaagggattaatgctctgattttaaaaaaggaagaggagatatttctctgtacgcaccaaggaaaggctacataacagcacaaccaggaggaaagccttcaccaagaactccacaatgcaggcacccccatctcagactttcagccttcagaagtgtgagaaataatttgttgtttaagccaccccatctataataatttgccacagtagaccaaatagactaagataattgtaaagggcaaaagaacatagacttatgttatagttttaaacacaagtcatatcaggtcttcacatgttgtgtctcagtgaggctcttgtttttcctaaaggagccgggtccttagaaggacttcccttttttttttttttttttttttgaratggagtcttgttctgttgcccatgctggagtggcatgatctcggcttactgcaacctccacctcccgagttcaaacgattctgccacctcgagtagcttgtactacaggcatgcacta

SEQ ID NO: 384180 - DNA, 599 bp, Homo sapiens
cattaaaaaactgagtggttgagagagcaaataaatagaatctgggtggcagttaatggagagaaataaaggaattctcattatctagtccagtatgtcaaataaataaagtatgmttaatttttatgataagataatcatatatattatcagaatagctttattaatatcaacaagtaaaatattagaatcctcacagaatcaaaactcccagccctgttgttgtagaaccaataaatatgacaattttttcccctgtgatgctgcctaagattgatacataccggtcccactcttgattctcatagccatattggatgcatggtataatctgaaaaaggtcttattacctaaagtgtacagtattttgcagattgttattttttttatttctacactgcatgtctaaattttccaactacttctacattagggaagaacattataaatgttatttttaagaaataaccttttgactttgagtcatttgtagtgatgttatgatgagatcctttcaatttaatggatccctggagtcgtaccaaatatgttatttagtttcagtgtacaattaataaaatgctatttgaaatttgggg

SEQ ID NO: 384181 - DNA, 565 bp, Homo sapiens
ttatttctctcttcctagttttctcttgctacaaagttttatgctttaaagattgcccagctaatgcagcacttgctgggaagttgaggtattatctgtgcagtttaaatagttatgagtaaaaagaaactacaagctgaagggtgttccatttatgaaagctttaatggatatagtttagcccaaactgaaacctgtttggggagcacaactgcatttgtttagtgatatatgaaaatattactctgtacttggcatagcatcagcgagtaattggaaagcagaaaatgccgaactgtagttggtgagacttttactgctggaagaaaaactgctatgattatagcagaagtctacgttagctaaataaccatgcttctggggcttaaatgcagggaatattattgcgcatatgtcatgacaatgcagtctctgtcttattaagtgtgggtttggtcccaygtgggcagtggtgaacaaatattgtatagcattggcacttggcagtggcacctgcaaaacagacgtcattggcagatgttgcacttattctaattcagaacca

SEQ ID NO: 384182 - DNA, 575 bp, Homo sapiens
aaggtatgtaaaatctccctttatgcacaacattgtccttaaaaggaagctgcattcttccattttttccctttgaagatatctggaatatgtatgtggtgktgataaaccaagggaaacttctaggggatgaagtagcaacaaaatgtaagaaacataggcctcaggcaattttattgataataaataacagatgccctactattttgttgatcactgtggacgtgtgtgtgtgtgtgtgtgtgtatgtgtgtgtgtgtgtgtgtgtgacagagactgagagatagaaacctaactcatttaagccattcttacttttatctctattaaagaatcaagccaataacctgagcataatgctcttttttttccttttcttactgtgagagtttctctaatttatcttacaaactttgtattaattttctcctttccctccatttctttccttatagtttaaattttcaaaaacttccccccactttaaaacaataatatcctgtttttttcctcttggattcaatatcttctcttatctctctgagtatattgtttttcttgttaagttttaatct

SEQ ID NO: 384183 - DNA, 618 bp, Homo sapiens
cttgaaaatcattgccaatttgtttgttctgtgtttcttattttaaggaggatgtaaatgtggtctatattatttcattttgccttgaagtggaagtctcaattttgccttgatttgaagagagcaagcaccaacctaatatatttgcacagaaaaatcctttactctagctttgtaaaacttcagcttttatcttaagtgaaatcaagaagtgttatagaattttgagcaaagaaataacatgacaacatgttgattttaagaggaaaaaattaaggaataagtccatttatctctgcagcctctgcacagaatgtgctcagtaatgttttttgataatagtaataatgtaatacagttaattacttgccttagcacctggctacaagtcaccattatttgacactgatatgtcagattccatgctagattcttgattcttgctattcccactcattcttacaaaaattaggtaaatatattagtctcattttgcagaagagaagaaacgagtcttacaaagtttaagcatcttcccccgggttcacatatttggtagtcaaattcaatctcaagyccatctggctcctgtatctgtgctctgtgacattactccta

SEQ ID NO: 384184 - DNA, 547 bp, Homo sapiens
taccaaaacatcaatgacactcatcacaaamatagaaaaaaaaatcataaaatatgtatgaaaccacaaaagaccccaaatattgaaagcaatcctgagcaaaatgaacaaagctggggtcattacactaacagattttgaaatatgctacaaaagtataataaccaaaacaacacagtactggcatgaaaatggacacacagaccagtggaacaaaatagagctatcagaaataaatccatttatttacagtcagctcattttcaacaaaggcacaaagaacatctattgaggaaagaattgactcttcaataagtgatgttggaaaaactaaataaggatatgcaggagaatgaaactggacccctatctctcatcatattaaaaattcaactcaaaatcctaacaacttaaatgtaaaacctgaaactataaaactactagaagaaaatataagggagatgcttcagaacattggtctaggaaaagattttattaatgagacctcaaaagcactggcaacaaaagcaaaaatagacaaaatgga

SEQ ID NO: 384185 - DNA, 596 bp, Homo sapiens
cctattatttgaagcaacatgtatgagcctggaggacattaagtgaaataaccctggaaaagaaaaataaatattgcatattttcactcatatgtggaaactaaaaagattgaactcatagactataatagtagaatagtggttactagaagctggaaagggtaaggaagtggagaaatggggagggatttgttaaagtaggaaaaattacagctagataggagaaataagttatattgttctatagcattgtagtgtgattatagtcaacaacaatttattatatattttcwaatatctagagaagagacttttaaatgttctcaacacaaaagataaatttttgaggtgatgaatacgctaattatctttatttgatcactatgcattgtgtgtatggaaattcactattccataactatgcccaattattatgtgtcaactttaaaaaataaaattaaaataagagattaactttgaggctctaaaactgaagtgttgaatgtttagtccatttcctggcatggcatcacaacccaagaagaatctgaatcaaggaataatgttgatgtgtcacatgaaaatagaacaaagcc

SEQ ID NO: 384186 - DNA, 605 bp, Homo sapiens
tttaaaacttgctacaaaatatacaataatgaagaagatgtggtactaacatcaggataaaaaagacaaagcaatggaacatgattgaaattcaagcaattagatccatacatctatgttcaattgatattcaacaaggatgycaacatcattcatcaaaaaataatagtctattcaacaaatggtggtgggacaactagataaccacatgcaaaagaataagtttaggcccctatttcacactgtatacaaaaattaactcaaatagaccaaaggtttaaatatcagaggtaaaaatgtaaaactcttagaagataatataggggaaaatcttcattaccttggattttgcaattaatataaaatcaaaagcatttcaacaaaacagaaaaatagataatatggagttaatcaaaattaaaaacttttgtgcatcaaataacactatcatagacaacttatagagttggtggaaatatttgcaaatcatatatatgataagggtcaagtacttttaatatgtgtaatactcttgtgattgagcacaaaaagacaaatagcctaattttaaaaatgggcaacattctgaggtacacaatactcca

SEQ ID NO: 384187 - DNA, 555 bp, Homo sapiens
ttggtggaaatatttgcaaatcatatatatgataagggtcaagtacttttaatatgtgtaatactcttgtgattgagcacaaaaagacaaatagcctaattttaaaaatgggcaacattctgaggtacacaatactccaaagtagatacaaaaaacacacatgaaaagatgctcaacatcagtcatcatttggaaaatgaaaataaaaaaccataatgagatacaacatcacattcattaagatggtaatcatcaaaaaaaaaaaaaggaaaattacaagcattggtgaggatgtggagatttgaagcctattytggtggtgggaattttaaatagtgaaaccactggggataacagtttggtgagtccttaaactttgaacggaaaattaccatatgaatggtcaattctacttctagatatatagcccaaaaaactaagaacaagtattcaaatgcatgacgcaatgtatacagcagcactagtcaaaatagccaaaggtggaaacaacccaaatgtaccccaatatattaaagtataaataaaatatggtat

SEQ ID NO: 384188 - DNA, 555 bp, Homo sapiens
ttggtggaaatatttgcaaatcatatatatgataagggtcaagtacttttaatatgtgtaatactcttgtgattgagcacaaaaagacaaatagcctaattttaaaaatgggcaacattctgaggtacacaatactccaaagtagatacaaaaaacacacatgaaaagatgctcaacatcagtcatcatttggaaaatgaaaataaaaaaccataatgagatacaacatcacattcattaagatggtaatcatcaaaaaaaaaaaaaggaaaattacaagcattggtgaggatgtggagatttgaagcctattctggtggtgggaattttaaatagtgaaaccactgkggataacagtttggtgagtccttaaactttgaacggaaaattaccatatgaatggtcaattctacttctagatatatagcccaaaaaactaagaacaagtattcaaatgcatgacgcaatgtatacagcagcactagtcaaaatagccaaaggtggaaacaacccaaatgtaccccaatatattaaagtataaataaaatatggtat

SEQ ID NO: 384189 - DNA, 555 bp, Homo sapiens
ttggtggaaatatttgcaaatcatatatatgataagggtcaagtacttttaatatgtgtaatactcttgtgattgagcacaaaaagacaaatagcctaattttaaaaatgggcaacattctgaggtacacaatactccaaagtagatacaaaaaacacacatgaaaagatgctcaacatcagtcatcatttggaaaatgaaaataaaaaaccataatgagatacaacatcacattcattaagatggtaatcatcaaaaaaaaaaaaaggaaaattacaagcattggtgaggatgtggagatttgaagcctattctggtggtgggaattttaaatagtgaaaccactggggataacagtttggygagtccttaaactttgaacggaaaattaccatatgaatggtcaattctacttctagatatatagcccaaaaaactaagaacaagtattcaaatgcatgacgcaatgtatacagcagcactagtcaaaatagccaaaggtggaaacaacccaaatgtaccccaatatattaaagtataaataaaatatggtat

SEQ ID NO: 384190 - DNA, 555 bp, Homo sapiens
ttggtggaaatatttgcaaatcatatatatgataagggtcaagtacttttaatatgtgtaatactcttgtgattgagcacaaaaagacaaatagcctaattttaaaaatgggcaacattctgaggtacacaatactccaaagtagatacaaaaaacacacatgaaaagatgctcaacatcagtcatcatttggaaaatgaaaataaaaaaccataatgagatacaacatcacattcattaagatggtaatcatcaaaaaaaaaaaaaggaaaattacaagcattggtgaggatgtggagatttgaagcctattctggtggtgggaattttaaatagtgaaaccactggggataacagtttggtgagtccttaaactttgaacrgaaaattaccatatgaatggtcaattctacttctagatatatagcccaaaaaactaagaacaagtattcaaatgcatgacgcaatgtatacagcagcactagtcaaaatagccaaaggtggaaacaacccaaatgtaccccaatatattaaagtataaataaaatatggtat

SEQ ID NO: 384191 - DNA, 622 bp, Homo sapiens
gagttttaaaatttaacccatgacatagttgggatatttgtccctgacaaatgtcatattgaaatgtaatccccagtgttggaggtgggacctggagggaggtgattggatcatggaggtggatcmcttatgaatggtttagtgccatccccttgttgataagtaagttcccgctcacttaggtcacataagatctggttctttaaaagtctggggcctcctccttctcttctttctcttgctcctgctctctccatgtgacatccctcccccgactttgccttctgcttcagcaaaactcctccctagaagctgagcagatgctggcaccatgtctgtacagtctgcagaaccatgagccaattaaatagcttttcttataaattacccagtctcaggtattcctttataacaacacaagaacggcctaatacaaccggtttaacttgacttctgaataacaaagagacaataattggcacacacaaaccttctccaggctactcttcctctacttacaaattttctggttttattatcattttagttattttagctgttaagtggtatacttaagtatttttaacttaaatcataaacctactcacattatacacattga

SEQ ID NO: 384192 - DNA, 647 bp, Homo sapiens
ctcatggtgtgataacgtggcattttcttcttttggcagccaagcctttaactgaagagctgcacactccccraagtttctccatcatcctggatgtttcttgccaggatggtatttttgggtgggttccttcccagtctattttcccctgacacacttctatgatacatatagtttaaggacatctctttgcttgtatgttcactcaaatattgtaatttcaatcaacaataccttgagatggcccttcaggaagtgatatctaacttgtaattctctgtgttcctcttattctgatttagttatgcagagacagttttctctcttgcctcccttttttgctctggtgtaatggtttctgctattggcaaccttactgcatgttgaattttgttgagtgtttttatttttataaaatattttttcctatttttcattttctcgtcttggagaattggactcaggaaaagagggagcagagtaacctttgctgtctttaaatggaaggcaaaaaagaccttgatgtgccttgcaaaatactcaggacacagagtaattaaaagataaacttgatgttaaagcaatgactgaatacattagcatgtttataatcgtattccttttcaaagccaagcctgcagtcttat

SEQ ID NO: 384193 - DNA, 573 bp, Homo sapiens
tatattctattcagtatgaaatgtaccactatacaaaattcatcaaattttgtattaagttaaagtgttaatatataatcctaataacatattagcttacctgcaaaggaaaaaaagcacatgcttgatacaaagagggaactataccagacctttgtaatattcttattttaaatattttatatttttaggatattgtctgggactctaaaatctaaattataagtgtctttatgcatactatctartatgcataaaaacagaacattttctcaaagtagattcttgtttgcaagacagtacaatatttctcaaatactttgattcatgtcaaacttatttccaatggttactgctcttcctttgtcacctttatcacattgaggaatttccggatctattcaactttatgtaatttttaaattatttttagtatttatcactgttattgctcatctctgtatatgtttcagtacttagtccagttttatacattaaatatgttttaggcatatttatttaattctactgagttgaatttacaaacgtcagactaaatattaacatttacac

SEQ ID NO: 384194 - DNA, 564 bp, Homo sapiens
atttctctcatatagaaattctctcaaatagaaattatctcatatatttctctcattcttttggcaatgtaaaatatacatacaagacaaagagaaaaagttgaataattactttaattgacacttattaattcttaaagttttctcttcataaaaccatgcaaatcatttagaagagtgactggtactcaataaatagttttaaattagtctaaatgtttgtttaattttcttaaaagagttgaattgtcctttcaacaataattaaaatgtgcaacaacaaaaaatagaacaaaatgaagaaactaatcctttatattttaaaactggayctctttaaataaaaatattaataaaataacatttgctgtaattacaatgtgtgtgtttgagtatgtgcacatatgcacttggatttatgtggaggtttgtgaatttaatagcaaggatatacatttactgattgaaatacattttgaaaatatttataataatttgggttctgagtactaatattagagcatattatatcattactacattataaaaatggtaaaatttaaa

SEQ ID NO: 384195 - DNA, 527 bp, Homo sapiens
caacttaccaaaatattttggatacacctaaagtagtgttagagggaatgtttgtagtacaaataccttcatgaagaacttagaaagatttcaaataacatttcatctagaggaacatgggaaaaaaagaacaaaccaaaccgaaagctagcagaagaaaaaaagaaatagctaaaatcagagacaaattaaaagaaattgagatgcaaaaatttatacaacttatcagtgaaaccaagaatttgctcttcaaaagaataaacaaggctgatggacaacttgctagactaacaaagaaaaaaagaatatccaaataaatacaatcagaaatgacaaagatgactttacaatcaatcctatagaaatacaaaaggtcctcagagactattacaaacacttgtatgcatacaaactagaaaatctacagaaaatagataacacttgtaaaaackaatccgtaataaaaacctatcacctaaagaaaaaaaaaaaaaaaaaaaaaaaaaagccctggaccagttgcattg

SEQ ID NO: 384196 - DNA, 494 bp, Homo sapiens
cccactatgtgggtgacaggattatccatatcccaaaccccagcatcatgcaaaacatgtaacaaacctgtacatgtattccctgaatctaaagtaaaagttgaaattattaaaaaaagaaaattttgcctaacttatagtcaaaaagagttttctctgagccttctggaaattttataattgtagtcaagttttaggttttaactttagctctgtgaaccatatagttcaaggtatagaccaaagttcatttttytgcatactgctatcccatgattctatcatggattttgaaaagactgtcttttctccatttaatacttttgattcaggacaagcaacccccaaattggggcttagcctggaaagattgtttcacccaggaaagaattcaagggtgagccgtagtgttggacaggaatctttcatttaacagtactgaaacttgtggagcagagttaacacataaacagtgtgcccagagtcagcaacat

SEQ ID NO: 384197 - DNA, 607 bp, Homo sapiens
agaagtagaggacagcaatattatcatttttaaatctaatactagatgacagaataatacagattacatgctacttgcaatgtttagatactaagagttttattaagttcctttccccaaatatttgattcaataggcatgtattgaatacttattttcaagctctgccaggtrctgtaaatatgaaaatgaaacagtccctggtccatttaaaaatacttggccaccttgccatgaatccctccacagtagattttttttatatttggcttcattctcctaacaacattttaaaaaactcttcagttattttgttttttcttgccatcctaaacatgtatgtattcttcaagtttctgtgcttgaaattctttttctgcttgtagtattttaatcatgtgccttttcatttccagggcttcacctctgcatgactgactcccaaatatatgtctacaattgaacattgacctacaggtccctaaaacttcagaagtccaaagcagaacttattgtcacttctgtgacccaagccagacccttttcttgatgtgtgtgtgcatgttattgctctagcatataatttgaagccaaggttgattcctcc

SEQ ID NO: 384198 - DNA, 598 bp, Homo sapiens
atgagagataaatctgaaaaaataatacaaagtcagaaaatcagatcaggatatgaatgagaaatttaccaaggagatatctttaaaagctaaaataataaaacagaacttttgaaaacaaaaaaaattattgaaagaattacaatatactgctgaaagcttcaacaataacctagaccaagcagaagagaatatctaaaacatcgaatatatgtcttttgaatttattcagtcagacaaattattttgtttgagatggagtcttgttctgttgcccaggctggagtgcaatggcatgatcttggctcactgcaagctccgcctcccgggttcaygccattctcctgcctcagcctcccgagtagtagctgggactacaggcacccgcaaaaacgcctggctaattttttttgttttttgtatttttagtagagatgggtttttaccgtgttagccaggatggtcttgatctcctgaccttgtgatctgcccgcctcagcctcccaaagtgctgggattacaggcatgagccactgcgcctggcccaaaaatttttttaaaagaatgaacaaaaccttagagaagtatggaactgcat

SEQ ID NO: 384199 - DNA, 598 bp, Homo sapiens
atgagagataaatctgaaaaaataatacaaagtcagaaaatcagatcaggatatgaatgagaaatttaccaaggagatatctttaaaagctaaaataataaaacagaacttttgaaaacaaaaaaaattattgaaagaattacaatatactgctgaaagcttcaacaataacctagaccaagcagaagagaatatctaaaacatcgaatatatgtcttttgaatttattcagtcagacaaattattttgtttgagatggagtcttgttctgttgcccaggctggagtgcaatggcatgatcttggctcactgcaagctccgcctcccgggttcacgccattctsctgcctcagcctcccgagtagtagctgggactacaggcacccgcaaaaacgcctggctaattttttttgttttttgtatttttagtagagatgggtttttaccgtgttagccaggatggtcttgatctcctgaccttgtgatctgcccgcctcagcctcccaaagtgctgggattacaggcatgagccactgcgcctggcccaaaaatttttttaaaagaatgaacaaaaccttagagaagtatggaactgcat

SEQ ID NO: 384200 - DNA, 452 bp, Homo sapiens
gatgacctagaattttatatccacaccatgaaacataatgcagtcattaaaaagaatgaatgagaggtaaaccatttgttttggagtgacttccacaaagacaaggtgagtggaaaaataacataaataagtataatggtatgatactggtttttgtgtaacaaactactgcaaaacttcctgcacatgtaacttgcacataygtaaattatgataacatgagcttgtagaaaatatggaataacatgtagtagatattcacaaggattcctctgagtagagggttatgtggatggaaggaagatgaagtagtaatggaatccagagagaaagaaaaacagccagccgctgtggctcacgtctgtaatcctagcacttcgggaggctgaggtgggcagatcacaaggtcaggagttcgagatcagcctggccaacatggtgaaaccctgtct

SEQ ID NO: 384201 - DNA, 495 bp, Homo sapiens
tttttttttttttttttttttttgggctgaatatactattctaaagtaaaagtttttttggttctttttttcttcarcactttatgtcacaccaccttctcctaaccaatagggtttccactgaaaagtctgctgccagatgtattggaactccattggatgttctttcttttctcttgctgcttgtatgaagtttactttatccttgacctttggaagttttattattaaatgccttgaggtagtcttctttgggctaaatctgcttggtgttctgtactcttcttgtacttgcatattgataccttcctctaggtttgggaaattctctgttattatttcttttaataaactttctatccctgtccctttcgctacctcctcattaaagccaataactcttagatttactcttttgaggctatttcctagatcatgtaggcatgcttcattgtttcttaatcttttttcttatctcctctgagtactgtcaat

SEQ ID NO: 384202 - DNA, 495 bp, Homo sapiens
tttttttttttttttttttttttgggctgaatatactattctaaagtaaaagtttttttggttctttttttcttcaacactttatgtcacaccaccttctcctaaccaatagggtttccactgaaaagtctgctgccagatgtattggaactccattggatgttctttcttttctcttgctgcttgtatgawgtttactttatccttgacctttggaagttttattattaaatgccttgaggtagtcttctttgggctaaatctgcttggtgttctgtactcttcttgtacttgcatattgataccttcctctaggtttgggaaattctctgttattatttcttttaataaactttctatccctgtccctttcgctacctcctcattaaagccaataactcttagatttactcttttgaggctatttcctagatcatgtaggcatgcttcattgtttcttaatcttttttcttatctcctctgagtactgtcaat

SEQ ID NO: 384203 - DNA, 581 bp, Homo sapiens
gacttgctcctttccttccaccatgattgttaggcctccctagccatgtggaacgctaagtccaataagcctctttctcttataaattgcacagtctcaggtatgtctttatcagcagcatgaaaatggaccaatacagatattttttaaaagacccaggcttcttacaagagactcacttcaactgtaaggacacttatagaatgaaagtgaagaaatgcaaaaacatattccatgcaaatagaaaccaaaagacagcatgggtagctatacttagataaagtagaatttacatcaaaaactgtaaaaagagacacaaaaaggtcagtatatgatgataaagttgtcaattcctcaagaagatataacaattatgagttttacataaaattataaattgaatcagtaataattctccatacctaacatyagagcacctacgtatataaatcaatgttactaggcctcaagtaaaatatagactataatacaataatagcaaggaactttaaaatcttactttcagctatacacagattatcaagacagaaaatcaataaggaaatattgaacttgaacta

SEQ ID NO: 384204 - DNA, 558 bp, Homo sapiens
ccttaaagatcttaatagacatttctcaagacacacaaatgaccaacaggtatatgaaaaaacacatcactaatcatcagggaaacacaaatcaaaaccacaatgagatatcatctcacctcagttaaagtaactactatcaaaaaagtagaaaacatgttggaaaggatgcaaagagaaagtggaattcttgtacactgttacggaaatggaaattagtacagccactatggaaaatagtatgtagttccttaaaaaaacataaagtagagctaccatatgatccagaaatcccactgctgggtatatatccaaaaaaaaaaagaaaatcaatgtatcaaagagatagctgcacttccatgtttattgtagcactatttacaagagccaagatagggaatcaaactaagtgtccatcaatggatgaatgaataaagaaaatgtgrtacatatacacaatagaatatcatgtagccaaaaaagaatgaaatcctatcatttgcagcaacatggatggaactggaggagattgtgttaagtgaaataagtcaagaacac

SEQ ID NO: 384205 - DNA, 435 bp, Homo sapiens
atagatatttggaaaaggcatatgtaggttcttgaagaaagaaggaaaaatcttctggtatatttaatatgtgaatcaatcctcagggacagggagtaataaagtcataaagagactattttcagayttaatcacagtttgtatatttttccacctaaatagcattgtagagctaggataatatattttaaaatactatgctgcctgaagtaaccactgaagttatctttttattatttttttaagtagaagagccaatcccctacagatattacaattaaatacagcatttaataaatatttaagtgaattaatagataaatcgcaattatataaataaaatataaatttattattcttcaccgactgtggtgaacgttacctctctgcagtaagctctcagattttaaattggttttaatacaaagggaaaac

SEQ ID NO: 384206 - DNA, 558 bp, Homo sapiens
agcacttttccattaacaggcaacttagtggaggggtatttgttgcctggttggccatgcagtttggcaataagcccactacatatttccgaggacttctctgaaattccatyactcagccggcaggaaggtctttgtcttcctttttcagaaagccatgaatctgtcactttcatatccttgtaatcagaactgccaagaactgtgagtaactgcaagagtcattgcaagctaacaagttcgcctgccacaggttcatggatgttggtaggaaaacaaacctcttgtgttaaagacaaaggatagtttgttaacctcctctcgaacttcttattttccttaatcctgcccctctttacactttttcctcgggaatatcttggatatttttgacttttgctcctagatttaaattttagagacagctcatcaatttacttgaaaacaatatgcaataaacaattcctttaaaaccatagataaatatagggaaaattggcatttttaaccatatttagtttttctagtaaatagcttgatttgtgtctccatttattt

SEQ ID NO: 384207 - DNA, 393 bp, Homo sapiens
tcactcttacaaccccatttaacttcaattacttctttaaaggcccatatctccatatacagwcatcttgggaattctagcttcaacatacgaatttggggtgacataattcaatctataatactataataccattgcactttttaatccttgaaaattttgaatatattgatagaagtttaaaaagctcatacatcctatgtttttcatctatataacttcttgtaatttttttgactgaatatctttgaactttgaaacagactgtcttcttggcatgccaggagattttttattagaggctgagcactgtaatatagaaaatctatattttgatgtctacctttagtagagtgctgtgctttgttctaacagattgtaaacttattatca

SEQ ID NO: 384208 - DNA, 563 bp, Homo sapiens
tcttcccaattcgcttcacacacacactcactctcgcctgctgccatgtaagacatgcttgcttccccttccaccataattgtgagtttcctgaggcctcatcagccataaggaactgtgagtcaattaaacttcttttccctataaattacccagtttatggcaattctttgtagcagtgagagaactaatacttacataatagttgtacatatttataggtaatgtgatatcttgatgcaggcatacaatatgatcaaatctgggtaaccgggatattcatcagttcaaaacaggataaattatgcaacacaaytgttttcacacattgaacaaaagtcagtgaagttctgcgatttctgtgagaagaaaatcaaggtgggcttaaaaaatattcgttttctatctggaggaatttttttaggatagaatgaaaatgtcctacaggatctttttgaattgaagacacagatatcagtgttccaggaggctaggcaactggaaactgaacaatcaagagtaggaatctacacagaaaaagagacccaggaatgtgcattggc

SEQ ID NO: 384209 - DNA, 536 bp, Homo sapiens
atgagacaatcccatctcacgctgggaaaattccctttatgggaagcttatatgattataaaagggccaggatgagtctttccattacgcatgcttcargtggtctcctgagtgttcatgcgcaattgtacattctagaacatacatcacatgtcttattagcatcttaattctccaaccagaggtgtgtttcttactagtatgatgaacttaggtcaacccaaggacactaatcatgggtttctgtgcttgtgtgaatttggggattttcccttcggctcttcatcttccttgctgcaggatgttccaaccaggggtcccagataggggatttgcactgttgggaagtttgttctatctatttggcaagtttcttccctcttaagggaggctgtgaccaacctatctaacctacctcagaaaaactatggtagatttcagctgattgctggttgaaactcattgctgatgtccacaatatccttcctaactaaacacatcctagcaagtcttccaaaatttgatcctgcaggact

SEQ ID NO: 384210 - DNA, 554 bp, Homo sapiens
aaggacaaattgtgggcaccaaagaatcccttggtattatatccacaaccatatcaatgaataaaatatatgcaatttaaaaaaattgtcctctctggtttctatattcaattctatttctcacatgaggatcttccagttaactgaaatccctgttatgatctccctgctgactatataccctgctaactctgtccacctcttccttgttgtcatgatctttgctatgttgcaaaactctttctcggaaacaaaacaaactaacaaactgatagatctggcattaaatcttcaacacaacaaaactaaacaagagtaaccagtctctgaccataaggcaaaatcattattcactctgagtccagtgttcaacactgagtacagtattactgtacctggatgatgactaaaactttagaataaaatgctataagatctatttctgtctgtatgtttatgtatgtytgtgtatgttatgtgtatctataaatattttttgtcttatgatattagaaatattaaattataaaagtactcttatttgtttaaagaag

SEQ ID NO: 384211 - DNA, 603 bp, Homo sapiens
aaattattgactttatcttatttgtgtttcataaaaagctttctggctacatgaaaagaaaacagttagaggttgggggcattgcggatttagaaattgagcatggagaacttggggccctggactaacagttgatagtagagttggaggtacatgcattgagtggagatgtgttgaagatgtggtcctggtatttcttgatgacgaattgaatgtagatgtggaagatgatggaagaaccaaggaagatggcttagtttctgccttgagcaactaagtggatgatgagttagggaataccggatgaggagtcataacaagaagacaataaattagttcaggaccttkttaaatgtgaggtcactctgagataccagtggaaatatccagcaggcagatggatatgtgaactggagcacaacagagtagtctagattaaaatttgcatttggagtgtagtatccatgaaagtagccacgagcttggatatgttgtccaaaagaatgtggactctcttctcatcattcaagctgaaaacctcaactttattccttgactcctctttctctttttttcttgcttcctatatgtaaataaatggtg

SEQ ID NO: 384212 - DNA, 603 bp, Homo sapiens
aaattattgactttatcttatttgtgtttcataaaaagctttctggctacatgaaaagaaaacagttagaggttgggggcattgcggatttagaaattgagcatggagaacttggggccctggactaacagttgatagtagagttggaggtacatgcattgagtggagatgtgttgaagatgtggtcctggtatttcttgatgacgaattgaatgtagatgtggaagatgatggaagaaccaaggaagatggcttagtttctgccttgagcaactaagtggatgatgagttagggaataccggatgaggagtcataacaagaagacaataaattagttcaggaccttgttaaatgtgaggtcactctgagataccagtggaaatatccagcaggcagatggatatgtgaactggagcacaacagagtagtctagattaaaatttgcatttggagtgtagtatccatgaaagtagccacgagcttggatatgttgyccaaaagaatgtggactctcttctcatcattcaagctgaaaacctcaactttattccttgactcctctttctctttttttcttgcttcctatatgtaaataaatggtg

SEQ ID NO: 384213 - DNA, 552 bp, Homo sapiens
gaatggcatatcttaaaatttacacaaaccaaattgtgcacatgcacacactcatgggaagagagacagagagagagagagactgtgcacaggttaatcttccaattatttatgataccacagttaaccctgggccttgtgtgagtcacattttatactcttaagtatgaaaaaccattaaactaataactagcattgcctttaagactggtagcttagtcagctcaaatatatcaaatgaagttcaagaaaatttaaaataagacttttttttttgagacggagtttcgctcttgttgcccaggctgaagmgcagcggtgtgatctcggctcactgcaacctccgcctcccgggttcaagcgattctcctggctcaaccttccaagtagctgggattacaggcatgtgtcaccatacttggctaatttttgtgtttttagtagagacggggtttcaccttgtcggtcaggctagtctcgaactcctgacctcaagtgatctcctgcctcagcctccaaaagtgctgagattacaggtgtgagccaccgcac

SEQ ID NO: 384214 - DNA, 552 bp, Homo sapiens
gaatggcatatcttaaaatttacacaaaccaaattgtgcacatgcacacactcatgggaagagagacagagagagagagagactgtgcacaggttaatcttccaattatttatgataccacagttaaccctgggccttgtgtgagtcacattttatactcttaagtatgaaaaaccattaaactaataactagcattgcctttaagactggtagcttagtcagctcaaatatatcaaatgaagttcaagaaaatttaaaataagacttttttttttgagacggagtttcgctcttgttgcccaggctgaagagcagcggtgtgatctcggctcactgcaacctccgcctcccgggttcaagcgattctcctggctcaaccttccaagtagctgggattacaggcatgtgtcaccatacytggctaatttttgtgtttttagtagagacggggtttcaccttgtcggtcaggctagtctcgaactcctgacctcaagtgatctcctgcctcagcctccaaaagtgctgagattacaggtgtgagccaccgcac

SEQ ID NO: 384215 - DNA, 590 bp, Homo sapiens
ataatcaataatttataatcaagtaaagaagaaaatattcttgaatttactcttatatgataaaatgttgcatataaagaactcatatatatttaaaaatatattcaggaagactggattaatgagaattctttatatttggggattatgttttacttttatgtttacatatgtatatttataaggatatactttaaagaaaaatatatcataaaaaggatatgtttatgatcattttcttgaaatgtattcttgtaaatacattattgagcatactctgggacatttttcaaaaccagggccgtkaatgtcagctcaaaaatgctattccaaactgtaatttttgaggatttaaaaaaatatattgtataggaaatcttcatgatcaataaaatattcttaagttaatgtttttgtccctcagtctctacctctctctgctccacagtctccattatctcctattccctgaccaagagtagttgtagagatatgagacacaggcagattgaatatatttttcctattgacatatttttaaaacatgttctttaaggacatattattcttaaatgaagcatggttaagag

SEQ ID NO: 384216 - DNA, 590 bp, Homo sapiens
ataatcaataatttataatcaagtaaagaagaaaatattcttgaatttactcttatatgataaaatgttgcatataaagaactcatatatatttaaaaatatattcaggaagactggattaatgagaattctttatatttggggattatgttttacttttatgtttacatatgtatatttataaggatatactttaaagaaaaatatatcataaaaaggatatgtttatgatcattttcttgaaatgtattcttgtaaatacattattgagcatactctgggacatttttcaaaaccagggccgttaatgtcarctcaaaaatgctattccaaactgtaatttttgaggatttaaaaaaatatattgtataggaaatcttcatgatcaataaaatattcttaagttaatgtttttgtccctcagtctctacctctctctgctccacagtctccattatctcctattccctgaccaagagtagttgtagagatatgagacacaggcagattgaatatatttttcctattgacatatttttaaaacatgttctttaaggacatattattcttaaatgaagcatggttaagag

SEQ ID NO: 384217 - DNA, 613 bp, Homo sapiens
gtggggtgtcaaagtctcccattattattgtgtgggagtctaagtctctttataggtcactcaggacttgctttatgaatctgggtgctcctgtattgggtgcatatatatttaggatagttagctcttcttgttgaattgatccctacacggctgsgtactcctctgaaacaaaacgtccagaggaacgatcagacaagaccaatatctttatttgcttttctccttttgttgcagataacctcataattcacaggtctgatcttcttaggtaggataagtgtgtatcagaatttgcctgggacagttttgtctataattattattgggatctccttttaaattttgatataaattacttgatcttggtattcataagactataaaacatgtatctttcctcatttcccactcttcagcaaactcccacacttcccatggtatcttctgaattaaccaagctcaattttctgaaacatcccctctaatctttctctcaatgttcctattccgtttttgacctaattgcaaattggctctcccctgaatatacatttccattaaagtcctctcacgtagtgactattttaaatcctgcactacttccctgcta

SEQ ID NO: 384218 - DNA, 602 bp, Homo sapiens
gatttctattaaaggtacaaactayggtagactgaattattggtcccgttacccctccccataaacaactttgcagtccctcccactaaaggtgagatttttctccttgccttttttgggctctttcataatatttggattggacaatgggctatctataaaaatagcacaagaaggggcttaaaatacacttattcttttctacctctgccatggtcactagaacagtatgtttctgctagcccactactaccagaaagactagagatactgagtagaggaatctcagctggaaggtttttagactgaagccaagcttcctagttgagtctagcctagagaagcccaactgcagttatccagaaatgtgtgaggataaaagtgaatttttgtaggcctttgagatttttgtggctctttattatgcaacattattctggcagtagctaacagatacaaaagccaaaacaatgaattcattaactggttattttactttgtttccatgttctaaataattactggtctaacatgagcagcacaaagaagagtaaaaagctaatgtatattgatctgttgtatggcttgtactgggagtttta

SEQ ID NO: 384219 - DNA, 569 bp, Homo sapiens
catggtcactagaacagtatgtttctgctagcccactactaccagaaagactagagatactgagtagaggaatctcagctggaaggtttttagactgaagccaagcttcctagttgagtctagcctagagaagcccaactgcagttatccagaaatgtgtgaggataaaagtgaatttttgtaggcctttgagatttttgtggctctttattatgcaacattattctggcagtagctaacagatacaaaagccaaaacaatgaattcattaactggttattttactttgtttccatgttctaaataattactggtctaacatgagcagcacaaagaagagtaaaaagctaatgtatattgatctgttgtatggcttgtactgggagttttatttctctgaatctattaataccttttcctaccctatatagctayacattctcacttaccatgccatactgctatctgtcaggggcaactcaaaataatacatatcaagttcttcctccccctccaacaatccaaagattagaggagtggtgggaatacatgatccaagaggaacgaat

SEQ ID NO: 384220 - DNA, 624 bp, Homo sapiens
attttctttaataagatgtttcagcataaaaggctatttgttttctatttttcattgtcaaaaccaaagtaccaacatttttagtggaataagagtatgacaaaaagctggacgaaaagctgaattttttttaaaaattgacttttaagaagtctgaactactatggaaatgtagaaagaaaataatgtgcaaaatcagataaaacatctgtacacttatgaaagatttgaaattagactccagagtaatggaaaaagccatcaattataaatactgactacaactaaccatctccatgaaataatacggtttgatgatttttttctactactctctcaytcttcctcaatttatgactatataactatgattatctataatttcaaagtatcctatgacatcaagggatactttgattttagttttcaaataaaggtatgttctatggaaaaaaactggaaaaataaaacagatgacacttcatcactcattctgctttttccaagataaaataaggcaattaactacttaatattatcattgaaacatgcttttaaatatgcacactaaaatttaatttaaggaatcaatatctgaattttgtgtgaggatgaccaagaagt

SEQ ID NO: 384221 - DNA, 596 bp, Homo sapiens
tctagtagaagcacagtcacctaaaccaaaattacactacatgttgctctaagtaaaaaattacagagagtctaaaggaaaagcacaagtgatagaagactggaaatttagacttcatcacaatttaaaccttttttgctttgaaggacattattaagtgaaagaaaacctcacagaatgggagaaaacatttgcaartcatatatctgaaagggacttatatccaaaatatataaagaactaatacaattcaataataaaaataaataacccaatttaaaatgggaaaagaatttgaatatacaatcctccaaagaaaatgtaagaatagttaaacaacacataaaaagatgttaaattcattagtcatttgagatatgaaaattaaaaatacaatatgtcacacataaaaatggctatattaaaaacaacagataataacaagtgttggtgagtacatacaaaaatcaaaacactcatatgttgttggtgagaatataagatggtgcaaccactttggaaaatactttggcagttcctcaatatgttaaatatagctatcacatgacttgtaattccagtcataggaattctac

SEQ ID NO: 384222 - DNA, 490 bp, Homo sapiens
agttcacaagtgttatctctaaagatattaagataatgccatcaagattgcttttaaatacaagcaagtaacagttttgtcagaaatatttatttcaataatagtattttgtagctctgatttaagtttatatattaccaacataggtaattgcaaatatcttcaggatactgaagatcatttatattacttaaattagagacttctatattctgagattccaagagcaataatgtgtcctgctcattctgacaacttatccatgtctagcatgtaaattctcctctagaaatatttctgtttttaagcaaatccaggtcatttttacatttttattaaagtcccatattcagcaaatgtaataataacataggcattctactggcatataaagatgtattaatcaaagttatccactattacaatgatattttaaagcaattcaaacctattgatttcctagttttkgtgtgggaacatgctatcatat

SEQ ID NO: 384223 - DNA, 619 bp, Homo sapiens
gcaaatcaaaaccacaatgagaaatcacctcacacctgttggcatggctatcataacaaataaamcaaaacaagtgttggtgaagaagtggggaaattggaacccttgtacactgttggtgggaatgcaaaatgatacagctgttgtggaaaaacagtatggaggtcctcaaaaaaataacaaatagaatcaccgtatgatccagcaatccttttttcacaatggtcatgatttggaaacaaactaaatagccattaacaaacgaatagataaaaaaaggtgatataggtttagcatccctaatcaaaactaatccaaaatccaaatgccccaaaatccaaacatttccaagtgccaatatgatgttcaaaggaaatgcttattggaacatttcagattttgacatttcagattagggatgctaaatcagcatgtataatgcaacttccaaaatttaaaaaaaaaaaaaaggaatttgagacacttctggtcccaagtatttcggataagaaatactcaacctgtatatacatacaaaggaatattattcagctcaaaaacaaaacgaaatcctgccatatgtgactacatggatgagccttaaggatgttatattaga

SEQ ID NO: 384224 - DNA, 619 bp, Homo sapiens
gcaaatcaaaaccacaatgagaaatcacctcacacctgttggcatggctatcataacaaataaaccaaaacaagtgttggtgaagaagtggggaaattggaacccttgtacactgttggtgggaatgcaaaatgatacagctgttgtggaaaaacagtatggaggtcctcaaaaaaataacamatagaatcaccgtatgatccagcaatccttttttcacaatggtcatgatttggaaacaaactaaatagccattaacaaacgaatagataaaaaaaggtgatataggtttagcatccctaatcaaaactaatccaaaatccaaatgccccaaaatccaaacatttccaagtgccaatatgatgttcaaaggaaatgcttattggaacatttcagattttgacatttcagattagggatgctaaatcagcatgtataatgcaacttccaaaatttaaaaaaaaaaaaaaggaatttgagacacttctggtcccaagtatttcggataagaaatactcaacctgtatatacatacaaaggaatattattcagctcaaaaacaaaacgaaatcctgccatatgtgactacatggatgagccttaaggatgttatattaga

SEQ ID NO: 384225 - DNA, 619 bp, Homo sapiens
gcaaatcaaaaccacaatgagaaatcacctcacacctgttggcatggctatcataacaaataaaccaaaacaagtgttggtgaagaagtggggaaattggaacccttgtacactgttggtgggaatgcaaaatgatacagctgttgtggaaaaacagtatggaggtcctcaaaaaaataacaaatagaatcacygtatgatccagcaatccttttttcacaatggtcatgatttggaaacaaactaaatagccattaacaaacgaatagataaaaaaaggtgatataggtttagcatccctaatcaaaactaatccaaaatccaaatgccccaaaatccaaacatttccaagtgccaatatgatgttcaaaggaaatgcttattggaacatttcagattttgacatttcagattagggatgctaaatcagcatgtataatgcaacttccaaaatttaaaaaaaaaaaaaaggaatttgagacacttctggtcccaagtatttcggataagaaatactcaacctgtatatacatacaaaggaatattattcagctcaaaaacaaaacgaaatcctgccatatgtgactacatggatgagccttaaggatgttatattaga

SEQ ID NO: 384226 - DNA, 620 bp, Homo sapiens
ggtatttatatatatgaagtatctaaaatggtcaaacacatagaagcagggagtagaatggtggttttccaggacagacagtagggagaaatcaggagcttataagccatgggtatacatcttcacttatgcaagaggaataatttctagatctactgtacaacatcgtgcctatagttaacaatactgtattgtacatttagaaatctyttaaaagggcagatctcacattaatgttcttatcacaataaaataaaaataaaagcgtatcaaatgaatacaatattttacagtcattcactattcatggacttggcttactgttgaacagtgtgttagagtggacaattttaatatagaacaaaagaagaaagtcaagctaaaatgttagagtatcggtatattttttgagaacttcaaatataacacaactttgcctcaattctacagccaaggaaccccaatattgttttaattggaagcaatcttttaaggatattgatattgcagtatggactagtgtagggagaggccagagaaggcagattgtgaatacagttggggcccaagagactgaggcttcatttcccccaagttgctgaaacagttctgtaaaatga

SEQ ID NO: 384227 - DNA, 620 bp, Homo sapiens
ggtatttatatatatgaagtatctaaaatggtcaaacacatagaagcagggagtagaatggtggttttccaggacagacagtagggagaaatcaggagcttataagccatgggtatacatcttcacttatgcaagaggaataatttctagatctactgtacaacatcgtgcctatagttaacaatactgtattgtacatttagaaatcttttaaaagggcagatctcacattaatgttcttatcacaataaaataaaaataaaagcgtatcaaatgaatacaatattttacagtcattcactattcatggacttggcttactgttgaacagtgtgttagagtggacaattttaatatagaacaaaagaagaaagtcaagctaaaatgttagagtatcggtatattttttgagaacttcaaatataacacaactttgcctcaattctacagccaaggaaccccaatattgttttaattggaagcaatcttttaaggatattgatattgcagtatggactagtgtagggagaggccagagaaggcagaytgtgaatacagttggggcccaagagactgaggcttcatttcccccaagttgctgaaacagttctgtaaaatga

SEQ ID NO: 384228 - DNA, 588 bp, Homo sapiens
ttgagcgtggactttaaagggggaaattctgagtgattcttaaaacaacatgtgaacttttttatttcccccagacattagttgccaatatgtaaacatttcagcaagaaattttataccacctcctctgtttgtcaggcagcatttaatggttgaatgacagacagtgctgagccttggcagttccatagtgatgtgcaaatctggggattaaaatgacagttaatcagtggaccttttctagtataaactccatggccactatttaaaatcagttacttatcaacaaggcagacgatttttatttcractttatgttttcgtgtaaagatttcacaacttttccctaggggtagtttctgttgtttggatgttagatgcaaaggttccaattcattttggcagtcttgattgcgtggattcctggtagtcattttaattggtatcttgcagacacgtgggagtcattcacacattgtttcctttttctttgtaggtagaaataacacttcaggatatcaatgacaatccaccagtatttccaacggacatgctggatctcacggtagaggagaacattggagatgg

SEQ ID NO: 384229 - DNA, 590 bp, Homo sapiens
gaaacaaatactttgtgatttgtatttttcttatgaaaaaaactccatagcttattttctctttactgggtaaggagtttaactaatgttctggagtttaaggaagagaagtaactttccagacaccagtatctccttacctctttccccttaagccaarccgaacacagaacagagaatttaattttcttcctctcatctaaactcagaaatatcagaaacttgattcctggcatatgaatcagtgctttataaatgtatttctgtaaccttaaaaatttaaataaataaataataaaataattttaactgccaatacagaaaggtaatgacttagtcatttatacattttgccaaaatctaactattacaaatgaacaaaataaagcatacacatttaggtaattgcaatttgctattagaaaagatacgatgttttatgtttagtacattctactcaattttacaatgtgaagttcacacttatttcaaatttagctagctttaaaagagttatctgacttaatatttctattgttgatagatatgtgatatcattagccataattcagtaaatatttcattttctt

SEQ ID NO: 384230 - DNA, 619 bp, Homo sapiens
atatttcatgtaagtattagtataaatgcaatgctgccagcattcttatttttctccatctgacttccgtgtgtgtgtttgtgtatgtgtgcacacacttgcattgcctccaagttcatcttttaagctatgtttacctttatgatgagactagaggaagcctaggaaggtccttatacatctaggtatttagaccaacactggtttttgtgaatttttattttatttctactgagctttgttttttaagtttaaaaaaaaatgtaagtaaccttgcagrtgttatcacttagacatgctagttaagaaaaatacagaatgtaaagtgatgatagctaggatatataagaagtacttttgagatgagacagagtcgggtattagggccagaaaagtataaggctataatgttggaatgaacaagagaattggagggaaggctgttagcaattcaagggtagagagggatgctgacaatatgtatgaggtgtgactgtgcctgaaggcataaaaatcaccacattcttataactcgatttgtttgtgtgcgagtgtagaaaggcagagaggatggaagggagtaactaggtgcacctacaacattaaaggaaaggggggc

SEQ ID NO: 384231 - DNA, 619 bp, Homo sapiens
atatttcatgtaagtattagtataaatgcaatgctgccagcattcttatttttctccatctgacttccgtgtgtgtgtttgtgtatgtgtgcacacacttgcattgcctccaagttcatcttttaagctatgtttacctttatgatgagactagaggaagcctaggaaggtccttatacatctaggtatttagaccaacactggtttttgtgaatttttattttatttctactgagctttgttttttaagtttaaaaaaaaatgtaagtaaccttgcagatgttatcacttagacatgctagttaagaaaaatacagaatgtaaagtgatgatagctaggatatataagaagtacttttgagatgagacagagtmgggtattagggccagaaaagtataaggctataatgttggaatgaacaagagaattggagggaaggctgttagcaattcaagggtagagagggatgctgacaatatgtatgaggtgtgactgtgcctgaaggcataaaaatcaccacattcttataactcgatttgtttgtgtgcgagtgtagaaaggcagagaggatggaagggagtaactaggtgcacctacaacattaaaggaaaggggggc

SEQ ID NO: 384232 - DNA, 619 bp, Homo sapiens
atatttcatgtaagtattagtataaatgcaatgctgccagcattcttatttttctccatctgacttccgtgtgtgtgtttgtgtatgtgtgcacacacttgcattgcctccaagttcatcttttaagctatgtttacctttatgatgagactagaggaagcctaggaaggtccttatacatctaggtatttagaccaacactggtttttgtgaatttttattttatttctactgagctttgttttttaagtttaaaaaaaaatgtaagtaaccttgcagatgttatcacttagacatgctagttaagaaaaatacagaatgtaaagtgatgatagctaggatatataagaagtacttttgagatgagacagagtcgggtattagggccagaaaagtataaggctataatgttggaatgaacaagagaattggagggaaggctgttagcaattcaagggtagagagggatgctgacaatatgtatgaggtgtgactgtgcctgaaggcataaaaatcaccacattcttataactcgatttgtttgtgtgygagtgtagaaaggcagagaggatggaagggagtaactaggtgcacctacaacattaaaggaaaggggggc

SEQ ID NO: 384233 - DNA, 580 bp, Homo sapiens
aaattttctctcttttcaaatcctggctctgttttctttcttcatctagtttgagtaagactcgagattatgtaggtcatcagccaattgtgtagatttttaaaaattatttatatacttttcattaattactttacctaacatataagtgttagtatgctataggaactcttgtagggcactgtagaacaaagcctgggtaaaggaattacaattttataaaacaacatgtacatgttgaacttaatttagatatcatttgaaatgtgttggatcaagatttacatgtttcagaagcacatgattccgtttgtctcttgttcccttttataaattatgctagtaatgggcyaggatactcaaactttgcttcgtggtaccatacatgtttttgaaaatactatttaaggttctaatatgcatttgaaatttatagctatttacttttagaattccttctatgtgcttttgtctctgtggttcatccggagagcagaatatttttaaccagcattatttccactgcagtgaagctgaaacatgatatttgtttcttgttttgttgctgatatggcatatt

SEQ ID NO: 384234 - DNA, 659 bp, Homo sapiens
tcagctgttccattattaaatttaaatgtgctttgaggcattcattttactaaatgttaagactggcctgaagaatgcagtacaaactaacactaaatatagcgggaatatttttgctttagactgttagaaatcatctccttatatgtttgaccatgaaggaaaaaatgtatgtamgctatgatggaaaagatgtatggaaactgtggatgctgtaatcccccactgtgtcagctttacatgcctatacactccaaacttaccttcttcctaatattctcattgagagctctgtgtctttatattttaataaatacattctttgaggttaattacaataaatggtatatttgttttaggtaagtatattaaattaaagagtaatttttgaagtcaacatttctagcactacttatacctagtgtcaaggtcaataataacatataataggaaatctgatactgtattttcccatggatatatggcaactctagttatattttgatttaaattattcatttgcagaagtctaagtcatcaaataaatttaagccatcatgtttctcttataagaaaatagtaagaataagaataaaataacaactatcattttcctgtgcttactatctgtcaagggttgttctaggtttttaaaatat

SEQ ID NO: 384235 - DNA, 659 bp, Homo sapiens
tcagctgttccattattaaatttaaatgtgctttgaggcattcattttactaaatgttaagactggcctgaagaatgcagtacaaactaacactaaatatagcgggaatatttttgctttagactgttagaaatcatctccttatatgtttgaccatgaaggaaaaaatgtatgtaagctatgatggaaaagatgtatggaaactgtggatgctgtaatcccccactgtgtcagctttacatgcctatacactccaaacttaccttcttcctaatattctcattgagagctctgtgtctttatattttaataaatacattctttgaggttaattacaataaatggtatatttgttttaggtaagtatattaaattaaagagtaatttttgaagtcaacatttctagcactacttatacctagtgtcaaggtcaataataacatataataggaaatctgatactgtattttcccatggatatatggcaactctagttatattttgatttaaattattcatttgcagaartctaagtcatcaaataaatttaagccatcatgtttctcttataagaaaatagtaagaataagaataaaataacaactatcattttcctgtgcttactatctgtcaagggttgttctaggtttttaaaatat

SEQ ID NO: 384236 - DNA, 600 bp, Homo sapiens
agattagaaagcttttatggtataaaatatgaaattgatactggttttgttcagaatcccttcattgacttttcagcacttacctttaacaggatagttttatttacatatttttacatttattatacatttagaaagaagatgagagcaatagctttttattagtatatggcaaacttaaactgattaaagcttcagttaaattttgccttatacactcatatttcctgttaaaaatacaatttaaatttagatatgtttacattaaaacactcagcacattataaacttaactattgacttaaaaattttgtagacgtcatcatatatgtttgaattttatttttttattacaataacaatatggtcaagaatgaaacacaattttatattactttatagctaagaatgtkaaaatgagataaaaattcaggtgtaaaattttggttcattctttttcactactacttttatttcttagttattgcattaaatcaggattttagagaaatattccatccaatgtacagttcttttgagtaaatattccaatgcaaataaatcaatgcaatatcattttgaaattataaattgggttat

SEQ ID NO: 384237 - DNA, 576 bp, Homo sapiens
tcagacatttggacaaacattgttttggatgtgtctgtgaaggtatttctggatgagattaacacttaaatcagtagacttagtaaagaagattgcctctcccaaaatgagttgaaggcctgattagaacagtaacactgagtaataaagaattccttctgtctgattgcctttgggctgggaaattgtgttttcctgccttcaaatttgagctaaaccaatggttcctgctgggtctttagccttacagccattagattgaactaaatcatcaactctcttgggattccagctttttggctgcagatcctgggaactgtcagcctgtataattgcagtggcaaactcattattatctgtctatytatttatctatgtatgtatgtatgtatgtatgtatctatctatctatctatatctatccattcattctactggctattggctctgttagtaatatttattttgtttgaaggacattaatctaaaagattaaaatgaagatgaaatccaaagtccttactatgaactacaaggtcctatacaattcatctcctatcactccattagctctct

SEQ ID NO: 384238 - DNA, 592 bp, Homo sapiens
atcaactctcttgggattccagctttttggctgcagatcctgggaactgtcagcctgtataattgcagtggcaaactcattattatctgtctatctatttatctatgtatgtatgtatgtatgtatgtatctatctatctatctatatctatccattcattctactggctattggctctgttagtaatatttattttgtttgaaggacattaatctaaaagattaaaatgaagatgaaatccaaagtccttactatgaactacaaggtcctatacaattcatctcctatcactccattagctctctgacttcatctctactctttttcctcctgttgatwacattccagtcacactggcttctttgttgttccttgaacatgccagacacactccaactgcaggacctttgcacttctaccagatattcacagatcagatatctgatattccaccagataactacaggagaaactctcttgactgcttcttcaggtcatttttcaaatgtcctttctttagtaaggccctttctgacccatctattaattattcaaatggactaactgaaagccaacttatttaaatctaat

SEQ ID NO: 384239 - DNA, 657 bp, Homo sapiens
tttatttgggaggcactgtcccagaaaattaaggatgatgaaaaaagttaaaaaaaagaacaaggcatagaaagatgaaatgctatatactgtgatatgaagcattactgtactggccctttcttcaaggcaacccctgaagggacacagcaggtakctcacaggcagatttatgcagcacaagtaacattgctaaaagggtcgtgaggtgtatcctcctcagaggagtatacaagcaagagaaaagatgtgggatgtatctcctatttcccagtggtcaaggtacatcagaaaacaacttcctataattctgggttgcatcatgtggctcttctgaggctgctgcactcctaggagtgtatttcatcgaagtctgcaagaaaagtatgagccaacttggatggcctgccaatcaaaagagagaaaaagtatgtcattaaagaaagaagtttaagaatacaacaggtttgaaagatcagataaaatttatgggcttaaatttgggctttaaaaaggggtagaattttgatgattaaagagaagaaagaatgatcttggtaagaaaaacactataagtaaagtcagaaagaaagaaatgtagagttgacccttcaacaacacagaggttaggagcatggactcccctcacagtcaaaa

SEQ ID NO: 384240 - DNA, 525 bp, Homo sapiens
gcatatttttctatgtttgttggctgagtgtatgccttttgagaagtgcctatttttgtcatttgcctacaktttaatgtttttttttttaaatttaagttccttatagattctggatagttgtcctttgtcagatgcagagttttcaaatattttcccccattctgtaggttgtctgtttactctgttgatagtttcttttgctgtgcaaaagctctttagtgtaatgagatcccacttgtctattattgttcttgtcgccattgcttttgaggtctggaagaaggaagaaaaatcttccagacattggcctaggcaaataacttatgactaagtttcttctaagatttttatcttaaaaggaaacttataactaagtttctttctatgatttttatttttcttctacgattataactaggttttcttctaagatttttatcatttgaagtcttatatttatgtctttgatccatcttgagttaatttttgtatatggtgacaggtaccagttcagtttcattc

SEQ ID NO: 384241 - DNA, 525 bp, Homo sapiens
gcatatttttctatgtttgttggctgagtgtatgccttttgagaagtgcctatttttgtcatttgcctacattttaatgtttttttttttaaatttaagttccttatagattctggatagttgtcctttgtcagatgcagagttttcaaatattttcccccattctgtaggttgtctgtttactctgttgatagtttcttttgctgtgcaaaagctctttagtgtaatgagatcccacttgtctattattgttcttgtcgccattgcttttgaggtctggaagaaggaagaaaaatcttccagacattggcctaggcaaataacttatgactaagtttcttctaagatttttatcttaaaaggaaacttataactaagtttctttctatgatttttatttttcttctacgattatractaggttttcttctaagatttttatcatttgaagtcttatatttatgtctttgatccatcttgagttaatttttgtatatggtgacaggtaccagttcagtttcattc

SEQ ID NO: 384242 - DNA, 596 bp, Homo sapiens
gtgcttgtttgtaacatttyttttttctttttgaatgcaactaatggtttattgatcttgtttatcctttcaaagaacgaactttatgtttcattgatcctttgtatgttttttttccaatttcctttagttctgctctaattttagttatttctttttttctgctagttttgagtttcgtttgtcttgtttttgtagtttgttatgttgttagcttgatatctttctaacttcttgatgtaggcttttagctctataaactctcctcttaacattgatttggccatatcccaatatcacaaatgttttggtatgttgtgttttgattttcatttgtttcaaattttttttatttctgtgttaattttgttgtttacccaaaagtcattcaggagtgagttatttagtttccatgtatttgtgtagttttgagagttcctcttggtattgacttctatttttattccactcttatatgacaagatgattcgtaagatttttattctcttgaatttattgagacttgctttatgactgaacatgtggtcagtcttagagtatgttccacgtgcagatgagaagaaagtattttctgt

SEQ ID NO: 384243 - DNA, 596 bp, Homo sapiens
gtgcttgtttgtaacatttcttttttctttttgaatgcaactaatggtttattgatcttgtttatcctttcaaagaacgaactttatgtttcattgatcctttgtatgttttttttccaatttcctttagttctgctctaattttagttatttctttttttctgctagttttgagtttcgtttgtcttgtttttgtagtttgttatgttgttagcttgatatctttctaacttcttgatgtaggcttttagctctataaactctcctcttaacattgatttggccatatcccaatatcacaaatgttttggtatgttgtgttttgattttcatttgtttcaaatttttttkatttctgtgttaattttgttgtttacccaaaagtcattcaggagtgagttatttagtttccatgtatttgtgtagttttgagagttcctcttggtattgacttctatttttattccactcttatatgacaagatgattcgtaagatttttattctcttgaatttattgagacttgctttatgactgaacatgtggtcagtcttagagtatgttccacgtgcagatgagaagaaagtattttctgt

SEQ ID NO: 384244 - DNA, 531 bp, Homo sapiens
acaaaagaggcagtagagtgagaagaacgtgaacttcagagcccacccatcccktttcacatttgaatcgcaactctgtcattcaccagctgtgcatccttgggaaagtcacttagcctctctgagctctaatttcctcacagggccgcaggactgaggttaaggacctgctgtcactggtacagtggttgaagaaaaggtgaatgaaggaagggcctcgttttactccttgtctcacattcctttctgctacttctctttggctcaccaaaaggagacagaagtttgtgtccatggctgtgaactgccaaagagttgccaattctctacgatctttgacctctgtgatcccaggggcaaggccagcactttccattccattagacttcattctcttgtgggtgctttctgctggaatctcccaatacagaacagaaagcacaggttatggaatcagatagaccaaagttcatctccaaatttgattccctctgcatacaagttgcttacccttgggggccctgtaaaatg

SEQ ID NO: 384245 - DNA, 531 bp, Homo sapiens
acaaaagaggcagtagagtgagaagaacgtgaacttcagagcccacccatcccgtttcacatttgaatcgcaactctgtcattcaccagctgtgcatccttgggaaagtcacttagcctctctgagctctaatttcctcacagggccgcaggactgaggttaaggacctgctgtcactggtacagtggttgaagaaaaggtgaatgaaggaagggcctcrttttactccttgtctcacattcctttctgctacttctctttggctcaccaaaaggagacagaagtttgtgtccatggctgtgaactgccaaagagttgccaattctctacgatctttgacctctgtgatcccaggggcaaggccagcactttccattccattagacttcattctcttgtgggtgctttctgctggaatctcccaatacagaacagaaagcacaggttatggaatcagatagaccaaagttcatctccaaatttgattccctctgcatacaagttgcttacccttgggggccctgtaaaatg

SEQ ID NO: 384246 - DNA, 574 bp, Homo sapiens
cagcatgaaaccatgttcccagagctaaaatccctatcttcagaaaacagtgcaagataccctactgaataaaatcagaatattttttaagtgaaaatgagatgaaaagaattgagaaggagccaagtgatagttaagttaatcttcaggggagggaaaacatgtcagaaaatgtaaaccagatcagtccaacccatgttacaattctgcagagggaattaaattcctgtggaaaaacaagtctctgactatgaaaggatttgactgtatagaagaatctggaacatcagtctattaaaaatacttgtaaaaccaggggcatcatgtaagaaattagagagctaaagaagtgggagagcttcggatrtctgaaatagaattattattgcagacactgtattgtattagtaagacagcaacgaagagaaaattgctttattccaaaaagcaaaatttattatcaggtaggatcatttaattctaagtggctctcttaactctttatgtataactctgcttggcttaaccatgagtagttaatttaaaaaaaaaaaaaagtaattccagtgtatct

SEQ ID NO: 384247 - DNA, 574 bp, Homo sapiens
cagcatgaaaccatgttcccagagctaaaatccctatcttcagaaaacagtgcaagataccctactgaataaaatcagaatattttttaagtgaaaatgagatgaaaagaattgagaaggagccaagtgatagttaagttaatcttcaggggagggaaaacatgtcagaaaatgtaaaccagatcagtccaacccatgttacaattctgcagagggaattaaattcctgtggaaaaacaagtctctgactatgaaaggatttgactgtatagaagaatctggaacatcagtctattaaaaatacttgtaaaaccaggggcatcatgtaagaaattagagagctaaagaagtgggagagcttcggatgtctgaaatagaattattattgcagacackgtattgtattagtaagacagcaacgaagagaaaattgctttattccaaaaagcaaaatttattatcaggtaggatcatttaattctaagtggctctcttaactctttatgtataactctgcttggcttaaccatgagtagttaatttaaaaaaaaaaaaaagtaattccagtgtatct

SEQ ID NO: 384248 - DNA, 560 bp, Homo sapiens
cattagagtcactgaggctggtcctccatgagaaagcaccctcagttaaaaatgcagattcccaatctctacccccaaaatggcctcaaccagactttctgtggatagggtctggaaattccaattttacatgcttcctccgagatgtgatgcttattcacaatgacaatcgaggaccatggggaagaaacactaaatgccccattacgaatgctcgagtgtagtcaggtctgtgaagagactgcttttttccacatctcccataggacccattacaaatcacagaagccctgcttgtggaagccccgcytgtggaagcccctgcatttaggaaatggggccgtcgtctgctggtctgcttcaagctctcttccctctcctacagagcataggagtggagggcagggaggtgaccactgggaatgacatttcctggcttccccaaatcccttgccaactggcttcctgtaggtttggacagtgggaggtgctggtgggagggacggagaagccagggaacttctctcctctccttcaggtgtcatgtcaccttgttggtt

SEQ ID NO: 384249 - DNA, 467 bp, Homo sapiens
gattcctccttacagcatatctgctcacctgagcctcaacagccatcagaaccctcaaacctccatgaaactcacacacacacacaaattgagaggcaaaaataaaatagcatttcctttgcaactatttatttcagcaaggaaaaccggaaaattcacttctgtgatgaatcacagatttttttttctccagcagatttcccttcatttaagcaggcacactttccctaaatccctggcacactccaaatatccaggcagagaactctgggctgtgccaggtgtcaatgcctactttggggaggtggggggaggtccccttctaattcttctatgtccaggttgaagcccagccaattactaagccctcgagaaagaaacaatggctaattaagatgaactwtaagcgggggagaggacttaattaatttgatctttatctgaaactctttctaattgaagtaaac

SEQ ID NO: 384250 - DNA, 544 bp, Homo sapiens
ttgagttagtttctgtaaaggtgtgaggtatcgattaaggtcagttttttttttttttttgcgtattcatgtccattccagtaacatttattgaaatcactgtcctttattgaattgcccttgtacctttatcaaaaatcagttcactgtttgtgtcaatctatctctagactttcttgtctgttccatttatttatgtgtctaattctttttttctttcaatactatactgatttaaccttttactaagtttaaaatcaggtagtgtgagtcttccaacttcttttttcatcaatgtcctgaactctttgaaaatctaccagaaggcatagcaattcacttttttctctttttgagacactttcgccctgttgccctggcttgagtatggtggcacagtcacrgctcactgcagccttaacctcctgtgctcaagtggtcccccacctcagcctcccaagtagctgggactgtaggcatgcactaccatgcctaactaattttatttttaaaatttttttgtagagatgaggtctcactatgt

SEQ ID NO: 384251 - DNA, 590 bp, Homo sapiens
gggcttaatatgatttagtgagatataaattacaccaaaaaagaggtagagtaacacctactatttactaaaataaaaatctcttggcagtacattgctgtaggaaaggacatggcagtcagcttataaatgacaaaatatgtgataactttgtgttacatacagaactgttgtttggctaggcgtagtggctcacgcctgtaatcccagcactttgggaggccaaggtgggcggatcacttgaggtcaagagtccgagatcagcctggccaacrtggtgaaaccccatctctaccaaaaatacaaaaagtagctggtcatggtggtgtgtgcttgtggtcccagctactcaggaggctgaggcaggacaattgcttgaaaccaggaggtggttgcagtgagctgagattgcaccactgtactctagcctgggagacagagtgagactctgtctcaaaaacaaaaaaaaaggactgttgttcgtagtgtatagtacataatacagtgtaatacctgtattataggcaaagctgtatatagttaaattaacctgtagtatatatatgaacatatatgtgtgtgtgtatata

SEQ ID NO: 384252 - DNA, 590 bp, Homo sapiens
gggcttaatatgatttagtgagatataaattacaccaaaaaagaggtagagtaacacctactatttactaaaataaaaatctcttggcagtacattgctgtaggaaaggacatggcagtcagcttataaatgacaaaatatgtgataactttgtgttacatacagaactgttgtttggctaggcgtagtggctcacgcctgtaatcccagcactttgggaggccaaggtgggcggatcacttgaggtcaagagtccgagatcagcctggccaacatggtgaaaccccatctctaccaaaaatacaaaaagtagctggkcatggtggtgtgtgcttgtggtcccagctactcaggaggctgaggcaggacaattgcttgaaaccaggaggtggttgcagtgagctgagattgcaccactgtactctagcctgggagacagagtgagactctgtctcaaaaacaaaaaaaaaggactgttgttcgtagtgtatagtacataatacagtgtaatacctgtattataggcaaagctgtatatagttaaattaacctgtagtatatatatgaacatatatgtgtgtgtgtatata

SEQ ID NO: 384253 - DNA, 590 bp, Homo sapiens
gggcttaatatgatttagtgagatataaattacaccaaaaaagaggtagagtaacacctactatttactaaaataaaaatctcttggcagtacattgctgtaggaaaggacatggcagtcagcttataaatgacaaaatatgtgataactttgtgttacatacagaactgttgtttggctaggcgtagtggctcacgcctgtaatcccagcactttgggaggccaaggtgggcggatcacttgaggtcaagagtccgagatcagcctggccaacatggtgaaaccccatctctaccaaaaatacaaaaagtagctggtcatggtggtgtgtgcttgtggtcccagctactcaggaggctgaggcaggacaattgcttgaaaccaggaggtggttgcagtgagctgagattgcaccactgtactctagcctgggagacagagtgagactctgtctcaaaaacaaaaaaaaaggactgttgttcgtagtgtatagtacatartacagtgtaatacctgtattataggcaaagctgtatatagttaaattaacctgtagtatatatatgaacatatatgtgtgtgtgtatata

SEQ ID NO: 384254 - DNA, 523 bp, Homo sapiens
taaccaaactggaggtatttgaggcatcatggaaggcatgaggcaaagaaaatgggactctgatcatttatgtggctttcctgaaataacacagcagtttaagtgacttgactcttcaaattgtttctttttggggggatgaatttttgtaacctgcagaaagagacactatctcttataatgatcataccagtttgctaagattgctgtaacaaagtaccacaaactaggtggcttaaacagcagaaacttttctctgagttctggaggctagaagtcagaaatcaaggtgttgscaaggtgggttccttccgagagatgtgaaggaaagttctgttctgggcctctcttcttggtttgtagatggttgccttcatgttcacatggcattctccccgtatcttcacatcttccctctgtgcatattcgtgtccaaattttctctgtttataaggactacggccatattggagtaaggcctaagctaacaacctcattttaacttgattacctctataaaaat

SEQ ID NO: 384255 - DNA, 523 bp, Homo sapiens
taaccaaactggaggtatttgaggcatcatggaaggcatgaggcaaagaaaatgggactctgatcatttatgtggctttcctgaaataacacagcagtttaagtgacttgactcttcaaattgtttctttttggggggatgaatttttgtaacctgcagaaagagacactatctcttataatgatcataccagtttgctaagattgctgtaacaaagtaccacaaactaggtggcttaaacagcagaaacttttctctgagttctggaggctagaagtcagaaatcaaggtgttggcaaggtgggttccttccgagagatgtgaaggaaagwtctgttctgggcctctcttcttggtttgtagatggttgccttcatgttcacatggcattctccccgtatcttcacatcttccctctgtgcatattcgtgtccaaattttctctgtttataaggactacggccatattggagtaaggcctaagctaacaacctcattttaacttgattacctctataaaaat

SEQ ID NO: 384256 - DNA, 523 bp, Homo sapiens
taaccaaactggaggtatttgaggcatcatggaaggcatgaggcaaagaaaatgggactctgatcatttatgtggctttcctgaaataacacagcagtttaagtgacttgactcttcaaattgtttctttttggggggatgaatttttgtaacctgcagaaagagacactatctcttataatgatcataccagtttgctaagattgctgtaacaaagtaccacaaactaggtggcttaaacagcagaaacttttctctgagttctggaggctagaagtcagaaatcaaggtgttggcaaggtgggttccttccgagagatgtgaaggaaagttctgttctgggcctctcttcttggtttgtagatggttgccttcatgttcacatggcattctccccgtatcttcacatcttccctctgtgcatattygtgtccaaattttctctgtttataaggactacggccatattggagtaaggcctaagctaacaacctcattttaacttgattacctctataaaaat

SEQ ID NO: 384257 - DNA, 561 bp, Homo sapiens
caatgattaacttagtcttctataggattttctgctgagctgagaatggtgtcctctgctttgagagataggaatctgaacaccacaagagttctgttagcaaggaagatggaaaagttgtctactttgtagaygggtgcttttcaaagcaactgcattggttacacggccatgaagctggctgtaaatgatcttgggcaagacgctggggatgtgactagggattttcatttgtgcacctggatgaaaggatttgttattaataaagaattctgaggaatgctggtaaaggagaggtttttaatttttaaattttaaggcgttttgggaggctattgtaaataaatccctggtcaattgtattttataagcatttattgctgatttatatggatactgatgattatatgttgatctttttataaggaagcttgctgcatttcctttttaaccaaatatcataatacatttgtacagaacttttacgaatactgtatatttgaagggcaattttgtatttttctttttattatttattttctttgttttattatattggct

SEQ ID NO: 384258 - DNA, 606 bp, Homo sapiens
ttcagaataaaataaagttgttaggaaacaaagatgtaacatcttgggaataaaattgtatgtgtgaaggtgtgtgtaagcaaggtagagagaatacaaaagtctcttcaattctaaatgattagttgcaataaactgtcttttgctggtgaatataataatgaaaaggcattaacgaaattgattttttaaaaatattgattgtcacaaaggaaatcattgcctctatttcaaaagtcagcaatgcagaaatgagaaaaccaacccatagtaaaactgcagaggtcagaggccaagttttatcttctctgtatgtgccatagcatataattggaagaaaagacctgacaaaggcatatttcccaatggscctactgagaagaaaatatctattgtggctagaactattaagatcaggaggctttatagcaatatttattcaccacagattaaattgtgaaaaatcaatatatttgtttaaaaaggtgaataacaaaaaaagtatattgttttctaaatctctttgaagattttcaataagggtgcaagtttttaccccacccatttccaaacacacacacacacagacacacacacaaacacaca

SEQ ID NO: 384259 - DNA, 347 bp, Homo sapiens
tcttgctgacttgaccaggccaggtccaatgatataaatacatcactctgagatagattcaaatactgttgaattttgatttgtctagtgtcccttcttgttccttcttgatgctttaactttctctgagcttcataagtctctctgcttaaggtaagaataaatatgctgamgtttgattatttggcacattattctttccttagttttctttatttttaaaaatttcaatagaattaatacttttagagaagttttagattcatagcagaaagtacagagagttcccacagaccttctgcacctacagatgcagaaattcctccattatcaatatcctacaccag

SEQ ID NO: 384260 - DNA, 578 bp, Homo sapiens
attgacttcctgtctaatctatttcactaatttctgctctaatttttatcagttattttattcctactgcctacttttttattttcttctactttcaatgtagtttgctgtccttttctagtttcctaaagtggaaacatggtttttagatatctattcttttctaatatatgcaataaacaccataaatttccctgtgagcactgcttttactgcatccacacatttagataagttgtatttttattttcaccaaatgcaaaatacttaaaatttctcttgagctttcattttaactcatgtgttatttagaaatgcatcctttattctccaagtgttgggggatttttttcggctatctatctgtcattgatttctactttaaatccattgtagtctgagataagacatataattttattattttaaatttattaagatgtgtcttatagctcaggatgtagtctatcttggtgaatgttctgtgggaacttgagatgagtatatattctgttgttggatgaagtagtcygtatatgttaattatatctatttgattgatggtgctgttgagttga

SEQ ID NO: 384261 - DNA, 626 bp, Homo sapiens
ctctggttttcctaggcagaggtccctgcggccttccgcagtgtttgtgtccctgggtacttgagattagggagtggtgatgactcttaacgagcatgctgccttcaagcatctgtttaacaaagcacatcttgcaccgcccttaatccatttaaccctgagtggacacagcacatgtttcagagagcacggggttgggggtaaggttatagattaacagcatcccaaggcagaagaatttttcttagtacagaacaaaatggagtctcctatgtctacttctttctacacagacacagtaacaatctgatctctctttcttttccccacatttcccccttttctattcaacaaaaccgccatcgtcatcatggcccgttctcaatgagctgttgggtacacctcccagacggggtggcggccgggcagagaggctcctcacttcccaaacgtggtggccgggcagaggtgccccccacctcccagacggggaggctgccrggcgggggcgccccccacctcccagacggggcagctgcccggcggaggggctcctcacttctcagatggggcagccggacagaggcgctcctcagttcccagacggggtggtggccgggcagagg

SEQ ID NO: 384262 - DNA, 626 bp, Homo sapiens
ctctggttttcctaggcagaggtccctgcggccttccgcagtgtttgtgtccctgggtacttgagattagggagtggtgatgactcttaacgagcatgctgccttcaagcatctgtttaacaaagcacatcttgcaccgcccttaatccatttaaccctgagtggacacagcacatgtttcagagagcacggggttgggggtaaggttatagattaacagcatcccaaggcagaagaatttttcttagtacagaacaaaatggagtctcctatgtctacttctttctacacagacacagtaacaatctgatctctctttcttttccccacatttcccccttttctattcaacaaaaccgccatcgtcatcatggcccgttctcaatgagctgttgggtacacctcccagacggggtggcggccgggcagagaggctcctcacttcccaaacgtggtggccgggcagaggtgccccccacctcccagacggggaggctgccaggcgggggcgccccccacctcccagacggggcagctgccsggcggaggggctcctcacttctcagatggggcagccggacagaggcgctcctcagttcccagacggggtggtggccgggcagagg

SEQ ID NO: 384263 - DNA, 596 bp, Homo sapiens
aagttttatctaatgcattttctgtatctattgatgtgattatgtggctttttcttaagtctgttaataygttgaatcacattgaatgtatttcaaatggtcagtcagccttgtattcctaatatgaaccccatttggtcataatgtattttactttcaatatattgttgttttctatttgctgaagttttgttcaatggtagagctcacagctaagttaaacaaatacttttcctgaagataacatttatacttcagtgtgcaataaaagtgctttatgtttcacagagaccatcatttttaatctaataaaattatgtgtgagtgcatggtggtgaagaatatagtaactgctagtattgcttggtgccattgcttcagtttgtgccccagggttcacattgcagccatcattgcttttgtatcattagtataattgtcaacacagtgaaaaaggcaaatatcatcttagtactgttatgaaaatagtttttactcatggattttccccaaagagtttctggcactgctggagttttgtatactacactttgagaatttctgttctatatctttattaatgtcttaggactgct

SEQ ID NO: 384264 - DNA, 596 bp, Homo sapiens
aagttttatctaatgcattttctgtatctattgatgtgattatgtggctttttcttaagtctgttaatacgttgaatcacattgaatgtatttcaaatggtcagtcagccttgtattcctaatatgaaccccatttggtcataatgtattttactttcaatatattgttgttttctatttgctgaagttttgttcaatggtagagctcacagctaagttaaacaaatacttttcctgaagataacatttatacttcagtgtgcaataaaagtgctttatgtttcacagagaccatcatttttaatctaataaaattatgtgtgagtgcatggtggtgaagaatatagtaactgctagtattgcttggtgccattgcttcagtttgtgccccagggttcacattgcagccatcattgcttttgtatcattagtataattgtcaacacagtgaaaaaggcaaatatcatcttagtactgttatgaaaatagtttttactcatggattttccccawagagtttctggcactgctggagttttgtatactacactttgagaatttctgttctatatctttattaatgtcttaggactgct

SEQ ID NO: 384265 - DNA, 572 bp, Homo sapiens
catcatcccaaaagaaaatcctacactcagtcactccccattttcccctcccctcagcctgggtctttcatataaatagaattatatatattatatattataatatatatggtatatatatgatatatatggtatatatatgatatatacatgtgatatatacatatgataatatatatggtcttttttgtttgatttatttcacttaagcaaattttcaggtttcattcacattgtarcgtgtatccatacttcatttttatggctaaataatatcccattttatagatataccatattttgtttatccattcatctgttgatgaatatttggagacttttgacctgatatatcagcattctgctttagtttaaaattcacaaataaaaggaacacaaaggaaagggcattactttccattctttattaagaggaaaaatatatgtgcaaaattgttctacttatcacgaagaaggcactgcataaatattagtgtcttctacctattacttatttaatgggtgtcttcatatccactgtctcatttagaccttataagaacataaaaaac

SEQ ID NO: 384266 - DNA, 624 bp, Homo sapiens
gtgtaaaaaattacaggtgaaccactaatgttgtttctttttaaatacaaaagaatttgatgaacaactgctttagaaaccagtgatttagatcaggggtcagcaaacttttcctgtaaggggccagatagtaaaattttgcagatcagtattgcaaatcaaggatattatgtaagtgttacataacaggagaaaaaacaaatttccacccaattttattgatagaattcaaaatataacaacaattgagtacaattttatgtaatacaaatctaatgagtgagaagtgaattctcttggagggataacatttcacttagttggaatttaaagttagtgatctagccatcaaaatttgagtacaaacattctgatctataataaaatttttaatttcatctttgaaaacatattttctcacatatgtactgccaaatactgatatcatcctacaagcatctaatttcakttgagcatatgtctctttgatatggcatttgtagaattttgttagattcttctcttgatatttgccttttagcatatcatttcattgcagataatcactttcaattgaaggttaggtggaagctcttcagttgcatagtgaaatggattttgaga

SEQ ID NO: 384267 - DNA, 608 bp, Homo sapiens
cattaatagaggttaaaggctgttcttttcattcataacaagttcaatctgggccctgagttcaaagtatcactgtgaaactctagcagtgctgagccattgaaatgctgtgtgatagcataatgcaggctaacctttagcctctatttttaacaaaaattcacagaactgacaatagttaagtccatgagagtaaatgaagttcactgttgacagtactgatccagtaacacttgatagatttccatatttttcaggtagtaccactgatcaaaacaatacaatgaataatcttaggtattaaacacttcaaattttcacaagctttctaaatttstcaaattacacctttttctgctccacacattttcactaccatgaaatataacacagcagattccacttcaggttgtactgaattattgttttctcaaatgctttgaaaatattcttacccatagttattctatgcagactattcaaggttaattcttcagtcacttcaaactcagcattgacttcttgactaaacaacttagtggtattggtaacatttttcacctcatcaagaaccaaggaaagtcacttgccttgttttttagtttact

SEQ ID NO: 384268 - DNA, 444 bp, Homo sapiens
ttgattaaaaatgtcatgtagtcataccctcacttaaaattacttcctttcacctgtaactccaaggagataaagcaataggaaatgaaaatatctagagaaatctgtcatggaaaagaagatatgctgagaatgaaacaaacacattttttttttccaaatcagttcttaaaatcttgtggtaggccaaatagtgcataatagcatttaatgacatgcctatcttttaataaaagattaacatcatggaaaatttaagttgtctggctttaygatgatgtcctaggagttttgtggtggcaagaagagaagcagaataaaaagcatcatgtgcatgtgatggacactaactttaagtgtaaaacaaatactggagaggttggaacacagttattcaaaatcacaggtgtgattgtgattgttcactctgaactggacagtgcc

SEQ ID NO: 384269 - DNA, 507 bp, Homo sapiens
tatttaccataaaaggttgttatgagaacttatcagataaaggagggcagatgcttattgagtgcccagctcaatgcatmttagttattgttgttaggagctccgattcttgattggcccaaacctttgttcagaggtgccccaccccctgtctggctgggctgctgtttccctgcaggctctggaggggccgtgttgtcacggggtgatctggatcagcgtgcccacttatggtgcatggacaggctctgtggtcaccactcctgccaagttccaacacagtaggggcagagacacctgctgtcatgaagccacactcatcatccctgccttttctcttggggcacccctgaaggagcccccataagttcctagcaaagacttccatttgggcaaacacacttcaccccaacaagtatactgatcccctcttgtcagcaggaacagaaaacatgattttacatctgttacccataatctatctctttacacacaaaagacttgccc

SEQ ID NO: 384270 - DNA, 507 bp, Homo sapiens
tatttaccataaaaggttgttatgagaacttatcagataaaggagggcagatgcttattgagtgcccagctcaatgcatcttagttattgttgttaggagctccgattcttgattggcccaaacctttgttcagaggtgccccaccccctgtctggctgggctgctgtttccctgcaggctctggaggggccgtgttgtcacggggtgatmtggatcagcgtgcccacttatggtgcatggacaggctctgtggtcaccactcctgccaagttccaacacagtaggggcagagacacctgctgtcatgaagccacactcatcatccctgccttttctcttggggcacccctgaaggagcccccataagttcctagcaaagacttccatttgggcaaacacacttcaccccaacaagtatactgatcccctcttgtcagcaggaacagaaaacatgattttacatctgttacccataatctatctctttacacacaaaagacttgccc

SEQ ID NO: 384271 - DNA, 507 bp, Homo sapiens
tatttaccataaaaggttgttatgagaacttatcagataaaggagggcagatgcttattgagtgcccagctcaatgcatcttagttattgttgttaggagctccgattcttgattggcccaaacctttgttcagaggtgccccaccccctgtctggctgggctgctgtttccctgcaggctctggaggggccgtgttgtcacggggtgatctggatcagcgtgcccacttatggygcatggacaggctctgtggtcaccactcctgccaagttccaacacagtaggggcagagacacctgctgtcatgaagccacactcatcatccctgccttttctcttggggcacccctgaaggagcccccataagttcctagcaaagacttccatttgggcaaacacacttcaccccaacaagtatactgatcccctcttgtcagcaggaacagaaaacatgattttacatctgttacccataatctatctctttacacacaaaagacttgccc

SEQ ID NO: 384272 - DNA, 559 bp, Homo sapiens
aggcatcatcctcagcaaactaacacaggtacagaaaaccaaatactgcatgttctcactcataagagtgagagctgaacattgagaacacatggacacagagaggggaataacacataccagggcctaatgaggggtgggggataaggggagggaacttagaggacgggtcaataggwacagcaaaccaccatggcacacgtaaccctatgcaacaaacctgcacattctgcacatgtatcctgttttttttttttagaagaaaaataatttatgggagtttctgtacttgtgataaaaggaccattttcactaatcatgggcaaagtgtcttattcattgtttttatcttcagtgcctagaagagtaaactaaaaaagggttggctaccttagcccaagaagatctttgaaacattggtgaaacagttagtcctcatgcctgcatttatggcaagaaataggcataaactggccaccttatttttctatatgtcgagcattgcatttagatcaaaaacctaacttcaaatgtactgctgttacaaaatattaattca

SEQ ID NO: 384273 - DNA, 559 bp, Homo sapiens
aggcatcatcctcagcaaactaacacaggtacagaaaaccaaatactgcatgttctcactcataagagtgagagctgaacattgagaacacatggacacagagaggggaataacacataccagggcctaatgaggggtgggggataaggggagggaacttagaggacgggtcaataggaacagcaaaccaccatggcacacgtaaccctatgcaacaaacctgcacattctgcacrtgtatcctgttttttttttttagaagaaaaataatttatgggagtttctgtacttgtgataaaaggaccattttcactaatcatgggcaaagtgtcttattcattgtttttatcttcagtgcctagaagagtaaactaaaaaagggttggctaccttagcccaagaagatctttgaaacattggtgaaacagttagtcctcatgcctgcatttatggcaagaaataggcataaactggccaccttatttttctatatgtcgagcattgcatttagatcaaaaacctaacttcaaatgtactgctgttacaaaatattaattca

SEQ ID NO: 384274 - DNA, 559 bp, Homo sapiens
aggcatcatcctcagcaaactaacacaggtacagaaaaccaaatactgcatgttctcactcataagagtgagagctgaacattgagaacacatggacacagagaggggaataacacataccagggcctaatgaggggtgggggataaggggagggaacttagaggacgggtcaataggaacagcaaaccaccatggcacacgtaaccctatgcaacaaacctgcacattctgcacatgtatcctgttttttttttttagaagaaaaataatttatgggagtttctgtacttgtgataaaaggaccattttcactaatcatgggcaaagtgtcttattcattgtttttatcttcagtgcctagaagagtaaactaaaaaagggttggctaccttagcccaagaagatctttgaaacattggtgaaacagttagtcctcatgcctgcattkatggcaagaaataggcataaactggccaccttatttttctatatgtcgagcattgcatttagatcaaaaacctaacttcaaatgtactgctgttacaaaatattaattca

SEQ ID NO: 384275 - DNA, 616 bp, Homo sapiens
gggacacatatggatcagttagcagtgrttaactctgaaaagtgagactgaaagagggactaggctgggtgcaggggctcctgcctataatcccagaactttaggaggccaaagcaagaggatcacctgagccccagagttcaagaccagcctacggaacagagtgagacccccatctctacaaaaatagaattagccagtgtggtggtgtgtgcctgtagtcccagctacttggaaggctgagtggggaagttcgtttgagtcgggaaagttgaggctgcagtgagttgtgattgagccactgcactccagcctggatgacagagtgagaccctgtctcagcaaaaaagcaaaaacaaaaacagagaataaagggagcttggaattttacaccctaaactactataagtgtttgtttaatataagggaaactcccagataagcaagagaagaagcaagataaattagtttaaacaatggataaaaattattggctcatacaactgtaaataccaaaggtagggtagactttacctgtggtttgatcaggttctgactccattttttctcaagtcttttgaatctgccctcttctagcagcggcctcacctttgga

SEQ ID NO: 384276 - DNA, 525 bp, Homo sapiens
attcagtgtggttaacagaaatagaacaattaaaataaaggacagtatctttaccagatcttgagatgatgacgatgataattatgatgatgacaatttctgttaacaattttaaatgcttactacctgccagacatcgtgcagagcatattgtatgcattatttcatgtaatwctttcatttgtctatgaggtcacaactgtgtaattcagtgtttcaagtgaccttagtaatctaaaaccaaacttttctacaaatgtatatgctcagatttagaatacagaaagtgatcatgcacagagctaaagacaaaattgactgtatttcaggtttttaatgttgtcatttttgtaatagtcaatgagcaataaagttattaaaaatcaaacacttgaaataattgttttaataaaatatattaatgaaaactatgtagatggtaacttttaggcttatgacagccccaagcttcctgactagctcttactgaaaaacaatgagacataggacattattgtcccatga

SEQ ID NO: 384277 - DNA, 619 bp, Homo sapiens
gaccatttgtgcaatacttaaaagtaaaaacaaagtggaattattccattctcaccctatcttccctcgcacacaaatatacacagtcacaactgagttgttggctcttgctctcagacagaataagccacaccacctcctgcttgtcccctgcaccacaccccttgatctctaaggagagatggttcaactcctaaataggacatagaaactttgtggatgcaaatcaggcccaggaagactgcaaggttaagagtgaaatgctgctggctacgcagagcttgagggagagaggcaactgcagccaaggagagggatacacacttactctcccatgcaattaatcatctttaagcacaaagggatggctgctgggaagattaggtgagtcgcagcagcttgcctagtctctgcttcccagctggggccacaaggtcagggcagtctggctaagtactcccccatgactggaccttgagggacagggaaaaagcagattgctaatcgamaggacagattggagaatgagagtgtctaccctgcccatccaaggctagcaggcactatcctgggcagagctgctctgtccttgactttctgcatgatttctgcatgcaga

SEQ ID NO: 384278 - DNA, 485 bp, Homo sapiens
gatgatcactttctaaatcttgttagaggcttagattacacagataagtacatttgtcaaaagtcagtggatatacacctaagatttctacattttgttgtatgtaaatttgatatcaagagaaaaattcaaaataaataattgaactctagttmatgatatgtatgctgaagcattcagggggatgtgtactgcctgtatgtagtttaccctgaaatgccaaaaataaaatgaattattcaatggatggttggataggtatttggtaaagcaagtatagtaaaatactaatggtagaatctatattgagatacatatacatgtgtttattataaaactatttcaacttttctttgtttcaaaattttcataatgaaatattaaagactactgtgtggtgaatagactcatgaccagttaggatgctataccattgtattaaaaaaaattacagaattttgtagttcttgaccaactataagatg

SEQ ID NO: 384279 - DNA, 485 bp, Homo sapiens
gatgatcactttctaaatcttgttagaggcttagattacacagataagtacatttgtcaaaagtcagtggatatacacctaagatttctacattttgttgtatgtaaatttgatatcaagagaaaaattcaaaataaataattgaactctagttaatgatatgtatgctgaagcattcagggggatgtgtactgcctgtatgtagtttaccctgaaatgccaaaaataaaatgaattattcaatggatggttggataggtatttgrtaaagcaagtatagtaaaatactaatggtagaatctatattgagatacatatacatgtgtttattataaaactatttcaacttttctttgtttcaaaattttcataatgaaatattaaagactactgtgtggtgaatagactcatgaccagttaggatgctataccattgtattaaaaaaaattacagaattttgtagttcttgaccaactataagatg

SEQ ID NO: 384280 - DNA, 548 bp, Homo sapiens
aaccgtttcagaatgaaggaatgcctacagatatagttttggagwggatatggtattataggaataaagagaacgaataagtttctccagccacatctttgcactaggtccacttgaagctctaagttgggaaactattaatagaggaaaaagtcattattttcaaaaaacagttattcccttaattaaaaattattggatgagttctttatgctagatattataataggagaatcacaaagatttcgtttaattatcctaacaatcccccaagataagagttgtttcagatattgaacactgaggctcaggaaggtttgttatatactaagaaatggcagggctggggtttgaatctaggccttacttccaacggctgcttctttctatattttttagcacacagtactcattagatgtatacctcagcctggaggtagataaatagacaacaaaaattttttataataaccaattttctaaactttaagatcttaaagactatttacttgtagcatgcattcagctcttagggaagaatgtatttt

SEQ ID NO: 384281 - DNA, 548 bp, Homo sapiens
aaccgtttcagaatgaaggaatgcctacagatatagttttggagaggatatggtattataggaataaagagaacgaawaagtttctccagccacatctttgcactaggtccacttgaagctctaagttgggaaactattaatagaggaaaaagtcattattttcaaaaaacagttattcccttaattaaaaattattggatgagttctttatgctagatattataataggagaatcacaaagatttcgtttaattatcctaacaatcccccaagataagagttgtttcagatattgaacactgaggctcaggaaggtttgttatatactaagaaatggcagggctggggtttgaatctaggccttacttccaacggctgcttctttctatattttttagcacacagtactcattagatgtatacctcagcctggaggtagataaatagacaacaaaaattttttataataaccaattttctaaactttaagatcttaaagactatttacttgtagcatgcattcagctcttagggaagaatgtatttt

SEQ ID NO: 384282 - DNA, 609 bp, Homo sapiens
ttggtttctttcctcttgctgaggctagtgaagcataaatggaagagggtaggagtgggaagtggtaggatggggagggcagggaggaggatgaataagagttgtattcacagccgatgtggggaacaacaccatgggagagaggaactccatgagtgagagaccgcacttaaggagaaggcaacgagtgaaacagctggaagcattagggraaaacaacccaatgcagcaagtaacccaatccagtggaatgagctgggaatcatggcagaccagagaccaggagaagaaaatatatttacactcgtggaaggaaatgcaaatggaaagacaaatccccagactggagcaagcaggctggccctgcatccctgcctctccctgggggcttcgcagtccccgagtctgccttttgcaggttacttctttcttaacccttttcaactttactcagattctgtcaggaatccagatggaataggctgggctacacttctcttgaaacaatcttcgaccaccttaccctgtgctttcaggaatgctatggtttgaatgatggtgttgcctccaaaattcaggtgtagaggcttaatggctagtgtgatagta

SEQ ID NO: 384283 - DNA, 609 bp, Homo sapiens
ttggtttctttcctcttgctgaggctagtgaagcataaatggaagagggtaggagtgggaagtggtaggatggggagggcagggaggaggatgaataagagttgtattcacagccgatgtggggaacaacaccatgggagagaggaactccatgagtgagagaccgcacttaaggagaaggcaacgagtgaaacagctggaagcattagggaaaaacaacccaatgcagcaagtaacccaatccagtggaatgagctgggaatcatggcagaccagagaccaggagaagaaaatatatttacactcgtggaaggaaatgcaaatggaaagacaaatccccagactggagcaagcaggctggccctgcatccctgcctctccctgggggcttcgcagtccccgagtctgccttttgcaggttacttctttcttaacccttttcaactttactcagattctgtcaggaatccagatggaataggctgggctacacttctcttgaaacaatcttcgaccaccttaccctgtgctttcaggaatkctatggtttgaatgatggtgttgcctccaaaattcaggtgtagaggcttaatggctagtgtgatagta

SEQ ID NO: 384284 - DNA, 477 bp, Homo sapiens
agaactggaccaattttactgaaactattgcaacaagttgaggaggagggactcctccctaactcattctgtgaggccagcatcattcaggcagagacacaatgaaaaaagaaaacttcaggctaataaccttgattaatatacatgcaaaaatactcaacaaaatactaaccaactgaatccagaagcacatcaaaaagctaatccaccataatcaagtaggctttaatcattgggatgcaagttttgttcaagatatacaaatcaataaatgtgattcatcacataaacaggawtaaaaacaaaaccacatgatctcaatagaagcaggaaaggctttcagtaaaattcaacatcctctcattaaaaacctcaacaagctatgcattaaaggaacatacgtaaaaataataatagctatctgtgacagacccacaaccagcatcatactgcatgggcaaaagctggaatcattcc

SEQ ID NO: 384285 - DNA, 571 bp, Homo sapiens
gacctaattaaagagtttccacacagcaaaaagcaaacaaacaaacaagaaaaacctatcaacacagyaaacagaaaacctacagagttgaaaatatttgcaaattatgtgtccgacaaaggtctggatgttagcatccagaatctataaggaacttaaatttacaagcaaaaaacaaacaacctcattaaaaaatgggcaaaggacctgaatagacacttctcaaaagaggacatacacatggctaacaagcataggaaaaaaatgtccatatcactaattatccgagaaattcaaatcaaaaccacaatgagataccatctcacaccagtcagaatggctattattaaaaaatcagaaaataacagatgctggtgaggttgtgtagaaaaggtaatatttatatactgctggtaggaatgcaaattagctcatccattgtggagagcagtttggaggttcctcaaataacttaaaatagagctagcatcccacctagcaatcccattcctgggtatatacccaaaggaatagaaatcattctaccacatagacacatacttgcatatgt

SEQ ID NO: 384286 - DNA, 571 bp, Homo sapiens
gacctaattaaagagtttccacacagcaaaaagcaaacaaacaaacaagaaaaacctatcaacacagtaaacagaaaacctacagagttgaaaatatttgcaaattatgtgtccgacaaaggtctggatgttagcatccagaatctataaggaacttaaatttacaagcaaaaaacaaacaacctcattaaaaaatgggcaaaggacctgaatagacacttctcaaaagaggacatacacatggctaacaagcataggaaaaaaatgtccatatcactaattatccgagaaattcaaatcaaaaccacaatgagataccatctcacaccagtcagaatggctattattaaaaartcagaaaataacagatgctggtgaggttgtgtagaaaaggtaatatttatatactgctggtaggaatgcaaattagctcatccattgtggagagcagtttggaggttcctcaaataacttaaaatagagctagcatcccacctagcaatcccattcctgggtatatacccaaaggaatagaaatcattctaccacatagacacatacttgcatatgt

SEQ ID NO: 384287 - DNA, 575 bp, Homo sapiens
gtggtcaaaccaagtctgaacagagcaagcctgaagcacttctagcaacacagccaggtggccaggagcccaaagtgatataactgyggtttactcacaggctttcagagtaacctttagggctggttgaactctcagacaccacttagcatttcctaacaatgatctgtaatgcatttgggaagcctgtctgaatcacccaattagatcatgctttctaatgggcctcaatgcagagatgctgccaacagctttggcagaggcacacagagcccccttctttacaaggcatcttccactctctgtttttgatttcactctcacaacatcactgtgttgtatcccaggtggatgctactattcccacttgcagatgaggaatctgaggctcgctgaagttaagtgacttgtgcaacgtcacaaaaccattgaatggttgctgtgagctttcaactcaggaaagggcttgactttcccctcaggtgccctttccactgtggtgttgggagttaagtagaggcagacaggtcattactggatgggaaatgccctgtgagccattgccagctatgttt

SEQ ID NO: 384288 - DNA, 582 bp, Homo sapiens
ttttaaccattcttttacttttaacttatctgtgtttttatatttaaagtatatctcttaaaagcagcatatagatgtcttgctttaaaaaaaaaaacctcataatctctcccttttaattaaagtgtggtttttgttttgttttgttttktttgagacagagtctcactctgtcaccaggctgtagttcagtggtgcgacctcggctcactgcaacctccgcctcccaggttcaatcgattcccctgcctcagcctcccgagtagctgggattacaggcacgcgctgctacgaccagctaaattttgtatttttagtagagatggggtttcaccatgttggccaggatggtctccatctcctgacctcatgatccgcccacctcagcctcccaaaatgctgggattacaggcctgagtcaccatgcccagcctaattaaagtgtttaatccattaatgtttgtagtggactgaataatgtaccctcaaaatttatgttttcccagaacctcagaatgtgaccttatttgaaaattggtttttgcaaatattagttaagatgaggtcatcctagattagaac

SEQ ID NO: 384289 - DNA, 582 bp, Homo sapiens
ttttaaccattcttttacttttaacttatctgtgtttttatatttaaagtatatctcttaaaagcagcatatagatgtcttgctttaaaaaaaaaaacctcataatctctcccttttaattaaagtgtggtttttgttttgttttgttttgtttgagacagagtctcactctgtcaccaggctgtagttcagtggtgcgacctcggctcactgcaacctccgcctcccaggttcaatcgattcccctgcctcagcctcccgagtagctgggattacaggcacgcgctgctasgaccagctaaattttgtatttttagtagagatggggtttcaccatgttggccaggatggtctccatctcctgacctcatgatccgcccacctcagcctcccaaaatgctgggattacaggcctgagtcaccatgcccagcctaattaaagtgtttaatccattaatgtttgtagtggactgaataatgtaccctcaaaatttatgttttcccagaacctcagaatgtgaccttatttgaaaattggtttttgcaaatattagttaagatgaggtcatcctagattagaac

SEQ ID NO: 384290 - DNA, 629 bp, Homo sapiens
ctatggtagaaaaaaggacaataaaatatttcaaaagaaaatattacaaaatattaaggtttttttttrgtttttttttttttttttgagacagagtcttgctctgtcacccaggctggagtgcaatggcacaatctcagctcactgcaacctccacctcccaggttcaagtgattctcctgcctcagccccctgagggctgggattacaggcgcctgccactacgcctggctaatttttgtatttttagtagagatggagtttcaccatgttggtcaggcaggtcttgagctcccgatctcatgtgatctgcccgcctcggcctcccaaagtgctgggattacaggcgtgagccaccgcacctggcccaaaatattaagttttacaactgcatttttctttctgtattttccaatgcaaaaatgactttgtatgttttaataattggggaaaattaaaataactgttttgaccatggaatactatgcagccataagaagggatgagatgatgtccttttcagggacatggatggagctggaagccattatcttcagcaaactaacataggaacaaaagactaaacactgcatgttgtcacttataagtaggatcagaacaatgagaac

SEQ ID NO: 384291 - DNA, 535 bp, Homo sapiens
aaacactgcatgttgtcacttataagtaggatcagaacaatgagaacacatggacatacttggtggggaacaacacacactggggcctgtcagtggtgggtaggaggggagaacatcaggaagaatagctaatggatgctgggcttaatatctaggtaataggttgacctgtgcagcwaaccaccatggcatacatttacctatatgacaaacctgcacatcctgcacatgtacctcaggacttaaaagttaaagaagaaaaaaatgaaataattggtttcgaatacaacagcctcagattgcccttagtgatgacctccctttgtcagggttgcagtgtggtgactgggcacaccctctccctccagctggccctgagctactcagagggagaccaggtaggcataccccaggctggctgtcagcaatttttggatggtttctagccaggctgccccatggaaatgttccaaatatttttcatcagttggctccctcaaagagtgagaccaacatttccaacacggcggcctaa

SEQ ID NO: 384292 - DNA, 535 bp, Homo sapiens
aaacactgcatgttgtcacttataagtaggatcagaacaatgagaacacatggacatacttggtggggaacaacacacactggggcctgtcagtggtgggtaggaggggagaacatcaggaagaatagctaatggatgctgggcttaatatctaggtaataggttgacctgtgcagctaaccaccatggcatacatttacctatatgacaaacctgcacatcctgcacatgtacctcaggacttaaaagttaaagaagaaaaaaatgaaataattggtttygaatacaacagcctcagattgcccttagtgatgacctccctttgtcagggttgcagtgtggtgactgggcacaccctctccctccagctggccctgagctactcagagggagaccaggtaggcataccccaggctggctgtcagcaatttttggatggtttctagccaggctgccccatggaaatgttccaaatatttttcatcagttggctccctcaaagagtgagaccaacatttccaacacggcggcctaa

SEQ ID NO: 384293 - DNA, 415 bp, Homo sapiens
tcagctcatgagctacatgcgtgattagaaaaataagttactcaccacaaaaatcacagagcaagagacaggaaagaagaggaaggttttcttctccctgcaactaaatatgcatagataaaggagaagctagggtcaaaacgttgtcagtgtgacaaaagctgaatttctgcttgggatggaagatcaggaaatgatttttgcagtttattaataatytaatcatagtctttgcagctaccatcatgaatgagtaatatcctttcccacagacacaggtgtcaagtcaaagagaaatggataagcagacaccatgggcgtcacgggcctctgccttagggatctctgcataagacagcaccagcataattttcagcaacaggctggctggacatgtcttcgtgatgctgctgca

SEQ ID NO: 384294 - DNA, 559 bp, Homo sapiens
tatagagatggcaaggaacttgctgaagctcccagctaggaagtaggagagtatagcttttgaatccatgcactttggctccagcacttgcgtactgaagtacaagatggatgataagaggcaagggtccatttgtgagctggagtcacaaattcaagttcaagaacaagagcakaactgctcagcatgagacaaggagaggaactctgttattgaaatgcagagggtgggaggggaggtggaaaatgaaggaaaagagagaagaatcaagtgatgatggggaagggaccaagagaagaacttgacagtggtgggaagccaaaaataggactttagagaaaatctgtctaaagcagatttttaacaatagctttattgaggtataatttacataaactatatttgaagtatacaataagttgaaactatcaccacaatcaagatagtaaaaatgtctatcaccccaaagtttctttgtgttccttgtaagctcccaatccaatccctgcctacccaggcaaccacaacttctttctgtcattataaattgatttgcatt

SEQ ID NO: 384295 - DNA, 545 bp, Homo sapiens
gaattcaatccaatgaaaaggaatggaatggaacggaatagaatggaatggaatggaatggaatggaaaaaattcgagtggaatggaatggaatgcaaagtaatataatgaaaatgaatggaatccacccgaatggaaaggaaaggaatggaatggaatggaatggaatggaatggaatggtatggagaggaatggaatttaatggaatggagaggaatggaatggaattgaatggaatggaatgcaaaggaayggaaaggaatggaatggaatggaattgaatggagtcaacgcaagtgtaattgaatggaatggaatggaatggaatggaatggaatggaattgatttgaatggaatggaatcaactggaatggaatgcaatggaatggaatggaatggaatggaatcaaatagaatagaaacgaatggaatggaatggaatgcagtggaatggaatggaatggaatcaacccgtgtggaatgtaaggcaaaggaatggaatggaatggaatggaatcaacaaaattggaagggaagggaatg

SEQ ID NO: 384296 - DNA, 545 bp, Homo sapiens
gaattcaatccaatgaaaaggaatggaatggaacggaatagaatggaatggaatggaatggaatggaaaaaattcgagtggaatggaatggaatgcaaagtaatataatgaaaatgaatggaatccacccgaatggaaaggaaaggaatggaatggaatggaatggaatggaatggaatggtatggagaggaatggaatttaatggaatggagaggaatggaatggaattgaatggaatggaatgcaaaggaacggaaaggaatggaatggaatggaattgaatggagtcaacgcaagtgtaattgaatggaatggaatggaatggaatggaatggaatggaattgatttgaatggaatggaatcaactggaatggaatgcaatggaatggaatggaatggaatggaatcaaatagaatagaaacgaatggaatggaatggaatgcaktggaatggaatggaatggaatcaacccgtgtggaatgtaaggcaaaggaatggaatggaatggaatggaatcaacaaaattggaagggaagggaatg

SEQ ID NO: 384297 - DNA, 545 bp, Homo sapiens
gaattcaatccaatgaaaaggaatggaatggaacggaatagaatggaatggaatggaatggaatggaaaaaattcgagtggaatggaatggaatgcaaagtaatataatgaaaatgaatggaatccacccgaatggaaaggaaaggaatggaatggaatggaatggaatggaatggaatggtatggagaggaatggaatttaatggaatggagaggaatggaatggaattgaatggaatggaatgcaaaggaacggaaaggaatggaatggaatggaattgaatggagtcaacgcaagtgtaattgaatggaatggaatggaatggaatggaatggaatggaattgatttgaatggaatggaatcaactggaatggaatgcaatggaatggaatggaatggaatggaatcaaatagaatagaaacgaatggaatggaatggaatgcagtggaatggaatggaatggaatcaacccgtgtggaatgtaaggcaaaggaatggaatggaatggaatgraatcaacaaaattggaagggaagggaatg

SEQ ID NO: 384298 - DNA, 495 bp, Homo sapiens
gaatggaatggaatggaatggattggaatcaacctgcgtggaatgtagtgcattcgaattgaatggaatcaacaagataggaatrgaatgaaatggaatggaattcaatggaatggaatggaatggaatgcaatggaatcaacccaaatggaatgtaatgaaatggaattgaatggaattaccccgagtgaactggcatggaaaggaacggaatagaatttaatggaatggaatggcatgcaatggaatcaacacgagtgcaatggaatgccatgaaatggaatgcaatgcaatggaatggaaccaataagagtggaatggattggaatggagtggaatggaatgaaagggaatggaatcaacccgagtggaatggaatggaatggaatggaatggaatggaaaggaatggaatggaatggaatggaatgcaatggaatggaatacaccatagtggaatggaatagaatggaatggaatggagtggaatcaaccc

SEQ ID NO: 384299 - DNA, 509 bp, Homo sapiens
ggaatggaatgcaatggaatcaacccaaatggaatgtaatgaaatggaattgaatggaattaccccgagtgaacwggcatggaaaggaacggaatagaatttaatggaatggaatggcatgcaatggaatcaacacgagtgcaatggaatgccatgaaatggaatgcaatgcaatggaatggaaccaataagagtggaatggattggaatggagtggaatggaatgaaagggaatggaatcaacccgagtggaatggaatggaatggaatggaatggaatggaaaggaatggaatggaatggaatggaatgcaatggaatggaatacaccatagtggaatggaatagaatggaatggaatggagtggaatcaaccccattggaatggaatggaatggaatggaatggaatggaatggaatggaaaggaatggaatggaatgggatggaatgggttggaatcaaaccgagtggaatggaatggaatgcaatggaatggaaaggaatggaa

SEQ ID NO: 384300 - DNA, 495 bp, Homo sapiens
gaatggaatggaatggaatggattggaatcaacctgcgtggaatgtagtgcattcgaattgaatggaatcaacaagataggaatggaatgaaatggaatggaattcaatggaatggaatggaatggaatgcaatggaatcaacccaaatggaatgtaatgaaatggaattgaatggaattaccccgagtgaactggcakggaaaggaacggaatagaatttaatggaatggaatggcatgcaatggaatcaacacgagtgcaatggaatgccatgaaatggaatgcaatgcaatggaatggaaccaataagagtggaatggattggaatggagtggaatggaatgaaagggaatggaatcaacccgagtggaatggaatggaatggaatggaatggaatggaaaggaatggaatggaatggaatggaatgcaatggaatggaatacaccatagtggaatggaatagaatggaatggaatggagtggaatcaaccc

SEQ ID NO: 384301 - DNA, 509 bp, Homo sapiens
ggaatggaatgcaatggaatcaacccaaatggaatgtaatgaaatggaattgaatggaattaccccgagtgaactggcatsgaaaggaacggaatagaatttaatggaatggaatggcatgcaatggaatcaacacgagtgcaatggaatgccatgaaatggaatgcaatgcaatggaatggaaccaataagagtggaatggattggaatggagtggaatggaatgaaagggaatggaatcaacccgagtggaatggaatggaatggaatggaatggaatggaaaggaatggaatggaatggaatggaatgcaatggaatggaatacaccatagtggaatggaatagaatggaatggaatggagtggaatcaaccccattggaatggaatggaatggaatggaatggaatggaatggaatggaaaggaatggaatggaatgggatggaatgggttggaatcaaaccgagtggaatggaatggaatgcaatggaatggaaaggaatggaa

SEQ ID NO: 384302 - DNA, 509 bp, Homo sapiens
ggaatggaatgcaatggaatcaacccaaatggaatgtaatgaaatggaattgaatggaattaccccgagtgaactggcatgkaaaggaacggaatagaatttaatggaatggaatggcatgcaatggaatcaacacgagtgcaatggaatgccatgaaatggaatgcaatgcaatggaatggaaccaataagagtggaatggattggaatggagtggaatggaatgaaagggaatggaatcaacccgagtggaatggaatggaatggaatggaatggaatggaaaggaatggaatggaatggaatggaatgcaatggaatggaatacaccatagtggaatggaatagaatggaatggaatggagtggaatcaaccccattggaatggaatggaatggaatggaatggaatggaatggaatggaaaggaatggaatggaatgggatggaatgggttggaatcaaaccgagtggaatggaatggaatgcaatggaatggaaaggaatggaa

SEQ ID NO: 384303 - DNA, 509 bp, Homo sapiens
ggaatggaatgcaatggaatcaacccaaatggaatgtaatgaaatggaattgaatggaattaccccgagtgaactggcatggaaaggaacggaatagaatttaatggaatggaatggcatgcaatggaatcaacacgagtgcaatggaatgccatgaaatggaatgcaatgcaatggaatggaaccaataagagtggaatggattggaatggagtggaatggaatgaaagggaatggaatcaacccgagtggaatggaatggaatggaatggaatggaatggaaaggaatggaatggaatggaatggaatgcaatggaatggaatacaccatagtggaatggaatagaatggaatggaatggagtggaatcaaccccattggaatggaatgsaatggaatggaatggaatggaatggaatggaaaggaatggaatggaatgggatggaatgggttggaatcaaaccgagtggaatggaatggaatgcaatggaatggaaaggaatggaa

SEQ ID NO: 384304 - DNA, 568 bp, Homo sapiens
tcgctttgattccattccattgcattccattccattccattccacaccattccaaaccatttcattgcattccattcgattccactcgggttgattccattccattccattccattaatttccattccattccattccactcgggttggttccattccattccattccgttgcactcgtgtgaagtccattccattccattccattccattccattgcaatccattccaatccattacattccacttgtgtggattccattccattccattccattccattccattccattccattccattccattccattctattcctttccrttccattccattccaatccattccatcgaatttcacttgattttattcctttccattccatttcaatccattccattgcattcctttccattctattccattccattccattccattccattcgggtttatttcattccattccattcctttccattccattgcattccattccattccactcggtttgattccaacccattccatcccattccattccattccattccattccattccattcc

SEQ ID NO: 384305 - DNA, 568 bp, Homo sapiens
tcgctttgattccattccattgcattccattccattccattccacaccattccaaaccatttcattgcattccattcgattccactcgggttgattccattccattccattccattaatttccattccattccattccactcgggttggttccattccattccattccgttgcactcgtgtgaagtccattccattccattccattccattccattgcaatccattccaatccattacattccacttgtgtggattccattccattccattccattccattccattccattccattccattccattccattctattcctttccattccattccattccaatccattccatcsaatttcacttgattttattcctttccattccatttcaatccattccattgcattcctttccattctattccattccattccattccattccattcgggtttatttcattccattccattcctttccattccattgcattccattccattccactcggtttgattccaacccattccatcccattccattccattccattccattccattccattcc

SEQ ID NO: 384306 - DNA, 568 bp, Homo sapiens
tcgctttgattccattccattgcattccattccattccattccacaccattccaaaccatttcattgcattccattcgattccactcgggttgattccattccattccattccattaatttccattccattccattccactcgggttggttccattccattccattccgttgcactcgtgtgaagtccattccattccattccattccattccattgcaatccattccaatccattacattccacttgtgtggattccattccattccattccattccattccattccattccattccattccattccattctattcctttccattccattccattccaatccattccatcgaatttcacttgrttttattcctttccattccatttcaatccattccattgcattcctttccattctattccattccattccattccattccattcgggtttatttcattccattccattcctttccattccattgcattccattccattccactcggtttgattccaacccattccatcccattccattccattccattccattccattccattcc

SEQ ID NO: 384307 - DNA, 476 bp, Homo sapiens
caccatggcccaggtagatctatgtaacaaacctgtgtgttctacacatgtatcccttttttttttttttaaaagaaaatactttctgaacttgcaacatgttcttttaaatagccccagttgagaggtgggttcggtctttaaaaatagctaaaagaatttggagtcacacttagaaaacccagaaaaaaaaaaaaaaaaaaaaccctaaacatgttcttacaaggataggggagtgaatgtmctccaggtttaaaagcactgtttacaagtcagtacctgtcacaattgatcccatgtttgaatttatacacttatttctccaaattgacagtgaaactcttcaagcacaggaaccttattccccagcaactagcaaattttgggacatttgctaggctcccaaagtttcttgatgttactggaatatccaagggtcaggagtttacaatcatagactccaaacatctatatgc

SEQ ID NO: 384308 - DNA, 476 bp, Homo sapiens
caccatggcccaggtagatctatgtaacaaacctgtgtgttctacacatgtatcccttttttttttttttaaaagaaaatactttctgaacttgcaacatgttcttttaaatagccccagttgagaggtgggttcggtctttaaaaatagctaaaagaatttggagtcacacttagaaaacccagaaaaaaaaaaaaaaaaaaaaccctaaacatgttcttacaaggataggggagtgaatgtcctccaggtttmaaagcactgtttacaagtcagtacctgtcacaattgatcccatgtttgaatttatacacttatttctccaaattgacagtgaaactcttcaagcacaggaaccttattccccagcaactagcaaattttgggacatttgctaggctcccaaagtttcttgatgttactggaatatccaagggtcaggagtttacaatcatagactccaaacatctatatgc

SEQ ID NO: 384309 - DNA, 596 bp, Homo sapiens
atttttaccaaaaactataaaacataaacaactcatataatttttatcagttagtaggtgtatgtcaagaaatgactttttaaattctgattacgatatacataatatctatctacaccgaaaaagataggtaagaatagtgattcactttattccaaggaaattatattaactgaagctatttaagtattaatttaagtcaatgtaattatcccgtaggtgattccagtaacatttatccctaccatatgaatgtaaaactgttataactgacacatggataacccactcgtgacttataaatattaacttaatgaaataaaagtattatcctgacttttgattagatgttacatatcttttgattttatctttgtcagattaaatgaaaatkttatgatcttgttttaaagtacggtttttttattgaaccgcttttgaaatatttcactgactgtaaagcttcatcttgattccataattcagtttatcctatgaaaaaaatatgttaaatatatcagtcatataattgaatatacaataatgcctttgattttaaaaattcacctaataacttatacaaagacctacttagg

SEQ ID NO: 384310 - DNA, 633 bp, Homo sapiens
ttctttgttgactgtaacagcagtgggatctcagtaagagatagccagccagcttttacacagactacattgccttaagagacattgagactcacaggaaaaaaaaaaaaaaaagaaattacactgatccaatagatatactgctgagagctttctattatattccaacctcagacgttgtaccaccattaaattcacatattcaggccctgggaatcaggccagcctgacacacaagtttggctgaaatgaatcyactgtattagtttttgtgaaaatgatggagctctgtggattcaagatcagttctatttttcaagcagtcaaagccctataaaactaggcaaataaaccttaataagagacgaaatgaaaggaagcctagcagagataaaattgaataacaagagcaagcagactgccataagacatgatttgagcccagaaaaaaaacacaaggtcatttatttggcaggtttttgtttttgtttttgtttttttaaatctgctaacaggcaacatttttataaacgccttttaagaagaatgtccgtcacaaaggcataattttaatcagaattcttacaacgtttctcaaattcctaagggcattcagctccactcaaattagta

SEQ ID NO: 384311 - DNA, 567 bp, Homo sapiens
aatacttgtaaaccaaaattttttatgtttgcatatatgccacaggattaaactwaacagaaaattatgactattttaatttcctgaatttagggttcaccatcaaactatcaaactgcataatttcttcacaaatacaaatacctaacatcataatgttgacctggttggaaaatcagtactaagtatatttggaatttgtgatatttttaacatttctaattcttaatgcaactgtctattctttgttgagcatactaacgagtcctacacagtgttgtagccctagacagttcagagaagcaagtgctgacttgttgctcacttcatgtaaccatgccctttgatatctttttttttaagtttgtaataatgctgtgactactgctgttcacaaatattttattcataaaatctatcctcccctagggctggtacagagaatctacaagctgaaggctagtctataaactccactcactctaggagactgagcttctttctcaacatcaatcgctgaactgggagtttagacagagtaaactagctgtgcctcccaattgcaat

SEQ ID NO: 384312 - DNA, 596 bp, Homo sapiens
ttctggagccctctcaaatctgccactgtctttcttagactctttgtccaatatccccaactgtgaacatggcatgtgctcgatagaaactggtggtagtctaatgcccataccaggcatctgggtgttgatgttcagaattatttgttctttgaatcttggttaagtggactattgatgatgaatgacagggattcttctccattttctccataaatttgcmgatttttattcctaagatattggaaggtgagggaatgattccctctccctacctttaatacaactcacacgtcttgttggggaagctacataacacactagctattcattcatcaaacatgacttgaatagaaactgtaagccagacatttctagggcctagaaatataaaatgaaaatataaatgtaatctctgccctcagagatctcatacacagacaaggaagcagctgacaacatactttgatagttggtgagagaggcatatacaacacctgtgggcccacagagaggctgccacccatcctgctcagcagagagatttctgtcactccacactgtgctgatggagtaatttaattatggtgctaccc

SEQ ID NO: 384313 - DNA, 619 bp, Homo sapiens
atagttggtgagagaggcatatacaacacctgtgggcccacagagaggctgccacccatcctgctcagcagagagatttctgtcactccacactgtgctgatggagtaatttaattatggtgctaccccctycatagaactagaatgtatagaagaagacggcttggaaaattgcaggcatttactaaatgaatctctttttatcctggaagatccatatttgaggagcctgtagcttctatctctgctactggttacctattcattctatatctttcttctctgcctcccaccccactccttctttcctcatcctcctcctctctctctctctcttttaagagatgggggtctcactgtgttgcccaggctgatctggaactcctggcctcgagtgatcctccctcctcagcctcccaaactgctgggattacagtcatgagccactgtgcctggcatctctctccctctctctctctcttacacgtacgcatcctaagcacacatttccacatgggaaacatctaacaaaagccttcttcatttggagtaaaaatgaataaaaaccagatacactggaatattatctgtacagatataggagtatttcagaggatat

SEQ ID NO: 384314 - DNA, 539 bp, Homo sapiens
gctccaatttgtaaatatcttcctgaggtcaaccccagatgtaaagggttcacacattgctcatggagcaattcagtaactgtgcaataccctcttgatgggacaatgtagatgaaattctctgtcaatttaaagtgccatacaaattttgtatcttctaaagcgaaataagaagcaaaattatcagcagaaggaaatcaaagcaatctgtaataatcttcaaactaaatgctttcagccttgaatttggcacttgaaggacaccrctgtgctaaagacatatgagtgaagttggactaaatatttctgggagtgccataaaaccagagtgtcttacattccatgctttgtcgtctttaaaacataaaagaaaaaaaagagcagtctggctgtgctgcttgttcacttctgaactctctaaaccatccacctctaattcaacctgacattgctaattttggcattagagtttgaaatgaaaatcaatatctgttttgagcttgaaaacagagtgactgtaccttgggtagagcacaacc

SEQ ID NO: 384315 - DNA, 557 bp, Homo sapiens
tttatatattgaaagatttgtgttgctggaaaatttccaatgttgattgcctctgtccttaaattaatacaaattgtttattaatttacttattaattaattactagagtatcttccaaaactcttagatgatcaataagaatctttccaaatctcttttatgctttttggatttttaaaaaattcccttcacattgttcctaagggataaaagttatttggtcagaataatttccaaaaagcctaaattttcttctaagtatgctaggaaacctttggctcattttatgcagggaaatgatatgatrtcactttattttaaaaggatcactcaaggctgttgtgctctgtagatatttgactggggaacaccccaagcaaaagacattggtggcttgatcagggcagatgtagtagaaatgatgagaagtggtctaatttagaatatattcaagtgacagagagatcagagtttaccgacggagtaaacatgggaacttagtaaaggaatagataaaaaatgactccttctgaactgacctgagcaactagaggga

SEQ ID NO: 384316 - DNA, 557 bp, Homo sapiens
tttatatattgaaagatttgtgttgctggaaaatttccaatgttgattgcctctgtccttaaattaatacaaattgtttattaatttacttattaattaattactagagtatcttccaaaactcttagatgatcaataagaatctttccaaatctcttttatgctttttggatttttaaaaaattcccttcacattgttcctaagggataaaagttatttggtcagaataatttccaaaaagcctaaattttcttctaagtatgctaggaaacctttggctcattttatgcagggaaatgatatgatatcactttattttaaaaggatcactcaaggctrttgtgctctgtagatatttgactggggaacaccccaagcaaaagacattggtggcttgatcagggcagatgtagtagaaatgatgagaagtggtctaatttagaatatattcaagtgacagagagatcagagtttaccgacggagtaaacatgggaacttagtaaaggaatagataaaaaatgactccttctgaactgacctgagcaactagaggga

SEQ ID NO: 384317 - DNA, 658 bp, Homo sapiens
tacctaaaactagctaaaagatttgtaatgttcccaacacaaagataaatgtttgaggtgatgtatatctcaattaccttgatttgagcattatacattttatacaggaatccaaatgtcacgggtaacccccaaatatgtatagctattatatagcaataaaaatttttaaatttcactggccttattcagatttcaccagttttacatgaactcgtgtgtgtgtgtgtgtgtgtgtgtgtgtgtgtgtgtgtaagttttatgctattttatcacatgaatatattcatgtagccaccactgcaatcaagatacagaaaaattccatcatacaaggatgcctcatgatactctttcctagttcattttttgtttgctccttaaaaaagaaaaatgataaaggaaaatcttttttttttctcttttccttgagtaaaarttcttccttgggaaaaattccgcaataccttggcatctcttctctacccctttggtgcacctcctttaacttgagcacttgtatttccctggcaatttgctcagctaagtgatagaaaaaaaggagttgactgaattaattcatacttatacataggtgtgaatgactcaaacgtcattaactctggcagaggaagttgcagttttaaaaagaaaatgt

SEQ ID NO: 384318 - DNA, 658 bp, Homo sapiens
tacctaaaactagctaaaagatttgtaatgttcccaacacaaagataaatgtttgaggtgatgtatatctcaattaccttgatttgagcattatacattttatacaggaatccaaatgtcacgggtaacccccaaatatgtatagctattatatagcaataaaaatttttaaatttcactggccttattcagatttcaccagttttacatgaactcgtgtgtgtgtgtgtgtgtgtgtgtgtgtgtgtgtgtgtaagttttatgctattttatcacatgaatatattcatgtagccaccactgcaatcaagatacagaaaaattccatcatacaaggatgcctcatgatactctttcctagttcattttttgtttgctccttaaaaaagaaaaatgataaaggaaaatcttttttttttctcttttccttgagtaaaagttcttccttgggaaaaattccgcaataccttggcatctcttctctacccctttggtgcacctcctttaacttgagcacttgtatttccctggcaatttgctcagctaagtgatagaawaaaaggagttgactgaattaattcatacttatacataggtgtgaatgactcaaacgtcattaactctggcagaggaagttgcagttttaaaaagaaaatgt

SEQ ID NO: 384319 - DNA, 490 bp, Homo sapiens
tacttttattgactgaataaaattcaagatatacttccacaaataagcagctgaaatcctgtacttccattccaatgctaagaaataatgtttttacacagtttactgtgtaatattataagatgaagaatggtaggataaaatggtagttattattgctataggtagtcataaagaggcttgggacagagaagttttaaatattaatattcataaaatcacttaaatcaatttaacactctttagtggtttatttagaggtgtgatttattttattctttgcaaccaatgcctttgatcagctctgaaataacatacaagctgaaaataaaatggcaaaacaaactgctgctagcattyttatagtaagctttaggttttatagcaggaactgttatatttggtgcttttgaattacttatcaatacttagacattgagaattacagagcccaggaggaacagtagagaacattgccagttgccctgct

SEQ ID NO: 384320 - DNA, 581 bp, Homo sapiens
atcttagtaaattgaattttttttcatttcctcatcaataaggagtagctctttaaatcatttttaattttttaaaatgtctctagtttttttacatattaataatattttaattaattaataaataataatgttacagcttaggaaaatatgcatctgtttctttttttaccttgattatagtatttgtcatataaattacagtatttgtcatttaaatgacaaaagcattgtagaaaatcagaaagctcaaaaaaattaaaatatttattttttgaaacaaatctgttyggtaataatttacaatttacaaactttcctacaaataaagaaatgttttatgtcaggaaagaaagtttgtggcctaaattaatataaatacaaattttctagtaataaaatttattgattttttttaacatgaaagctggttttagtttcccttgagatctagaataccacttgggccaaaacttcatgattattttacttattcgttttttaaaaagtactgctacagtagctctttacaaagctgaagtttttgtatctaggtattcacattttaagaaacagtgcaa

SEQ ID NO: 384321 - DNA, 622 bp, Homo sapiens
catgttatttttccactcattttaatgcttttttattttaatgaagaccctcctactctctttagtttgaactacacaattcaccaatgcactgggttttgtctagtaatctcttcatgatttcacctatatgcactcctctctcccactgcagctcatgttcctgaggatcagagggtgtgtctttgatttagagcagctcctttgcaagaccctcatgtgaatttcatgtgattgacattttccctacttggtcaataatgaactatactcgtcctactgcctatatatttcctgtttttctgtaaattgtttaaggaaatacccacactctctcaaaccacaaaaaagatcagttgtccttactttgaggagggacactcctaccaggagctgttcactggcagctaaataacaggttcccaaataattcttgtcctaatatctacatagcactttatattatctcacagcattacaaccattctcagaagtagattttcttttttactatgaggaaattcaacttaaagagatttcctggcccaaatgtgttgggtatggaaggctaggacatgaatccaagtrttcttattctaaggttagtgttcatttcagcagg

SEQ ID NO: 384322 - DNA, 593 bp, Homo sapiens
gactcaagcaatcctcccgcctcggcctcccaaagtgttaagattacaggcgtgagccaccactcccagttgagttttcttaaaactcaattttactgggaaattacttacgttcaaaaactgaatccatttaaagtgtgcaattccatgagttctgacgattatagctgcccgagaaagcaccaccacccgaagatgcagcacattcctgtcaccccagaaagacccctgccctctgcagttcagcccaccttccaccgctgccagaggcagctcctcgcctgttgccccttgaggtttgttttgttgttgttgtcgtctttttgttttttggtttgggkttttttttgttttgttttgttttgccagaaatgtgtttgtttccacttctggcaagtagtaaaagatggctgccagagtgtaaagaactcttagggttacattgaaagaccctccagtccctatgtcattcacgattttatagtaatttaccaaagcttcggggagagctccaggtgctttgcctctttcatactcccaccgccaggtagggtcagggagggctgaaggccggtgggtagctctgagcattt

SEQ ID NO: 384323 - DNA, 593 bp, Homo sapiens
gactcaagcaatcctcccgcctcggcctcccaaagtgttaagattacaggcgtgagccaccactcccagttgagttttcttaaaactcaattttactgggaaattacttacgttcaaaaactgaatccatttaaagtgtgcaattccatgagttctgacgattatagctgcccgagaaagcaccaccacccgaagatgcagcacattcctgtcaccccagaaagacccctgccctctgcagttcagcccaccttccaccgctgccagaggcagctcctcgcctgttgccccttgaggtttgttttgttgttgttgtcgtctttttgttttttggtttggggttttttttgttttgttttgttttgccagaaatgtgtttgtttccacttctggcaagtagtaaaagatggctgccagagtgtaaagaactcttagggttacattgaaagaccctccagtccctatgtcattcacgattttatagtaatttaccaaagcttcsgggagagctccaggtgctttgcctctttcatactcccaccgccaggtagggtcagggagggctgaaggccggtgggtagctctgagcattt

SEQ ID NO: 384324 - DNA, 566 bp, Homo sapiens
tgcagtaaacttcatttatgttccaggaaggaggcttggacttcgagcaaaataatccagaataatattaaaaataaggattataatctacctccaggtctttcttgagtaattgtcagatacagacaaagaggaacaggttattttcacccacagaattcatgcacctctgaaaacaatatgaactgagtatyaacaccagcaataactatttgtattttggacatgttcaatgcatagaaattagagaagagaaacgtattacaatgaaacagtctatagccattaaaataaagcattctgtctaaaagttggcccgaactattctcctctagcctttttgcagcaactgccaaaacatctaggaggataatttagaaagtgaagccagagatgggctagagttgattcaagaccttatgaaataaacttcacagaatagagagaaagaaacacttgcacgctctaatcaagttgtagttatttgtatattacagagaatgtgaactctcgccatcttaaaaagaaaaatatatgatagactggattaagaaaatgtggcacat

SEQ ID NO: 384325 - DNA, 552 bp, Homo sapiens
tggcatgcatctgtcgttcaagctgtgtgggaggctaaggcaggaggattgcttgagtccgcccaggagttcaaggctgcagtgagcctcaaaaaaccaaaaaaaaaaaaaaaaamcaaaaaaattagaaacagactagggatatcagaccaaggaagaaagatagtgccccagtagacaataccagactggctgaggtctgtgttggttatctattgctgtataacaaattactgcaaaattagctgcttaaaggagcaaatatttattttcttatatgctgtctgagggttgggaatctgcgatgacccggctggatggtctgggccagggtttctcaggctgttggctgaggccatactctctgaattcttgacatcgggctggaggatccacttgcaagctcacttgcaaggcgttggcaggaggcttcctctccacacggcccccactgttggtttgctcacaacatggtttccccaagcagagacatctgagcatgagactgctagacagagaccaaaatgaaagcaacagtgtctttataatgga

SEQ ID NO: 384326 - DNA, 557 bp, Homo sapiens
cttcctagaaagtgtgtgcatgtgctgggccatagaagtggaaaagatttaaacatacagagacagaaaagatgagagaagaggygtttacagggaagaaatacagttatcagcaagaaaaccacccatgtgtttggggattattgaatggttgaattaaggacaaactgagttccccattttattaactcctgaaatatttattacctataccactaactcttatttgtagttgatatttatatccataccatatcatctcaccatatatacgattttacataaattatctaacaacctgagtagtaaaacagttcatggaaaatgaactgtagaaaaatgttacatggatgtgggtggtgtgtcttaaagatcacagataatttctaactgagtggcattacctttattaataataacacatgaaaagttaaggaaacttcagttctggatctgagcactgacttctctgtgaagctaagtgccatttatctctcaattagagcttttaggagaagaaatatctaagatgacagatggcaagatttaacaataat

SEQ ID NO: 384327 - DNA, 557 bp, Homo sapiens
cttcctagaaagtgtgtgcatgtgctgggccatagaagtggaaaagatttaaacatacagagacagaaaagatgagagaagaggtgtttacagggaagaaatacagttatcagcaagaaaaccacccatgtgtttggggattattgaatggttgrattaaggacaaactgagttccccattttattaactcctgaaatatttattacctataccactaactcttatttgtagttgatatttatatccataccatatcatctcaccatatatacgattttacataaattatctaacaacctgagtagtaaaacagttcatggaaaatgaactgtagaaaaatgttacatggatgtgggtggtgtgtcttaaagatcacagataatttctaactgagtggcattacctttattaataataacacatgaaaagttaaggaaacttcagttctggatctgagcactgacttctctgtgaagctaagtgccatttatctctcaattagagcttttaggagaagaaatatctaagatgacagatggcaagatttaacaataat

SEQ ID NO: 384328 - DNA, 557 bp, Homo sapiens
cttcctagaaagtgtgtgcatgtgctgggccatagaagtggaaaagatttaaacatacagagacagaaaagatgagagaagaggtgtttacagggaagaaatacagttatcagcaagaaaaccacccatgtgtttggggattattgaatggttgaattaaggacaaactgagttccccattttattaactcctgaaatakttattacctataccactaactcttatttgtagttgatatttatatccataccatatcatctcaccatatatacgattttacataaattatctaacaacctgagtagtaaaacagttcatggaaaatgaactgtagaaaaatgttacatggatgtgggtggtgtgtcttaaagatcacagataatttctaactgagtggcattacctttattaataataacacatgaaaagttaaggaaacttcagttctggatctgagcactgacttctctgtgaagctaagtgccatttatctctcaattagagcttttaggagaagaaatatctaagatgacagatggcaagatttaacaataat

SEQ ID NO: 384329 - DNA, 599 bp, Homo sapiens
tgtttggggattattgaatggttgaattaaggacaaactgagttccccattttattaactcctgaaatatttattacctataccactaactcttatttgtagttgatatttatatccataccatatcatctcaccatatatacgattttacataaattatctaacaacctgagtagtaaaacagttcayggaaaatgaactgtagaaaaatgttacatggatgtgggtggtgtgtcttaaagatcacagataatttctaactgagtggcattacctttattaataataacacatgaaaagttaaggaaacttcagttctggatctgagcactgacttctctgtgaagctaagtgccatttatctctcaattagagcttttaggagaagaaatatctaagatgacagatggcaagatttaacaataataattagaaaatctggatatagtaaatgcaactggagagaaggcagtagacatggaagagagaacaagatgatccaacataaggataacaggcattcctgatacagagaactaaaaacaagacaaaaaggtggtcaaacatatgatttttaaaaatacaggactgtctcctcc

SEQ ID NO: 384330 - DNA, 557 bp, Homo sapiens
cttcctagaaagtgtgtgcatgtgctgggccatagaagtggaaaagatttaaacatacagagacagaaaagatgagagaagaggtgtttacagggaagaaatacagttatcagcaagaaaaccacccatgtgtttggggattattgaatggttgaattaaggacaaactgagttccccattttattaactcctgaaatatttattacctataccactaactcttatttgtagttgatatttatatccataccatatcatctcaccatatatacgattttacataaattatctaacaacctgagtagtaaaacagttcatggaaaatgaactgtagaaaaatgttacatggatgtgggtggtgtgtcttaaagatcacagataatttctaactgagtrgcattacctttattaataataacacatgaaaagttaaggaaacttcagttctggatctgagcactgacttctctgtgaagctaagtgccatttatctctcaattagagcttttaggagaagaaatatctaagatgacagatggcaagatttaacaataat

SEQ ID NO: 384331 - DNA, 618 bp, Homo sapiens
gagttttcgttattttcccagccctgggctcagtagatatgattttgtaagagcttagacatttgaacaaggaaaaaaaagaaaatttgaacaaggaaatgagacataaatgcataaactgttaaataatacaaaatagcaaatgattaagtgctagaacagatactagggacaataattgtttaaatgttcagagaaagagaatactgaatgaattatctgaatatggtttaggggaagatgagacttgcagcrggctctaaaatatgagcaaggcaaattctgtgatttaatttgctgtgacagagaggtgagagccttctatgctggaggaagatgcttctctcatcttcctctctcttcttccagggtgagagcatctatccagggcaaataggatctcatctcagcaaggctaatctcagcaagagcccctcatcccacataaggttttcctcagttgtacagcctgagaaactcaattcatcagtgtgctttgacattaacacaaataaaatacagtgtattttttcattgccttaatctttgtggtttttaaatgtaactaacagccaaagcccaatagcacatccttctactgattaataaatgaacccc

SEQ ID NO: 384332 - DNA, 567 bp, Homo sapiens
catctatccagggcaaataggatctcatctcagcaaggctaatctcagcaagagcccctcatcccacataaggttttcctcagttgtacagcctgagaaactcaattcatcagtgtgctttgacattaacacaaataaaatacagtgtattttttcattgccttaatctttgtggtttttaaatgtaactaacagccaaagcccaatagcacatccttctactgattaataaatgaaccccatgtttgttttatagatatgtctgctaagtaataaatctgtgtcattaaattagggggaaaacagaatttggaaaagtacttttaatggttgttgtttaattaccccaatcagggtgttgcattataaggaaaatmcatttctcatagctgtgcaccattcttaattcagataatctgtgctcacaggtggacaaaaggaccgtttagatgtgaagcctggtgttgttctcccttttgacatccagcaacctggcatgatatctcaaagacgtgagatgaagagctgagccagggcagaggactctgatcataaaactgcatgatc

SEQ ID NO: 384333 - DNA, 558 bp, Homo sapiens
gatgagacaagctgatgtcctctttctgggaagaaaatccacctacggggagctggagggaaagagaaccctgtgttcttggctgcagcgatgtggagtggagtttccacattactgagcagggaggagggaagagagaacggccttggcgcacataccacagactcacctttcttaccaaattttcatagatttctcttaaatagatgtttctctacttgctctttttcttcagaactttttcagagactttaaatrgttgtcttttaatggcatgcatttgataaatgttagttaacttccccgcacctttgtttcctcacaaaaggctgaaaggatctctaaagtcacttctagctaacaattgttattttagtgtttcataatcattcactgccctagaaagacttctttgatcataccctattttttgttttgatggacttacggatcagctttttttctgtatagcaggtagagtcacagaacactacaacagatggtgaggaagtaggtttaataccttctctttcccacagttcagaaccttcacagccc

SEQ ID NO: 384334 - DNA, 461 bp, Homo sapiens
acactacaacagatggtgaggaagtaggtttaataccttctctttcccacagttcagaaccttcacagccctctaagtctttctgtttcaccaagctcctcagtgtatttccaaataaataatgactcaktgctcctgggctttctcaggagccatgctgtttggttatttattcagaatggcaaattctgaagaatctttatgaaccataatagctttccgtaagcatcttttgcctactccactactgtcagtttcctttacaacagtacaattagcacaactccttcctcaccattcagcggtttgttgacattataccaacgtctcaaagttatacttttgtgcattcgagttgctgatacaatttccctgcactctgatttagtggttttaagtcctggtcacacacctgtcctcatctctgctctctgcataaccactggactgatcagccatga

SEQ ID NO: 384335 - DNA, 604 bp, Homo sapiens
gttccaacaaaggacttcaaagtctacaagagctcaaaccaggtagctgtattacctgtcttacttccagatctaataattcaccaggtaataatttcaataatttaataatttaattaatttaataattatttaatttaataattaataattctgaggtaataatttttacctcagaatatcagaaagactaccagagattatggaccaggaatcttgcttcccacgaggttgcaattcaaggatccattatgactgraaatgaggaaagaggtagaaaatagaatatttataagcacctgatagaaatatggcctcacaaaacaaatccaattcaaagaaagaaaaaggagaggaacaaggatcatgtgagaatagagaaagaaaatactacatctgctgaaaagctaacattaaaagcaaaaaatctccaaaattttataataatttctaaaatatcacaaagcaatacttcctgccagatcaaaatgaaatcccttgtaatatatgccccatgattgctaatctctgtttatgacatttatctttatgagctcagagttcataagggagaaaggctaaaatactattcgcattatcttcc

SEQ ID NO: 384336 - DNA, 539 bp, Homo sapiens
caaaagaaaggttgatccagcctaaaatgtcaaaagtgccaaggttgagaaaccctggtctcctaatacagtcrtgtaaatgaaagacaaatagttccagtcaaattcgcatgatcatccattcactcattcgcaaacatttagtgaatttcccctattttccagtgtgttaggtactaagatgcaaagatgagatactcacaatccgtgcctttaagaatctgccactttcaacaagaatgacatcatatctgatatgaacattcagagcaaaaccagatgattcccagatgtgtgatcagggagcaccaagaaatggcagcatttaaatagacaggtattaatcacatcgaggagtggggagcactgagaagagggttaaggtaaggcacagctaggaaagagaaactggagaggcaattcattatgcagaaccggggcaaacccatggtacaggatcagagcaaacaatctggagtggaaaggatgagaggttacattggaagggcaaatgaagccagattgcatgacgtcaaaaa

SEQ ID NO: 384337 - DNA, 575 bp, Homo sapiens
atccaataatgcaggggacagctctcaaaagaaaggttgatccagcctaaaatgtcaaaagtgccaaggttgagaaaccctggtctcctaatacagtcgtgtaaatgaaagacaaatagttccagtcaaattcgcatgatcatccattcactcattcgcaaacatttagtgaatttcccctattttccagtgtgttaggtactaagatgcaaagatgagatactcacaatccgtgcctttaagaatctgccactttcaacaagaatgacatcatatctgatatgaacattcagagcaaaaccagatgattcccagatgtgygatcagggagcaccaagaaatggcagcatttaaatagacaggtattaatcacatcgaggagtggggagcactgagaagagggttaaggtaaggcacagctaggaaagagaaactggagaggcaattcattatgcagaaccggggcaaacccatggtacaggatcagagcaaacaatctggagtggaaaggatgagaggttacattggaagggcaaatgaagccagattgcatgacgtcaaaaagccaggctaag

SEQ ID NO: 384338 - DNA, 482 bp, Homo sapiens
agtttgtcattttgtctaagaagagataaaagcaaggtcgctgtgtcacccacaaaataccaaacaccccctctcccagccaaaacgagtgactgctactttaccaattacaattttatcctctttctaattgtccctctctacacataagatttattgagatacccaatcacagaattgttgtactcctgaaagtacccaattcagggtatgcccctgcttccttcgacacctcctaaatcacccaaccaaagcccagatcttataataggttgtcacacatcttactgagacacgccataattacgctggtgtatgtcttccctgcctgcaacaagagataagcccaacttgttcaactctaagtgtcttcctgrtagcctttggctggagggcactgccacctctgcgccatatacaactttccactccttgaaatcctcttcttccttggcctgtagacatcattctctcctggttct

SEQ ID NO: 384339 - DNA, 484 bp, Homo sapiens
ctaaaattcctattgaaagaacagactagaaaaatgtctgcctactggcataggaaaacagcaaggaattttgtctgtttytactgggctctgaagagggggaaaaaagtcttacctcaaaattcaaagtaagatttatgtgcctaatttcggtttgggatttaaggttgaggttcaaattttaagaaattaacataaaaattgttcaggagctagtgttatttgaataaagcaaaagtaaaatcctctctggaaggaaggttctaggtacaatggagcaagcacattccactctatcttttccactgaaagtagcaataaaacctggagagatgggtagtgtagttatttaaggatattcatagttatttactttgaaaagtaaatagaaacaggcatactgatgaagactgaatttgaatgacagcaaaactggcagattaaaacaagacccagagtcttattaaaaaaaaaaaaaaaaacc

SEQ ID NO: 384340 - DNA, 570 bp, Homo sapiens
tttggcctcctaaagtggtggcattacaggcatgagccaccatgcctggccaatgctaaaattcctattgaaagaacagactagaaaaatgtctgcctactggcataggaaaacagcaaggaattttgtctgtttctactgggctctgaagagggggaaaaaagtcttacctcaaaattcaaagtaagatttatgtgcctaatttcggtttgggatttaaggttgaggttcaaattttaagaaattaacataaaaattgttcaggagctagtgttatttgaataaagcaaaagtaaaatcctctctggaaggaaggttytaggtacaatggagcaagcacattccactctatcttttccactgaaagtagcaataaaacctggagagatgggtagtgtagttatttaaggatattcatagttatttactttgaaaagtaaatagaaacaggcatactgatgaagactgaatttgaatgacagcaaaactggcagattaaaacaagacccagagtcttattaaaaaaaaaaaaaaaaacctaatgaaaatgttcaggatacaaccccaaat

SEQ ID NO: 384341 - DNA, 567 bp, Homo sapiens
gctgtctttcagttttcgtactttgcccaccaaagagtgttagagtaaactggccattcttcagatacctgctatatacctcaaagtacctttaagggaactgaaagaacttcactagtctgtttccatcccggttcagttggtggagagttgagaaaggaactcaggtgtgargactttctctcggtccagttctagttaatctagctggcaaaaacaaaacaaaacaaaaacaaaaaaataaaaacaggccctggaaacgtgtgtttttaattttggggtgtagggagtgatggtataaacaaaatatttcaaagtgggggtagtgcagttagagaaataaatgttaaagactaggtacttgggcctattaagcattattagcattaggaatctaaaaaaccttttattctttttacttaaatgaagacttagtcaaaaataaatacacagtctgctatttcaggtttcttattatttattcaaaagaaacgagttgtgcacaggagaattaaatgctttacagacaaggaaaactgctagaaccaactcccctgtcattgccat

SEQ ID NO: 384342 - DNA, 601 bp, Homo sapiens
taggctccatccagatatctatgtcagcccaagagtaacccttttctatttatagttcaatgaattgtagtaacaaaaagttaggttctgtgcttttaaaagttcttttttttcttttgtagactatgccagttgcaatggctttattaagagatgttcataatctttgtcctaaagaagtcttaacrtttattttagacttaatcaagtacaatgacaacaggaaaaataaggtgaggtacttttatttttaaatcttctacaacagttgtcttagataattttcttaatgaatattacagaactacccaatggtattttgtttctaaataaatatttagtctataaaaatcatcgtacttgatgactgtccacagtccttgacatttctagagatagaggcatgtaaacacgatttattagaataaccagtggataaaaaacaatattagtttttaaatgttcttcaaacctcttgtagtgtggagagagtagtacatcagatttggggtagccagttaaaacttgataaaacctgacagcacaattttatttacattgatttattttttgttcacctaatgatacctagaaaagagtt

SEQ ID NO: 384343 - DNA, 532 bp, Homo sapiens
ttctatctgcaaaaggcgacctccctgattagatcatcacaagtgatgggggaaggtgggaagactccaagaaaaaaaggtaatatcaggtggaaagtctatcacttgtagataatggtaacgagcttaaattttatattagtatattctaagaaatatataggtttygacatattctgctttgcactttataaaatcattttgtttgctttgtggattaaaaaaaggctatactaagggaaacaattaggtgaaagtaggaaaaacaataaaaggctattgaattgctctagtttgggagaaaagagatgctgtcaaattatttgttgacacatctttgggaacagattttgactggttcctgggaatacagagacagaaaaataaaactcacacttaaaaaaattattctaggctttattcctctgttacatgggtgtattgcatagtggtgaagtttgggcttctcacgaatctacgtcccaaacagtgaatatggtacctcataggtagtttttccaccctcacacct

SEQ ID NO: 384344 - DNA, 584 bp, Homo sapiens
ctctgttgtcattggtggtwttgtctttgtgctagagacatagtatgaagctaatgtcaccctttgtgtgggcaaaggaaagggatgtccgtgtatgcagtggggtttggaaggtaaggcatcaggggcagagactttcctgaaagtagtgacttgctgggagagggattgtagtcataccccctatgctgtctctttgttctcttccagcaacatacagagtgctctcattccatctcagagtagtcttactcatctagtgtcagtgtgtccaatatagatccatgacatttggggcagacactgccctaacacaaattgtaattgcagccatttgctatcactagatgaagctcattaccttatgcaagtccatccagttacaaaaagaaaatatctttggcctttgtaaagagatgagaatatttgctcacaagtgatcctccgtgatctatttaggaatcttatcaacagttgtgactgttatgtgaaatgatatctgtgggtgcacaactggaacaataggaataattattttttcttctattagctcctgtaatgagcagttttctccagaaagcaga

SEQ ID NO: 384345 - DNA, 584 bp, Homo sapiens
ctctgttgtcattggtggtattgtctttgtgctagagacatagtatgaagctaatgtcaccctttgtgtgggcaaaggaaagggatgtccgtgtatgcagtggggtttggaaggtaaggcatcaggrgcagagactttcctgaaagtagtgacttgctgggagagggattgtagtcataccccctatgctgtctctttgttctcttccagcaacatacagagtgctctcattccatctcagagtagtcttactcatctagtgtcagtgtgtccaatatagatccatgacatttggggcagacactgccctaacacaaattgtaattgcagccatttgctatcactagatgaagctcattaccttatgcaagtccatccagttacaaaaagaaaatatctttggcctttgtaaagagatgagaatatttgctcacaagtgatcctccgtgatctatttaggaatcttatcaacagttgtgactgttatgtgaaatgatatctgtgggtgcacaactggaacaataggaataattattttttcttctattagctcctgtaatgagcagttttctccagaaagcaga

SEQ ID NO: 384346 - DNA, 584 bp, Homo sapiens
ctctgttgtcattggtggtattgtctttgtgctagagacatagtatgaagctaatgtcaccctttgtgtgggcaaaggaaagggatgtccgtgtatgcagtggggtttggaaggtaaggcatcaggggcagagactttcctgaaagtagtgacttgctgggagagggattgtrgtcataccccctatgctgtctctttgttctcttccagcaacatacagagtgctctcattccatctcagagtagtcttactcatctagtgtcagtgtgtccaatatagatccatgacatttggggcagacactgccctaacacaaattgtaattgcagccatttgctatcactagatgaagctcattaccttatgcaagtccatccagttacaaaaagaaaatatctttggcctttgtaaagagatgagaatatttgctcacaagtgatcctccgtgatctatttaggaatcttatcaacagttgtgactgttatgtgaaatgatatctgtgggtgcacaactggaacaataggaataattattttttcttctattagctcctgtaatgagcagttttctccagaaagcaga

SEQ ID NO: 384347 - DNA, 526 bp, Homo sapiens
acaaaggaccctatgatctattctaatagtgcgttcatgaacagttcaatccatgggttatatttgagcaactagtgctcaaatgaataataagaggggtaagtgactgataataactctaaggttaagagatgactttgatgtctttaatatttgtcactttttgtttatgtcatgccaccctctctcaaacttacataattatatggttctatacagaataacaccctatagattgttactcattctcatccttaggcaggagtaatggcaacaagaggtccaggtcccattcctagacttttgcatctgaaccatccacttgttcccttacacacacactgtacacatgcactaataacctgggctttacaagctcctttgatccaacgtttaaagaacaattcatgactcattcctaagtgaaatttttatgtctctctatggagtagatgggtgcagaytcttgaacaagatagacatcagatggaggatgggagtactttttgtgctgcattatgatgtg

SEQ ID NO: 384348 - DNA, 564 bp, Homo sapiens
ccttcattaatcagacaaagaatcacctagaaattcttaagatgcagattctgattttgcaggtgtgagtggggcctgagattctgcatgtttaacaagctcacaggtgaagtccctgttgctgctaggtcctgtattgagtagcaaggcctatggctaacagtaaatgttgtggygggcaaagaatatgttgcaccgtgtttttctcatggtgcaatgtattctttgtcttgctgatttatcttgtcttggtgcttggttgactttattgcctaatgcctacagcaagcatcagtaatttatatctacattaatgcaatgaatggcctactaactgttctccctgcaccattattgtgccttttccaaaaataaattactattactattattgttattgtttttattcatgctgtgtgccaggtactcttttaaacaccttgtaagtattgactcattaattccttctactgtcacattaatcaacttccaaaatattattcatatcctattactcttatcctctgaacttgtcagtagttgctatagttattttagacctgg

SEQ ID NO: 384349 - DNA, 564 bp, Homo sapiens
ccttcattaatcagacaaagaatcacctagaaattcttaagatgcagattctgattttgcaggtgtgagtggggcctgagattctgcatgtttaacaagctcacaggtgaagtccctgttgctgctaggtcctgtattgagtagcaaggcctatggctaacagtaaatgttgtggtgggcaaagaatatgttgcaccgtgtttttctcatggtgcaatgtattctttgtcttgctgatttatcttgtcttggtgcttggttgactttattgcctaatgcctacagcaagcatyagtaatttatatctacattaatgcaatgaatggcctactaactgttctccctgcaccattattgtgccttttccaaaaataaattactattactattattgttattgtttttattcatgctgtgtgccaggtactcttttaaacaccttgtaagtattgactcattaattccttctactgtcacattaatcaacttccaaaatattattcatatcctattactcttatcctctgaacttgtcagtagttgctatagttattttagacctgg

SEQ ID NO: 384350 - DNA, 661 bp, Homo sapiens
gaggcaagatacctggattgtgttctctcctttgttttctatgatatctttctgctgcccttattacaacattcattgttatgtaataacaacaactcttatgtagttgcttatttattccaactcgattctgagttacctaaggtagagaccttctttttacattgctacattcaaatayttcacaaagtgtctggtatttatagattctcagtcatatttattacacaaataaacataatcctaactcaacattggcttttccttggcttacttcacagccttaggatttccaaagatacttcatgaaatatctggaagattttatagccacttttttcctaattactaataatacaactcttgcttaggcctggaaatttccattgcaggggcttattcaaaacatctcatttccctatagtgcacaaaatatggaactatataatgccatcacaatatttcgggaaaacaataaaaattgttcttctaatagttggtcataaattaaataataaatcaatatataatgaataagatagagatatgcaaatatacctttaaaaaaaacttccaattaaattctcttataagggtaactaaatacattgacatagctaagaaagacaacatttgctagaaggagtattggtccccaaag

SEQ ID NO: 384351 - DNA, 661 bp, Homo sapiens
gaggcaagatacctggattgtgttctctcctttgttttctatgatatctttctgctgcccttattacaacattcattgttatgtaataacaacaactcttatgtagttgcttatttattccaactcgattctgagttacctaaggtagagaccttctttttacattgctacattcaaatacttcacaaagtgtctggtatttatagattctcagtcatatttrttacacaaataaacataatcctaactcaacattggcttttccttggcttacttcacagccttaggatttccaaagatacttcatgaaatatctggaagattttatagccacttttttcctaattactaataatacaactcttgcttaggcctggaaatttccattgcaggggcttattcaaaacatctcatttccctatagtgcacaaaatatggaactatataatgccatcacaatatttcgggaaaacaataaaaattgttcttctaatagttggtcataaattaaataataaatcaatatataatgaataagatagagatatgcaaatatacctttaaaaaaaacttccaattaaattctcttataagggtaactaaatacattgacatagctaagaaagacaacatttgctagaaggagtattggtccccaaag

SEQ ID NO: 384352 - DNA, 661 bp, Homo sapiens
gaggcaagatacctggattgtgttctctcctttgttttctatgatatctttctgctgcccttattacaacattcattgttatgtaataacaacaactcttatgtagttgcttatttattccaactcgattctgagttacctaaggtagagaccttctttttacattgctacattcaaatacttcacaaagtgtctggtatttatagattctcagtcatatttattacacaaataaacataatcctaactcaacattggcttttccttggcttacttcacagccttaggatttccaaagatacttcatgaaatatctggaagattttatagccacttttttcctaattactaataatacaactcttgcttaggcctggaaatttccattgcaggggcttattcaaaacatctcatttccctatagtgcacaaaatatggaactatataatgccatcacaatatttcgggaaaacaataaaaattgttcttctaatagttggtcataaattaaataataaatcaatatataatgaataaratagagatatgcaaatatacctttaaaaaaaacttccaattaaattctcttataagggtaactaaatacattgacatagctaagaaagacaacatttgctagaaggagtattggtccccaaag

SEQ ID NO: 384353 - DNA, 661 bp, Homo sapiens
gaggcaagatacctggattgtgttctctcctttgttttctatgatatctttctgctgcccttattacaacattcattgttatgtaataacaacaactcttatgtagttgcttatttattccaactcgattctgagttacctaaggtagagaccttctttttacattgctacattcaaatacttcacaaagtgtctggtatttatagattctcagtcatatttattacacaaataaacataatcctaactcaacattggcttttccttggcttacttcacagccttaggatttccaaagatacttcatgaaatatctggaagattttatagccacttttttcctaattactaataatacaactcttgcttaggcctggaaatttccattgcaggggcttattcaaaacatctcatttccctatagtgcacaaaatatggaactatataatgccatcacaatatttcgggaaaacaataaaaattgttcttctaatagttggtcataaattaaataataaatcaatatataatgaataagatagagatatgcaaatatacctttaaaaaaaacttccaattaaattctmttataagggtaactaaatacattgacatagctaagaaagacaacatttgctagaaggagtattggtccccaaag

SEQ ID NO: 384354 - DNA, 566 bp, Homo sapiens
caaagctttcatgaatttactgaggcccaggtttctgtataaataaagagaaaggctggaaggtaacaagttaagtcagttttcacctaaacataaatgaggtagaggaagagaatgcaggatctgtccttggagatttgaaggacttaaatgtttagcactaacatattgaacctaattctyagcttcagaggtagtgagggcaatcacccaagagatcaatgcttgctctcccctgaggatgaatacactcctgcctttcctattccataccccaaaccttatttctgaccaactgcccaagacagagaatagttgttattttgttcttctccttttgccgtgaaaaattcatttaggacataacatcataattctccactcccactcatttttcttccattgtgaaaatcaataacctatggggctggattttatgaaagctgcagcagttagaagaaaataaagaaatgaatcttttgattcattatatttcccacacccaccttcttactgcctttgtgccagacagaagatactcaggaaacattaggtatggatgccat

SEQ ID NO: 384355 - DNA, 566 bp, Homo sapiens
caaagctttcatgaatttactgaggcccaggtttctgtataaataaagagaaaggctggaaggtaacaagttaagtcagttttcacctaaacataaatgaggtagaggaagagaatgcaggatctgtccttggagatttgaaggacttaaatgtttagcactaacatattgaacctaattcttagcttcagaggtagtragggcaatcacccaagagatcaatgcttgctctcccctgaggatgaatacactcctgcctttcctattccataccccaaaccttatttctgaccaactgcccaagacagagaatagttgttattttgttcttctccttttgccgtgaaaaattcatttaggacataacatcataattctccactcccactcatttttcttccattgtgaaaatcaataacctatggggctggattttatgaaagctgcagcagttagaagaaaataaagaaatgaatcttttgattcattatatttcccacacccaccttcttactgcctttgtgccagacagaagatactcaggaaacattaggtatggatgccat

SEQ ID NO: 384356 - DNA, 566 bp, Homo sapiens
caaagctttcatgaatttactgaggcccaggtttctgtataaataaagagaaaggctggaaggtaacaagttaagtcagttttcacctaaacataaatgaggtagaggaagagaatgcaggatctgtccttggagatttgaaggacttaaatgtttagcactaacatattgaacctaattcttagcttcagaggtagtgagggcaatcacccaagagatcaaygcttgctctcccctgaggatgaatacactcctgcctttcctattccataccccaaaccttatttctgaccaactgcccaagacagagaatagttgttattttgttcttctccttttgccgtgaaaaattcatttaggacataacatcataattctccactcccactcatttttcttccattgtgaaaatcaataacctatggggctggattttatgaaagctgcagcagttagaagaaaataaagaaatgaatcttttgattcattatatttcccacacccaccttcttactgcctttgtgccagacagaagatactcaggaaacattaggtatggatgccat

SEQ ID NO: 384357 - DNA, 566 bp, Homo sapiens
caaagctttcatgaatttactgaggcccaggtttctgtataaataaagagaaaggctggaaggtaacaagttaagtcagttttcacctaaacataaatgaggtagaggaagagaatgcaggatctgtccttggagatttgaaggacttaaatgtttagcactaacatattgaacctaattcttagcttcagaggtagtgagggcaatcacccaagagatcaatgcttgctctcccctgaggatgaatacactcctgcctttcctattccataccccaaaccttatttctgaccaactgcccaagacagagaatagttgttattttgttcttctccttttgccgtgaaaaattcatttaggacataacatcataattctccactcccactcatttttcttccattgtgaaaatcaataacctatggggctggattttatgaaagctgcagcagttakaagaaaataaagaaatgaatcttttgattcattatatttcccacacccaccttcttactgcctttgtgccagacagaagatactcaggaaacattaggtatggatgccat

SEQ ID NO: 384358 - DNA, 590 bp, Homo sapiens
gactgagaagtttctccttcatcattgttgataaaatcataacatctatagcaggccaccaatggagtgggagacaagttgttcaattgactatatcattagtgtaattgttaagatagataattttgccttaactgctatgctgaagccataaaaaggatgtcattttattaaaacaatgtcattttccragatgaagaactacattaattctgttgcatttagtaacacacaatgttgttaccgtaacaccagtggttcagtctaagacccattgctcatcacagaaaaagccaatcactgagacaatgaatatcaccagggaagaaaggctttattcaggagatgtcagctggagagaccggagccaaacctcaaatccctctctcctccgcgaccaaagttagggagttatatagcagggaaggaatgtagctatgtgcaggactgttcagtaagaagcaggtgacactttgggaggccaaggaggatgaatcacctgaggtcaggagttcaagaccagcctgggcaacatggtgaaaccctgtctctactaaaattacaaacattagttgggcgtggtggcatgt

SEQ ID NO: 384359 - DNA, 578 bp, Homo sapiens
gaagaaaaacagtggattatgttggcatgcaattacggaaacaacagtaagtatgaaagttagtaaacctggagagaagctgctaagtactcacttccccaagtctcagttccaggctggttgaagcagaatgtttttgaaaatctagacattacatcatgattccccattctctctctcattctaataattgtgttaggattttcctttttataaacacaagccctcagactttggggttaaccacagtatgatttaacaagggtaaaatagaaagagataaataacatatttttcctctcatctagtatatcaaattttgataattttgtagactttttctatatttgtcatctatacacaaattatctgcaatacactatttggaatatcaaaaaattagaaatccctatcaccccaaaaaataatttgttagaaaaagcagwgacttctcagaaaaagagaaaagttaaatctatcttttgcatttactaaacatgttcctttcttccacaccctcatgctgttatcattgtcaggtggttgcattccaggttgaggaggcagttgtaaatatt

SEQ ID NO: 384360 - DNA, 605 bp, Homo sapiens
atttgaaaagttactgtaaatacaaagtgtttggttaaggctaactttgttgtatttaaatttttaaagaccaaaaaataaaaatagtacctaagtcatatattttcatgtctggaggatgactcatatgtcacttagtttcaccttctactattatccctgataactcactagtacccctagctagtcttagcattctgcagtgatgagaaaccccatccccattaaggaggtgcagtgaaagtggttttaaattgcacagtattttgtttctcctttcttgacactgagtttattcagtcattcatcagaccttgattagtgcctcttcagcagcagggctttctcttagcatgagaattcaaacctaatgagttttaactaatagatggttcsatgacagtttcaacattgacaacacttcctgtctacatctacctcttctgtacaagggtcttaatggtttttagccatgaagaatcttctgtctaaagagatctcaagctcagagtaatatcataggattgagattaaagcaatctctaccataatacacttcaagacatattcattcaatagaatgccaggacagaaagacaaatatt

SEQ ID NO: 384361 - DNA, 593 bp, Homo sapiens
accttctgttcctctacaaaatcaaacacatttttgcacacatcacagtttgaatgtgctttttcctctaaggtagagagtccaaaatcacagggcagtgttagttgaaatgacttggacatgaatttaaagtataaagtaccatctgwttcaaacagttaggaaaaagataatgggagagacactttagaagatagatggttattggaaaacaacatttggttgaggaattactaagacagcacactcaggtcatttataatccacccagtgtctgatgacaaaaaagagaagaaaatggcatgaaaactgagaaatggtgttattttcctgccccatgaatttagctcaggaattaaagtctgttgtattacatctagaataaacaccacaaggtatccataggtatcattcatgagtgattatcaaataagactgagagcaatgcaacaggatgccctctgaggtccagagcccctgtcctctgacagcatgaaatcagtcttcacagtgttagttctggacttcaggcttggagccgccacattttaggagacagtgttcccaatgagaggactttagcagaagatcaa

SEQ ID NO: 384362 - DNA, 488 bp, Homo sapiens
cctaatactcttaaacttatasgtcttggattattgtgtagtgaaaagctaatattcatttaccataattgacagtttattgatgttttcagttatgtaaatccagcatgtagccatggataaaacaggaaattgagcactgatcatttttctcagaactgttttccaaagagactttaatttaaccctttggaggtgggaaaagtgtaaaagaaattctgaagtcagtggcttgagtaagacacaggattctgtcttaaaatggaatcttaaagcaggaggctataaatatgaatgaagaatataagaatcagattgaatacacctgaacttggataatgttccattgtagaggctttttaaacatctgagaggaggaatacactgggctgacaatcaggtgccatccaaatgaggccacgtcatgcagagctctaggcaagcaaagaaaggggagtggattcttcagttacattgcccatcacctt

SEQ ID NO: 384363 - DNA, 518 bp, Homo sapiens
agtaagtattctgttcaaatatagaaagtgaccacaaattctttgatgttcctctcatcaaagaagttctttctgacggtggctcacacctgtaatcccaacactttgggaggcccaggtgggcacatcrcttgaggtcaggagttgaaggtcagcctggccaacatagtgaaaccttgtctccactaaaaatacaaaaattacctaggcatggtggtgcacacgtgtaatccccagctactttggaggttgggacaggagaattacttgaacccaggaggcagaggttgcagtgagccgagattgtgccactgcactccagcctgggtgacagagtgagtgagactctgtttaaaaaaaaaacaaaaaacaaaaaaaaaaaaacctatttctttctccacccattgaatattgactattaatttatccttatgaatttctttggccagtgggaaactagaaaacatgatacaagcaaaagtttgaaaaggtgtttgttttgttttgtttttgatcat

SEQ ID NO: 384364 - DNA, 511 bp, Homo sapiens
gctaagcccttcgggggcaagttattttagtaagaaacccattttgtagaatttaataaattctaggttttgtcacatgctttttttcctttctattttttccctgttttcataaaaaaaaaaaaaaaaaaaaaaaaaaaaaaaaaaaaggcttttttatttttagaggacaaatggaaaagtctctctctttccatgactcagccaaaaaagtttgaaggattatggtgttttacaaggccaratgtgaggcatcagggatggaaagcttggtgaggtgggggcttggggagggatgcctactgcctcacatcctttcaggctaaggaaaaaatgtatttggcatccaaagtgcatgacaaatttgtgtaacttcacatacatcctactggtagggacaagagaagatgtctaatagtgagacatagagtcagcaaggtaggcaaaacctggtcacgagtatttttatctagctacataaaggatttagattttgttttataagttgtgc

SEQ ID NO: 384365 - DNA, 511 bp, Homo sapiens
gctaagcccttcgggggcaagttattttagtaagaaacccattttgtagaatttaataaattctaggttttgtcacatgctttttttcctttctattttttccctgttttcataaaaaaaaaaaaaaaaaaaaaaaaaaaaaaaaaaaaggcttttttatttttagaggacaaatggaaaagtctctctctttccatgactcagccaaaaaagtttgaaggattatggtgttttacaaggccaaatgtgaggcatcagggatggaaagcttggtgaggtgggggcttggggagggatgcctactgcctcacatcctttcaggctaaggaaaraatgtatttggcatccaaagtgcatgacaaatttgtgtaacttcacatacatcctactggtagggacaagagaagatgtctaatagtgagacatagagtcagcaaggtaggcaaaacctggtcacgagtatttttatctagctacataaaggatttagattttgttttataagttgtgc

SEQ ID NO: 384366 - DNA, 585 bp, Homo sapiens
tgtgctattagtgtaaatacctcattttaatgacaatataaaaaatgtgaaatatatcattaatgatttttactttgatcacagtggaaataaaacattttgaatatatattatataaaatatgtcataagaattaactttgcctgtctcttttcactttttattttttttcttttgagatggagtctcactctgccactcaggctggagtgcaatggtgcaatctcggctcactgcaacctcygccttccaggttcaagcgattctcccacctcaacctcccaagtagctgggattgcaggcacccaccatcatgcctggctaatttttgtatttttgtagagatggggtctcactacgttggccaggctggtcttgaacttctgacctcaggtgatcttccctcctcagcttcccaaagtgctgggatcacagatgtgaggcaccgcacctggcctctttttacttttttaatgtggctatgaacagtaggatattaaaggaaatttatcatgaggtatgtggctcatatttgtgccttgcattttctttctattgaataggtgttctaaaagaaaggatatg

SEQ ID NO: 384367 - DNA, 588 bp, Homo sapiens
tgtggctcatatttgtgccttgcattttctttctattgaataggtgttctaaaagaaaggayatgcatatagagatgcctgctattacattgtctatcatgcaggcattttagcatgcaactaaagtatttatcaatgagagaatggctgtgaatataatgatattgatatattgaatggtatacagacaatgggaatcgtaatttaatgactgcagcaatatgaaaccctgtagcatgcatatataaatgagaaagtagaaagagaacttgtatgtaaaataggtatagaactttttaaaaatatgtatgtgaacagaaaaaaactgaaagaaaatataaataataatacttcttataaagtaaggtttgggaagagttgcttttcttttttaaaagccccattattggtattatactatcgttttcacaagtaaaacaaatggagtaaaaagataaaactggtatagaaaggcgttttaaccacaatcgaatcttctgggttaggagttttcaagaatcctgcaagcccgggtagccaatctttcctgccagggagcaattggtgcttctggtattggaatgcagt

SEQ ID NO: 384368 - DNA, 554 bp, Homo sapiens
actgaaggactttatctctgagtcaagcaagaaggggcatttcctgaccccccctggcagcctgctggataccatgtgacactgtagttttcccatccaagtggattcttctaaattaagctgagatatcctagatggccacctattttcagaaaatgcaataatttatgtgtagaacatgattttggtgctttagtgaagaaaatttattgttattcattattttctagagccacatagttttatttacacaaatcttgggttattgccacacaaaccattctctttatgggcctcagaccttaaatcatcaccatttaagataactttcaagaaattagagtcgaatgtgaatattattactgtacagatatttggcttaayaggaaaattctgaaaacattttaatgagtttcaagtacatttgcctttttttttctctctctctctctgagaaaaaaaaaaaatccatctcttaaggcctacttgaccctgtgagtaaagcaaaaatttcagtatgcaacctggaaatcattgtaatggccacagcagtg

SEQ ID NO: 384369 - DNA, 562 bp, Homo sapiens
gagtgaatgcgtaggttctgtgtacttttcctaccatgtcattatttctcattattcttttattgtctcctgtgtcctgtcygtagataccttgatgtcagggtcaatggttgcccttttgcatttttcctcattaaagtagaacccaatgcaaggaacatgacacatatttcctgtccatgagaggtagctgagtatgatatgcaatttttcagggttaacttctcaaactcttgggtctttagaaagtggtagtggtagcatgctcccagctgggttcacagcttgtaacagcaaatatcccaatggggtcccatactgcagagaggattctgagacccgttcttaaagaccatatcatctgtagtgacttccttattcccaggtagtactgtacccttggaggtctcttgacacctgctcttactgtactatctctaggtgaactagtctttaaatactcaaggtttggtagggatgcaatagtcattcattctttctattcatagaagaataattcattgagtacctactaagtgcctggaactacccaaagtgtttg

SEQ ID NO: 384370 - DNA, 615 bp, Homo sapiens
taattttgattaagcatacttcatgtggataatgagaagtggaaatttgaaagatagaattcctttgtgcaaggtttacagccatcattcaatgaacacgatgattgcttttatgttagaagaggaaaaaagaggaatcaagaatttaagcgccatcaaaataagcactgtgtcatatctcacccacctccctggcttgcacagggcaaagcctgcatcagacacttgccaaaatgctcatggataattgcgaggccagggttgcaagtctgggctttcttgttctgtgatcccatacttaccatagtgatgcaaaaggagggctgtggatggcttgaaggtattaatgttcttgttttatttgataaacatttcttaaaaagctaggaattgagggtcygtttgggctaaatgcacaatagttaatttgaagaagttcaaatccttggatcaagccagaacaatggtgtaactatgtacactgctaatttctcagtcttaattttattgcagtagaaggacactttgaaagttaacagacatgatgccgaattctctaagtaattcaatgtttttaaaaggcaaatctgttaaaaatctgattaatattctgct

SEQ ID NO: 384371 - DNA, 505 bp, Homo sapiens
tccttcaggtaaaatggagtcatggctccctaatatcaagccaaatgagtcgttatttccaagcagagaactcaggggctctacgatctggtcctgctccccctccatccatgtgacacttccttacagttcctaaagcactctggactgactcacattctgtcctttgtctgtgtggctyctcttcctttcctgtctagtcattaagtttaaattcaggcttcatctctcctagaagtaaaagcaggaattaagtccaagtagagttcgtggtctggctctgtctcatgaattggtaagctagtattccccatgtaacatacacttaccatcattcataatcaaggaacaggagagttgcagagaaggcttaataaagaaaatgttgatgttcagatgtctagaatttagagagtgtgtgttgcaccagtgtttaagattccattcattagagggagaggctacaggtaaaatataaagaagaaaatccatgcaggacattgtg

SEQ ID NO: 384372 - DNA, 440 bp, Homo sapiens
ttctgtaactatggaaatgttgagataagttttaatattgaaaaaaggcgatttactttcactttgaagcattgtttgtgtcttttgtatctaattccagaattatttaggctttccttgttgccatgttaccgaagtgttcctayagtatgtgtgcatcaatgatagatctagaaattgtgtttggaaaacaaaaatcaataaaaattgttttatttatattaatagttgtaaataataaatattcttcttattgtctaaaatttcaccatattgcgaaaagaaaccagggtggttagatatggagagttggcagaatccattcatgtctggggaagtaggtgagagttttggttttcactagataccatgattgtgttgtctagagtcataaacatagttctgcctttggttttgcaactagagctaaaacttctgct

SEQ ID NO: 384373 - DNA, 643 bp, Homo sapiens
tccagttgatatctttaagcttctgtaggcagaaaatacttcagagcttgagtgcatgacatacaaatggtctctgatgttatttttcaacttattttttaactttatgatggtacaaaagtgatacatattcaatagaaaccatactttgaattttgatcctttccagggatactatgctatgatggggtgctattctccctctctctcttttgctgtctccatgctggacactggcagtgagccacagctcccagtcagccacacattcatgagggtaaacaactgayacagccattctgtttttcattttcagtccagtattcaataagatacatgagatattcagcactttgttataaaaaaggctttgtgttagataattttgcccaactacaggccaatgtattgttctgagcatatttaagctaggctgggctgagctatgctgtttagtaggttatctgtattcaatgcatttttgacttaagatattttcaccttacaataggtttattgaaatgtaaccccatcataagtcaaggagcatctatgcttcaaacagtcctgggcaagaaagagttgaactttgctctacacccccactatattcttgcctcctagtatcttggctatgtctact

SEQ ID NO: 384374 - DNA, 612 bp, Homo sapiens
ttgttatttctgttttctcttgctcatgattgttaattttatgatttaataactttgtattgtgaatacgtttcttggtgctccagctgtgaatatttgttgacatgagatctatgtttaaaatatgttattccagagaggataatcatttgcctttgactaatgcctgaagtactagcaatttagaaccagtttaaattayatttttggtgggaagggggttgggaggcacagaaagtatgaattataagcctcagaactcgagagaagtcttgtgagttggaattctcattagatttttttacaataattattatttagacacagtaccaacaggggtagcagtccacacatttcccactgtagggtgcacttatgctttctttcagtcttctgagaaagctggccctcagtccacctagatccatgtagttgctccaactttccatgtgttagatcatcaagaataagtagaacttcctcaagcaaaatcgattcttgctttctcctgatttgggctttcttatatttcataagctataaaacacctttttaacttttcttttagctcaacaatgcattgagaaatatacattcaggtgtgtcttacta

SEQ ID NO: 384375 - DNA, 603 bp, Homo sapiens
tggctcaggctgctttcatgcttagaaattgagattctctgtgactgcagctttgcaracatcggcattatgtagccaatacttgatcttcttctcatgatctttgtctcatgagattggactgtgctatctgtactcttacctgttgatgaaggccatgtcataatcagattgatgggccaagcccaaaacgccatctgtagtagcctcattcattaaataataaatactaccacttcactaaacaatgtgtttcttggattcctctttgggtatcataatgtccaaccagatcaatttttgtctacctccttgtcctcctttctgagtttcctttctattggcccatcatgacaatttctagatattgcctatataatggcatgatgtctcatattttaatctacaggcagagtaagaagcaaaaagcagtttaatgcctcagccattggaggtacgtcatagcagtcaagaaggtagcaacactggaatcagacctggcttagatacctggtgctgccctataccctctacataaacttaagccatcactcattctttttatttggtcaagtctaacctgagtatacaaatatcaaattc

SEQ ID NO: 384376 - DNA, 277 bp, Homo sapiens
ataaccagtttgatagattgcaaaaatggccacaaattctctccgtccctgtacatttgatcctttgcaaagtgcctcttaagcttctcccatccaaggtgtaatgagtttttctgttcatatagtctgctttgtgatatcctttgtcaatgggaaaatagcaaacatgctatcaaagatttgatgtctttcataaagaggcttgcactcacttgctgttcttgaamacctcaaactgtgtataaagcagtctgggccagcctcctgaatgatggca

SEQ ID NO: 384377 - DNA, 277 bp, Homo sapiens
ataaccagtttgatagattgcaaaaatggccacaaattctctccgtccctgtacatttgatcctttgcaaagtgcctcttaagcttctcccatccaaggtgtaatgagtttttctgttcatatagtctgctttgtgatatcctttgtcaatgggaaaatagcaaacatgctatcaaagatttgatgtctttcataaagaggcttgcactcacttgctgttcttgaaaacctcaaactgtgtrtaaagcagtctgggccagcctcctgaatgatggca

SEQ ID NO: 384378 - DNA, 567 bp, Homo sapiens
tgtccatataaaaacacgtggcattcatatcctaggtgaaatagcatgcactgtgagaaaaygaatcatatgagtaaggttccagacacatagaattaaaaaatgtatgtattaaattgcaggattatcaataatgcagttttttagttttttggagcaattgctttttatccacagataatgatcactgctccacataactaattgataataaataatgtgtggaaaagggtgtggaataaaacattcagagcaaacattccattttgtgattaaggatcattagatgcattaactgccttactaatgaatgcattgttaattacttgttagcactttggccaggcaaattacttagaacactgctgactcttgtgagaagatatgttggcagtaagaaatggaaatatcagggaacatttacagaaacaacaaactcctaagctcaactttatccaagatgacatcaatttttttgctgaatttttatgcaaaatccatccatataagttgattgttaatacacaaatgtggtagaaggcgaaggatgggcttcttggtttgggt

SEQ ID NO: 384379 - DNA, 528 bp, Homo sapiens
ctggctgggcttggtggcttatgcctgtaatcccaacagtttgggaggccagggtaggaggatcccttgagtccaggagcttgagaccagcatgggtaacatagagagatcctgtctctacagaaaaaaaaatttaaaaaaaagccagcatggtgctgtgcacctgtggtcccaggtactcaggatgctgaggtgggaggatcgcttgagtccaggagcttgatgttacaatgagctatgactgtgccactgtactccagcctgggtgacacggtgagaccctgtcttaaaacaaaaacaaaaacaaagayagaaagaaataacaacaagaaaaggcattggccttgcatcataagcatagttaatgaatgcacatttatatatcttaagtgaaaacacaatgtttaagcagtaagtgtttatttaaataactctgctttacagccttttaaaattaattggccggttactgactttgaatactctagattggaagagtttctattgtatatggaaagtgaaaaacaa

SEQ ID NO: 384380 - DNA, 613 bp, Homo sapiens
agcatgtatatgtatttttagaaaaaagcggatgagaatattaatatttaatgttgggtgccatgtttactcctggcctttattttctttgttatatttttctacagtaaaatttcctataattctctcctattacatttataatgagattatcaacctgtaaatgctatttaacgccctgtgttttcagctcttctgtctcagactctatcctcatatctcccaccagaggcatttgaccattcytgaagacagagtgctcagaacctcccacaagacaacgttcgcagcagggctggtctgtgcgtcttcctggatcacatccaggggcttcattcctaaggacctttttaaatgtgtcctcatttacaaagtttcttcttggccccaggaaaaactcagagatacggtctctgagtttcaaagacaaaaaacaaaaattctccctttgctttgttttagtttgccacagtcaccatggtttgctgataattgaggctatagaaaatctaagtacttggaaccccagcaacatttataaacattttgaattgttatagtttatagccttttccccttgcagtcatgttctgaaaaaaggaaaaaaaaagga

SEQ ID NO: 384381 - DNA, 613 bp, Homo sapiens
agcatgtatatgtatttttagaaaaaagcggatgagaatattaatatttaatgttgggtgccatgtttactcctggcctttattttctttgttatatttttctacagtaaaatttcctataattctctcctattacatttataatgagattatcaacctgtaaatgctatttaacgccctgtgttttcagctcttctgtctcagactctatcctcatatctcccaccagaggcatttgaccattcctgaagacagagtgctcagaacctcccacaagacaacgttcgcagcagggctggtctgtgcgtcttcctggatcacatccaggggcttcattcytaaggacctttttaaatgtgtcctcatttacaaagtttcttcttggccccaggaaaaactcagagatacggtctctgagtttcaaagacaaaaaacaaaaattctccctttgctttgttttagtttgccacagtcaccatggtttgctgataattgaggctatagaaaatctaagtacttggaaccccagcaacatttataaacattttgaattgttatagtttatagccttttccccttgcagtcatgttctgaaaaaaggaaaaaaaaagga

SEQ ID NO: 384382 - DNA, 567 bp, Homo sapiens
gccgcctgggattagaggtaggcttttttttattgaaaatgttaaatagttgcttcaaaagttcaatgaatcaattaacatttcttctttgtatttaggtctgcatttttggggagaagaaagttgaaagtattttgcatatatcctattctttgcaagaaaacacaggttttcattcttaaaacaaaatggagcaatataattttattaaatattttcagaaagcctcaatcaagtagaataatattgttttactttgtcaactctattagacatttctatgtttgtggttacctataagaactcctacaaaggttcagaagatataggcctaattatcctttggttatagcatgtggctagatcrtgattacgtccatttagaagataagtagcaatatagttttgtgctttttccaggacgatgatgaaataagtacaattttcaggtaactaccccctttaattctactgtaagaattaaattagaatttctcattcttgtcttaatccataccccttgcaatgccttctcagttgcctgcatgttccaatcagccaagaaga

SEQ ID NO: 384383 - DNA, 593 bp, Homo sapiens
aaacaaaaaaccatagaaattttctctaaactagggaaagttatatataatcatataaattacataattttaacgtcctttgaatatgctaattttttataacaattaaaattatccaggaaaatattgatgtgtccaaatttgtatttttataatttaaaataaattayattaacttttttcctttaaaagcttttcttaaaaatttttttcttaaaattatattacctttatcgaggtatgattgacacacagaaggctggacatatttaatatatacatcttagtgagtttcgaaatttgcatacacccctgaaaccaactttacagtctgtgccataaacctatccaatatctccaaaagttttttcctgccctgtttatttatttatttattattacttgtggtaacacttaacataagaactacccttttaccaactttttaaatctataatacaatattgttaatgactgacaatatgctgtacagtagatctctaagacttcttcatcttgtgtagtgaagctcaattccgactatttcagtactttgttcaaaaatccccaatggctctccattaaatactgac

SEQ ID NO: 384384 - DNA, 593 bp, Homo sapiens
aaacaaaaaaccatagaaattttctctaaactagggaaagttatatataatcatataaattacataattttaacgtcctttgaatatgctaattttttataacaattaaaattatccaggaaaatattgatgtgtccaaatttgtatttttataatttaaaataaattacattaacttttttcctttaaaagcttttcttaaaaatttttttcttaaaattatattacctttatcgaggtatgattgacacacagaaggctggacatatttaatatatacatcttagtgagtttcgaaatttgcatacacccctgaaaccaactttacagtctgtgccataaacctatccaatatctccaaaagttttttcctgccctgtttatttatttatttattattacttgtggtaacacttaacataagaactacccttttaccaactttttaaatctataatacaatattgttaatgactgacaatatgctgtacagtagatctctaagacttcttcaycttgtgtagtgaagctcaattccgactatttcagtactttgttcaaaaatccccaatggctctccattaaatactgac

SEQ ID NO: 384385 - DNA, 539 bp, Homo sapiens
atataagctatatggcattttgtggtagcagcccaaatgaactaagacacttatcaacaaaccctcttcagtaaagtcctactttaaaaagtgtgcaccctatgccatggtgtatcagtcaattattaccataatcattttgtgtgacaaacaacctcaagatcttaatggattacaacagtaactacttattttccttgcttctgtgagtcaggtatggctttactaggataggatgggcttggctacaggtcagattagcattgttccaaccattttttcttttgcaggcaacagacacctgagccatgtactcctcctgatggatcgcaggagcataagatggtaagccgaaacacagaatacatcrcaaagcccatccttgaaactaggacaatgtccatcagctacaagccctatgattaagtccatcaaaggtgaagtagatggaactccatatagacaaaaataaaggtgacaggtaagaataggaaacggttgaagtggatgagataaaattctaaccttatgaataattt

SEQ ID NO: 384386 - DNA, 630 bp, Homo sapiens
ttcttttcttatctatgctgatgcaaatttctcctaatatgtatcctggtgtgatacacacacacattatttgacacccatatatctatgtatatatgtataggtctgcatatatatttgtgcaagcataaatttgtaagggaggggaattaaatgyataaggcttaaattgccatcttgaaccagaagacctttgggtgtaatttttccatgtttgtttaagtgtgtttctcccaaagagactgtatatcatcttggtattctaagcacataatattgttccaggactagtcatataaataaataaataaataaataaataaataaataaataaatatatgtgtgtgtgtgtgtgtgtgtgtgtgtgtgtgtatacactcaacaaatgttcaaattaaattattaatcaaattaatgatttggctattctttccaaacattttatgacgataaaaacttaaatcctgtactaaaatcttgcatcttttcatcccattcattctgtgacccagcagcttaatcctgccttgctgaccttgtatattctctagttccatgatgcctcctttaaggtggggtgaaatatgtagcaaataactcagggtaaaggcacaattatctgttaacag

SEQ ID NO: 384387 - DNA, 630 bp, Homo sapiens
ttcttttcttatctatgctgatgcaaatttctcctaatatgtatcctggtgtgatacacacacacattatttgacacccatatatctatgtatatatgtataggtctgcatatatatttgtgcaagcataaatttgtaagggaggggaattaaatgcataaggcttaaattgccatcttgaaccagaagacctttgggtgtaatttttccatgtttgtttaagtgtgtttctcccaaagagactgtatatcatcttggtattctaagcacataatattgttccaggactagtcatataaataaataaataaataaataaataaataaataaataaatatatgtgtgtgtgtgtgtgtgtgtgtgtgtgtgtgtatacactcaacaaatgttcaaattaaattattaatcaaattaatgatttggctattctttccaaacattttatgaygataaaaacttaaatcctgtactaaaatcttgcatcttttcatcccattcattctgtgacccagcagcttaatcctgccttgctgaccttgtatattctctagttccatgatgcctcctttaaggtggggtgaaatatgtagcaaataactcagggtaaaggcacaattatctgttaacag

SEQ ID NO: 384388 - DNA, 594 bp, Homo sapiens
gaacattttgactaagaactccaaattgaaccagaatagaggacatagtgcatttctttgtaacttggaaagttgggtcatggagaagctactgtgtaaaataggcatataaaattttggcattaaagaagactcttgctcagccaatgacatgtggactgcctggatatccccaaattctgattccacatttgtttttataaaacaaaacaaatgaacaaagaacagccccatattcacctgctacttgctacaaaacataggcctgagagaatttatgagcaaaggcaggatgyttactttaaatatgtttgtatagcatttggaatcctcagagaatggggcctgaataaataaaacaccactactaataatatttcacaaagctcggtgagagagtggctgtggaccctggccattccctgggcatacctgcctcttatcaaactcgcatcacagtctgatggggtgtccttctcttgcccttgccattcaataactcctgcaagtgcagaagacaatgggggttttaaggaagggtcaggattctctgcccatctccattgctcctgcactcagccacgtggtcacctc

SEQ ID NO: 384389 - DNA, 594 bp, Homo sapiens
gaacattttgactaagaactccaaattgaaccagaatagaggacatagtgcatttctttgtaacttggaaagttgggtcatggagaagctactgtgtaaaataggcatataaaattttggcattaaagaagactcttgctcagccaatgacatgtggactgcctggatatccccaaattctgattccacatttgtttttataaaacaaaacaaatgaacaaagaacagccccatattcacctgctacttgctacaaaacataggcctgagagaatttatgagcaaaggcaggatgctyactttaaatatgtttgtatagcatttggaatcctcagagaatggggcctgaataaataaaacaccactactaataatatttcacaaagctcggtgagagagtggctgtggaccctggccattccctgggcatacctgcctcttatcaaactcgcatcacagtctgatggggtgtccttctcttgcccttgccattcaataactcctgcaagtgcagaagacaatgggggttttaaggaagggtcaggattctctgcccatctccattgctcctgcactcagccacgtggtcacctc

SEQ ID NO: 384390 - DNA, 448 bp, Homo sapiens
gcaaaggcaggatgcttactttaaatatgtttgtatagcatttggaatcctcagagaatggggcctgaataaataaaacaccactactaataatatttcacaaagctcggtgagagagtggctgtggaccctggccattccctgggcatacctgcctcttatcaaactcgcatcacagtctgatggggtgtccttctcttgcccttgccattcaataactcctgcaagtgcagaagacaatgggggttttaaggaagggtcaggattctctgcccatctccattgctcctgcactcagccacgtggtcacctcctgcaactggcattgtgcagaacgtcatggaagagaaatggtccctgggcagagtctgtcagcaggaattytggctgaggaagagagacagttcttgtccagcatcgtatttctttctctaccttagtaatagcc

SEQ ID NO: 384391 - DNA, 327 bp, Homo sapiens
tcctcactgccactcttctgtcagcccgctgaagtctggcttcccctctctgccctgagcctctgtacttccttgtgacaaaatcttacacagacacatctcagcccttatcatctttgatwactgcccagcatttggcactgctaaccactttttctgtgaaatgcctttttctgtttttaactttcctctccctgtccttgactctcatctcttgctcagtcctcatatcaatgcagacacccccaagtcctgtctgctccccgtgtgaatgttctatcctgccccactgcctccatcctagtataagcccctctcatctctcat

SEQ ID NO: 384392 - DNA, 327 bp, Homo sapiens
tcctcactgccactcttctgtcagcccgctgaagtctggcttcccctctctgccctgagcctctgtacttccttgtgacaaaatcttacacagacacatctcagcccttatcatctttgattactgcccagcatttggcactgctaaccactttttctgtgaaatgcctttttytgtttttaactttcctctccctgtccttgactctcatctcttgctcagtcctcatatcaatgcagacacccccaagtcctgtctgctccccgtgtgaatgttctatcctgccccactgcctccatcctagtataagcccctctcatctctcat

SEQ ID NO: 384393 - DNA, 606 bp, Homo sapiens
tatacatattttgcttcaaggatgtattccagtactgcttgaataactagacattttttaaggaggtaagagaacagttggaactttctaggtgattgggtgatatattgacttggctgacatcccaattctgctatttatactatgaatcatttgccctgtggggggcttcagttttctcattgctaaaatgggaataatatccttcccccagtatttttgaatatctcaatgagatgatgtragacccttcgcagggccaaagtgccatgtaaatatcagcttagtgtcctctctacggctcccattggcccctcttccttctcaacaacttctattgactcctgtcctgctctgaactctctcctggacttgcctaactctcctgccctcacttttttacacctccttgccttttatgatgttcatgaaatagaaggataaaagtaactcttcctgttgtctgggcagagcccctaaagtcctagagcaattcagaaggtgccaaacacactgtttcctaagttgggatgcaggaccactgtgctacttgagtaagggtctgtgaaatcaatcatgccatcctcagtctatcacccacctcca

SEQ ID NO: 384394 - DNA, 633 bp, Homo sapiens
  misc_feature (1)...(633): n = A,T,C or G
tccactgactgatgactagataagcaaaatgtggtatagacatgcaattgaatattattcagyctttaaaaggaaggaaattctgacatatgctacaatatggatgaatctttttttatctttatttttaacaggatatggccctgttgcctaggctgaagtgcagtggtgcaatcactgctcactacagccttgacttctcaggctcaaacgatcctcctacctcaaccacccaagtagctgggactacaagcacacaccacggtcaggcctctgagcccaagctaagccatcatatcccctgtgacctgcacgtatacatccagatggcctgaagcatctgaagatccacaaaagaagtgaaaatagccttaactgatgacattccaccattgtgatttgtttctgccccaccctaactgatcaatgtactttgtaatctcccccacccttaagaaggttctttgtaattctccccacccttgagaatgtactttgtgagatccatcccctgcctgcaaaacagcgctcctaactccactgcctatcccaaaacctataagaactaatgataatcccaccactctntgctgactctcttttcggactcagcccacctgcacccaggtgaaa

SEQ ID NO: 384395 - DNA, 633 bp, Homo sapiens
  misc_feature (1)...(633): n = A,T,C or G
tccactgactgatgactagataagcaaaatgtggtatagacatgcaattgaatattattcagtctttaaaaggaaggaaattctgacatatgctacaatatggatgaatctttttttatctttatttttaacaggatatggcyctgttgcctaggctgaagtgcagtggtgcaatcactgctcactacagccttgacttctcaggctcaaacgatcctcctacctcaaccacccaagtagctgggactacaagcacacaccacggtcaggcctctgagcccaagctaagccatcatatcccctgtgacctgcacgtatacatccagatggcctgaagcatctgaagatccacaaaagaagtgaaaatagccttaactgatgacattccaccattgtgatttgtttctgccccaccctaactgatcaatgtactttgtaatctcccccacccttaagaaggttctttgtaattctccccacccttgagaatgtactttgtgagatccatcccctgcctgcaaaacagcgctcctaactccactgcctatcccaaaacctataagaactaatgataatcccaccactctntgctgactctcttttcggactcagcccacctgcacccaggtgaaa

SEQ ID NO: 384396 - DNA, 633 bp, Homo sapiens
  misc_feature (1)...(633): n = A,T,C or G
tccactgactgatgactagataagcaaaatgtggtatagacatgcaattgaatattattcagtctttaaaaggaaggaaattctgacatatgctacaatatggatgaatctttttttatctttatttttaacaggatatggccctgttgcctaggctgaagtgcagtggtgcaatcactgctcactacagccttgacttctcaggctcaaacgatcctcctacctcaaccacccaagtagctgggactacaagcacacaccacggtcaggcctctgagcccaagctaagccatcatatcccctgtgacctgcaygtatacatccagatggcctgaagcatctgaagatccacaaaagaagtgaaaatagccttaactgatgacattccaccattgtgatttgtttctgccccaccctaactgatcaatgtactttgtaatctcccccacccttaagaaggttctttgtaattctccccacccttgagaatgtactttgtgagatccatcccctgcctgcaaaacagcgctcctaactccactgcctatcccaaaacctataagaactaatgataatcccaccactctntgctgactctcttttcggactcagcccacctgcacccaggtgaaa

SEQ ID NO: 384397 - DNA, 633 bp, Homo sapiens
  misc_feature (1)...(633): n = A,T,C or G
tccactgactgatgactagataagcaaaatgtggtatagacatgcaattgaatattattcagtctttaaaaggaaggaaattctgacatatgctacaatatggatgaatctttttttatctttatttttaacaggatatggccctgttgcctaggctgaagtgcagtggtgcaatcactgctcactacagccttgacttctcaggctcaaacgatcctcctacctcaaccacccaagtagctgggactacaagcacacaccacggtcaggcctctgagcccaagctaagccatcatatcccctgtgacctgcacgtatacatccagatggcctgaagcatctgaagatccacaaaagaagtgaaaatagccttaactgatgacattccaccaytgtgatttgtttctgccccaccctaactgatcaatgtactttgtaatctcccccacccttaagaaggttctttgtaattctccccacccttgagaatgtactttgtgagatccatcccctgcctgcaaaacagcgctcctaactccactgcctatcccaaaacctataagaactaatgataatcccaccactctntgctgactctcttttcggactcagcccacctgcacccaggtgaaa

SEQ ID NO: 384398 - DNA, 341 bp, Homo sapiens
gtgcgccttaattctccactgaacaaatagcctcagcggcatccctcagcttagagaagaggccatgtcaagtgagggaagggaaggggaagagggaagctggggtgggaagaaaagggtagatgagctgggaagaaaagggtaggtgagctgtcttctcattgcctctctgggtctctgagacctctcttgccttacttttgccggtctccttgtttgtccatcctggccagtgtttggcccctgagagatgaggaatcccagaatagctgccccttcagagctgtgctggcccacacatatcagcacsggatacatgaagccctttcacacacatcgcc

SEQ ID NO: 384399 - DNA, 510 bp, Homo sapiens
gctgtacttaggattacagttttattataaaggatacgagtcaggaccagcatataaatagatgcccaggatgaggtctggagggtcctgaatgcacagctgccatgccctcttcccacagcatcagagcacattaccctcctggcacactgatgtgtttaccaacacccagggggatcatcaggtgtctggagctttgaatgggtttcatttggtaggtgtgactgactgaatcattgaccatgttatagaactccatctctagcatccctctccaggggtcaggaggttgggcctgtattaagtgactcaaagccccaactctctaatcacaggactggcttttccacaagactggccccatcctgagtmaccttgttagcataaactctgctgtggtccaagggcccaccatgaataacagatactcttatcactcggattcagacgccatgttcccggaacctaaaacaaaaactagacacattctttattatacaacacaatgac

SEQ ID NO: 384400 - DNA, 510 bp, Homo sapiens
gctgtacttaggattacagttttattataaaggatacgagtcaggaccagcatataaatagatgcccaggatgaggtctggagggtcctgaatgcacagctgccatgccctcttcccacagcatcagagcacattaccctcctggcacactgatgtgtttaccaacacccagggggatcatcaggtgtctggagctttgaatgggtttcatttggtaggtgtgactgactgaatcattgaccatgttatagaactccatctctagcatccctctccaggggtcaggaggttgggcctgtattaagtgactcaaagccccaactctctaatcacaggactggcttttccacaagactggccccatcctgagtcaccttgttagcataaactctgctgtggtccaagggcccaccatgaataacagatactcttatcactcggattyagacgccatgttcccggaacctaaaacaaaaactagacacattctttattatacaacacaatgac

SEQ ID NO: 384401 - DNA, 599 bp, Homo sapiens
gacattttgaaggggaattgaaggggacttgcactacccagacatccagatgtcaacatgcactataaaactatagcaattaagtagtttagtaaaaatttwaaaaaaaatcaaaatcattctaactctcccttagtagaggaatggataaattctcttttattcatacaatatcgggggaaaccaggccccagtatttcatgtagtttcttttctactttccctaagtgtcgtctggtctgagaaataaagggaaagagtacaaaagagagaaatgttaaagctgggtgtcggggaagacaccacatgtcggcaggttccatgatgccccccaagccacaaaaccagcaagtttttattagtgattttcaaaaggggagggagtgtacgaatagggtgtgggtcagagagatcacatacttcacaaggtaataaaatatcacaaggcaaatggaggcagggcgagatcacagaaccagggcaaaattaaaattgctaatgaagttttgggtacgcattgtcattgataacatcttatcaggagacagggtttgagagcagacaactggtctgaccaaaatttattaggcgggaatttc

SEQ ID NO: 384402 - DNA, 523 bp, Homo sapiens
gtcgtctggtctgagaaataaagggaaagagtacaaaagagagaaatgttaaagctgggtgtcggggaagacaccacatgtcggcaggttccatgatgccccccaagccacaaaaccagcaagtttttattagtgattttcaaaaggggagggagtgtacgaatagggtgtgggtcagagagatcacatacttcacaaggtaataaaatatcacaaggcaaatggaggcagggcgagatcacagaaccagggcaaaattaaaattgctaatgaagttttgggtacgcattgtcattgataacatcttatcaggagacagggtttgagagcagacaactggtctgaccaaaatttattaggcgggaatttcctcgtcctaataagcctgggagcgctaagtgagactggggcttatttcatyccttatctacaaccataaaagacagacattcccaaagcggccattttagagaattccccttgggaatgcattctccttctcagggatgttccttgctgagaa

SEQ ID NO: 384403 - DNA, 598 bp, Homo sapiens
cttttaaaaggcaagttgaaaacgaacctataaactatgatgctatttatgtttaatttagaaatacaaacaataattcatatattctttatggatacatgcatatacactaaaagttatatatttgtatttaaaaaaagctgtggttgcctctagaagagaagaggacgaaacagggccagagcagggcaatatgctttgccatatttataatattttttagagtgcgctttcaaatgacagtagcaaaataacaagatatacttacgcaagmctcagtaaattcaaaaagataggaaccttactctcagaccacagtggaatagaaatagaaattaatacccaaatctctcaaaaccacaaaattacatggaaattaaataacttgctcctgaatgacttttggataaacaataaaattaaagcagaaatcaaaaaattctttgaaataaatgaaactagagacacaacataacaaatctctgggatgtagcaaaaacagtggtaagagtagtatttttagcaataaatgcctacatcaaaaagcttgaaaaaatcttaaattgacaacctaatatcacacctagaggaactagaa

SEQ ID NO: 384404 - DNA, 576 bp, Homo sapiens
gcatggtggctcatgcctgtaattccagcactttgggaggccraggcgggtagatcagttgaggtcaggagtttgagaccagcatagccaatatggtaaaaccccatctctactaaaaatacaaaagtcagccaggtatggtggcacatgcctgtaatcccagctactcagtagggtgaggcaagagaatcacttgaacctgggaggcagaggttgcactccagcctgagcaacagagggagattccatctcaaaaaaaagaaaaaacaaaacaaaacatggaaaaagaatcaatattgttaaaatggccatgctgccaaaggaatctacatattcaacactattcttatcaaactaccaatgtcatctttcacagaactagaaaaaaactattctaaaattcatatggaaccaaaaaagagtctgaatagccaaagcaattccaagcaaaaacaacaaagccagaggcatcacattacctgacttcaagctatactacaaggctacaacaaaaacagacacatagataaatggaacagaatacagaatccagaagtgaagctgcacacctacagc

SEQ ID NO: 384405 - DNA, 576 bp, Homo sapiens
gcatggtggctcatgcctgtaattccagcactttgggaggccgaggcgggtagatcagttgaggtcaggagtttgagaccagcatagccaatatggtaaaaccccatctctactaaaaatayaaaagtcagccaggtatggtggcacatgcctgtaatcccagctactcagtagggtgaggcaagagaatcacttgaacctgggaggcagaggttgcactccagcctgagcaacagagggagattccatctcaaaaaaaagaaaaaacaaaacaaaacatggaaaaagaatcaatattgttaaaatggccatgctgccaaaggaatctacatattcaacactattcttatcaaactaccaatgtcatctttcacagaactagaaaaaaactattctaaaattcatatggaaccaaaaaagagtctgaatagccaaagcaattccaagcaaaaacaacaaagccagaggcatcacattacctgacttcaagctatactacaaggctacaacaaaaacagacacatagataaatggaacagaatacagaatccagaagtgaagctgcacacctacagc

SEQ ID NO: 384406 - DNA, 607 bp, Homo sapiens
cattaggaccccttatcttgtggtcacgtatcttggtgcacatgtaacttgtttcactggcctaagactatctctcctctaggctcaattattttgtgtttcaaacctacttaggttagggcttggctgggcacggtggctcwcgcctgtaatcccagcactttgggaggctgaggcaggcagatcaccttaggtcgggagttcaagaccagcctggccaacatggtgaaaccccatctctactaaaaatacaaaaattagctgggcatggtggtgggcacctgtaatccagctactcgggaggctgaggcaggagaatcacttgaacgtgggaggcggaggttgcaatgggccgagatcccaccattgcctgggtaacagagtgagaccttgtctcaaaaaaataaataaataaataaatacatccatagaaatttaaaaatacctacttagattagggctgccacataaaatatagaacagttaaatttgaatttcagataaatagtatattttaataataagtattttcaagtattacatatttgaagtttatctgaaattcagagtaaactagagatctccaataattttcctaaatttgcca

SEQ ID NO: 384407 - DNA, 591 bp, Homo sapiens
gcactgcatgtagtagaaaaattcaaaaccacttaagtgtccatcagtaggagagggttaatatgatacatgcataatactatgcagattaaaaaataatyagattgataagtgattctcaaccctgactgcacttgtgaatccagaaacacttaaaaaactcgtaattccaggatccaccctcagaggttctgattatctgtttgagaatgaggcccagtatttgcactgttttaaagtgccccaggtaattctaatgtgcagtcaagtttgagaaccactcaacccttaatatgcgagatgtttctatcagctctaacaagaaagatgcccatgatacactgcaagtgaaaaaattaggttacttaatttgttgattatgatttgttaaattgagctaaaaatggcctgagaaggactctgtacttctatatttgagtccttgtggacaaactgtaatctaacttaataggtagacaagattgaaaacctaacttaggagcatgtgcctgtaacaagagctgagtcttggccaatcccaacagccatacttcaaccactcatacactgctgagtgttcaaactgtgttc

SEQ ID NO: 384408 - DNA, 591 bp, Homo sapiens
gcactgcatgtagtagaaaaattcaaaaccacttaagtgtccatcagtaggagagggttaatatgatacatgcataatactatgcagattaaaaaataatcagattgataagtgattctcaaccctgactgcacttgtgaatccagaaacacttaaaaaactcrtaattccaggatccaccctcagaggttctgattatctgtttgagaatgaggcccagtatttgcactgttttaaagtgccccaggtaattctaatgtgcagtcaagtttgagaaccactcaacccttaatatgcgagatgtttctatcagctctaacaagaaagatgcccatgatacactgcaagtgaaaaaattaggttacttaatttgttgattatgatttgttaaattgagctaaaaatggcctgagaaggactctgtacttctatatttgagtccttgtggacaaactgtaatctaacttaataggtagacaagattgaaaacctaacttaggagcatgtgcctgtaacaagagctgagtcttggccaatcccaacagccatacttcaaccactcatacactgctgagtgttcaaactgtgttc

SEQ ID NO: 384409 - DNA, 598 bp, Homo sapiens
gctttactgaaaatcatgatttagagttttaccacatagtagagttcactaaaaaatattacagctctccaggcatggtggctcatgcctataattccagcactttgcaggctgaggcaggaggattgcttaagaacaggagttcaaggctgyagtgagctgtaatcatgccactgcactccagccctgtctcaaaaagtaattacaactcaataaaactggtgtgtgtgtgtgtgtgtgtgtgtgtgtgtgtgtgtgtatcattgattgtaagtctgatatttctctctcccttccttccttgctgtctccacccttgtaaacaaaacaaaacaaaaaaactccaaccagttttcccagggtcagtctactgaagagctgatttctacgtattgcataaactatactattcatgaattttaaaaaataacttaaactctcaggtgatatcatcattttctttgttatttctttctattgcataccaccttcagaatgataaagagactgaggctctagtcacaattatattcagctgtcaggaatgattaactatcttccttctccccatgaagtgcatgagaatgcaaccatgcaa

SEQ ID NO: 384410 - DNA, 543 bp, Homo sapiens
ttaatcccacatgattttcaggttcaaggtgagaaaaaaaggagaaagtacagttcttgtaccttgacacactttattccatctgcagaagtggctgcagctcacatgtgtgactcacgttggaacagcrggctcacataatagcatcacgtgctggcaaagtgttcagatgacaagccagttacctcattcggctgatgcaatcctggaatttcctgaattgaaatacaatttaggaccagaagggagagaccctgggctgtttgattagggcatcacctttagctaattctaaccacccccaccttttttttcccatttgtctatttccttctttccttaggtgtgaggtaataatactaattggtaacagttaaactgtgctgtgcactcatctaagagttttactcttaattgtcaaacaatcctaggaggcaggcatcccatttttttcagataaggcaactgaggtgcaaaaatcccatgtcattgctttaggtcacacaggagaaaatgtaaggctcttctctttgagatgtatac

SEQ ID NO: 384411 - DNA, 609 bp, Homo sapiens
tggcagaaatcaagaccagttacagatattaaatagagaaaatctgcctggtcaggagatataggtcaggcttaattatctgattattcagtagaaagagtaatatggattatttaaagactcctttgaggcaacacggagttctctctagagtcttcttctaaagaagtaactaaatattatgacctaagtggagatctgaagaaacaagctgctaagcaaagaaagtcttaaaggtattccacttcctcataaatttaccaaaacaagttttagttcaatgactaatacattcttgtctttccctataaaagtgatttcccagttcaagtagtgattctctttaatragatccagactataaatgatcttaaaccagaagaaataactaaatgtcatgaggaaatctccaggtctagcaattttgataaagtcttgaaaccgtgactttgtctaacatccatctttccacattggctctgtaagacctaacagtagggaagtggctcatcaaatatgttgaaagtcatgacagtattcctgaagaaatataacaggtaaaaacaaaactgtatcatcagcaataatttcaaagcaaaacaatgcgtc

SEQ ID NO: 384412 - DNA, 508 bp, Homo sapiens
caaacctgcaaatatttaattccaaacagctgagcagcagcagatgcttcatttttgtacaataatgtttaaatatctaatgtcctaattttttaaaacattgcttaaatattttgagaaaactgacacaatcttaaaactgcctaagctaattaaaaatgacacagtgcttaaaactacctaagttaatgattaaaatttagtattattttacttatactttttcatgtagcataagctatctattgatcatgtaaagagcaccctaatatrtatttatttgtttcttgctttgttttttgagaatgggtcttgctatgttgctcaggctggattgcaggggctatttattcacaggcgtaatcccactactgatcagcacaggagttttgacttgcttcatttctgactttgactggttcacccctccttagacaacctggtgatttccctatacccgggaggtcaccatatgataccaaacttagtgtagacctccggttggtat

SEQ ID NO: 384413 - DNA, 559 bp, Homo sapiens
aaccaggcacctcaggtggaaatgtagaaatcacccgtcttctgcgtcaatcataccgggagctgcagacaggagctgttcctatttggccatcttccaatcattacatcttaaagctccaaaataatctcctttgactctgtgtctcacatccaggccacactgatgcaaggggtgggttccgaaaggccttgggtgtctccacccctgtgtctctgcaaggtacaatcccttcagctgctttcacaggctagtgttgagtgcctaagggttttgcaggcaaacagtgcaagcggttagtcaatctcccattctggggtctggacgatagtggcctacttctcacagctccactaggcagtgtcccagtgggaaccctgtgtggggactccagtcccacatttcccatccacactgccctaatagaagttctccatgagggctctgcccctgcratatccagacttctgtgtggatatcgacacatttccatacatcctctgaaatctaggaagagctcctaagcctcagctcttgccctgtgcccacctgcaggctt

SEQ ID NO: 384414 - DNA, 655 bp, Homo sapiens
tgttgaagagactgtcctttcccctttgtgtatgcttggcacctgagtcaaagatcagtggactgtatttcttgggtttatttttgagctatctatttcatccgtctctgtctgtcttaattcctgtgtcatactgttttaattactgtagctttgtgatatatttggaaatcaggaactattatgcctctagctttgttcttctttctcaagatgcagggtcttttgtagttctgtatgaattttaggattatgtgttctatttctttaaaaagtaccattggaattttggtgagtgtaacattgaatttgtggattactttggatagtatggacattttaacaatattaagttcttccaatccatgaacacaggatgtctttccatttatttttgtcttgaaagaaggctatttgtaattgacaaatcaggattaggactctactgccatttccttattttttattttattttctataacttccctattaccaaatgttttagctagtyacatttaccaaatatttacttcatttttgggatcacaggctacacatttgtttcaattagaaattctgctattttattataaggataactagataaatttgtgtggatcaatgctaattcattatgcttagaaaaaaactgaaa

SEQ ID NO: 384415 - DNA, 640 bp, Homo sapiens
cccactaattctacattacggtgagctgtataattacttcattacatatcacaatgtaatmataatagaagtagagtgcaccatacatgtaatgtgcttgaatcatcctgaaaccactggaccgcatccccggtccatggaaaaactatcttccatgaaaccggtccctggtgccaaaacagttggggactgcagttctagaagatcagaaacatggcagaactgacccatccaggaagctactacctctcccagtcagaaaggtagatgatcaggagtcatcaccagaactgatgacttcaagaatataatcaatcttgacgtctggaagccactaccaccactacttcggtgacttcctatcaatatgtacaaagcaagttaccagatactggaatactttcgcagaaaatttagatgtttacatgactgtgcttatcagcagaaaaagccaaagaaacaaaacaatatgctccacctcatttccactctgcaaatctcaagtaagtgcacttaactggggagcctactttggatccagtccattaatttcaatggagtgtgggaaacagtgtttagttttcccacctccatatcacagggaggtgcatgggaaggaggtgggaagtgatgctcaatt

SEQ ID NO: 384416 - DNA, 556 bp, Homo sapiens
tccgacccagagttcggcctctgactagacgcctgggaatccgtgagcttaatccccgcttaaatcccaaacggaaaatcatagcgctttcttgtcggttaagggtgtcattccmataagaagctggacctggggaccgccagggaaagcctgagcgtggcagcaaatggggaggcctggagggatcgcagcagtcttggactcgggatctgaaattctctccctaggatttgtaaacagtgccagttcctaagctatttgttgtcctatggtctgtccatctttaaatcccaccagtaacaatccaatctccaggctgaccctctaaacctgctttagctgggcgttgatccgcagcaccaccagaaggcagtgacgaagagggaaaaataaagtgaactaggacctcctgtagaataactcctcctgtggaataactcctcctgtggaataaggttatggaataatcatgctttttaatattcctgtctgatgggctttataattccataattacaggaagacctccaccaaataaggcatccataaaagagtc

SEQ ID NO: 384417 - DNA, 585 bp, Homo sapiens
cagataggtctgcattctcatttgtatccagtaaacccctctgagcctcaacgtcaccctctgcaacatgcagggatctgtgggggaagacgatctctacatgaaatggaataacagtatctggcacaaaggcagacacttaatcaacgctagctcctttcctctccgcagtttattccggggaagaactctggcctgggaaacagcagacctggtccaactcccggctctgccagatcccaagtgactcaaatgcttcagctgccctgacctctgcttcctcgttactaaaatraaaagcacgggatctacctccaacaacagtcatgggattcaaggacaccaggacacctcccccgtgaaaaccagggcaatgaattcaaacaaagcacattaactaaatctaaatctaaatcgatggcattttgtcccataaacactcagcctgaaagtctctccctcagcttgctgtttgtttttttgttttgttttgttttttggagatgggatatcgctctgtcgcccaagccgcagtgcagtggcgcaatctcagctcactgcaacctctgcctactgggtttaagt

SEQ ID NO: 384418 - DNA, 647 bp, Homo sapiens
aaatattatccttacagtagaaactcctataaaacagtaagacttcactaaacgaaactatacaaataacagcacaacagtaggatttgagtgctggtactttttggtaaagttttgaagctgaatacacttttaaaaacaaaaccattgaaaaaaaggatgtataactggtacagcttatgcagtaaagacaaaactgaattcaaatttgtagactcctttacaaagaaaggacttaaccctacattcaaagactggtgaataaagacacatttatgtactttgtagtaaagtgaaatgccacagctttaaaaagaaaatcatttgcacatcytctgaagttagtaaagctaagtttcaggcttagatagtgggcaatcactctacttgttagtagcagtcttagccagagaagaaattactggttctaagagtttacagaataaagatgacatatttttcaagaagcaatacatttgggaggatcaaaatggagtagtattaatgtagtcaataattttaagaggatgagatccttttctagtcagatttatttattttttaaagctagtagcaaaagaaacaaatatatcagctggccagaagtaatttgtctgactcaaatcaaagagcaaactaaaaaggct

SEQ ID NO: 384419 - DNA, 582 bp, Homo sapiens
atgatttgactcccaggacaaaaaagtaaactctgtactacttagttataacaattctacttaaaacggcaactcaaagtactgtaaaaacaaaacaaaaaagaccaacagtaataattctacttagacctagaatagccaaaaaaaagtagtcatttttttttttagacataatcttgctctgtcacccaggctagagtgcagtggcacaatctcagctcactgcaacctccacttcctgggttcaagtgattcttgtgcctcagcctcccgagtagctgggattacaggctcctgccaccaygcctggctaatttttgtattttttagtagagacagggtttcaccatcttgaccaagctggtctggaactcctgacctcgtgatccaccacgcctggccttacgtagtcatctttttaacaagtcattacaaattctaatttgattttgtgtctcataggtccaaatgattctgcattttaatatttcattcagtacagggcacaaaactgaaattcaataagctatgagataaataattccgtatcagagaagcatataatgttcccttaaatattaa

SEQ ID NO: 384420 - DNA, 582 bp, Homo sapiens
atgatttgactcccaggacaaaaaagtaaactctgtactacttagttataacaattctacttaaaacggcaactcaaagtactgtaaaaacaaaacaaaaaagaccaacagtaataattctacttagacctagaatagccaaaaaaaagtagtcatttttttttttagacataatcttgctctgtcacccaggctagagtgcagtggcacaatctcagctcactgcaacctccacttcctgggttcaagtgattcttgtgcctcagcctcccgagtagctgggattacaggctcctgccaccatgcctggctaatttttktattttttagtagagacagggtttcaccatcttgaccaagctggtctggaactcctgacctcgtgatccaccacgcctggccttacgtagtcatctttttaacaagtcattacaaattctaatttgattttgtgtctcataggtccaaatgattctgcattttaatatttcattcagtacagggcacaaaactgaaattcaataagctatgagataaataattccgtatcagagaagcatataatgttcccttaaatattaa

SEQ ID NO: 384421 - DNA, 582 bp, Homo sapiens
atgatttgactcccaggacaaaaaagtaaactctgtactacttagttataacaattctacttaaaacggcaactcaaagtactgtaaaaacaaaacaaaaaagaccaacagtaataattctacttagacctagaatagccaaaaaaaagtagtcatttttttttttagacataatcttgctctgtcacccaggctagagtgcagtggcacaatctcagctcactgcaacctccacttcctgggttcaagtgattcttgtgcctcagcctcccgagtagctgggattacaggctcctgccaccatgcctggctaatttttgtattttttaktagagacagggtttcaccatcttgaccaagctggtctggaactcctgacctcgtgatccaccacgcctggccttacgtagtcatctttttaacaagtcattacaaattctaatttgattttgtgtctcataggtccaaatgattctgcattttaatatttcattcagtacagggcacaaaactgaaattcaataagctatgagataaataattccgtatcagagaagcatataatgttcccttaaatattaa

SEQ ID NO: 384422 - DNA, 582 bp, Homo sapiens
atgatttgactcccaggacaaaaaagtaaactctgtactacttagttataacaattctacttaaaacggcaactcaaagtactgtaaaaacaaaacaaaaaagaccaacagtaataattctacttagacctagaatagccaaaaaaaagtagtcatttttttttttagacataatcttgctctgtcacccaggctagagtgcagtggcacaatctcagctcactgcaacctccacttcctgggttcaagtgattcttgtgcctcagcctcccgagtagctgggattacaggctcctgccaccatgcctggctaatttttgtattttttagtagagacagggtttcaccatcttgaccaagctggtctggaactcctgacctcgtgatccaccacrcctggccttacgtagtcatctttttaacaagtcattacaaattctaatttgattttgtgtctcataggtccaaatgattctgcattttaatatttcattcagtacagggcacaaaactgaaattcaataagctatgagataaataattccgtatcagagaagcatataatgttcccttaaatattaa

SEQ ID NO: 384423 - DNA, 658 bp, Homo sapiens
atcagttggtcattaccagtatttgttggacatttactattactgcctcagctgctwtcaggttttggggaagcaagaatgttaaggttcaatagaggaagatggatataaaactcagtacaaaacagttttatgagaactccacaaagggcttaggggggcacaaaagagaggaatgggtagaaaagcaatgcgttagttgacttatacaaataaactagtgaatgcttctttaaataaagagcatccaaaatttatttcctggtcaatatagtttctctggtttttattcatgaaaatgttttgatgtatagaatatgtgtccgatttcagagtatgtaaaccccgcccccctacatttatagcacacatttatgcttatacacaacacaagcataaaaccgaagttaccttgtcgcatcattactgtttcaatgtagttgggacaggaaggtttacgttaaacacaaaatgttcctcacatgtcacttgacttgaactgttcccatcagcaagaaaaattactgcaagaatgaaaggagttcacttttctctgtgactgttccaaagaagcggaagagcattttaagtttctccggtttccttgatgaatgtccctcaaacaacctaaaggacttaaaaaataagagaatggaag

SEQ ID NO: 384424 - DNA, 545 bp, Homo sapiens
catccaaaatttatttcctggtcaatatagtttctctggtttttattcatgaaaatgttttgatgtatagaatatgtgtccgatttcagagtatgtaaaccccgcccccctacatttatagcacacatttatgcttatacacaacacaagcataaaaccgaagttaccttgtcgcatcattactgtttcaatgtagttgggacaggaaggtttacgttaaacacaaaatgttcctcacatgtcacttgacttgaactgttcccatcagcaagaaaaattactgcaagaatgaaaggagttcacttttctctgtgactgttccaaagaagcggaagagcattttaagtttctccggtttccttgatgaatgtccctcaaacaayctaaaggacttaaaaaataagagaatggaagatgagttaaaatgccttaatgattcagaaaactacatccatattgctaccaagtaacaaaaagaaataattgttccagaagacaattctgtaatgataagaactagaaaattggtttagattcaaatggca

SEQ ID NO: 384425 - DNA, 499 bp, Homo sapiens
cttcctgcattagtttgctgaagatatcagctttgagctcatccatatccctgcaaaaacatgatctcattcatttttatggctccatagtattccatggtgtatatgtaccacattttctttatcccgtctatcactgatggacatctgggttgattccatggctttactgttgtgaatagtgctgcaatgaacatacaaatgcatgtatctttataatagaataatttatattccaacgtatggtaattttaratcagttttggtattaaaaatcatgtaattttggaaaatattgataatggaaaaacccaaattctgccaaaatatgttgagaaaatagagggtaaatatatcttttcagactttaaatgcctcaggctcttagttaatcttccccagatctgggaagaactagaaggggagagattgggctacgttaatgagggccatttcaatctcttggccctgcagcagccatttcaaaatatgacaaaaa

SEQ ID NO: 384426 - DNA, 629 bp, Homo sapiens
tattctgaggaaagaaaaacacggctttaaaagcattatgacctgagtaagtagttcactaaaaratttgtaacacaaaagcatgcttttgagtatgagatctagctttccaaaggcatttaaaaattatagagactcagtggctatgaatgatgaggtactcttcatctgcctctagccatgtgctctgactttaaaaccagagacccttcaagtaaggtccacgttagtaagtgctgaaatgggtaattatttttcatgattacaacagcaagcttatgtaactacgctgagagggaaaagttaattccatgagaaaatcctattgagcgactgaaataaattaggaaaaggaaaggaaatgcagatttcaaatggttccgttttcaacgatctgaaatctgtattcaaggccaatttctggaaaaacaatttatgtgaatatttatttcctagaaagaatactaatgtaggctagtattttaaccaaatctaaaatcagatctcttttttaaaagtttaagacagcctgtgtgataatttttatttatttaaaagaatctgtcttctaaaatatttaatacacatctcttataatccagttgctagttgaaacagggtacaggtta

SEQ ID NO: 384427 - DNA, 629 bp, Homo sapiens
tattctgaggaaagaaaaacacggctttaaaagcattatgacctgagtaagtagttcactaaaagatttgtaacacaaaagcatgcttttgagtatgagatctagctttccaaaggcatttaraaattatagagactcagtggctatgaatgatgaggtactcttcatctgcctctagccatgtgctctgactttaaaaccagagacccttcaagtaaggtccacgttagtaagtgctgaaatgggtaattatttttcatgattacaacagcaagcttatgtaactacgctgagagggaaaagttaattccatgagaaaatcctattgagcgactgaaataaattaggaaaaggaaaggaaatgcagatttcaaatggttccgttttcaacgatctgaaatctgtattcaaggccaatttctggaaaaacaatttatgtgaatatttatttcctagaaagaatactaatgtaggctagtattttaaccaaatctaaaatcagatctcttttttaaaagtttaagacagcctgtgtgataatttttatttatttaaaagaatctgtcttctaaaatatttaatacacatctcttataatccagttgctagttgaaacagggtacaggtta

SEQ ID NO: 384428 - DNA, 499 bp, Homo sapiens
cttcctgcattagtttgctgaagatatcagctttgagctcatccatatccctgcaaaaacatgatctcattcatttttatggctccatagtattccatggtgtatatgtaccacattttctttatcccgtctatcactgatggacatctgggttgattccatggctttactgttgtgaatagtgctgcaatgaacatacaaatgcatgtatctttataatagaataatttatattccaacgtatggtaattttagatcagttttggtattaaaaatcatgtaattttggaaaatattgataatggaaaaacccaaattctgccaaaatatgttgagaaaatagagggtaaatatatcttttcagactttaaatgcctcargctcttagttaatcttccccagatctgggaagaactagaaggggagagattgggctacgttaatgagggccatttcaatctcttggccctgcagcagccatttcaaaatatgacaaaaa

SEQ ID NO: 384429 - DNA, 477 bp, Homo sapiens
atctggcaagtcagttaagagagcttctgctgccatttttattgacatgtaatagtgtaataaactcacatgtaatactgtaaagctctgtaaaaaaattttaacctagcctatttgtttaaaggagatgttaacaattcatgctcccttgaaccacttcatttttgcttttaggacaggactgttcattaacacacacaatcaattactaaacacaattactgaaataaatattatcaagcagtaaccaaaaaattcaacgtaaggctatcatacccaaactccaatatccagaagccaatttaagtaacccatgcctccttggcaaaagtgtatggatawtaccttttccttgtgatagtaaaacctatccattttcttacatcacccaagtatcagcttttacacttctacaaataaagcagacaatgaacatactgtgtagaaatcttgagcccttaattaaaaggtactcac

SEQ ID NO: 384430 - DNA, 477 bp, Homo sapiens
atctggcaagtcagttaagagagcttctgctgccatttttattgacatgtaatagtgtaataaactcacatgtaatactgtaaagctctgtaaaaaaattttaacctagcctatttgtttaaaggagatgttaacaattcatgctcccttgaaccacttcatttttgcttttaggacaggactgttcattaacacacacaatcaattactaaacacaattactgaaataaatattatcaagcagtaaccaaaaaattcaacgtaaggctatcatacccaaactccaatatccagaagccaatttaagtaacccatgcctccttggcaaaagtgtatggatattaccttttccttgtgatagtaaaacctatccattttcttacatcacccaagtatcagcttttacrcttctacaaataaagcagacaatgaacatactgtgtagaaatcttgagcccttaattaaaaggtactcac

SEQ ID NO: 384431 - DNA, 577 bp, Homo sapiens
cctgagcctcctgagtagctgagaccaatcaaagttaagttttcttcggtttaaagtaacttgttatgttgtttagcctcatggtaaccagaaaacaaaaatcaacagacactctaaacataaaaaccaaggaattaaaacactaccagaaaaaattacttcactacaaataaagacaggaagaaaggcraggaggaaagagaagaaataaaaagagatcagaaagaaaagaggaagggagaaagaacaaaagaaaaagcaaaacaatcaaaaaagtaaaaaatggcagtagtatgtttttatctgtaataatcctgaatgtaaattaaattaagacagagtggctgaatggattaaaagacccaattatgtcctgcctacaaggaactcagttcacctataaagacatacacagacaaagtcaagggatgataagagatattccatacaaacggaaacaaaaaaagcaggagtagctatacttagataaaatagcctttaactcaaaaaaagaaaaaataaagataattatataatgagaaacaagtaaacagccgttaagtgcatatgcaaccaa

SEQ ID NO: 384432 - DNA, 577 bp, Homo sapiens
cctgagcctcctgagtagctgagaccaatcaaagttaagttttcttcggtttaaagtaacttgttatgttgtttagcctcatggtaaccagaaaacaaaaatcaacagacactctaaacataaaaaccaaggaattaaaacactaccagaaaaaattacttcactacaaataaagacaggaagaaaggcaaggaggaaagagaagaaataaaaagagatcagaaagaaaagaggaagggagaaagaacaaaagaaaaagcaaaacaatcaaaaaagtaaaaaatggcagtagtatgtttttatctgtaataatcytgaatgtaaattaaattaagacagagtggctgaatggattaaaagacccaattatgtcctgcctacaaggaactcagttcacctataaagacatacacagacaaagtcaagggatgataagagatattccatacaaacggaaacaaaaaaagcaggagtagctatacttagataaaatagcctttaactcaaaaaaagaaaaaataaagataattatataatgagaaacaagtaaacagccgttaagtgcatatgcaaccaa

SEQ ID NO: 384433 - DNA, 500 bp, Homo sapiens
aataccataaagattagagaagaaattttaaaaatagaaacaaaaaatacaaaaagtcaatgaaacaaaagctggggtgttttaaaaaaaatcaaaattgacgagttttaacyagatgaagttagataaaaagaaaacaaagtcataaagaaggcattagaactggtaacccagaaatacgaagcattaaaagattactaaaaacatcacaaacaaattgaaaaatctggaagtgaatacatttctagacacataacgaattcccaagatagaatgataaaaaataaaaataaaaaacctgaacagaccaataatgagtaatgcaattaaagcagtcataaaaagtctcctggcaaagaaaaacacaagaatcatggttttcctgctgaattaccaaacattttaaaaatagctaatatctattttactcaaaatattccccataaaatgaagaggaagaaaggcttcaaaacttgttctatgaggacagcatgaccctg

SEQ ID NO: 384434 - DNA, 500 bp, Homo sapiens
aataccataaagattagagaagaaattttaaaaatagaaacaaaaaatacaaaaagtcaatgaaacaaaagctggggtgttttaaaaaaaatcaaaattgacgagttttaaccagatgaagttagataaaaagaaaacaaagtcataaagaaggcattagaactggtaacccagaaatacgaagcattaaaagattactaaaaacatcacaaacaaattgaaaaatctggaagtgaatacatttctagacacataacgaattcccaagatagaatgataaaaaataaaaataaaaaacctgaacagaccaataatgagkaatgcaattaaagcagtcataaaaagtctcctggcaaagaaaaacacaagaatcatggttttcctgctgaattaccaaacattttaaaaatagctaatatctattttactcaaaatattccccataaaatgaagaggaagaaaggcttcaaaacttgttctatgaggacagcatgaccctg

SEQ ID NO: 384435 - DNA, 578 bp, Homo sapiens
agagatcccaaaatgaaaacttcataaaacatagatgaaagatactaaagcagacacaagtaaatggaaagatatcccatctctatgcactagaagaatgttaaaatatgtgtatcacccaatgtgatctacagaatcaatgcaatcyatgttcaattacaagacattcttcattgaaatagaaaaagaatctcaaaattcacatggaagttcaaaatacctcagatagacaaaagaatctggaataaaaagaaaagctggaggcatcacactacctgatttcaaaatatactacaaatttatagtaaggatggtactatcaaaacagtatggtactctcaataaaaggggcgggggagagacaagagagatgaacgaatgagacagacagacatagacaagtgaaacagaatagagaaatcataaataaattcacgcgtttacggtcaattcatttttaacaaaggccccaagaacacaccttcgggaaggacaatctcttcaataaactgtactaggaaaacccaacacccacatgtacaagaatacatctaggccattaccttaccatatacaaa

SEQ ID NO: 384436 - DNA, 383 bp, Homo sapiens
ccttccaaaaccaaatattaaataatgcctatggytttctgtattataatgttgatttccccaatattaatgggaaccattgagcatttgccttggggtgtctcctcagctgtattcacacattccatcaccttgtcttaatggataatcatgcactatgagtatgggttttcagaagagctgtatcatttaaagataacacaggagcatcaaatttaattctgctagaatacttggtctattgattaactgcagctaatatggggtctacttcacatacaagttaaattcagtgcccttaatcagtcatatggtcaggtcaacagtaataaattatgcaatattttttcacccctatagttttaatttctctttccccttat

SEQ ID NO: 384437 - DNA, 383 bp, Homo sapiens
ccttccaaaaccaaatattaaataatgcctatggttttctgtattataatgttgatttccccaatattaatgggaaccattgagcrtttgccttggggtgtctcctcagctgtattcacacattccatcaccttgtcttaatggataatcatgcactatgagtatgggttttcagaagagctgtatcatttaaagataacacaggagcatcaaatttaattctgctagaatacttggtctattgattaactgcagctaatatggggtctacttcacatacaagttaaattcagtgcccttaatcagtcatatggtcaggtcaacagtaataaattatgcaatattttttcacccctatagttttaatttctctttccccttat

SEQ ID NO: 384438 - DNA, 383 bp, Homo sapiens
ccttccaaaaccaaatattaaataatgcctatggttttctgtattataatgttgatttccccaatattaatgggaaccattgagcatttgccttgkggtgtctcctcagctgtattcacacattccatcaccttgtcttaatggataatcatgcactatgagtatgggttttcagaagagctgtatcatttaaagataacacaggagcatcaaatttaattctgctagaatacttggtctattgattaactgcagctaatatggggtctacttcacatacaagttaaattcagtgcccttaatcagtcatatggtcaggtcaacagtaataaattatgcaatattttttcacccctatagttttaatttctctttccccttat

SEQ ID NO: 384439 - DNA, 383 bp, Homo sapiens
ccttccaaaaccaaatattaaataatgcctatggttttctgtattataatgttgatttccccaatattaatgggaaccattgagcatttgccttggggtgtctcctcagctgtattcacacattccatcaccttgtcttaatggataatcatgcactatragtatgggttttcagaagagctgtatcatttaaagataacacaggagcatcaaatttaattctgctagaatacttggtctattgattaactgcagctaatatggggtctacttcacatacaagttaaattcagtgcccttaatcagtcatatggtcaggtcaacagtaataaattatgcaatattttttcacccctatagttttaatttctctttccccttat

SEQ ID NO: 384440 - DNA, 550 bp, Homo sapiens
acatgaccttttagactatacctttagaatccaatagctcataattttatatttaatttttaaaacatyttaaccagttatgaaacttaagatattcttactatctctagtaactattagttattctggtaattcttactatctctagtaactcatagctgtctttacccttggaattgaggcaagacattttcagaattatcttgctcttttattgttataaccttactcataatacagaaggtaacatgaaatattgggtcatattattaaggaatagaaattgtgaacaatttaacaatgatggccactgagttaaactagtgttaaaggagtcatcattgccagtggttcaaatgttgcagttttacattgctggtcatcagtgccgaggttaaagatttattctgttttgtggtcacgatttgacttctgtgtctgtgttcagggagtgaatggggtcataaaagtcaacccagttgcctattaagagaatcctaccttgtggaatgggacctttggtgtcagggtacaaacaataactttattt

SEQ ID NO: 384441 - DNA, 427 bp, Homo sapiens
atatgttttccacctataaacttttgtggtaattgaatgtgaaatctgggaagcatctcattttccagaattctgcactagaaactcagcagtttcactctgcttcttttgttgtggcaaacgttggttcccataattcaaagagaacctttacttttttgatatcacaggattcaaaaaaaaaaaaagagagataaaaggcagtggggaaaagagtagctcagtacagaaaagggaaaacttctttactgttcctgaaggcctacaakgtcacatcctcttaatctggctatttcatgtaaaatccaggtagtaaagacagaagacatatgttatgcctgtgtccttttatttctctgtttctgccagccagatagcataaaaatttataccagatagcaaagagtggatgggaataaaagcacaa

SEQ ID NO: 384442 - DNA, 601 bp, Homo sapiens
ctgctgctggcagattaacccaacaaagaaagattgggaaaacgtatcctcagcaatttcccaagaagctgaaggaagagcatgataggtaagcctatagcagtgttttttttttgtttgtttggttttgggttttttttgtttgtttttgtttttttgagatggagtttctctcttgttgcccaagctggagttcaatggtgtgatctcagctcactgcaacctctgcctcctgggttcaagcgattctcctgactcagtctccctagtagctgggattacaggcatgtgccaccatgcccggctaattttttgtatttttagtaaaaataggatttcaccatgttagccaagctcgtctcgaactcctgacttcaggtkttctgcccacctcggcctcccaaagtgctgggtttacaggagtgagccaccgtgcctggccgcctatagcagtatttcacaggagataattgtcattgtgctataaactaattgaaaattggactaatattccttatgattaacaagttttatatttttaccaggggtatttagccctgcctggtaatcagaaaaatgcaaattaacataaaataagata

SEQ ID NO: 384443 - DNA, 570 bp, Homo sapiens
tcatttttaaaaatgaatgatgacacttacaggtacaattattaatatttattataaatcttggcatccacataggatattattttattacaaagagcttttgaaaacaataatatgccataatttatacttagtgataacctattgataaaaattttgttccaggtaaaatttttccttgtactttcccstatttcatattgattactgcacctaatattataaagaggaaacagaaattattgcaatcgcaaataatctcatgatattctaagaagagctctataaattttatcttatttactattggcgttttgaaataaaagttttctttcgtattgatgtatttacaccacagaagtaactgtgatctgttggagaactagaagtagagtcagaagtcctggggaaaatcctgtagcttgcttatatttttaacatttctttttcaaaattgtggtaactagatgagttcatcaatgaatgtatataggagtgactagtataatgtctagtttatgatttagtgaatgtaattcttataactgactataaaagtgttaaaagagt

SEQ ID NO: 384444 - DNA, 623 bp, Homo sapiens
atgtgtggtgataattttcaaagtagatatgttagaattaaacattattaacataatttaataaggcagtttataaaatcagtaacaaaaatattttatcaggtggttgtgagacaacttcaacaagaagtggctgacagcgtaaaaaaattaacgacgttagagtctccactggaaggtatatcacgttgtcacattaatttggatgagacacagrcctcaaataagaaattatttcaagtgaaaagtcaagtatgtatggaatttaacatgtcaacagttattctgtagctagttgaattatataacgtgttttaggatactaattttggcagaagcttgattttttattttcattataatgaatgatttccattttactatctttataatgtacttatttttttatattgtgactttcattctaccattttgaaaaaccattgcataccttttctcttacaatatgtacccttggaaaagttgagaattatacatcattcctcatagaaaattgacttttttcctgttaaacagtatttttaagtaatttttgtattgctctgatgaggcaggccagattaaatcagaggagaatgtttcatggaatgttccagaaaatt

SEQ ID NO: 384445 - DNA, 623 bp, Homo sapiens
atgtgtggtgataattttcaaagtagatatgttagaattaaacattattaacataatttaataaggcagtttataaaatcagtaacaaaaatattttatcaggtggttgtgagacaacttcaacaagaagtggctgacagcgtaaaaaaattaacgacgttagagtctccactggaaggtatatcacgttgtcacattaatttggatgagacacaggcctcaaataagaaattatttcaagtgaaaagtcaagtatgtatggaatttaacatgtcaacagttattctgtagctagttgaattatataacgtgttttaggatactaattttggcagaagcttgattttttattttcattataatgaatgatttccattttactatctttataatgtacttatttttttatattgtgactttcattmtaccattttgaaaaaccattgcataccttttctcttacaatatgtacccttggaaaagttgagaattatacatcattcctcatagaaaattgacttttttcctgttaaacagtatttttaagtaatttttgtattgctctgatgaggcaggccagattaaatcagaggagaatgtttcatggaatgttccagaaaatt

SEQ ID NO: 384446 - DNA, 623 bp, Homo sapiens
atgtgtggtgataattttcaaagtagatatgttagaattaaacattattaacataatttaataaggcagtttataaaatcagtaacaaaaatattttatcaggtggttgtgagacaacttcaacaagaagtggctgacagcgtaaaaaaattaacgacgttagagtctccactggaaggtatatcacgttgtcacattaatttggatgagacacaggcctcaaataagaaattatttcaagtgaaaagtcaagtatgtatggaatttaacatgtcaacagttattctgtagctagttgaattatataacgtgttttaggatactaattttggcagaagcttgattttttattttcattataatgaatgatttccattttactatctttataatgtacttatttttttatattgtgactttcattctaccattttgaaaaaccattgcataccttttctcttacaatatgtacccttggaaaagttgagaattatacatcattcctcatagaaaattgacttttttcctgttaaacagtatttttaagtaatttktgtattgctctgatgaggcaggccagattaaatcagaggagaatgtttcatggaatgttccagaaaatt

SEQ ID NO: 384447 - DNA, 298 bp, Homo sapiens
ctgcaactctcagtgttaagaatgattcagtgcagctataggagactacttccattggcatgccacctgcgtaaaatacacaattttgttaagatatacaataaaattattatgctaatagcaaatattttatgtagctcactatgttccatgtagtcttctaagtgcttcatgttagtccccagttaaacacctggttttggaaggctgaggcaggaggattgyttgagcccaggagtttgagaccagccagagcaatatagtgagactctgtctctaaaaaaaaaaaatttttttt

SEQ ID NO: 384448 - DNA, 298 bp, Homo sapiens
ctgcaactctcagtgttaagaatgattcagtgcagctataggagactacttccattggcatgccacctgcgtaaaatacacaattttgttaagatatacaataaaattattatgctaatagcaaatattttatgtagctcactatgttccatgtagtcttctaagtgcttcatgttagtccccagttaaacacctggttttggaaggctgaggcaggaggattgcttgagcccakgagtttgagaccagccagagcaatatagtgagactctgtctctaaaaaaaaaaaatttttttt

SEQ ID NO: 384449 - DNA, 549 bp, Homo sapiens
aaacaattgataatctgattttcatgggaaagttttcattatcaaagaaaaagagggctgggttccatggctcacatctgtaatcccaacactttgggaggctgagaggggtggatwacctgaggtcaggagttcaaaaacagcctggccaacatggtgaaaccctgtctctactgaaaatacaaaaattagccaggcgtggtggtgtgcacctgtagtcccagctacttgcgaggcagaggcaggagaatcacttgaacccaggaggtagaagttgcagtaagctgagatggcttactgcatccagcctggatgacacagtgtgactccatctcaaaaaaagaaaaggacaaagtatattggtccaaaaaagaagaaagaatgaaaaaaaggacaaagtatactggttagtatcgtaacagtgagatagtccccctttgagattagaaaataacagtatactcaaagtaacatcaataagaaccaacataaaatagacaagattcactatctacaaaagtaatctgcaccaagtagcaatgtatgagc

SEQ ID NO: 384450 - DNA, 518 bp, Homo sapiens
ggcctgctactccagatgatgagcaaatgaaggaagccacttccatccttaactgtgaaaaatgagtaggrgaaggtggtgcattctgggtcccatgattccagactgaccattggccctatttgagtgcagctgctgttaggcagaaactctggactccaaactctcagtaaaacttctgaagacactgctgttgctattgcagctgtcagcaccattgattcagctgagaagaagtccagaatatcacactgacacccacgctgttggttgtgtttttttgaaccagattgaaattaatatctattgtatggttcaatttctatgaagttcaatgtcaagcaaatgtaatttataaagataaaagtaagaacagtggttgcctatagtaatgattggaggttcacaatagagactcctggattctagtaatactcaattcatattcatgtaggttgtgatgacattagtattttacattctaaaaatgtttaatgctatatgctcaagatctgtgt

SEQ ID NO: 384451 - DNA, 518 bp, Homo sapiens
ggcctgctactccagatgatgagcaaatgaaggaagccacttccatccttaactgtgaaaaatgagtaggggaaggtggtgcattctgggtcccatgattccagactgaccattggccctatttgagygcagctgctgttaggcagaaactctggactccaaactctcagtaaaacttctgaagacactgctgttgctattgcagctgtcagcaccattgattcagctgagaagaagtccagaatatcacactgacacccacgctgttggttgtgtttttttgaaccagattgaaattaatatctattgtatggttcaatttctatgaagttcaatgtcaagcaaatgtaatttataaagataaaagtaagaacagtggttgcctatagtaatgattggaggttcacaatagagactcctggattctagtaatactcaattcatattcatgtaggttgtgatgacattagtattttacattctaaaaatgtttaatgctatatgctcaagatctgtgt

SEQ ID NO: 384452 - DNA, 518 bp, Homo sapiens
ggcctgctactccagatgatgagcaaatgaaggaagccacttccatccttaactgtgaaaaatgagtaggggaaggtggtgcattctgggtcccatgattccagactgaccattggccctatttgagtgcagctgcygttaggcagaaactctggactccaaactctcagtaaaacttctgaagacactgctgttgctattgcagctgtcagcaccattgattcagctgagaagaagtccagaatatcacactgacacccacgctgttggttgtgtttttttgaaccagattgaaattaatatctattgtatggttcaatttctatgaagttcaatgtcaagcaaatgtaatttataaagataaaagtaagaacagtggttgcctatagtaatgattggaggttcacaatagagactcctggattctagtaatactcaattcatattcatgtaggttgtgatgacattagtattttacattctaaaaatgtttaatgctatatgctcaagatctgtgt

SEQ ID NO: 384453 - DNA, 518 bp, Homo sapiens
ggcctgctactccagatgatgagcaaatgaaggaagccacttccatccttaactgtgaaaaatgagtaggggaaggtggtgcattctgggtcccatgattccagactgaccattggccctatttgagtgcagctgctgttaggcagaaactctggactccaaactctcagtaaaacttctgaagacactgytgttgctattgcagctgtcagcaccattgattcagctgagaagaagtccagaatatcacactgacacccacgctgttggttgtgtttttttgaaccagattgaaattaatatctattgtatggttcaatttctatgaagttcaatgtcaagcaaatgtaatttataaagataaaagtaagaacagtggttgcctatagtaatgattggaggttcacaatagagactcctggattctagtaatactcaattcatattcatgtaggttgtgatgacattagtattttacattctaaaaatgtttaatgctatatgctcaagatctgtgt

SEQ ID NO: 384454 - DNA, 567 bp, Homo sapiens
ggaaggtggtgcattctgggtcccatgattccagactgaccattggccctatttgagtgcagctgctgttaggcagaaactctggactccaaactctcagtaaaacttctgaagacactgctgttgctattgcagctgtcagcaccattgattcagctgagaagmagtccagaatatcacactgacacccacgctgttggttgtgtttttttgaaccagattgaaattaatatctattgtatggttcaatttctatgaagttcaatgtcaagcaaatgtaatttataaagataaaagtaagaacagtggttgcctatagtaatgattggaggttcacaatagagactcctggattctagtaatactcaattcatattcatgtaggttgtgatgacattagtattttacattctaaaaatgtttaatgctatatgctcaagatctgtgtctttcacatgtgcatatcatatttcatatttcaattaataaatcagtaaaaaaagttccacttcaggatacaatactgtagaacaatccaaaatattaatttattcttaaagtttttaa

SEQ ID NO: 384455 - DNA, 567 bp, Homo sapiens
ggaaggtggtgcattctgggtcccatgattccagactgaccattggccctatttgagtgcagctgctgttaggcagaaactctggactccaaactctcagtaaaacttctgaagacactgctgttgctattgcagctgtcagcaccattgattcagctgagaagaagtccakaatatcacactgacacccacgctgttggttgtgtttttttgaaccagattgaaattaatatctattgtatggttcaatttctatgaagttcaatgtcaagcaaatgtaatttataaagataaaagtaagaacagtggttgcctatagtaatgattggaggttcacaatagagactcctggattctagtaatactcaattcatattcatgtaggttgtgatgacattagtattttacattctaaaaatgtttaatgctatatgctcaagatctgtgtctttcacatgtgcatatcatatttcatatttcaattaataaatcagtaaaaaaagttccacttcaggatacaatactgtagaacaatccaaaatattaatttattcttaaagtttttaa

SEQ ID NO: 384456 - DNA, 567 bp, Homo sapiens
ggaaggtggtgcattctgggtcccatgattccagactgaccattggccctatttgagtgcagctgctgttaggcagaaactctggactccaaactctcagtaaaacttctgaagacactgctgttgctattgcagctgtcagcaccattgattcagctgagaagaagtccagaatatcacactgacacccacgctgttggttgtgtttttttgaaccagattgaaattaatatctattgtatggttcaatttctatgaagttcaatgtcaagcaaatgtaatttataaagataaaagtaagaacagtggttgcctatagtaatgattggaggttcacaatagagactcctggattctagtaatactcaattcatattcatgtargttgtgatgacattagtattttacattctaaaaatgtttaatgctatatgctcaagatctgtgtctttcacatgtgcatatcatatttcatatttcaattaataaatcagtaaaaaaagttccacttcaggatacaatactgtagaacaatccaaaatattaatttattcttaaagtttttaa

SEQ ID NO: 384457 - DNA, 607 bp, Homo sapiens
actcaattcatattcatgtaggttgtgatgacattagtattttacattctaaaaatgtttaatgctatatgctcaagatctgtgtctttcacatgtgcatatcatatttcatatttcaattaataaatcagtaaaaaaagttccasttcaggatacaatactgtagaacaatccaaaatattaatttattcttaaagtttttaaaatattagaataaatacagagcattttgttaaaacaatatggtaaacctaaatgtaaaaaaaaattaaattgagttaggaatttcaaaaagacatttcatgtgccttttcaactttcaatttcgtatgaaagttgaaaaaacttgaaatcagtaagtgtgcatgtgtatgtaaaacaaaattactgcatataaaaacttttttgaggcatctagaaaatatttagcagtgtgccatagtttagaggcattttaaaatgctttttagtggtacataaaaaattagttaatgacagagtctatgaaaaacaagtagagcagcttgaaataattcacatatttttcatgttaaacttttaggagaagtccagtgatgtcacgatagctctacaatgttgatttatt

SEQ ID NO: 384458 - DNA, 607 bp, Homo sapiens
actcaattcatattcatgtaggttgtgatgacattagtattttacattctaaaaatgtttaatgctatatgctcaagatctgtgtctttcacatgtgcatatcatatttcatatttcaattaataaatcagtaaaaaaagttccacttcaggatacaatactgtagaacaatccaaaatattaatttattcttaaagtttttaaaatattagaataaatacagagcattttgttaaaacaatatggtaaacctaaatgtaaaaaaaaattaaattgagttaggaatttcaaaaagacatttcatgtgccttttcaactttcaatttcgtatgaaagttgaaaaaacttgaaatcagtaagtgtgcatgtgtatgtaaaacaaaattactgcatataaaawcttttttgaggcatctagaaaatatttagcagtgtgccatagtttagaggcattttaaaatgctttttagtggtacataaaaaattagttaatgacagagtctatgaaaaacaagtagagcagcttgaaataattcacatatttttcatgttaaacttttaggagaagtccagtgatgtcacgatagctctacaatgttgatttatt

SEQ ID NO: 384459 - DNA, 607 bp, Homo sapiens
actcaattcatattcatgtaggttgtgatgacattagtattttacattctaaaaatgtttaatgctatatgctcaagatctgtgtctttcacatgtgcatatcatatttcatatttcaattaataaatcagtaaaaaaagttccacttcaggatacaatactgtagaacaatccaaaatattaatttattcttaaagtttttaaaatattagaataaatacagagcattttgttaaaacaatatggtaaacctaaatgtaaaaaaaaattaaattgagttaggaatttcaaaaagacatttcatgtgccttttcaactttcaatttcgtatgaaagttgaaaaaacttgaaatcagtaagtgtgcatgtgtatgtaaaacaaaattactgcatataaaaacttttttgaggcatctagaaaatatttagcagtgtgccatagtttagaggcattttaaaatgctttttagtggtacataaaaaattarttaatgacagagtctatgaaaaacaagtagagcagcttgaaataattcacatatttttcatgttaaacttttaggagaagtccagtgatgtcacgatagctctacaatgttgatttatt

SEQ ID NO: 384460 - DNA, 607 bp, Homo sapiens
actcaattcatattcatgtaggttgtgatgacattagtattttacattctaaaaatgtttaatgctatatgctcaagatctgtgtctttcacatgtgcatatcatatttcatatttcaattaataaatcagtaaaaaaagttccacttcaggatacaatactgtagaacaatccaaaatattaatttattcttaaagtttttaaaatattagaataaatacagagcattttgttaaaacaatatggtaaacctaaatgtaaaaaaaaattaaattgagttaggaatttcaaaaagacatttcatgtgccttttcaactttcaatttcgtatgaaagttgaaaaaacttgaaatcagtaagtgtgcatgtgtatgtaaaacaaaattactgcatataaaaacttttttgaggcatctagaaaatatttagcagtgtgccatagtttagaggcattttaaaatgctttttagtggtacataaaaaattagttaatgacagagtctatgaaaaacaagtagagcagcttgaaataattcacatatttttcatgtwaaacttttaggagaagtccagtgatgtcacgatagctctacaatgttgatttatt

SEQ ID NO: 384461 - DNA, 476 bp, Homo sapiens
gatgaccctaaatgtctgcagacatttttgcagcaatgttaagggtaaaagtgacacagccaatagcaaagaagtgccagaaaatacgtaagcaaactgtgacctctttttacctcttgattgacttttatgttaaataatgaatttaccttatgcttgaaagaatttgaaatarcatttggcagtgaagaatttactcctcccatattttcattcaagagaaatttccatgaggagggttgttggtgggttacctccaactcacccacttcagagctactacagtggtaatgcatgttgaagaaaagagtcaaactctgtgaaatatttgaagagatttattctgaggcaaatatgagtgacctcggcctgtcacacagcccaggagatcctaagaacatctgccaaggttgttggactacagcttggatttatacatgtgagggagacataagacatcaataagtacacctaag

SEQ ID NO: 384462 - DNA, 476 bp, Homo sapiens
gatgaccctaaatgtctgcagacatttttgcagcaatgttaagggtaaaagtgacacagccaatagcaaagaagtgccagaaaatacgtaagcaaactgtgacctctttttacctcttgattgacttttatgttaaataatgaatttaccttatgcttgaaagaatttgaaatagcatttggcagtgaagaatttactcctcccatattttcattcaagagaaatttccatgaggagggttgttggtgggttacctccaactcamccacttcagagctactacagtggtaatgcatgttgaagaaaagagtcaaactctgtgaaatatttgaagagatttattctgaggcaaatatgagtgacctcggcctgtcacacagcccaggagatcctaagaacatctgccaaggttgttggactacagcttggatttatacatgtgagggagacataagacatcaataagtacacctaag

SEQ ID NO: 384463 - DNA, 571 bp, Homo sapiens
caggtttagtttaaaatgcccttggccaagataaagagcccatttagttggttaacggacattgaatttyatttttggcttacatgcaggtgccatgctctccttaggttgctgctccctgccaatgctgagcaaggaagatattatagggcttttcattcttgtcccacatggactcatctaaaggtcaaagttcactttggtgctctttcagtgtggctgacaatttctcagatctgcactcttctctgaggctcctcctttccaattatctttcatgctctctcttcttttgaggtgccggcttgcatcatgatctggaggctcttgcagcctcttgctctatcttctctttattcttcaaaggcgttttctctggttactctcttatacgtgtaattccatcttggtgtctgattcttgggaaacccaaactggcttataatttttcttactttcagtaaaaccttctttgctgatgcatcattcattaattcattaaatgtattgtgttttgtatgggaaaacaatgatgccaaagtgtctatagctatatagtctgatatatgct

SEQ ID NO: 384464 - DNA, 477 bp, Homo sapiens
actatcaataatacagagatctgcaagaattcccacacaggtgaaatatgcatggtggaaagaggcaaytcttaaggcaaagagccaagcatgtaccaaacaccaatgcccttgcataccaaagctaaagattctacaatttgccaaagataagaatgtacctttcacaacagcaaggacctcatatattgtcttattatatatccctaaaatctagcacagtgttgaataagaggaagtagaaataattttgagaaggaattaaacatgtatttgtagaagtcaagtcttacccattgaaaaagtatctcccccatatttgtaattcattaaattgtttggaagggaaaagaaactaaagggaatactccatagggaaagttgtttcagaaattatgcaaatttattctaataactaagaaatagtgaaaatgtattagaaatgttaggtagaggcacatttcagatttagactaa

SEQ ID NO: 384465 - DNA, 477 bp, Homo sapiens
actatcaataatacagagatctgcaagaattcccacacaggtgaaatatgcatggtggaaagaggcaactcttaaggcaaagagccaagcatgtaccaaacaccaatgcccttgcataccaaagctaaagattctacaatttgccaaagataagaatgtamctttcacaacagcaaggacctcatatattgtcttattatatatccctaaaatctagcacagtgttgaataagaggaagtagaaataattttgagaaggaattaaacatgtatttgtagaagtcaagtcttacccattgaaaaagtatctcccccatatttgtaattcattaaattgtttggaagggaaaagaaactaaagggaatactccatagggaaagttgtttcagaaattatgcaaatttattctaataactaagaaatagtgaaaatgtattagaaatgttaggtagaggcacatttcagatttagactaa

SEQ ID NO: 384466 - DNA, 617 bp, Homo sapiens
ttaggtagaggcacatttcagatttagactaaggtgcaaatggctttctacttaatgatagagaaaagcataaataaaagtacattgtatacatgaaatggttttgtttgaattgggtatagaatatcaaatgagaaatatatagtaaggaattgaatatatggaaatacagatatagacggccagagcacctacttgtagctcttgatagcagaattatcagtcaactgaaaagatattttaagacctccaagaataagtagataatttctattctgtattttgttaatgaaagaaaaccagggtaataactgcttgaattttcatcactagcatgtttcctacatacataaacatagtgagtagtgagtatattcacayataaagtaacaaagaattatagtaaaccccaacatccaatcgggaaaaatgttgtaactctatatattcattaaattgctcacaaactgacatcttttagcatataatatggtttcctttagcttgttaaagagcatggactcatgactaaaacataagaacacccaatgaagctcaactaaatcaattcaactatgaaaaataaactgactagtgatcatctctttactattatt

SEQ ID NO: 384467 - DNA, 416 bp, Homo sapiens
tttaagacctccaagaataagtagataatttctattctgtattttgttaatgaaagaaaaccagggtaataactgcttgaattttcatcactagcatgtttcctacatacataaacatagtgagtagtgagtatattcacatataaagtaacaaagaattatagtaaaccccaacatccaatcgggaaaaatgttgtaactctatatattcattaaattgytcacaaactgacatcttttagcatataatatggtttcctttagcttgttaaagagcatggactcatgactaaaacataagaacacccaatgaagctcaactaaatcaattcaactatgaaaaataaactgactagtgatcatctctttactattattgaaagaataacttacaagtaaaaacattcaatttttga

SEQ ID NO: 384468 - DNA, 416 bp, Homo sapiens
tttaagacctccaagaataagtagataatttctattctgtattttgttaatgaaagaaaaccagggtaataactgcttgaattttcatcactagcatgtttcctacatacataaacatagtgagtagtgagtatattcacatataaagtaacaaagaattatagtaaaccccaacatccaatcgggaaaaatgttgtaactctatatattcattaaattgctcacaaactgacatcttttagcatataatatggtttcctttagcttgttaaagagcatggactcatgactaaaacataagaacacccaatgaagctcaactaaatcaattcaactatgaaaaataaactgactagtgatcatctctttaytattattgaaagaataacttacaagtaaaaacattcaatttttga

SEQ ID NO: 384469 - DNA, 599 bp, Homo sapiens
tggtttcatagaaagcttttacccccttcactctgcacttttccttcctgccacaatgtgcagaaggacatggtttgcttccccttctggcatgattgtaagttttctgaggcctccccagacctgcagaattgygagtcaattaagcctctttcctttatatattaaccagcatctagcagctctttatagcggtgtgagaacggaccaatacaacaagtgaacaggtatttttgcttattgtccattgtcaaaaccacttatttatttttacattgactattgtctatcttctatggtttgttacctccaacaataaggtaatcaagggtcaaaattttttgtttattcagtaaaatgctctcagtgaattgggcattgggtggcacagagtaagtatttaatgtatctattaattttgtatataaatgaataaattttctaaattttgctaataatgttaatagaagacccaaaaagtataatcagtaaattagttgtattttgaagaaaaaaaagttaatctatgtaacaaatttatgtaaaaattctcaggatatacacttgagtaataatcattgtaacatttacctatttaa

SEQ ID NO: 384470 - DNA, 599 bp, Homo sapiens
tggtttcatagaaagcttttacccccttcactctgcacttttccttcctgccacaatgtgcagaaggacatggtttgcttccccttctggcatgattgtaagttttctgaggcctccccagacctgcagaattgcgagtcaattaagcctctttcctttatatattaaccagcatctagcagctctttatagcrgtgtgagaacggaccaatacaacaagtgaacaggtatttttgcttattgtccattgtcaaaaccacttatttatttttacattgactattgtctatcttctatggtttgttacctccaacaataaggtaatcaagggtcaaaattttttgtttattcagtaaaatgctctcagtgaattgggcattgggtggcacagagtaagtatttaatgtatctattaattttgtatataaatgaataaattttctaaattttgctaataatgttaatagaagacccaaaaagtataatcagtaaattagttgtattttgaagaaaaaaaagttaatctatgtaacaaatttatgtaaaaattctcaggatatacacttgagtaataatcattgtaacatttacctatttaa

SEQ ID NO: 384471 - DNA, 561 bp, Homo sapiens
cacacccttgcagaggtggctggttgctctttgagccagcttggacttacttggcatgcacaggccccgggtactgacaagctgctccgagtgagcttgtcttgtcttgggccaaattctaagtctggccagggccacagaaggctgagtcccctgggtggtaaycctggctgctgcagggaggcccatggtgctcctcccctcccagggctcaggatgaggttcaactgggacaggaccctttaggtatgggacttgtgccccaggagggggcctctgtcacacaggttgggtaagatgtatggcatgctgctggcttccagggctgttgggatgacacattcacccttccctccagggacctcaaaatgaccagcttcccctttgagaatgacttcccaaggcctaggagccatctggggctgcagggcagctgcctgcatgctgccctggcttcttccatgttgtgctggtcactacccaccaaggggggtcagatgcaggcaccatgcagggcagttgtctctggacctgtgtctttgttatcatggagctggactg

SEQ ID NO: 384472 - DNA, 312 bp, Homo sapiens
ttttgtctgatattaatagaagtcttcagtttttatatacttagtagttataccatagaaatactgccatcctcttatcttaaaagactccagaaatttgaactttcatgtaaaatattttcaatattaatttataatattttataacattacatagtaattttgaaaaaatatttgttatttatataaaaagcctacggagatttggactgatattgcaattaatctagaaatcaatttartagaactaccttcttaacactataaagcattcaaattattgaacttggtttatctctccatttatttagg

SEQ ID NO: 384473 - DNA, 594 bp, Homo sapiens
caacttcacagccaatgagttgacatgcaagcaggtgatggtgacaggctttaagaaggagcatcagaaggctgccagttcttcagcctcagccaggccttggagctggaccagcccatccacttcaccacagatgccttcaacactgtcagtgagctctttgccaatcatcccaggcagaacctggacccagtcatggacctattagtgctgtctcagggacaccagaccaacatcctgaacatcatccacatacacaagcaagttcttaccaaagtcgcggaggrcaggcaacatgtggcagaagggaagatagagatgcagaggctgatgacatcagaatcacaggaacaggaattctttcaccacttcagtggaaattcaccacttccatccaatttgaatgagagacatgaaatcacagatgcagcatttcttgcaataagagatactattttttcaaaaatcatccaggaattgataatgttgaatgactagatatttgattgtggactgtttccagttcaaggatactttctacacagaataataacactagcaaggagctagtgccagctatccgtggtagcacaa

SEQ ID NO: 384474 - DNA, 561 bp, Homo sapiens
cacacccttgcagaggtggctggttgctctttgagccagcttggacttacttggcatgcacaggccccgggtactgacaagctgctccgagtgagcttgtcttgtcttgggccaaattctaagtctggccagggccacagaaggctgagtcccctgggtggtaatcctggctgctgcagggaggcccatggtgctcctcccctcccagggctcaggatgaggttcaactgggacaggaccctttaggtatgggacttgtgccccaggagggggcctctgtcacacaggttgggtaagatgtatggcatgctgctggcttccagggctgttgggatgacacattcacccttccctccagggacctcaaaatgaccagcttcccctttgagaatgacttcccaaggcctaggagccatctggggctgcagggcagctgsctgcatgctgccctggcttcttccatgttgtgctggtcactacccaccaaggggggtcagatgcaggcaccatgcagggcagttgtctctggacctgtgtctttgttatcatggagctggactg

SEQ ID NO: 384475 - DNA, 594 bp, Homo sapiens
caacttcacagccaatgagttgacatgcaagcaggtgatggtgacaggctttaagaaggagcatcagaaggctgccagttcttcagcctcagccaggccttggagctggaccagcccatccacttcaccacagatgccttcaacactgtcagtgagctctttgccaatcatcccaggcagaacctggacccagtcatggacctattagtgctgtctcagggacaccagaccaacatcctgaacatcatccacatacacaagcaagttcttaccaaagtcgcggagggcaggcaacatgtggcagaagggaagatagagatgcagaggctgatgacaycagaatcacaggaacaggaattctttcaccacttcagtggaaattcaccacttccatccaatttgaatgagagacatgaaatcacagatgcagcatttcttgcaataagagatactattttttcaaaaatcatccaggaattgataatgttgaatgactagatatttgattgtggactgtttccagttcaaggatactttctacacagaataataacactagcaaggagctagtgccagctatccgtggtagcacaa

SEQ ID NO: 384476 - DNA, 561 bp, Homo sapiens
cacacccttgcagaggtggctggttgctctttgagccagcttggacttacttggcatgcacaggccccgggtactgacaagctgctccgagtgagcttgtcttgtcttgggccaaattctaagtctggccagggccacagaaggctgagtcccctgggtggtaatcctggctgctgcagggaggcccatggtgctcctcccctcccagggctcaggatgaggttcaactgggacaggaccctttaggtatgggacttgtgccccaggagggggcctctgtcacacaggttgggtaagatgtatggcatgctgctggcttccagggctgttgggatgacacattcacccttccctccagggacctcaaaatgaccagcttcccctttgagaatgacttcccaaggcctaggagccatctggggctgcagggcagctgcctgcatgctgccctgrcttcttccatgttgtgctggtcactacccaccaaggggggtcagatgcaggcaccatgcagggcagttgtctctggacctgtgtctttgttatcatggagctggactg

SEQ ID NO: 384477 - DNA, 551 bp, Homo sapiens
gacctaaagtttggaaaatctgcagcctggccaagtggtcaaaaagaaaagatgattttccgggggaaaattcaaggaggcttagagtatctgcataaaaagaagcccagtgcaaatagccaagacaatgggaaagaggcctcgaaggcatttcacagtcctctgcagcagcccttgctgtcacaggcccccatacagggaggcatcattctccaaaccccagattcatagacccacaaacagcttgcaccctcagtatggaaaagctacaggcactcaacaccagccctgtccatgacggcagctacaggggctgaacactgcaaagccayaggtgcagatctgcccaaggcctaggaagaccagccctcatacacctgtgccatggatgtgggacagggattcaaaaaggatgattctggagctgtaggattgagtgactggcctgctgggttttggacatttatgtatcctatgaatcccatctgtgttttgtgctgctttccagcaatttttttttctattggttgagaatgcttacccattgcctg

SEQ ID NO: 384478 - DNA, 551 bp, Homo sapiens
gacctaaagtttggaaaatctgcagcctggccaagtggtcaaaaagaaaagatgattttccgggggaaaattcaaggaggcttagagtatctgcataaaaagaagcccagtgcaaatagccaagacaatgggaaagaggcctcgaaggcatttcacagtcctctgcagcagcccttgctgtcacaggcccccatacagggaggcatcattctccaaaccccagattcatagacccacaaacagcttgcaccctcagtatggaaaagctacaggcactcaacaccagccctgtccatgacggcagctacaggggctgaacactgcaaagccacaggtgcagatctgcccaaggcytaggaagaccagccctcatacacctgtgccatggatgtgggacagggattcaaaaaggatgattctggagctgtaggattgagtgactggcctgctgggttttggacatttatgtatcctatgaatcccatctgtgttttgtgctgctttccagcaatttttttttctattggttgagaatgcttacccattgcctg

SEQ ID NO: 384479 - DNA, 551 bp, Homo sapiens
gacctaaagtttggaaaatctgcagcctggccaagtggtcaaaaagaaaagatgattttccgggggaaaattcaaggaggcttagagtatctgcataaaaagaagcccagtgcaaatagccaagacaatgggaaagaggcctcgaaggcatttcacagtcctctgcagcagcccttgctgtcacaggcccccatacagggaggcatcattctccaaaccccagattcatagacccacaaacagcttgcaccctcagtatggaaaagctacaggcactcaacaccagccctgtccatgacggcagctacaggggctgaacactgcaaagccacaggtgcagatctgcccaaggcctaggaagaccagccctcatacmcctgtgccatggatgtgggacagggattcaaaaaggatgattctggagctgtaggattgagtgactggcctgctgggttttggacatttatgtatcctatgaatcccatctgtgttttgtgctgctttccagcaatttttttttctattggttgagaatgcttacccattgcctg

SEQ ID NO: 384480 - DNA, 585 bp, Homo sapiens
gtcatatgctataacctaaaaacacagacaggtaggcaatgtccacatagtgtcatagataccatgacaggtatacagcagggcactactggaacacacaaaagggacatctatcccacttttatgtcaatatcatgggctttctggtggaggagataacataggttgatacctgaaggacaaggaaaagcttgccagatagagggaagaggcgaaggcaaagagcctgaggtgaggaagagccctgcggagttctactctcctccactttggtgctagagcaaagggtagagtgcggtaagtggcaaaaaacaaggctgagtaacttgacaagaatcacattgacgtgggtgttttyatttcatggtgaaaattttggaacttttcctgagaacagatgtaagccaatgacacagtaaatgataggagatttaaaatgtcacctgtcaagtgactgcttatgaagggttattgcccagctaaggatttcaaaatgagtctgaggtctgttggccttcaatctgtaccaaaaccctgagaacttggtgatgcctttgttttctgagaattgtttcagtgtgctgg

SEQ ID NO: 384481 - DNA, 585 bp, Homo sapiens
gtcatatgctataacctaaaaacacagacaggtaggcaatgtccacatagtgtcatagataccatgacaggtatacagcagggcactactggaacacacaaaagggacatctatcccacttttatgtcaatatcatgggctttctggtggaggagataacataggttgatacctgaaggacaaggaaaagcttgccagatagagggaagaggcgaaggcaaagagcctgaggtgaggaagagccctgcggagttctactctcctccactttggtgctagagcaaagggtagagtgcggtaagtggcaaaaaacaaggctgagtaacttgacaagaatcacattgacgtgggtgtttttatttcatggtgaaaawtttggaacttttcctgagaacagatgtaagccaatgacacagtaaatgataggagatttaaaatgtcacctgtcaagtgactgcttatgaagggttattgcccagctaaggatttcaaaatgagtctgaggtctgttggccttcaatctgtaccaaaaccctgagaacttggtgatgcctttgttttctgagaattgtttcagtgtgctgg

SEQ ID NO: 384482 - DNA, 585 bp, Homo sapiens
gtcatatgctataacctaaaaacacagacaggtaggcaatgtccacatagtgtcatagataccatgacaggtatacagcagggcactactggaacacacaaaagggacatctatcccacttttatgtcaatatcatgggctttctggtggaggagataacataggttgatacctgaaggacaaggaaaagcttgccagatagagggaagaggcgaaggcaaagagcctgaggtgaggaagagccctgcggagttctactctcctccactttggtgctagagcaaagggtagagtgcggtaagtggcaaaaaacaaggctgagtaacttgacaagaatcacattgacgtgggtgtttttatttcatggtgaaaattttggaacttttcctgagaacagatgtaagccaatgacacagtawatgataggagatttaaaatgtcacctgtcaagtgactgcttatgaagggttattgcccagctaaggatttcaaaatgagtctgaggtctgttggccttcaatctgtaccaaaaccctgagaacttggtgatgcctttgttttctgagaattgtttcagtgtgctgg

SEQ ID NO: 384483 - DNA, 411 bp, Homo sapiens
tgcagtggtatgatcttggttcactgcaacctctgtctccygggttcaagtgactctcccgcctcagcctcccaagtatctgagattacacatgcctgccaacatgccttgctaatttttgtatttttagtagagatgggtttcatcatgttggccaggctggtctcaaactcctgacctcaggtgatccacctgcctcggcctcccaaaatgttgggattgtaagtgtgagccacggcacctggccaagcacaaagctttgaacataaaaatggaaatgaacattttagtgttttgtttaattcataaaatgcaattattttggattctactaaataataaacatctatatgtggcaaactgtttggatgccaatcattcagttgtgattatgggtgggaagagttgaga

SEQ ID NO: 384484 - DNA, 411 bp, Homo sapiens
tgcagtggtatgatcttggttcactgcaacctctgtctcctgggttcaagtgactctcccgcctcagcctcccaagtatctgagattacacatgcctgccaacatgccttgctaatttttgtatttttagtagagatgggtttcatcatgttggccaggctggtctcaaactcctgacctcaggtgatccacctgcctcggcctcccaaaatgttgggattgtaagtgtgagccacggcacctggccaagcacaaagctttgaacataaaaatggaaatgaacattttagtgttttgtttaattcataaaatgcaattattttggattctactaaataataaacatctatatgtggyaaactgtttggatgccaatcattcagttgtgattatgggtgggaagagttgaga

SEQ ID NO: 384485 - DNA, 338 bp, Homo sapiens
ttctttcttggcttaagctcatatttcattgaccaattaggcttgttttttgtttgtatctctcttcattctcayattttaaattgaaatttttggggagtcagggtcttgctctgttgcccatgctgcagtgtagtggcatgatcttggctcactgcagtatccacctctcaggctcaagtgatcctcccacatcagcttcccaagcagctgggactacaggcgcacaccatcatgcctgactccttttggtattttttgagtagagatgtgttctcattatgttgcccaggctggtctcaaactcctgaactcaagcaatccacccaccttggcct

SEQ ID NO: 384486 - DNA, 338 bp, Homo sapiens
ttctttcttggcttaagctcatatttcattgaccaattaggcttgttttttgtttgtatctctcttcattctcatattttaaattgaaatttttggggagtcagggtcttgctctgttgyccatgctgcagtgtagtggcatgatcttggctcactgcagtatccacctctcaggctcaagtgatcctcccacatcagcttcccaagcagctgggactacaggcgcacaccatcatgcctgactccttttggtattttttgagtagagatgtgttctcattatgttgcccaggctggtctcaaactcctgaactcaagcaatccacccaccttggcct

SEQ ID NO: 384487 - DNA, 338 bp, Homo sapiens
ttctttcttggcttaagctcatatttcattgaccaattaggcttgttttttgtttgtatctctcttcattctcatattttaaattgaaatttttggggagtcagggtcttgctctgttgcccatgctgcagtgtagkggcatgatcttggctcactgcagtatccacctctcaggctcaagtgatcctcccacatcagcttcccaagcagctgggactacaggcgcacaccatcatgcctgactccttttggtattttttgagtagagatgtgttctcattatgttgcccaggctggtctcaaactcctgaactcaagcaatccacccaccttggcct

SEQ ID NO: 384488 - DNA, 526 bp, Homo sapiens
attgatctgtagaagaaggaagaacatggtgttagaaacaggaaagaagataaagtgagcttccagtaccaaaatgtgtcagagaattacagtaacattttccttctcttgctgtcatcctcactactggggaggcattaaggattgaggcacctcmccacacagacctgtgttttatctaccatagatgaacatcaccaaagatggtcagccatgtatggctataatttgtttttatagaaaatgttgtaacctcataggatagtatcatataggccaaattaacataattgaatagtgttgggtgatttatggagaagaaattaattcaagaagttattgcctgattaaaagttcattagaaacattatggcttataatgtagtattaaattgagggacataatagggaagaaattgaggctaggccaaaagggcaattaggggaaaccaatatggaagcacatcagtgtagaacagggcattcaaattgtcatgaatgagttgaagagcttctggaaggtgca

SEQ ID NO: 384489 - DNA, 526 bp, Homo sapiens
attgatctgtagaagaaggaagaacatggtgttagaaacaggaaagaagataaagtgagcttccagtaccaaaatgtgtcagagaattacagtaacattttccttctcttgctgtcatcctcactactggggaggcattaaggattgaggcacctcaccacacagacctgtgttttatctaccatagatgaacatcaccaaaratggtcagccatgtatggctataatttgtttttatagaaaatgttgtaacctcataggatagtatcatataggccaaattaacataattgaatagtgttgggtgatttatggagaagaaattaattcaagaagttattgcctgattaaaagttcattagaaacattatggcttataatgtagtattaaattgagggacataatagggaagaaattgaggctaggccaaaagggcaattaggggaaaccaatatggaagcacatcagtgtagaacagggcattcaaattgtcatgaatgagttgaagagcttctggaaggtgca

SEQ ID NO: 384490 - DNA, 526 bp, Homo sapiens
attgatctgtagaagaaggaagaacatggtgttagaaacaggaaagaagataaagtgagcttccagtaccaaaatgtgtcagagaattacagtaacattttccttctcttgctgtcatcctcactactggggaggcattaaggattgaggcacctcaccacacagacctgtgttttatctaccatagatgaacatcaccaaagatggtcagccatgtatggctataatttgtttttatagaaaatgttgtaacctcataggatagtatcatataggccaaattaacataattgaatagtgttgggtgatttatggagaagaaattaattcragaagttattgcctgattaaaagttcattagaaacattatggcttataatgtagtattaaattgagggacataatagggaagaaattgaggctaggccaaaagggcaattaggggaaaccaatatggaagcacatcagtgtagaacagggcattcaaattgtcatgaatgagttgaagagcttctggaaggtgca

SEQ ID NO: 384491 - DNA, 502 bp, Homo sapiens
ataggccaaattaacataattgaatagtgttgggtgatttatggagaagaaattaattcaagaagttattgcctgattaaaagttcattagaaacattatggcttataatgtagtattaaattgagggacataatagggaagaaattgaggctaggccaaaagggcaattaggggaaaccaatatggaagcacatcagtgtagaacagggcattcaaattgtcatgaatgagttgargagcttctggaaggtgcacattctgattcagcaggtatgggagtctgcatttctcatgagtactcaggtgatttttggtgctggtccttggacacagctctgaatagcaagggaatagccttcctttagagaactctggaaaaagaaccattggagagcaatttaaaaaataacagaatccagggaaagcattaatttccttttatttctgagcatgattctagccacaggggaaggagaatgagatgaaaacagagagattaca

SEQ ID NO: 384492 - DNA, 593 bp, Homo sapiens
ttctgtcatgttgccgtcctaggcaatgaaaagatgccaagaagaamcctcaaaaccttaagtaattatttttatagccaggcatgagaattcagctcgatagtaccactgcatgaatgtttggttggccctgtcatacttacatataattgatgacatatcccctttgctttgtagggcctcctgcaaaacatccttccttgaaggtaattaattatgtatatttttgaatcactaactccatgttgtataaaatatatatgatttatgaatcattttcttttaaaacccattcagcctagcactgaagtggaagatcctgctgtgaaaggagcagtacaaagaaagaatgtacagacattgagagcaggtacatttaatggaatactggaaataagtacattcaatgattggaagtactcacattattcttattcctaattctatttgttcaaaattgaatggaaggcattgacataaatgttattgttggtatccatatttgaataaaaataaatttagaagcataaaaaagattttaaaaatgtaagctttaactcagatgtttctcttttaatgtttttgaatagcat

SEQ ID NO: 384493 - DNA, 593 bp, Homo sapiens
ttctgtcatgttgccgtcctaggcaatgaaaagatgccaagaagaaccctcaaaaccttaagtaattatttttatagccaggcatgagaattcagctcgatagtaccactgcatgaatgtttggttggccctgtcatacttacatataattgatgacatatcccctttgctttgtagggcctcctgcaaaacatccttccttgaaggtaattaattatgtatatttttgaatcactaactccatgttgtataaaatatatatgatttatgaatcattttcttttaaaacccattcagcctagcactgaagtggaagatcctgctgtgaaaggagcagtacaaagaaagratgtacagacattgagagcaggtacatttaatggaatactggaaataagtacattcaatgattggaagtactcacattattcttattcctaattctatttgttcaaaattgaatggaaggcattgacataaatgttattgttggtatccatatttgaataaaaataaatttagaagcataaaaaagattttaaaaatgtaagctttaactcagatgtttctcttttaatgtttttgaatagcat

SEQ ID NO: 384494 - DNA, 568 bp, Homo sapiens
tggtatttctagttatgttttaaccactttgtgaattacacttctttaaattccttgataattattccctatttcacaaggatgcctttctgtaacatcttgaaaatgttacacaaatagtctttcttgaggcacsctctagtgataatactaaagatcacaatcaaaaatgattgtgcccagagtagcagtaccacttgaaactttgggtttaggttgtgatctaccaaaaaataaattaaactcattaatatttctatttaggaaaattctgacaagcaattttataacaagatcacattattaattataaagcttcgaaagtacttagtgacaaaaactaacagatcaggttaactacatgagacttttcaggggaaaaaagtcatacaaaagcaaaaaaaaaaagagagagagagagaaagaaatgggacagaaactatccttgactaacattttaaaggtaagattatttactaacattattttctgaaattacattattagattagcattcacttcctactaatctcctgaagccatctcactaaaaattatgctttcaaaa

SEQ ID NO: 384495 - DNA, 578 bp, Homo sapiens
ctgggtcaaatggtatttctagttatgttttaaccactttgtgaattacacttctttaaattccttgataattattccctatttcacaaggatgcctttctgtaacatcttgaaaatgttacacaaatagtctttcttgaggcaccctctagtgataatactaaagatcacaatcaaaaatgattgtgcccrgagtagcagtaccacttgaaactttgggtttaggttgtgatctaccaaaaaataaattaaactcattaatatttctatttaggaaaattctgacaagcaattttataacaagatcacattattaattataaagcttcgaaagtacttagtgacaaaaactaacagatcaggttaactacatgagacttttcaggggaaaaaagtcatacaaaagcaaaaaaaaaaagagagagagagagaaagaaatgggacagaaactatccttgactaacattttaaaggtaagattatttactaacattattttctgaaattacattattagattagcattcacttcctactaatctcctgaagccatctcactaaaaattatgctttcaaaa

SEQ ID NO: 384496 - DNA, 551 bp, Homo sapiens
accaaaaaataaattaaactcattaatatttctatttaggraaattctgacaagcaattttataacaagatcacattattaattataaagcttcgaaagtacttagtgacaaaaactaacagatcaggttaactacatgagacttttcaggggaaaaaagtcatacaaaagcaaaaaaaaaaagagagagagagagaaagaaatgggacagaaactatccttgactaacattttaaaggtaagattatttactaacattattttctgaaattacattattagattagcattcacttcctactaatctcctgaagccatctcactaaaaattatgctttcaaaacaaattaatgagcttaattcattttctatgagtgtatgtttcgacttactttgttaacttttttgacatggaattgttagctttcaatgctgctgcaaaggcttccttatattcttctaattcggttgtaacctcttcataagcagttttcatttctgagaatttacattccacatctttaagtgtgagttcctttttatttagtgaa

SEQ ID NO: 384497 - DNA, 551 bp, Homo sapiens
accaaaaaataaattaaactcattaatatttctatttaggaaaattctgacaagcaattttataacaagatcacwttattaattataaagcttcgaaagtacttagtgacaaaaactaacagatcaggttaactacatgagacttttcaggggaaaaaagtcatacaaaagcaaaaaaaaaaagagagagagagagaaagaaatgggacagaaactatccttgactaacattttaaaggtaagattatttactaacattattttctgaaattacattattagattagcattcacttcctactaatctcctgaagccatctcactaaaaattatgctttcaaaacaaattaatgagcttaattcattttctatgagtgtatgtttcgacttactttgttaacttttttgacatggaattgttagctttcaatgctgctgcaaaggcttccttatattcttctaattcggttgtaacctcttcataagcagttttcatttctgagaatttacattccacatctttaagtgtgagttcctttttatttagtgaa

SEQ ID NO: 384498 - DNA, 551 bp, Homo sapiens
accaaaaaataaattaaactcattaatatttctatttaggaaaattctgacaagcaattttataacaagatcacattattaattataaagcttcraaagtacttagtgacaaaaactaacagatcaggttaactacatgagacttttcaggggaaaaaagtcatacaaaagcaaaaaaaaaaagagagagagagagaaagaaatgggacagaaactatccttgactaacattttaaaggtaagattatttactaacattattttctgaaattacattattagattagcattcacttcctactaatctcctgaagccatctcactaaaaattatgctttcaaaacaaattaatgagcttaattcattttctatgagtgtatgtttcgacttactttgttaacttttttgacatggaattgttagctttcaatgctgctgcaaaggcttccttatattcttctaattcggttgtaacctcttcataagcagttttcatttctgagaatttacattccacatctttaagtgtgagttcctttttatttagtgaa

SEQ ID NO: 384499 - DNA, 551 bp, Homo sapiens
accaaaaaataaattaaactcattaatatttctatttaggaaaattctgacaagcaattttataacaagatcacattattaattataaagcttcgaaartacttagtgacaaaaactaacagatcaggttaactacatgagacttttcaggggaaaaaagtcatacaaaagcaaaaaaaaaaagagagagagagagaaagaaatgggacagaaactatccttgactaacattttaaaggtaagattatttactaacattattttctgaaattacattattagattagcattcacttcctactaatctcctgaagccatctcactaaaaattatgctttcaaaacaaattaatgagcttaattcattttctatgagtgtatgtttcgacttactttgttaacttttttgacatggaattgttagctttcaatgctgctgcaaaggcttccttatattcttctaattcggttgtaacctcttcataagcagttttcatttctgagaatttacattccacatctttaagtgtgagttcctttttatttagtgaa

SEQ ID NO: 384500 - DNA, 578 bp, Homo sapiens
ctgggtcaaatggtatttctagttatgttttaaccactttgtgaattacacttctttaaattccttgataattattccctatttcacaaggatgcctttctgtaacatcttgaaaatgttacacaaatagtctttcttgaggcaccctctagtgataatactaaagatcacaatcaaaaatgattgtgcccagagtagcagtaccacttgaaactttgggtttaggttgtgatctaccaaaaaataaattaaactcattaatatttctatttaggaaaattctgacaagcaattttataacaagatcacattattaattataaagcttcgaaagtacttagtgacaaaaactaacagatcaggttaactacatgagacttttcaggggaaaaaagycatacaaaagcaaaaaaaaaaagagagagagagagaaagaaatgggacagaaactatccttgactaacattttaaaggtaagattatttactaacattattttctgaaattacattattagattagcattcacttcctactaatctcctgaagccatctcactaaaaattatgctttcaaaa

SEQ ID NO: 384501 - DNA, 575 bp, Homo sapiens
ctagctccaatttatattcttgtagtttactaakttctaccctattgttttccatatgtgtcttaagatttaatatttcttctttcaacatctttttatcctcctcaagtttttcacattgctgttgtacttttttcatagataaaaactcctgttgaagaacttgattgtctttagccaaattgacacattttgaagataaagcttccttctgtgctgtaagatcatcaaactgcatgaataaaataatatagcttgataatgaagtaggctgagaataatctaatacaaaaccaatagcaaattttgaaatgcatttacttgcaataaaatgttatctgtaatgcagtggattcttcaaatgtgaacccttaaattactcagaattttaagaacaaagttaaagctaccatgagtcacaaaaatatattatttgctatcatcatctttgccacagaacttttgcacttcatcttacttttatttttctgataattcatttttgttcctccttagatggcactaagttatctcttagtaaaaagtgtctaaccaccttccctcattatcattcc

SEQ ID NO: 384502 - DNA, 575 bp, Homo sapiens
ctagctccaatttatattcttgtagtttactaatttctaccctattgttttccatatgtgtcttaagatttaatatttcttctttcaacatctttttatcctcctcaagtttttcacattgctgttgtacttttttcatagataaaaactcctgttgaagaacttgattgtctttagccaaattgacacattttgaagataaagcttccttctstgctgtaagatcatcaaactgcatgaataaaataatatagcttgataatgaagtaggctgagaataatctaatacaaaaccaatagcaaattttgaaatgcatttacttgcaataaaatgttatctgtaatgcagtggattcttcaaatgtgaacccttaaattactcagaattttaagaacaaagttaaagctaccatgagtcacaaaaatatattatttgctatcatcatctttgccacagaacttttgcacttcatcttacttttatttttctgataattcatttttgttcctccttagatggcactaagttatctcttagtaaaaagtgtctaaccaccttccctcattatcattcc

SEQ ID NO: 384503 - DNA, 563 bp, Homo sapiens
tgtaaataaggattctgatgccataagcctttccttaaactgcaaatgtttcatgctaatttgaattgcattttamgaagtaatgattcttggggtaaaggccatagaatacacacccagaaataaatccacatatttacagccaactgattttggacaaaggtgccaagaacatacactggggaaaggacagtctcttcaaatgaatggcactgggaaaactaaatatccatatggagaagaatgatactagcttcctatgtaacagcacataatgaaataaactcagaattgattgaagactgacatttaaggcctaaaattatgaaaccactctaagtaaatggaggaaaaatgcttgaggacattagtctgcacaaagatttttatgggtaagacatcagaagcataggcaaaaaccaagtgatagacaaatggtattacattaagataaagagcttctgcccagcaaactgagtgaagagaaaaccagtggaatgggagaaaatattgtcaactattcatctaataagggactagtatccaaaatatacaagaaactc

SEQ ID NO: 384504 - DNA, 563 bp, Homo sapiens
tgtaaataaggattctgatgccataagcctttccttaaactgcaaatgtttcatgctaatttgaattgcattttaagaagtaatgattcttggggtaaaggccatagaatacacacccagaaataaatccasatatttacagccaactgattttggacaaaggtgccaagaacatacactggggaaaggacagtctcttcaaatgaatggcactgggaaaactaaatatccatatggagaagaatgatactagcttcctatgtaacagcacataatgaaataaactcagaattgattgaagactgacatttaaggcctaaaattatgaaaccactctaagtaaatggaggaaaaatgcttgaggacattagtctgcacaaagatttttatgggtaagacatcagaagcataggcaaaaaccaagtgatagacaaatggtattacattaagataaagagcttctgcccagcaaactgagtgaagagaaaaccagtggaatgggagaaaatattgtcaactattcatctaataagggactagtatccaaaatatacaagaaactc

SEQ ID NO: 384505 - DNA, 563 bp, Homo sapiens
tgtaaataaggattctgatgccataagcctttccttaaactgcaaatgtttcatgctaatttgaattgcattttaagaagtaatgattcttggggtaaaggccatagaatacacacccagaaataaatccacatatttacagccaactgattttggacaaaggtgccaagaacatacactggggraaggacagtctcttcaaatgaatggcactgggaaaactaaatatccatatggagaagaatgatactagcttcctatgtaacagcacataatgaaataaactcagaattgattgaagactgacatttaaggcctaaaattatgaaaccactctaagtaaatggaggaaaaatgcttgaggacattagtctgcacaaagatttttatgggtaagacatcagaagcataggcaaaaaccaagtgatagacaaatggtattacattaagataaagagcttctgcccagcaaactgagtgaagagaaaaccagtggaatgggagaaaatattgtcaactattcatctaataagggactagtatccaaaatatacaagaaactc

SEQ ID NO: 384506 - DNA, 379 bp, Homo sapiens
caactgattttggacaaaggtgccaagaacatacactggggaaaggacagtctcttcaaatgaatggcactgggaaaactaaatatccatatggagaagaatgatactagcttcctatgtaacagcacataatgaaataaactcagaattgattgaagactgacatttaaggcctaaaattatgaaaccactctaagtaaatgkaggaaaaatgcttgaggacattagtctgcacaaagatttttatgggtaagacatcagaagcataggcaaaaaccaagtgatagacaaatggtattacattaagataaagagcttctgcccagcaaactgagtgaagagaaaaccagtggaatgggagaaaatattgtcaactatt

SEQ ID NO: 384507 - DNA, 379 bp, Homo sapiens
caactgattttggacaaaggtgccaagaacatacactggggaaaggacagtctcttcaaatgaatggcactgggaaaactaaatatccatatggagaagaatgatactagcttcctatgtaacagcacataatgaaataaactcagaattgattgaagactgacatttaaggcctaaaattatgaaaccactctaagtaaatggaggaaaaatgcttgaggacattagyctgcacaaagatttttatgggtaagacatcagaagcataggcaaaaaccaagtgatagacaaatggtattacattaagataaagagcttctgcccagcaaactgagtgaagagaaaaccagtggaatgggagaaaatattgtcaactatt

SEQ ID NO: 384508 - DNA, 379 bp, Homo sapiens
caactgattttggacaaaggtgccaagaacatacactggggaaaggacagtctcttcaaatgaatggcactgggaaaactaaatatccatatggagaagaatgatactagcttcctatgtaacagcacataatgaaataaactcagaattgattgaagactgacatttaaggcctaaaattatgaaaccactctaagtaaatggaggaaaaatgcttgaggacattagtctgcacaaagatttttatgggtargacatcagaagcataggcaaaaaccaagtgatagacaaatggtattacattaagataaagagcttctgcccagcaaactgagtgaagagaaaaccagtggaatgggagaaaatattgtcaactatt

SEQ ID NO: 384509 - DNA, 379 bp, Homo sapiens
caactgattttggacaaaggtgccaagaacatacactggggaaaggacagtctcttcaaatgaatggcactgggaaaactaaatatccatatggagaagaatgatactagcttcctatgtaacagcacataatgaaataaactcagaattgattgaagactgacatttaaggcctaaaattatgaaaccactctaagtaaatggaggaaaaatgcttgaggacattagtctgcacaaagatttttatgggtaagacatcagaagcataggcaaaaaccaartgatagacaaatggtattacattaagataaagagcttctgcccagcaaactgagtgaagagaaaaccagtggaatgggagaaaatattgtcaactatt

SEQ ID NO: 384510 - DNA, 513 bp, Homo sapiens
caaagatttttatgggtaagacatcagaagcataggcaaaaaccaagtgatagacaaatggtattacattaagataaagagcttctgcccagcaaactgagtgaagagaaaaccagtggaatgggagaaaatattgtcaactattcatctaataagggactagtatccaaaatatacaagaaactcaaaaaacttgacagtaaaaaaaaatctgrgttcaaaattgggcaaaatatctaactatacttttctttagaaaaaagaaatacaaatagccaataaataaatttaaaaacgctcagtatcactaatcctcagggaaataaaaatcaaatcttcaatgtgatacaatcttgcttcaatttgaataaattgctatcattgaaaagacaaaaaaataacatatgctggtgaggttccagagaacagtaaactctaacatgctgttggtgggaaggtaaattagtgcagccactatagaaaacaacatgaggttttctcaaaaagctaata

SEQ ID NO: 384511 - DNA, 513 bp, Homo sapiens
caaagatttttatgggtaagacatcagaagcataggcaaaaaccaagtgatagacaaatggtattacattaagataaagagcttctgcccagcaaactgagtgaagagaaaaccagtggaatgggagaaaatattgtcaactattcatctaataagggactagtatccaaaatatacaagaaactcaaaaaacttgacagtaaaaaaaaatctgagttcaaaattgggcaaaatatctaactatacttttctttagaaaaaagaaatacaaatagccaataaataaatttaaaaacgctcagtatcactaatyctcagggaaataaaaatcaaatcttcaatgtgatacaatcttgcttcaatttgaataaattgctatcattgaaaagacaaaaaaataacatatgctggtgaggttccagagaacagtaaactctaacatgctgttggtgggaaggtaaattagtgcagccactatagaaaacaacatgaggttttctcaaaaagctaata

SEQ ID NO: 384512 - DNA, 562 bp, Homo sapiens
gctgttggtgggaaggtaaattagtgcagccactatagaaaacaacatgaggttttctcaaaaagctaataatgggactgccaagggatccggcaaacccactattgggtattcaggcaatagaaaagaaaacaatakatcaaaaagatacctgtactcgtatgtttattgtagcactattcacaatagctgatgtatggaatcaacctgcatgtccataaccaaatgaatggacaaaaaactgtggcacacaaacacagtagaatactattcaccgtataaaggaattcaatcctgttattcgtggccatgtggatcagtctgagggatggtatgttaagtgcagacacagaaagataaacactgcacattctcactcatatgtgggagctaaagaaaaactgagggctgggcaacatggctattgcctgtaatttcctagcactttgaaagaccaaggcaggagaatcacttgaggccaaagttccagagcaccctggacaacataggtagatagctctacaaagtcaaaaatcagacaggtgcaatggtgcatgcccat

SEQ ID NO: 384513 - DNA, 473 bp, Homo sapiens
taaacctgcacatttacagtcaattgattttatacaaggttaacaaaagaacagaatgggaaaagaatagtcttttcaacaaatggtgctgcgacaactggatatccacatgcaaaaaataaataaagtamgaagaaaaccctggcataaatctttgtgactgcatttggcagtgttttcttagctatgactccaaaggaaaaatggattcaatgaacttcaaaattgaaaactgctgtgcttgagaagacagtatcaagaagtgaaaaggtaagatactgagtagaagaaagtatttgaaaagcatgtatctgataagggacttacatatgtaggatatataaagaacctttgcaattcataaataacaagataacccaatttaaaaaatgggcaaagattttgaatagatatatttgcaaagaagatataaagatggataataagcacattaatagatgcttaatgtaatt

SEQ ID NO: 384514 - DNA, 430 bp, Homo sapiens
tccacatgcaaaaaataaataaagtacgaagaaaaccctggcataaatctttgtgactgcatttggcagtgttttcttagctatgactccaaaggaaaaatggattcaatgaacttcaaaattgaaaactgctgtgcttragaagacagtatcaagaagtgaaaaggtaagatactgagtagaagaaagtatttgaaaagcatgtatctgataagggacttacatatgtaggatatataaagaacctttgcaattcataaataacaagataacccaatttaaaaaatgggcaaagattttgaatagatatatttgcaaagaagatataaagatggataataagcacattaatagatgcttaatgtaattagtcattaggaaaaagtaaatcaaaaccacgtgtggtatcacttcacaccacaggatgaaa

SEQ ID NO: 384515 - DNA, 473 bp, Homo sapiens
taaacctgcacatttacagtcaattgattttatacaaggttaacaaaagaacagaatgggaaaagaatagtcttttcaacaaatggtgctgcgacaactggatatccacatgcaaaaaataaataaagtacgaagaaaaccctggcataaatctttgtgactgcatttggcagtgttttcttagctatgactccaaaggaaaaatggattcaatgaacttcaaaattgaaaactgctgtgcttgagaagacagtatcaagaagtgaaaaggtaagatactgagtagaagaaagtatttgaaaagcatgtatctgataagggacttacatatgtaggatatataaagaacctttgcaattcataaataacaagataacccaatttaaaaaatgggcaaagawtttgaatagatatatttgcaaagaagatataaagatggataataagcacattaatagatgcttaatgtaatt

SEQ ID NO: 384516 - DNA, 473 bp, Homo sapiens
taaacctgcacatttacagtcaattgattttatacaaggttaacaaaagaacagaatgggaaaagaatagtcttttcaacaaatggtgctgcgacaactggatatccacatgcaaaaaataaataaagtacgaagaaaaccctggcataaatctttgtgactgcatttggcagtgttttcttagctatgactccaaaggaaaaatggattcaatgaacttcaaaattgaaaactgctgtgcttgagaagacagtatcaagaagtgaaaaggtaagatactgagtagaagaaagtatttgaaaagcatgtatctgataagggacttacatatgtaggatatataaagaacctttgcaattcataaataacaagataacccaatttaaaaaatgggcaaagattttgartagatatatttgcaaagaagatataaagatggataataagcacattaatagatgcttaatgtaatt

SEQ ID NO: 384517 - DNA, 473 bp, Homo sapiens
taaacctgcacatttacagtcaattgattttatacaaggttaacaaaagaacagaatgggaaaagaatagtcttttcaacaaatggtgctgcgacaactggatatccacatgcaaaaaataaataaagtacgaagaaaaccctggcataaatctttgtgactgcatttggcagtgttttcttagctatgactccaaaggaaaaatggattcaatgaacttcaaaattgaaaactgctgtgcttgagaagacagtatcaagaagtgaaaaggtaagatactgagtagaagaaagtatttgaaaagcatgtatctgataagggacttacatatgtaggatatataaagaacctttgcaattcataaataacaagataacccaatttaaaaaatgggcaaagattttgaatagatatatytgcaaagaagatataaagatggataataagcacattaatagatgcttaatgtaatt

SEQ ID NO: 384518 - DNA, 454 bp, Homo sapiens
tgagctgaactaaggagcaaaaaccctgcatcaatacctgctgcagcacagatgcagcatggaaaattatgctaagtgaaatragccagtcacagtagaccacttgcttttcatttcagaggcttataggcaaatctataaaagaaggtgggtggttacctagggctgagggaggaagggaaaactagtgaagatagctaaatgatgtggggtttgtttttagggtgatgaaaatgttctacaattgattgtaatgatgactgcataactctctgaaaatactgaagttaataaattgtatattttaaatgagtgaattgcatggtgtgttcattatttctcaataaacctgttacccccaccccaaattaatttggtactagtgattttggtagtagtgatctggagacaggtactgcttggtttcagatcactggccagggttcaaggccta

SEQ ID NO: 384519 - DNA, 592 bp, Homo sapiens
  misc_feature (1)...(592): n = A,T,C or G
nnnnnnnnnnnnnnnnnnnnnnnngaattcttacaagataagaaggttgttttctgagtgtgtgtatgtgtatatacgtgagtgtatacattttgcttaaagagtattgtgctataaatctaattttatttctaattttttcacagagcataacatccttcatacattcccacattgctgtaggttatttttggttstttattcccctgtagctgctgcatagttttcaataaaatgaatcaaccacattttccctatccagtcttgcagtagaattcacactgatatcctgctactgaaatattcacttccttatggtatccttatgaaaacactttttggtcatgtgttacaatttgtcaggggctgtgttagtctctttatattgctatgaagacatacccaatgctgggtaatttatttattattttttaataaaagaggtttatcttggttcggggttctgcagactgcacaggaagcaatgctatctgctctgggtgaggcctcaagaagcttacaatcatggcagaaggtgaaggggagccagtgtgtcacatggtcagagagggagtaagagagacaagggggc

SEQ ID NO: 384520 - DNA, 592 bp, Homo sapiens
  misc_feature (1)...(592): n = A,T,C or G
nnnnnnnnnnnnnnnnnnnnnnnngaattcttacaagataagaaggttgttttctgagtgtgtgtatgtgtatatacgtgagtgtatacattttgcttaaagagtattgtgctataaatctaattttatttctaattttttcacagagcataacatccttcatacattcccacattgctgtaggttatttttggttgtttattcccctgtagctgctgcatagttttcaataaaatgaatcaaccacattttccctatccagtcttgcagtagaattcacactgatatcctgctactgaaatattcacttccttatggtatccttatgaaaacactttttggtcatgtgttacaatttgtcaggggctrtgttagtctctttatattgctatgaagacatacccaatgctgggtaatttatttattattttttaataaaagaggtttatcttggttcggggttctgcagactgcacaggaagcaatgctatctgctctgggtgaggcctcaagaagcttacaatcatggcagaaggtgaaggggagccagtgtgtcacatggtcagagagggagtaagagagacaagggggc

SEQ ID NO: 384521 - DNA, 639 bp, Homo sapiens
ttgctgggttcattcagatttagaactcagataactttttggaggataaattctttttatcataatgaagaatggctatcataatgcaatatgattacttctgccaatgcttattgttttatagtctactttgtttctgtggtcaggaggacaagacctgaatggccttgaccaactcagctttctgtacctcctagttctcagaataactttagaatgttccaagaagacaatatcctgagatgagtagaaaccrtctgggacagtctgggctctgtccttgttgttcctagaacaggatattactgcagcccttaaactcagagagccaatgtgcacgtggggtgtgaaacctagggcggagcactcaggggttcctcagcacagtacacagtggggcatgtgcagaggagactccaccaacgctgggcaacttttctgacctcaagggtcaggcttgccatagaacttaacggttttgctgattcttcctgctcctctgtgagtaataaatttggtttgtctgacttactgtgcgagcattcttctgttcctggcagcttggtttatataaaaaacctcctactagacctatgaatctatgcaatgtggaagtgtcatagaggtaaataagaagca

SEQ ID NO: 384522 - DNA, 629 bp, Homo sapiens
tgttttatagtctactttgtttctgtggtcaggaggacaagacctgaatggccttgaccaactcagctttctgtacctcctagttctcagaataactttagaatgttccaagaagacaatatcctgagatgagtagaaaccatctgggacagtctgggctctgtccttgttgttcctagaacaggatattactgcagcccttaaactcagagagccaakgtgcacgtggggtgtgaaacctagggcggagcactcaggggttcctcagcacagtacacagtggggcatgtgcagaggagactccaccaacgctgggcaacttttctgacctcaagggtcaggcttgccatagaacttaacggttttgctgattcttcctgctcctctgtgagtaataaatttggtttgtctgacttactgtgcgagcattcttctgttcctggcagcttggtttatataaaaaacctcctactagacctatgaatctatgcaatgtggaagtgtcatagaggtaaataagaagcaacttaactgagttgaaaactaacatacataacatggggccactgcaccaaggggcaaaatgatcctgccaaaaagtcccatgtgaccattccagacatactgtg

SEQ ID NO: 384523 - DNA, 629 bp, Homo sapiens
tgttttatagtctactttgtttctgtggtcaggaggacaagacctgaatggccttgaccaactcagctttctgtacctcctagttctcagaataactttagaatgttccaagaagacaatatcctgagatgagtagaaaccatctgggacagtctgggctctgtccttgttgttcctagaacaggatattactgcagcccttaaactcagagagccaatgtgcacgtggggtgtgaaacctagggcggagcactcaggggttcctcagcrcagtacacagtggggcatgtgcagaggagactccaccaacgctgggcaacttttctgacctcaagggtcaggcttgccatagaacttaacggttttgctgattcttcctgctcctctgtgagtaataaatttggtttgtctgacttactgtgcgagcattcttctgttcctggcagcttggtttatataaaaaacctcctactagacctatgaatctatgcaatgtggaagtgtcatagaggtaaataagaagcaacttaactgagttgaaaactaacatacataacatggggccactgcaccaaggggcaaaatgatcctgccaaaaagtcccatgtgaccattccagacatactgtg

SEQ ID NO: 384524 - DNA, 629 bp, Homo sapiens
tgttttatagtctactttgtttctgtggtcaggaggacaagacctgaatggccttgaccaactcagctttctgtacctcctagttctcagaataactttagaatgttccaagaagacaatatcctgagatgagtagaaaccatctgggacagtctgggctctgtccttgttgttcctagaacaggatattactgcagcccttaaactcagagagccaatgtgcacgtggggtgtgaaacctagggcggagcactcaggggttcctcagcacagtacacagtggggcatgtgcagaggagactccaccaacsctgggcaacttttctgacctcaagggtcaggcttgccatagaacttaacggttttgctgattcttcctgctcctctgtgagtaataaatttggtttgtctgacttactgtgcgagcattcttctgttcctggcagcttggtttatataaaaaacctcctactagacctatgaatctatgcaatgtggaagtgtcatagaggtaaataagaagcaacttaactgagttgaaaactaacatacataacatggggccactgcaccaaggggcaaaatgatcctgccaaaaagtcccatgtgaccattccagacatactgtg

SEQ ID NO: 384525 - DNA, 509 bp, Homo sapiens
atgatttaatagactttggggactcagagggaaggttaggrgggtgagggataaaagactacacattgggtacaatgtacactacttgagtaatgcgtacaccaaaatctcagaaatcaccactaaataacttttccatgtaaccaaaaaccacctgtttcccaaaaactattgcaataaagtaatatatatgaaaacaatcaacatgatagtcttgaagtgcaacattcactgggtttcatatgggagaaaaacagctaaaatcaaacacatggacaggcagtcagaacaatgtccatcatatacatagtaaaattaatacaaggacaaacattcatgagtggagtccatttgaattagcctgtagtgaagacatgtgccttagggcacacataactcatgttagggagaaaatgtataattttactcaatgtgaaaacatcttcagaaataactcagtccatgctgtccagatgcagttctgttctgtagagatgaagaataagaat

SEQ ID NO: 384526 - DNA, 509 bp, Homo sapiens
atgatttaatagactttggggactcagagggaaggttaggggggtgagggataaaagactacacattgggtacaatgtacactacttgagtaatgcrtacaccaaaatctcagaaatcaccactaaataacttttccatgtaaccaaaaaccacctgtttcccaaaaactattgcaataaagtaatatatatgaaaacaatcaacatgatagtcttgaagtgcaacattcactgggtttcatatgggagaaaaacagctaaaatcaaacacatggacaggcagtcagaacaatgtccatcatatacatagtaaaattaatacaaggacaaacattcatgagtggagtccatttgaattagcctgtagtgaagacatgtgccttagggcacacataactcatgttagggagaaaatgtataattttactcaatgtgaaaacatcttcagaaataactcagtccatgctgtccagatgcagttctgttctgtagagatgaagaataagaat

SEQ ID NO: 384527 - DNA, 509 bp, Homo sapiens
atgatttaatagactttggggactcagagggaaggttaggggggtgagggataaaagactacacattgggtacaatgtacactacttgagtaatgcgtacaccaaaatctcagaaatcaccactaartaacttttccatgtaaccaaaaaccacctgtttcccaaaaactattgcaataaagtaatatatatgaaaacaatcaacatgatagtcttgaagtgcaacattcactgggtttcatatgggagaaaaacagctaaaatcaaacacatggacaggcagtcagaacaatgtccatcatatacatagtaaaattaatacaaggacaaacattcatgagtggagtccatttgaattagcctgtagtgaagacatgtgccttagggcacacataactcatgttagggagaaaatgtataattttactcaatgtgaaaacatcttcagaaataactcagtccatgctgtccagatgcagttctgttctgtagagatgaagaataagaat

SEQ ID NO: 384528 - DNA, 593 bp, Homo sapiens
ccaaaaaccacctgtttcccaaaaactattgcaataaagtaatatatatgaaaacaatcaacatgatagtcttgaagtgcaacattcactgggtttcatatgggagaaaaacagctaaaatcaaacacatggacaggcagtcagaacaawgtccatcatatacatagtaaaattaatacaaggacaaacattcatgagtggagtccatttgaattagcctgtagtgaagacatgtgccttagggcacacataactcatgttagggagaaaatgtataattttactcaatgtgaaaacatcttcagaaataactcagtccatgctgtccagatgcagttctgttctgtagagatgaagaataagaatcatcaaagtggaaaaacctctgtcctgctccaaattctggtccacacaggagtagtactactggagagaaaagccatacatgtcccaaatgaaggaaagcctttacgttatcagtcatttcttatgagacattatgaaacttcacactggagagaaaccttatgaatgtaacaaaagtgagaaaggctttagatattccctacaccttaataaacatttaagaaaga

SEQ ID NO: 384529 - DNA, 593 bp, Homo sapiens
ccaaaaaccacctgtttcccaaaaactattgcaataaagtaatatatatgaaaacaatcaacatgatagtcttgaagtgcaacattcactgggtttcatatgggagaaaaacagctaaaatcaaacacatggacaggcagtcagaacaatgtccatcatatacatagtaaaattaatacaaggacaaacattcatgagtggagtccatttgaatyagcctgtagtgaagacatgtgccttagggcacacataactcatgttagggagaaaatgtataattttactcaatgtgaaaacatcttcagaaataactcagtccatgctgtccagatgcagttctgttctgtagagatgaagaataagaatcatcaaagtggaaaaacctctgtcctgctccaaattctggtccacacaggagtagtactactggagagaaaagccatacatgtcccaaatgaaggaaagcctttacgttatcagtcatttcttatgagacattatgaaacttcacactggagagaaaccttatgaatgtaacaaaagtgagaaaggctttagatattccctacaccttaataaacatttaagaaaga

SEQ ID NO: 384530 - DNA, 581 bp, Homo sapiens
atgtgaaaacatcttcagaaataastcagtccatgctgtccagatgcagttctgttctgtagagatgaagaataagaatcatcaaagtggaaaaacctctgtcctgctccaaattctggtccacacaggagtagtactactggagagaaaagccatacatgtcccaaatgaaggaaagcctttacgttatcagtcatttcttatgagacattatgaaacttcacactggagagaaaccttatgaatgtaacaaaagtgagaaaggctttagatattccctacaccttaataaacatttaagaaagaacattctggagaagccctatggatgtaaggaatgtgggaaagccttcagcaaggctcaaaacatgcacatataaggagtcacactggaagaaaccctataaatgtgataaatgtgaaaaagactttgcaaagtcaccagaattaaaagccatcttaagattcacaatagtgagaagccctgtgagtggcagggaaatcatcattaatttttcaccgtactgaacatgtgaggaggacatactggaagggagctcaatgagttaacatgcatgaga

SEQ ID NO: 384531 - DNA, 581 bp, Homo sapiens
atgtgaaaacatcttcagaaataactcagtccatgctgtccagatgcagttctgttctgtagagatgaagaataagaatcaycaaagtggaaaaacctctgtcctgctccaaattctggtccacacaggagtagtactactggagagaaaagccatacatgtcccaaatgaaggaaagcctttacgttatcagtcatttcttatgagacattatgaaacttcacactggagagaaaccttatgaatgtaacaaaagtgagaaaggctttagatattccctacaccttaataaacatttaagaaagaacattctggagaagccctatggatgtaaggaatgtgggaaagccttcagcaaggctcaaaacatgcacatataaggagtcacactggaagaaaccctataaatgtgataaatgtgaaaaagactttgcaaagtcaccagaattaaaagccatcttaagattcacaatagtgagaagccctgtgagtggcagggaaatcatcattaatttttcaccgtactgaacatgtgaggaggacatactggaagggagctcaatgagttaacatgcatgaga

SEQ ID NO: 384532 - DNA, 581 bp, Homo sapiens
atgtgaaaacatcttcagaaataactcagtccatgctgtccagatgcagttctgttctgtagagatgaagaataagaatcatcaaagtggaaaaacctctgtcctgctccaaattctggtccacacaggagtagtactactggagagaaaagccatacatgtcccaaatgaaggaaagcctttacgttatcagtcatttcttatgagacattatgaaacttcacactggagagaaaccttatgaatgtaacaaaagtgagaaaggctttagatattccctacaccttaataaacatttaagaaagaacattctggagaagccctatggatgtaaggaatgtgggaaagccttcagcaaggctcaaaacatgcacatataaggagtcacactggaagaaaccctataaatgtgayaaatgtgaaaaagactttgcaaagtcaccagaattaaaagccatcttaagattcacaatagtgagaagccctgtgagtggcagggaaatcatcattaatttttcaccgtactgaacatgtgaggaggacatactggaagggagctcaatgagttaacatgcatgaga

SEQ ID NO: 384533 - DNA, 592 bp, Homo sapiens
tttcccagtttttcttgtaactgtagtgagcgaatcttatagtcctggccaatgtgaaatgcagaattcactgctttggatttctgaaaatctgtttggaaaggggagagttattgttcctcttttttgttgaccaatttccctttgctttctctgcttgctsctctctggaaataggatgaaatgccctgagttgggtttagcaacttgaagaccattggaaagattgtccctacaacaaaaccttcaatctacaagatttctccctccccaatggcatgttgtgtatccctggctgccgtggactatttctggacttgtttcatgaaactaacccctagtagaactaagaaacattttaggagagaagtttacaacagattaaatgataaacctaaaaaatgaataaaacatattataaaaataaagaggatagacaaaacgggcttgcagatgctgactggccacactcatccttggtgcttgcccccatggatgcctcactgactgtgacacttggagagctggcagccatcactcaaaaatcagaacacagtggcctctactgcagcatcagggaacaaaaactaag

SEQ ID NO: 384534 - DNA, 592 bp, Homo sapiens
tttcccagtttttcttgtaactgtagtgagcgaatcttatagtcctggccaatgtgaaatgcagaattcactgctttggatttctgaaaatctgtttggaaaggggagagttattgttcctcttttttgttgaccaatttccctttgctttctctgcttgctcctctctggaaataggatgaaatgccctgagttgggtttagcaacttgaagaccattggaaagattgtccctacaacaaaaccttcaatctacaagatttctccctccccaatggcatgttgtgtatccctggctgccgtggactatttctggacttgtttcatgaaactaacccctagtagaactaagaaacattttaggagagaagtttacaacagattaaatgataaacctaaaaaatgaataaaacatattataaaaataaagaggatagacaaaacgggcttgcagatgctgactggccacactcatccttggygcttgcccccatggatgcctcactgactgtgacacttggagagctggcagccatcactcaaaaatcagaacacagtggcctctactgcagcatcagggaacaaaaactaag

SEQ ID NO: 384535 - DNA, 635 bp, Homo sapiens
ttcttcttttgtgcccaagaggacacaattcccaggaggctgcatgtggtctcctaggacaagcctgtgggcacccactggctgcagttccacctttccttccctggactctcaggaagacatgagttctggattcagctgaactgagctcaagttcaggttctgtgactcactggctctgtaattctgggtaagtctcttgctctccttgagtctcatatcctccttggtaaaatggagaggtagagctattgttagattttgaaggcaaggcragggttaaagaaagacacagaaagacagttgacggcttcaacagcaacacctttattactagcaaaaccctgcagaggaggaaaccagcttactgccagcaccaactgcctctcacaggctggggtgatcatgggactgggaaggaggggtgtgggcggtagagcttgctgcccggcaggatatggcaaggatgttcctgcagtcaggctgttgggcctttgcccgggagggtgcgataaggatgtttctacagtcaggtgatcaggaaggatgcttctcacggcccgagttcccaaggaatgtttcattctgaccagggtgtgcaaaacggctgcaggtttacaaaatggtacaggtta

SEQ ID NO: 384536 - DNA, 246 bp, Homo sapiens
ggtttctataggcacagagaaaacactgtcccaactgttgcaatggagctgggaaaaataatgtttkttctcaatgcttagacttaccaattgcttcattttatcacatgaaggctgtgtggcactttgaagtagaattagtaatttacataattacaaatcatgtttttttctttttttttagatggagtcttgctctctcgcccaggctggagtgcagtcgcgccatctcggctcactgcaagt

SEQ ID NO: 384537 - DNA, 613 bp, Homo sapiens
agcagggactacaggtgtacaccaccacactcagttatttttctacaatttttawtttttttgtctcactacagaaccaataatataagtagaaaaacaatctctcgtaaaaacaatatgataccaaaataataagtttccaagaacaaaagctatatgctatgtgctgaatattcttgccactaaaaatcaccaggaggatcccatgattactgcaaataatttgatccactgaagatttatacaggcataaatattaagaaagtcacactcgtatgatttaaaagtcaaagtattagtatttatccaaataaaccttaagcaaatttcatatttcctctattggagaaagcatttcctaatgtgattttcctgtcactactaattttccagttcattttttttcagctcccaccctgtcacagtacttatcaatctttgttagttaccaaagttaaacacattttttgaatcaactagccatatgtatgtttttctctgaccaactttccattaccaccataaaacaatgataggtaaaccactgctaaatttgaaaagtaaatactacgcaaaagtacattcagagtgagaaaattaattttacaagaga

SEQ ID NO: 384538 - DNA, 613 bp, Homo sapiens
agcagggactacaggtgtacaccaccacactcagttatttttctacaatttttattttttttgtctcactacagaaccaataatataagyagaaaaacaatctctcgtaaaaacaatatgataccaaaataataagtttccaagaacaaaagctatatgctatgtgctgaatattcttgccactaaaaatcaccaggaggatcccatgattactgcaaataatttgatccactgaagatttatacaggcataaatattaagaaagtcacactcgtatgatttaaaagtcaaagtattagtatttatccaaataaaccttaagcaaatttcatatttcctctattggagaaagcatttcctaatgtgattttcctgtcactactaattttccagttcattttttttcagctcccaccctgtcacagtacttatcaatctttgttagttaccaaagttaaacacattttttgaatcaactagccatatgtatgtttttctctgaccaactttccattaccaccataaaacaatgataggtaaaccactgctaaatttgaaaagtaaatactacgcaaaagtacattcagagtgagaaaattaattttacaagaga

SEQ ID NO: 384539 - DNA, 533 bp, Homo sapiens
cccacttaggaaggtcctattgctttcctttgccctaaatcagtacaggaaagcccctacaatatttgaaatgtatgaaagctaaatgtacagaagtcaaataacaaaggtgtatgttcttattgagaatacttttcccagaaagattgaaatattaacaattataaaatcccattattttcaacctataggtcctaccttaytcaggtccacataaactagcaagcccttaaaacttttcataggcactcagacacccaaggagagagactgtcagaaaaaaacagagtcctggtaggtgtacctctatttccctaagtactctctaagtatctgtcttcctatgggctcccacttccagattccacttctgcagggctccacagaagtctccaatctttaaatcttcagtctatgaaagcacagattcctgaaaggatggcctcaaatgaccaggactaggagctctctatatccctgctcctgaaaaacaagctaactggagtctccatcacctgcccccagctagacac

SEQ ID NO: 384540 - DNA, 546 bp, Homo sapiens
agaatcatttgaccagaatgttcaacacaggtaaaaatactagaaggtattttaattcattccaagattccttaaaattctgtaattytatgtcctcttgattctgtctatagaaaaacttagaatacatagccagcagagtttgaaaaaataatagaacaaaagaaataccaagaaaagcagagaagaaagttttaaaaaatgaaggcaagattatagaaaagtcacggaaaaagcaacaagactaaaaaatgtattatggaagtaagcagaaatacttgcctaaatggaaaaccaaactgggaagtcaaataatttgtctctaagacttgcctaaacttgcttttgtaaaacttacacccctatggcaaagctaagtaagatctgccctagagcctttgatggtaaaaataagatactggttaccactgaaattgtcaaatttattaggacaaactcttggactaaccacattctaatgataaacttaaatgagagttcaaggtatttaaactctcattaatttagacattaatcaaattaatc

SEQ ID NO: 384541 - DNA, 546 bp, Homo sapiens
agaatcatttgaccagaatgttcaacacaggtaaaaatactagaaggtattttaattcattccaagattccttaaaattctgtaattctatgtcctcttgattctgtctatagaaaaacttagaatacatagccagcagagtttgaaaaaataatagaacaaaagaaataccaagaaaagcagagaagaaagttttaaaaaatgaaggcaagattatagaaaagtcacggaaaaagcaacaagactaaaaaatgtattatggaagtaagcagaaatacttgcctaaatggaaaaccaaactgggaagtcaaataatttgtctctaagacttgcctaaacttgcttttgtaaaacttacwcccctatggcaaagctaagtaagatctgccctagagcctttgatggtaaaaataagatactggttaccactgaaattgtcaaatttattaggacaaactcttggactaaccacattctaatgataaacttaaatgagagttcaaggtatttaaactctcattaatttagacattaatcaaattaatc

SEQ ID NO: 384542 - DNA, 486 bp, Homo sapiens
gctagtggaaaagagctcaaaagagatcaatgtattactctggctactactctttggggaaggtgctgggtggtttacttagttgtagctatttgctctgccctacatatagcaaggcccaaattcacctgccattttacctcccacagaaaaaccactggaaagatcaytcctttaagagcttatacgctaggaaccacacctcacattcagagaagctgaagaaacaccagggaggtgtggcaggctgctggacagtactatatgatgtgaaaaatatatagaaagaaaaccatcaatgcccttttactaccggaatgttccagtgcttgcccttctccctagtaggggaaaaaaattctttttcacctcacagaaagcaaaactctcttgctatccctcatgacagaatctagttgtaggtgagtcacatcatcataatacaggctgttgtcaacctcatccctcaaaggaagaggatcagtg

SEQ ID NO: 384543 - DNA, 486 bp, Homo sapiens
gctagtggaaaagagctcaaaagagatcaatgtattactctggctactactctttggggaaggtgctgggtggtttacttagttgtagctatttgctctgccctacatatagcaaggcccaaattcacctgccattttacctcccacagaaaaaccactggaaagatcactcctttaagagcttatacgctaggaaccacacctcacattcagagaagctgaagaaacaccagggaggtgtggcaggctgctggacagtactatatgatgtgaaaaatatatagaaagaaaaccatcaatgcccttttactaccrgaatgttccagtgcttgcccttctccctagtaggggaaaaaaattctttttcacctcacagaaagcaaaactctcttgctatccctcatgacagaatctagttgtaggtgagtcacatcatcataatacaggctgttgtcaacctcatccctcaaaggaagaggatcagtg

SEQ ID NO: 384544 - DNA, 501 bp, Homo sapiens
aagaacatcttaaatgactacattcaactgccatggagctttaattttttaactattcaaaaagatatccactgtattattccaactatgtgactcttctgaaaaaagtaaaactatgaagacagagtaaacatcaatggttgccacgagttactagggagaaagggaaagatgaacaggcatagcacagagaatttttmgggctgtgaaactgttctgtcgataatattacagtaatagatacatgtcatgtcattatacacttgtccaaattcacagaacgtacagcatcaagagtgaagcctgatgtaaactatgaactttgaatgattataatgtgtcaatgtaagttcatcagttgtaacaaatgtaccactctctggtggaaaatagtaataatgggggaggctatgcatgtgtgggaggcatgggatatatgagaaatctctgtaccttcctctcaattttgctgtgaacctaaaactgctctaagaaataagg

SEQ ID NO: 384545 - DNA, 602 bp, Homo sapiens
tccagaacaattacaataaataaataaataaataaataaataaataaatggctgggggcagtggctcatgcctgtaatcccagcactttgagaggccgaggtaggtggatcacctgaggtcaggagttcgagaccagcctgactaacatggtgaaaccccatctctactaaatacaaaaaattagccaggcatgattgtgcatgcctgtagttccaggtacctaggaggctgaggcaggagaatcatttgaaactgggaggtggargttgcaatgagccaagattatgtcattgtactgcagcctgggcaacaagagcaaaactccgtctcaaaaaaataagtaaataaaataaaaaataaagatattcactgaacctgttactatgatatatttaagcaagacacggtgaccctaaaaattagagatcattgaagaccaaagtaacaacatgtggtcattacttctcaaattgaactatataaaatatataaaataaataaatttaattgcatgcttagataagaaaatattgataaaaataattgaatattttatcttatttcataattctaaacagggatttaacacaatatgaaaact

SEQ ID NO: 384546 - DNA, 602 bp, Homo sapiens
tccagaacaattacaataaataaataaataaataaataaataaataaatggctgggggcagtggctcatgcctgtaatcccagcactttgagaggccgaggtaggtggatcacctgaggtcaggagttcgagaccagcctgactaacatggtgaaaccccatctctactaaatacaaaaaattagccaggcatgattgtgcatgcctgtagttccaggtacctaggaggctgaggcaggagaatcatttgaaactgggaggtggaagttgcaatgagccaagattatgtcattgtactgcagcctgggcaacaagagcaaaactccgtctcaaaaaaataagtaaataaaataaaaaataaagatattcactgaacctgttactatgatatatttaagcaagacacggtgaccctaaaaattagagatcattgaagaccaaagtaacaacatgtggtcattacttctcaaattgaactatataaaatatataaaataaataaatttaattgcatgcttagrtaagaaaatattgataaaaataattgaatattttatcttatttcataattctaaacagggatttaacacaatatgaaaact

SEQ ID NO: 384547 - DNA, 472 bp, Homo sapiens
tatatacatatatacacattcaatttacacatatttttaaactggtcttttttgactgaaactaccttaatcttacatcttactttgtattttcttatcaagagtaggaccaccaagacaagtaagaaattcacaatcagaagtcttacctgatttctcctttttaagtatcttctttttatgttccaaaatttgttgttgaattctatgtatacaaaagtaataaataaaattgcyatttttataatgaaataaaaaatattcaccaaacatattaaattccaaaacactttcaagcaatatcagacctaatctcagaattttaatgtcccatacacttcaaatttgtaaaccttacaagcttattaagcttataattaaagaagaaaagaaagtgaagtactcataaatggaggaagcacagctcagtaaatgaactctagttagctggatatcatgcaaagtgtcctgc

SEQ ID NO: 384548 - DNA, 601 bp, Homo sapiens
aagtccttgctctgtaaccaaaatacctcgctctgtaggtattttgtcttcagacaagttgcttctcttaggctccatggtttcttctaaaaaayaaggattctgctaccttacttcactaggttgtttggaagatgtaatgagattacatgtttatatgttcagagaaatagtaaagcaatggaataatttattcttgaactttattgctgaaaccattttggaatcccaaataatgctcggtgtgtgtttttctgtaagttctaatactcaaatgttgcagttttcagaaaatgttattaagtgctaattttggttattacttgtattcattgtggcttgtaattcagggcattttacctaattcataacttattactaaatttctatatatataaatttagtgagctcatcactgagctcatcaatcacaccaagggcagaaaactaataggtgtcaaaacctggcttggacaactaccactccttctctacctcctcaaactctgagccagcagatctgtgcttggctgctggatctccatggtcctctccaactaacagacaagacaaaaccctgctttgattgtttttcagttcc

SEQ ID NO: 384549 - DNA, 601 bp, Homo sapiens
aagtccttgctctgtaaccaaaatacctcgctctgtaggtattttgtcttcagacaagttgcttctcttaggctccatggtttcttctaaaaaacaaggattctgctaccttacttcactaggttgtttggaagatgtaatgagattacatgtttawatgttcagagaaatagtaaagcaatggaataatttattcttgaactttattgctgaaaccattttggaatcccaaataatgctcggtgtgtgtttttctgtaagttctaatactcaaatgttgcagttttcagaaaatgttattaagtgctaattttggttattacttgtattcattgtggcttgtaattcagggcattttacctaattcataacttattactaaatttctatatatataaatttagtgagctcatcactgagctcatcaatcacaccaagggcagaaaactaataggtgtcaaaacctggcttggacaactaccactccttctctacctcctcaaactctgagccagcagatctgtgcttggctgctggatctccatggtcctctccaactaacagacaagacaaaaccctgctttgattgtttttcagttcc

SEQ ID NO: 384550 - DNA, 601 bp, Homo sapiens
aagtccttgctctgtaaccaaaatacctcgctctgtaggtattttgtcttcagacaagttgcttctcttaggctccatggtttcttctaaaaaacaaggattctgctaccttacttcactaggttgtttggaagatgtaatgagattacatgtttatatgttcagagaaatagtaaagcaatggaataatttattcttgaactttattgctgaaaccattttggaatcccaaataatgctcggtgtgtgtttttctgtaagttctaatactcaaatgttgcagttttcagaaaatgttattaagtgctaattttggttattacttgtattcattgtggcttgtaattcagggcattttacctaattcataacttattactaaatttctatayatataaatttagtgagctcatcactgagctcatcaatcacaccaagggcagaaaactaataggtgtcaaaacctggcttggacaactaccactccttctctacctcctcaaactctgagccagcagatctgtgcttggctgctggatctccatggtcctctccaactaacagacaagacaaaaccctgctttgattgtttttcagttcc

SEQ ID NO: 384551 - DNA, 500 bp, Homo sapiens
aatgattttgaaaacaatgaccacgccttggacatwtactgtccagtgcactcttcattatctggtttgaatttttatttctgaagatattttttgctgtctgtggtcattttttcttccttttttagtatcctctgctgcattcaaattgtttaaagaagacctgtttgtgtcattctttaacatcaaatttatcttgatatgtagcttatattttgtttctgctttttcttttagatataaaacgtggaaatttactcattgtacatgagtacctctgttgtatacatgaagtatacatgttattaaacttgttttacataaataaatttcatatatataaaaatatatgtataacttaaagaaaaagtaaaatgaacattcatgttttgatcacagattttttttaaaacaatggaatctgtctttgaagccctgaacacagctacttttctatttatttactgagcacttaatttggttttctgattagaatcaac

SEQ ID NO: 384552 - DNA, 500 bp, Homo sapiens
aatgattttgaaaacaatgaccacgccttggacatatamtgtccagtgcactcttcattatctggtttgaatttttatttctgaagatattttttgctgtctgtggtcattttttcttccttttttagtatcctctgctgcattcaaattgtttaaagaagacctgtttgtgtcattctttaacatcaaatttatcttgatatgtagcttatattttgtttctgctttttcttttagatataaaacgtggaaatttactcattgtacatgagtacctctgttgtatacatgaagtatacatgttattaaacttgttttacataaataaatttcatatatataaaaatatatgtataacttaaagaaaaagtaaaatgaacattcatgttttgatcacagattttttttaaaacaatggaatctgtctttgaagccctgaacacagctacttttctatttatttactgagcacttaatttggttttctgattagaatcaac

SEQ ID NO: 384553 - DNA, 548 bp, Homo sapiens
actaataaacaccgtagctttgacctctatatatgaatcaccatgaaaactgaggggtctgaatcagtgaaggcatcctggtggcaaaggtcaatcattatcagattgcaggaccggttataatggcaataatacagcaagtgagtccatggaaacaacagaatgattagaatggccttttttccccttcttctgacttgtraagaaagattgccttccttggacttaggaaaccccttagcttcttggaaaattcaaagaaggaagacacaggagagagccccaggggacaatacaagattttctgttaaactggacattacaagactcaataactaattagaaaagtcaggccaggcatggtggctagcactttcagaggccgaggcagggggattacttgacctcaaaagttcaagaccagccagggcaacagagtgagaccttgtctctacaaaaaaaaaaaaaaaaaaaggaaaggaaaggaaaagaaatcaaagacatggctctttttatcccatgcatggggattatacttagaataaaat

SEQ ID NO: 384554 - DNA, 500 bp, Homo sapiens
aatgattttgaaaacaatgaccacgccttggacatatactgtccagtgcactcttcattatctggtttgaatttttatttctgaagatattttttgctgtctgtggtcattttttcttccttttktagtatcctctgctgcattcaaattgtttaaagaagacctgtttgtgtcattctttaacatcaaatttatcttgatatgtagcttatattttgtttctgctttttcttttagatataaaacgtggaaatttactcattgtacatgagtacctctgttgtatacatgaagtatacatgttattaaacttgttttacataaataaatttcatatatataaaaatatatgtataacttaaagaaaaagtaaaatgaacattcatgttttgatcacagattttttttaaaacaatggaatctgtctttgaagccctgaacacagctacttttctatttatttactgagcacttaatttggttttctgattagaatcaac

SEQ ID NO: 384555 - DNA, 609 bp, Homo sapiens
tgattagaatggccttttttccccttcttctgacttgtaaagaaagattgccttccttggacttaggaaaccccttagcttcttggaaaattcaaagaaggaagacacaggagagagccccaggggacaatacaagattttctgttaaactggacattacaagactcaataactaattagaaaagtcaggccaggcatggtggctagcactttcagaggccgargcagggggattacttgacctcaaaagttcaagaccagccagggcaacagagtgagaccttgtctctacaaaaaaaaaaaaaaaaaaaggaaaggaaaggaaaagaaatcaaagacatggctctttttatcccatgcatggggattatacttagaataaaatgaataacattgagatccctagggataaatgtctcaaaaatccagaaaaaatctcgcactctacttctaactaatctagacttctgcttgatttctggctaaaaggtagactaactcttcgctatttcaaactatctgaaccaaactatgaactctcacctaatgtataagatggagtagttgcaattattttaaacttcaatttagcattaactggccttttaa

SEQ ID NO: 384556 - DNA, 499 bp, Homo sapiens
aacaacagaatgattagaatggccttttttccccttcttctgacttgtaaagaaagattgccttccttggacttaggaaaccccttagcttcttggaaaattcaaagaaggaagacacaggagagagccccaggggacaatacaagattttctgttaaactggacattacaagactcaataactaattagaaaagtcaggccaggcatggtggctagcactttcagaggccgaggcagggggattacttgacctcaaaagttcaagaccagccagggcaacagagtgagaccttgtctctacaaaaaaaaaaaaaaaaaaaggaaaggaaaggaaaagaaatcaaagacatggctcyttttatcccatgcatggggattatacttagaataaaatgaataacattgagatccctagggataaatgtctcaaaaatccagaaaaaatctcgcactctacttctaactaatctagacttctgcttgatttctggctaaaag

SEQ ID NO: 384557 - DNA, 499 bp, Homo sapiens
aacaacagaatgattagaatggccttttttccccttcttctgacttgtaaagaaagattgccttccttggacttaggaaaccccttagcttcttggaaaattcaaagaaggaagacacaggagagagccccaggggacaatacaagattttctgttaaactggacattacaagactcaataactaattagaaaagtcaggccaggcatggtggctagcactttcagaggccgaggcagggggattacttgacctcaaaagttcaagaccagccagggcaacagagtgagaccttgtctctacaaaaaaaaaaaaaaaaaaaggaaaggaaaggaaaagaaatcaaagacatggctctttttatcccatgcatggggattatacttagaataaaatgaataacattgagatccctagggataaatgtctcaaaaatccagaaaaaatctygcactctacttctaactaatctagacttctgcttgatttctggctaaaag

SEQ ID NO: 384558 - DNA, 504 bp, Homo sapiens
ggctctttttatcccatgcatggggattatacttagaataaaatgaataacattgagatccctagggataaatgtctcaaaaatccagaaaaaatctcgcactctacttctaactaatctagacttctgcttgatttctggctaaaaggtagactaactcttcgctatttcaaactatctgaaccaaactatgaactctcacctaatgyataagatggagtagttgcaattattttaaacttcaatttagcattaactggccttttaacataaacacttactttgtcaaatgatgagaaatagcataatcttctgcatctcgtccacacatgtcttgagcgaagacatcaatattttgcttaagaaggatattgacaatacctggtgagtcatagtatacagcaagcatgagagctgacctaaaacaacaaagaaataactccactcaagaactttaataaagacttttttaaaaagctagtttgatacactttaccagtttaa

SEQ ID NO: 384559 - DNA, 565 bp, Homo sapiens
tgaataacattgagatccctagggataaatgtctcaaaaatccagaaaaaatctcgcactctacttctaactaatctagacttctgcttgatttctggctaaaaggtagactaactcttcgctatttcaaactatctgaaccaaactatgaactctcacctaatgtataagatggagtagttgcaattattttaaacttcaatttagcattaactggccttttaacataaacacttactttgtcaaatgatgagaaatagcataatcttctgcatctcgtccacacatgtcttgagcgaagacatcaatattttgcttaagaaggatattgacaatacctggtgagtcatagtatacagcaagcatgagagctgacctaaaacaacaaagaaataactccactcaagaactttaataaagacttttttaaaaagctagtttgatacactttaccagtttaatatccgcctgtcagtatagatgtaataacyatttgcatgtactagcttgggtctataagcatctagggtgctcaagtgttcatctttgtaaattgtcaccaagg

SEQ ID NO: 384560 - DNA, 325 bp, Homo sapiens
tttcttgcaaattatagcaaataaaagtggggtattattgtcctataaaacagcagaaaaaaattaataattcacaaaattacatatttctcaactgaactgaaaatcttctctaggatgctttgaacttcaacatacaatacagaaaggaagtaaatgaaaagcagtcccttcattctcactcctctgtgctttctgatrtgctgtgctttgccttgcaaacaaccctcctctgtctccccggattaactgtggtcattgccaaaactcactttaaacatttactagtcccaagaatccttgctttgatcacagcacttatcat

SEQ ID NO: 384561 - DNA, 500 bp, Homo sapiens
aatgattttgaaaacaatgaccacgccttggacatatactgtccagtgcactcttcattatctggtttgaatttttatttctgaagatattttttgctgtctgtggtcattttttcttccttttttagtatcctctgctgcattcaaattgtttaaagaagacctgtttgtgtcattctttaacatcaaatttatcttgatatgtagcttatattttgtttctgctttttcttttagatataaaacgtggaaatttactcattgtacatgagtacctctgttgtatacatgaagtatacatgttattaaacttgttttacataaataaatttcatatatataaaaatataygtataacttaaagaaaaagtaaaatgaacattcatgttttgatcacagattttttttaaaacaatggaatctgtctttgaagccctgaacacagctacttttctatttatttactgagcacttaatttggttttctgattagaatcaac

SEQ ID NO: 384562 - DNA, 540 bp, Homo sapiens
tcagaagtattataccgcaagagaaagactccatgaccatctgtatttgagaagtattacaaaactgtattttatgtccaataatcaagaaatctctttaatttyacctaatcccctttcacaatactatttgtggcaaacattaacatttgaggaattaagagtttcagagatacagttgccagagcttcccaatacaggtggcagttccctctgggtggtacaaacttgcttgattcacttctatcaatggtgtcaggatcccagatgccaatgtcaggcactcctgctccaaatgggtcaccatggaaatgagctttgaattaagacagattggcttcaaatgcatttattttccttattattaaatagtccatgggtttttcccctaatacaagagaagagatttttatctttactgttagaaagctcagtatattctgtgtaagagagataggtttaaaaaacttaagaggaaatattttaaaaaccaaaactcagtaagaaatactattctcaattataatggtaatcccggga

SEQ ID NO: 384563 - DNA, 540 bp, Homo sapiens
tcagaagtattataccgcaagagaaagactccatgaccatctgtatttgagaagtattacaaaactgtattttatgtccaataatcaagaaatctctttaatttcacctaatcccctttcacaatactatttgtggcaaacattaacatttgaggaattaagagtttcagagatacagttgccagagcttcccaatacaggtggcagttycctctgggtggtacaaacttgcttgattcacttctatcaatggtgtcaggatcccagatgccaatgtcaggcactcctgctccaaatgggtcaccatggaaatgagctttgaattaagacagattggcttcaaatgcatttattttccttattattaaatagtccatgggtttttcccctaatacaagagaagagatttttatctttactgttagaaagctcagtatattctgtgtaagagagataggtttaaaaaacttaagaggaaatattttaaaaaccaaaactcagtaagaaatactattctcaattataatggtaatcccggga

SEQ ID NO: 384564 - DNA, 540 bp, Homo sapiens
tcagaagtattataccgcaagagaaagactccatgaccatctgtatttgagaagtattacaaaactgtattttatgtccaataatcaagaaatctctttaatttcacctaatcccctttcacaatactatttgtggcaaacattaacatttgaggaattaagagtttcagagatacagttgccagagcttcccaatacaggtggcagttccctctgggtggtacaaacttgcttgattcacttctatcaatggtgtcaggatcccagatgccaatgtcaggcactcctgctccaaatgggtcaccatggaaatgagctttgaattaagasagattggcttcaaatgcatttattttccttattattaaatagtccatgggtttttcccctaatacaagagaagagatttttatctttactgttagaaagctcagtatattctgtgtaagagagataggtttaaaaaacttaagaggaaatattttaaaaaccaaaactcagtaagaaatactattctcaattataatggtaatcccggga

SEQ ID NO: 384565 - DNA, 540 bp, Homo sapiens
tcagaagtattataccgcaagagaaagactccatgaccatctgtatttgagaagtattacaaaactgtattttatgtccaataatcaagaaatctctttaatttcacctaatcccctttcacaatactatttgtggcaaacattaacatttgaggaattaagagtttcagagatacagttgccagagcttcccaatacaggtggcagttccctctgggtggtacaaacttgcttgattcacttctatcaatggtgtcaggatcccagatgccaatgtcaggcactcctgctccaaatgggtcaccatggaaatgagctttgaattaagacagattgscttcaaatgcatttattttccttattattaaatagtccatgggtttttcccctaatacaagagaagagatttttatctttactgttagaaagctcagtatattctgtgtaagagagataggtttaaaaaacttaagaggaaatattttaaaaaccaaaactcagtaagaaatactattctcaattataatggtaatcccggga

SEQ ID NO: 384566 - DNA, 544 bp, Homo sapiens
tcaagaaatctctttaatttcacctaatcccctttcacaatactatttgtggcaaacattaacatttgaggaattaagagtttcagagatacagttgccagagcttcccaatacaggtggcagttccctctgggtggtacaaacttgcttgattcacttctatcaatggtgtcaggatcccagatgccaatgtcaggcactcctgctccaaatgggtcaccatggaaatgagctttgaattaagacagattggcttcaaatgcatttattttccttattattaaatagtccatgggtttttcccctaatacaagagaagagatttttatctttactgttagaaagctcagtatattctgtgtaagagagataggtttaaaaaacttaagagsaaatattttaaaaaccaaaactcagtaagaaatactattctcaattataatggtaatcccgggaccctagtgcagctctactttttaaatccatttttactggcttccacttaaatggctacttaaaattattttttattttagacaaaata

SEQ ID NO: 384567 - DNA, 570 bp, Homo sapiens
tataacataggagttgtaaactcagatacttacaaggacaaaggaaggttgcctgagtaagggaagtactaaggtgggcacagtagcaaactggagaatacctgccttctataaaggggcaacttctgcacagcagaccaaagaatgatagaaactcaggggacaccagatttgaytttttaggatatgcctgaagtccacatttcttcacgagtcttctaaattttacatgttgattcaacttatagaggcaaacaaacaaatctgtgtaccacattagaatatagcccttgttttttttatattcgctattaatgtgttactaaatggttgtgtataatccaagtatttgcatgtaaaatattttctttctctggtatcatatgttctaccaaaaaatcaggctctcatatataataaaaattgctaaaaagactcacaatacctgcttcaagaatttttccaacatgtattcatttaaaatatgtttgtatataattttcccagattattaaccaaatagataattggttcacaagactgctaaaactaaattattaaaagaattcc

SEQ ID NO: 384568 - DNA, 570 bp, Homo sapiens
tataacataggagttgtaaactcagatacttacaaggacaaaggaaggttgcctgagtaagggaagtactaaggtgggcacagtagcaaactggagaatacctgccttctataaaggggcaacttctgcacagcagaccaaagaatgatagaaactcaggggacaccagatttgactttttaggatatgcctgaagtccacatttcttcacgagtcttctaaattttacatgttgattcaacttatagaggcaaacaaacaaatctgtgtaccacattagaatayagcccttgttttttttatattcgctattaatgtgttactaaatggttgtgtataatccaagtatttgcatgtaaaatattttctttctctggtatcatatgttctaccaaaaaatcaggctctcatatataataaaaattgctaaaaagactcacaatacctgcttcaagaatttttccaacatgtattcatttaaaatatgtttgtatataattttcccagattattaaccaaatagataattggttcacaagactgctaaaactaaattattaaaagaattcc

SEQ ID NO: 384569 - DNA, 570 bp, Homo sapiens
tataacataggagttgtaaactcagatacttacaaggacaaaggaaggttgcctgagtaagggaagtactaaggtgggcacagtagcaaactggagaatacctgccttctataaaggggcaacttctgcacagcagaccaaagaatgatagaaactcaggggacaccagatttgactttttaggatatgcctgaagtccacatttcttcacgagtcttctaaattttacatgttgattcaacttatagaggcaaacaaacaaatctgtgtaccacattagaatatagcccttgttttttttatattcgctattaatgtgttactaaatggttgtgtataatccaagtatttkcatgtaaaatattttctttctctggtatcatatgttctaccaaaaaatcaggctctcatatataataaaaattgctaaaaagactcacaatacctgcttcaagaatttttccaacatgtattcatttaaaatatgtttgtatataattttcccagattattaaccaaatagataattggttcacaagactgctaaaactaaattattaaaagaattcc

SEQ ID NO: 384570 - DNA, 588 bp, Homo sapiens
atacttactagctcttattgctcactgccttaatgaaaacagcagcctatttgagtagaaagagctcagtctttggattcggttcaactagggcttgagtcctactttaagccttgacacttaccaactattgcttagcctttctgtrcctcaacttcctcattaataaagatgacaatagtagctatctcataggacaccatcgtgatgcttaaatgagaagctatgtaaagtatgtagaacagttcctacgacaactcaataattgtaagatttttgttttttgagacaaagtctcactcttttgcccaggctggagtgcaatggtgtaactatacctggaactcctgggtcaaatgatcctccatccccagcctcctgagtagctgggactacagatgagcaccagcatgcccagctatttatttaaaaatttttgtagagtaagaatctcactttgttgcccaggctggtctcaaactcctggcatcaagcaatcctctcaccccagcctcccaaagttctgggattacaggtgtgagccactgcacccagccagatattataattattactattactactact

SEQ ID NO: 384571 - DNA, 588 bp, Homo sapiens
atacttactagctcttattgctcactgccttaatgaaaacagcagcctatttgagtagaaagagctcagtctttggattcggttcaactagggcttgagtcctactttaagccttgacacttaccaactattgcttagcctttctgtacctcaacttcctcattaataaagatgacaatagtagctatctcataggacaccatcgtgatgcttaaatgagaagctatgtaaagtatgtagaacagttcctacracaactcaataattgtaagatttttgttttttgagacaaagtctcactcttttgcccaggctggagtgcaatggtgtaactatacctggaactcctgggtcaaatgatcctccatccccagcctcctgagtagctgggactacagatgagcaccagcatgcccagctatttatttaaaaatttttgtagagtaagaatctcactttgttgcccaggctggtctcaaactcctggcatcaagcaatcctctcaccccagcctcccaaagttctgggattacaggtgtgagccactgcacccagccagatattataattattactattactactact

SEQ ID NO: 384572 - DNA, 588 bp, Homo sapiens
atacttactagctcttattgctcactgccttaatgaaaacagcagcctatttgagtagaaagagctcagtctttggattcggttcaactagggcttgagtcctactttaagccttgacacttaccaactattgcttagcctttctgtacctcaacttcctcattaataaagatgacaatagtagctatctcataggacaccatcgtgatgcttaaatgagaagctatgtaaagtatgtagaacagttcctacgacaactcaataattgtaagatttttgttttttgagacaaagtctcactcttttgcccaggctggagtgcaatggtgtaactatacctggaactcctgggtcaaatgatcctccatccccagcctcctgagtagctgggactacagatgagcaccagcatgcccagctatttatttaaaaatttttgtagagtaagaatctcactttgttgcccaggctggtctcaaactcctggcatcaagcaatcctctcaccycagcctcccaaagttctgggattacaggtgtgagccactgcacccagccagatattataattattactattactactact

SEQ ID NO: 384573 - DNA, 588 bp, Homo sapiens
atacttactagctcttattgctcactgccttaatgaaaacagcagcctatttgagtagaaagagctcagtctttggattcggttcaactagggcttgagtcctactttaagccttgacacttaccaactattgcttagcctttctgtacctcaacttcctcattaataaagatgacaatagtagctatctcataggacaccatcgtgatgcttaaatgagaagctatgtaaagtatgtagaacagttcctacgacaactcaataattgtaagatttttgttttttgagacaaagtctcactcttttgcccaggctggagtgcaatggtgtaactatacctggaactcctgggtcaaatgatcctccatccccagcctcctgagtagctgggactacagatgagcaccagcatgcccagctatttatttaaaaatttttgtagagtaagaatctcactttgttgcccaggctggtctcaaactcctggcatcaagcaatcctctcaccccagcctcccaaagttctgggattacaggtgtgagccactgcacccagccagatatwataattattactattactactact

SEQ ID NO: 384574 - DNA, 324 bp, Homo sapiens
cttggggacttaatattagttactctagctacatgataaaattactggatattggaatctgaagcagcacaattatgcttcaagtaccatgctcatctgtcactgacacacacacacaagtgtgaatgcctgctttgctcaattaactctgtaaataagttcaggatttgctgtggaatgttccctgctttccattttcactatggtgaaagttatggaaackcgatccccataatttaagcaaagttgtacttaaagtaactcatatgtaaaaatttaagatactacctttagtgtcaaaaacattttaatccaagtaacgta

SEQ ID NO: 384575 - DNA, 614 bp, Homo sapiens
aatttttaaagagcaatgattacagtcagaaaaactcatttggtggctagtattcttgaattaaaagtgccataccaaagtgaaatctttttggttttcaacayctagctttttcatgtcacaattattttgggattcttttccacttactgcatattgtgaaaactcacctgaactcaaaactctaggtaaatctataaacctgtaactcagaatccacctttaattcatttgtaaaatacactttctctgcacacatttcctctctcttcttttaaccgtaatatttggatttagggagcatcaagttccttgactgtaaagtcaatgaaaaaagagatatgaagtcaaaagaatgggagataatgaacaagaggccagtagttaaaaagtaaaatttcaataaagaataacagttaagatggtcgttcatgttattacccaaacactaggggtttcgtccaggtcctcctgctcatcggagaaaaagccagtcactgaggtgacaagtactgccaaggaagaaagctttaacctggtgctgcggcccaggagctgggagctcagtctcaaatccatgggcttgactaataggggcaggaaaaaaatttaac

SEQ ID NO: 384576 - DNA, 614 bp, Homo sapiens
aatttttaaagagcaatgattacagtcagaaaaactcatttggtggctagtattcttgaattaaaagtgccataccaaagtgaaatctttttggttttcaacacctagctttttcatgtcacaattattttgggattcttttccacttactgcatattgtgaaaactcacctgaactcaaaactctaggtaaatctataaacctgtawctcagaatccacctttaattcatttgtaaaatacactttctctgcacacatttcctctctcttcttttaaccgtaatatttggatttagggagcatcaagttccttgactgtaaagtcaatgaaaaaagagatatgaagtcaaaagaatgggagataatgaacaagaggccagtagttaaaaagtaaaatttcaataaagaataacagttaagatggtcgttcatgttattacccaaacactaggggtttcgtccaggtcctcctgctcatcggagaaaaagccagtcactgaggtgacaagtactgccaaggaagaaagctttaacctggtgctgcggcccaggagctgggagctcagtctcaaatccatgggcttgactaataggggcaggaaaaaaatttaac

SEQ ID NO: 384577 - DNA, 614 bp, Homo sapiens
aatttttaaagagcaatgattacagtcagaaaaactcatttggtggctagtattcttgaattaaaagtgccataccaaagtgaaatctttttggttttcaacacctagctttttcatgtcacaattattttgggattcttttccacttactgcatattgtgaaaactcacctgaactcaaaactctaggtaaatctataaacctgtaactcagaatccacctttaattcatttgtaaaatacactttctctgcacacatttcctctctcttcttttaaccgtaatatttggatttagggagcatcaagttccttgactgtaaagtcaaygaaaaaagagatatgaagtcaaaagaatgggagataatgaacaagaggccagtagttaaaaagtaaaatttcaataaagaataacagttaagatggtcgttcatgttattacccaaacactaggggtttcgtccaggtcctcctgctcatcggagaaaaagccagtcactgaggtgacaagtactgccaaggaagaaagctttaacctggtgctgcggcccaggagctgggagctcagtctcaaatccatgggcttgactaataggggcaggaaaaaaatttaac

SEQ ID NO: 384578 - DNA, 553 bp, Homo sapiens
gcacttttggagaggaaagtaggtcaagaagccattaagatacatgaaggaaggtcaaatcttaaagaaaactagaaattcagatttatttacatagctctagaaggaagaaccaggaatagtggagaatgaatgtagaaaacatttttagtgaatgaaagcatgagatgataacacaagcagccaccaatggaacaaactgatgtgcaacagcggatttgccgtcactgaagctatccagtytccaactgttgcaggtattacagagctatcgagagttttagtaggcggctggggttcctttcagatctgacatggcatgatgccaaaatgctgtacatgctctcatctttttctggctcattttttttctctcttcaggtttcttaaccttttatctacttccctctattaataatcacctaaaccatacactcagtcttctggagtaaatttctttatctttcacttcacaaataaacatctttgatggatgaaaacaccgcaggaaagccacctaagcagatatgacttctcaacttttttttttaag

SEQ ID NO: 384579 - DNA, 553 bp, Homo sapiens
gcacttttggagaggaaagtaggtcaagaagccattaagatacatgaaggaaggtcaaatcttaaagaaaactagaaattcagatttatttacatagctctagaaggaagaaccaggaatagtggagaatgaatgtagaaaacatttttagtgaatgaaagcatgagatgataacacaagcagccaccaatggaacaaactgatgtgcaacagcggatttgccgtcactgaagctatccagtctccaactgttgcaggtattacagagctatcgagagttttagtaggcggctggggttcctttcagatctgacatggcatgatgccaaaatgctgtacatgctctcatctttttctggctcattttttttctctcttcaggtttcttaaccttttatctacttccctctattaataatcacctaaaccatacactcagtcttctgragtaaatttctttatctttcacttcacaaataaacatctttgatggatgaaaacaccgcaggaaagccacctaagcagatatgacttctcaacttttttttttaag

SEQ ID NO: 384580 - DNA, 610 bp, Homo sapiens
agccaggaagagctggaggatgtctgaacattcacgaggagctgataagcagccgctcagggcagagttctgggccagcgaggggagctgtaggagtgttcagaacacagatttgctggaggtgggcagaggagagcgggcctcgggcaggaggtcagcgtgggatatgggcccagagctgtggtggaggtgagcctgcttcacagccaggtgcagatgagrtggagactgcagtcggggcaggacaccaggacggccccagggaggccctgatggagagtttccagaagagggagttgttggccaggggttgctgccctcaggccacgcaggaggcgaggaggcagggtcatgcgtggcctcctgggcagtggggctgagggtacctgaggggtgggcaggagctggcgctgctgtctctaacagtcactctccacctccttccagttcttcgccttcatcgccacgctgctctacattctccatgccttcagcatctattaccactgatgcacaggcgccaggccaagggggaaatgctctttgaaagctccaattattggtccccaaaagcagcttccaacgtttgccatctggatgacaaacggaa

SEQ ID NO: 384581 - DNA, 550 bp, Homo sapiens
gctgtctaggatgatcactgattamtatttactaagtagccacatgcaaataaaagttgtttggtaaaaaggagcagttggtcgacttcatcttgttagcatctggaactggccatcaggtactaggtgttgtcagtaatttcaagaaaagcaccccttggagcatttcacaacctaagttctctgagggtgggatcccagcccacccggccttgcttctagagcaagagcgaagggaggtcacatttgtctccagggcttcgggtttataatgtcatttgtacttcagtaaggacagtttgggtgcaagttccggaaaccaaactcatacagcttaggcaaaaatgggagtgcaccagtaggggctgggagaggtgaagagggctcagtaggaggagagctgacccccgcatggctctctgctgcacactggccatcgtctcttgccacactgcaagacttgtccaagtctcaacaaacaccggcctcccatcccacgtgcagacactagaggctcagcctggacccccaaagtccatccacccacagc

SEQ ID NO: 384582 - DNA, 550 bp, Homo sapiens
gctgtctaggatgatcactgattactatttactaagtagccacatgcaaataaaagttgtttggtaaaaaggagcagttggtcgacttcatcttgttagcatctggaactggccatcaggtactaggtgytgtcagtaatttcaagaaaagcaccccttggagcatttcacaacctaagttctctgagggtgggatcccagcccacccggccttgcttctagagcaagagcgaagggaggtcacatttgtctccagggcttcgggtttataatgtcatttgtacttcagtaaggacagtttgggtgcaagttccggaaaccaaactcatacagcttaggcaaaaatgggagtgcaccagtaggggctgggagaggtgaagagggctcagtaggaggagagctgacccccgcatggctctctgctgcacactggccatcgtctcttgccacactgcaagacttgtccaagtctcaacaaacaccggcctcccatcccacgtgcagacactagaggctcagcctggacccccaaagtccatccacccacagc

SEQ ID NO: 384583 - DNA, 513 bp, Homo sapiens
ttagtttatagaaataaccttgaggctgagtacggtggctcacacctgtaatgccagcactttgggaggccgagtcgggcggatcacttgaggtcaggagtttgagaccagcctggccaacatgccgaaatcctgtctctactaaaamtacaaaaaattagcagggcgtggtggtggtgcctttcccagctactcaggaggctgaggcaggagaatcacttgaaccagggaggcagaggttgcagtaagccaagattgcgccactgcactccagcctgggtgaaagagtgaaactccaccgcaaaaaaaaaaaaaaaagaaagaaataacattgattcatgattggctctacattgtgaggccatactgcgtggtttagtgcctggtgtggctttattaggttaatttatggctccttatccttggcaagcagtttcaagagctgaatacgtagctcaaggttgattactatctcattttattgtctctctgggcctgataatttaaatggac

SEQ ID NO: 384584 - DNA, 522 bp, Homo sapiens
ctgtactccagggacagagacctcagggcacacagtcctgcctccaggagctcagagtttcaacaggaggcagggaagagaaaagagagacaatgacagtggagagtgatcctaggggaggtatgctgggggacttggtagtcaagggtggcttcctggaggaggtgacatggtctggtccctgcctttcagggtctagtcatagatagactggggatcagctggggagagccaagcaggcaatccatcaaccagaactaagtgacccggtgcctaatgaagggcaggttattagtcacaaaatgtctgtgggctcctgaggagaaaggagggtatggggacttcccctgagcctgagtccagggatcatcagscaacttcttttggggaacatgggcaggaacatgaagttaatcaatgtacagggagagtgagaaagaggacactggggcagggggccagggagagtggggaagcccagccaccgggccgcggtgggagcaggatgccttccccttgctg

SEQ ID NO: 384585 - DNA, 561 bp, Homo sapiens
taaaataaggattctttgaatgcaagcactgcagtgccacaacagttgatctgatagcccagatgagtacaaagcgactaacatgggtggcacagacagtgtagacatgctagacaaatgtctgattcacatcccaggtggaacagggcgggacagtgcaagatttcatcattgtactcagaaaggcacacatttaattgttaatttctggaatttttcatttaatatttcagaccaagattgactttgcgtaactgaaatatactgatctttattartctgccattgcttacgacatagatattacattaaaaacactgtgtattagtctattctcacattgctataaacaaccagagactgggtaaattataaagaaaagaggttgaattgactagttcctcatggttagggaggcctcaggaaacttacaatcatggtggaaggtgaaggctaagcaaggcatgccttgcatggcagcaggagagatgggggagggggaagtgccatacttttaaaccatcagatcccatgagaactcattcactatcatgagaacag

SEQ ID NO: 384586 - DNA, 561 bp, Homo sapiens
taaaataaggattctttgaatgcaagcactgcagtgccacaacagttgatctgatagcccagatgagtacaaagcgactaacatgggtggcacagacagtgtagacatgctagacaaatgtctgattcacatcccaggtggaacagggcgggacagtgcaagatttcatcattgtactcagaaaggcacacatttaattgttaatttctggaatttttcatttaatatttcagaccaagattgactttgcgtaactgaaatatactgatctttattagtctgccattgcttacgacatagatattacattaaaaacactgtgtattagtctattctcacattgctataaacaaccagagactgggtaaattataaagaaaagaggttkaattgactagttcctcatggttagggaggcctcaggaaacttacaatcatggtggaaggtgaaggctaagcaaggcatgccttgcatggcagcaggagagatgggggagggggaagtgccatacttttaaaccatcagatcccatgagaactcattcactatcatgagaacag

SEQ ID NO: 384587 - DNA, 557 bp, Homo sapiens
aacttgctaaaaaatgttatatacacagtgacatgttttggctgtgtgcccacccaaatcttgaattgtagctcccataattcccacatgtcatgggagggacccagtgggaggtaattgaatcatgagggtgggtctttcccgtgctgttctcgtggtagtgaatatgacccatgagatctgatggttttataaagggaagttcccctgcacaggctctcttgcctgctgccatgtaagatgtgcctttgctcctcctttgtcttctgccatgattgtgaggcctccccagccatgtggaactgtgagtcaattaaacttctttcctttataaattactcagtctcatgtatgtctttatgagcagtgtgagaacagattaatatacgtagtaatcacaggagtgacatcctcatcccctttgctttattatattagttagaagcaagtcacaggtcacacccacactcaaggggagkggattacacaaaggcctgaacactaggaggtggaagtcatggtgggggggtgtcaaaatgactttcatcattagaaat

SEQ ID NO: 384588 - DNA, 619 bp, Homo sapiens
aaaggtattttccctttaaaagtgaagttaaatttttaaaatttgtaatcattggcattgatgaattcagtccatctgctttttgtttttcttaaaaggcttttattataatgcaaaggcataaactatttactaacaaatagggctgaaaccctgtgtgaggccgttcttgcattgctataaagaaatgcatgaggctggttaatttataaagaaaagaggtttaattggcccctggttctgcagactgtacaggaagcatggcacaggcatctgctcagcttctagggaggcctcaggaagcttccartcatggcagaaggtgaagggagagcaggcatctcacgtgacagtgcaggagcaagaaggaggaaggaggtgccacacacttttaaaaaaactgatctcctgagaacgaactctctgtggtgaggacagtaccaaaccatgagggatctgccctcatgacccaaacacctcccaccaggcctcaccttcaacattgggattacaattcaacatgaaatttggtggggacatttattcaaaccacatcaaacccccttcccattttttatttttatcaataactttaatttctttatcatttcaggttact

SEQ ID NO: 384589 - DNA, 619 bp, Homo sapiens
aaaggtattttccctttaaaagtgaagttaaatttttaaaatttgtaatcattggcattgatgaattcagtccatctgctttttgtttttcttaaaaggcttttattataatgcaaaggcataaactatttactaacaaatagggctgaaaccctgtgtgaggccgttcttgcattgctataaagaaatgcatgaggctggttaatttataaagaaaagaggtttaattggcccctggttctgcagactgtacaggaagcatggcacaggcatctgctcagcttctagggaggcctcaggaagcttccagtcatggcagaaggtgaagggagagcaggcatctcacgtgacagtgcaggagcaagaaggaggaaggaggtgccacacacttttaaaaaaactgatctcctgagaacgaactctctgtggtgaggacagtaccaaaccatgagggatctgccctcatgacccaawcacctcccaccaggcctcaccttcaacattgggattacaattcaacatgaaatttggtggggacatttattcaaaccacatcaaacccccttcccattttttatttttatcaataactttaatttctttatcatttcaggttact

SEQ ID NO: 384590 - DNA, 619 bp, Homo sapiens
aaaggtattttccctttaaaagtgaagttaaatttttaaaatttgtaatcattggcattgatgaattcagtccatctgctttttgtttttcttaaaaggcttttattataatgcaaaggcataaactatttactaacaaatagggctgaaaccctgtgtgaggccgttcttgcattgctataaagaaatgcatgaggctggttaatttataaagaaaagaggtttaattggcccctggttctgcagactgtacaggaagcatggcacaggcatctgctcagcttctagggaggcctcaggaagcttccagtcatggcagaaggtgaagggagagcaggcatctcacgtgacagtgcaggagcaagaaggaggaaggaggtgccacacacttttaaaaaaactgatctcctgagaacgaactctctgtggtgaggacagtaccaaaccatgagggatctgccctcatgacccaaacacctcccaccaggcctcaccttcaacattgggattacaattcaacatgaaatttggtggggacatttattcaaaccayatcaaacccccttcccattttttatttttatcaataactttaatttctttatcatttcaggttact

SEQ ID NO: 384591 - DNA, 479 bp, Homo sapiens
ttaggaaagataattttctgcagcttataattaggaaagaaagactgtttatttgcccagatagtacctcatggagggatcaacaattattcttttcatttaccaacgaggcataaatgaaatgtctgagtatattagtgctaaaaaatatttaactactgactycagtgttttctacatgcccacagcttatatctgtcattgtatgttattcttttatagaacttatgagcttttcttgaatggtggtactccttatgaaaaaggtattgaagtggacccttcaatatccagaagaggtatggctctcatgtgttgtcttcctttccttaaagattaaacaaatagaagcatctgagaggtagctacattctaataagcatagcgttttttacttgaattcacacttttaaaaatatgtcatttgatataaaaattttaatcatttttaagtacttattttcttggtaacacatatg

SEQ ID NO: 384592 - DNA, 479 bp, Homo sapiens
ttaggaaagataattttctgcagcttataattaggaaagaaagactgtttatttgcccagatagtacctcatggagggatcaacaattattcttttcatttaccaacgaggcataaatgaaatgtctgagtatattagtgctaaaaaatatttaactactgactccagtgttttcyacatgcccacagcttatatctgtcattgtatgttattcttttatagaacttatgagcttttcttgaatggtggtactccttatgaaaaaggtattgaagtggacccttcaatatccagaagaggtatggctctcatgtgttgtcttcctttccttaaagattaaacaaatagaagcatctgagaggtagctacattctaataagcatagcgttttttacttgaattcacacttttaaaaatatgtcatttgatataaaaattttaatcatttttaagtacttattttcttggtaacacatatg

SEQ ID NO: 384593 - DNA, 606 bp, Homo sapiens
gcagagctctaaattatgcagctcaacttcatatgaaatgcaggacaacaatcaggtctttgggggtggaggtgggaggatgtattgctctgcattcaagcagtaaaaacatgtgacactcaaattaggaggatatkaggagagtttaatcaaaggactacttacaaaggtgggggtggggggtgaaatgtagcaggtccagaacaatctctagggctggggaggcagagctagcaccaccctctcagccctgtcctcaggcccaagggagaagggggaggagcaactcctgcctggaggagaagggagtatggagagacactgccctcagaggggcaagtgcaaagtgaaaatgtgagcccttctgtccaaaaagcaggcaaaacgtgacattaaagcataaattattttgttgttcctcaggtaagtctccccacttctcctctctcctttttctcttttatccttttctcttcctctctccttgtcacattgctatttatttgctatttaatgttacagtccctcttccctctggcatggggatagtgcatatcttaggggacagtgcagaccctcaaagatgtctatgggccccaccctgca

SEQ ID NO: 384594 - DNA, 369 bp, Homo sapiens
gtgcgacagctcatgcctgtaatcccagcactttgggaggccaaggtaggcagatcacttgaggtcaggaattcaagaccagactggttaacatggtgaaaccctgtccctacaaaaaaaaaaaaaaaatacaaaaattagcagggcatggtggtgcatgcctgtaaccccagctacttgggaggctgaggcatgagaatcgcttgaacctgggaggcagaggttgcagtgagttgagatcccgccactgcactccagcctgggtgacggagtgagaygctgtctcaaaacaaaaaacaaaaaacccaggagtgtttagggtgttttttgttgttgttgttttttaatgcttaactgtgaaagcaagta

SEQ ID NO: 384595 - DNA, 573 bp, Homo sapiens
tagtgttttttacattgtaatttgtaatttataatttttattgctagcatatagaaatacatttaatttttgtatattgcttttatatactctgatattgctaawcttctggtattgtttctctagattctttggagcattctatgtagacaatcatgttgtctatgaataaagacagttttgtttcttcctttctaatctgtaaaatgttttcctctctcaccttatcgcacttgctaagcctccagtacaatgtggagtgagtggaaatccttgccttgttctcaatcttagggggaaagcattacactttttcccttttttatcagaattaaattttatttcacattgaaataaactgtgaaaaggatttacattttcccgtattacagcacaacatcttaatgaactatttcttgccgtaaataagatcttgttagtttgaataactgaaacaacagtttatgttcttcaaggtaaagcaaaatgacttagcaaataatagtttaaaagttttcaatccagacataaacatatggcttcattattaacatcctttatagtccattacaa

SEQ ID NO: 384596 - DNA, 598 bp, Homo sapiens
actctgtgttaatgagttctgtctaggcctttttttttgttactaggatgatgtctcccaatccctatccattgtctaggtaactcagtcctcatctttcccatcttagcataaattcccaagggctgccttccctgacccagggagcaggtggagtgcctgctatgtacactattgcaatctttgcccattttttccttgacttaggatggccactgattgtgtcctaagagcaaaaatccaaaatggtctgtaagataaatcaattgaatttgcaggggagaatcagggcatgcacatcatctttaattccatgtgtgctgtttgctgtctgaaataactgttgagtgttatgttaaatcrtatgaaatctccaattttcagccatttttggcctaagtggcagtttcatatggtttagcctaatacatcagggtcaataagtagaagagctgcatgcatgcaaggcagatacacaggtaacatcacaagtgccatgggggaggtataacccaggaccttgaagatttaaagaaggcagcaaagaaggatccaaattctgtttcactagagaggtcctgcatgagagagcctaata

SEQ ID NO: 384597 - DNA, 614 bp, Homo sapiens
gctgttaggaaaaattcttttaagcaattaaatattctattcataaatgttcaactttatatcagaatctcaagaaggaagtattttagaatagtaaaggttagaacacgttctttattcagagaagttgataatgtcatgtcgttaaggactagcattattcataagttatattgctctgtgctatcagatgacggggtgaaggtgacagatgtcttggtaaacattctgagactgagtgcacacaatattccacttgtggaaccctactccgcccaaaacacacttagatcttttaaacttgttatattctttcctccaagtagaatgtcctttarcattctctttctctctttccatattccaaatcaaattttatttctcctgtgatcactcaggtggctcctaccatctgttaccttttgttatcttttcatatattaatgtcttagctcctgaactaattttaagatccctaaaggcaggaatttttttttcgaggcttcaaattagtttttattagtaatttgcttttcttaaaactttgatttttcttaaatattatacaaatatggaatgtaagctcttccagtcatattcacgattttcagttg

SEQ ID NO: 384598 - DNA, 565 bp, Homo sapiens
tcagtgctgtctccctcccccaagttcacagattctgtctctgcaccacgtggctgttgccaggtgatgggagagggtataagcaattcaagactgcctttcctaccctcttcagtgcctccttcctaaatatgatgttaaaaccaggcactgtgatcgctcacctgttttgtggttcttatgaagggacttttttccccccactgtggatagtttttcagtttggtgttcctgcagtggagatgatctctggagggttctatttggccatcttgttctgccttcctccagaaattttaaactttaataaattccaacaacattattttccttcatggattatacttttggcgttacatctaaaaagacataattaaacccaagggcacatagtttttctcttatgctttcttctagaggtttgatggttttgcattttacatttagatttatggttcatttcgaagtaatatttgtgaaagmtgtatggtctgtgactttgttattattattattttttcatgtgtatgtccatttttttccagcagcatttgtggaaaagatg

SEQ ID NO: 384599 - DNA, 507 bp, Homo sapiens
ctcagcttcaaaatcactgatcctaaagtcttccttgactctcctaaggagagttagaatctctctttgcagttctctggccatattctacttttaaaggcatttactgctgatattgatagctttcctaccaaactgtgaacttctcagggccaaaacaacaaacaaacaaacaaacaatcttattcatctttgcatctccagcacagtggttagcacttattaagtaggygcttaataaacgtttgctgaaggaataaagcaatgactgtgtgttgttacaagaggattttccttctaaggaacaaaacctcagttgcccaggtgtagaatactgcctttgagagagtatttatgttctggatcatggcagccatggaagaggatctgtttctgagggaaaccacgggagagtttgggcaggtgaaatgtaattatccatgctggccctaagccaagggtttgcagagctgccaccaggccagggctaaacacaaataggtatga

SEQ ID NO: 384600 - DNA, 605 bp, Homo sapiens
taaggaggaaatagataattcttcacttaaaactttgcctcttttagattagtgaacagaacatattttcttgcccctcagtggactttatgttagccaattctactatgccatatcccagtgagacatgagtcttttcaccccttccttttagccttggtcgtgatttacaaggataaacacttgagcactcaagatacttaacatttgttaatacatgtaaatggttaattctatactgacaggcacatattaaattggttcmttcctaataatgaagttatgtctgttattttagcacagccctcatgcttgccatatgtcatggatcatcagagatagttggcacggttcttcagcaaaatgttgacatctgtgctgaagctacatgtggaatgattgcagaacgttatgctgttgcttgtggatttaatctctaagtgtttacatttaaaggctaggtgagattttatagtttgtttcaggtagtttttgaatgacagtgagttagttcacttcatcagccagaaactaggcaaaaagctagactagttagaaagattaatggctccaggattctttattttagggctttagggacgcta

SEQ ID NO: 384601 - DNA, 605 bp, Homo sapiens
taaggaggaaatagataattcttcacttaaaactttgcctcttttagattagtgaacagaacatattttcttgcccctcagtggactttatgttagccaattctactatgccatatcccagtgagacatgagtcttttcaccccttccttttagccttggtcgtgatttacaaggataaacacttgagcactcaagatacttaacatttgttaatacatgtaaatggttaattctatactgacaggcacatattaaattggttcattcctaataatgaagttatstctgttattttagcacagccctcatgcttgccatatgtcatggatcatcagagatagttggcacggttcttcagcaaaatgttgacatctgtgctgaagctacatgtggaatgattgcagaacgttatgctgttgcttgtggatttaatctctaagtgtttacatttaaaggctaggtgagattttatagtttgtttcaggtagtttttgaatgacagtgagttagttcacttcatcagccagaaactaggcaaaaagctagactagttagaaagattaatggctccaggattctttattttagggctttagggacgcta

SEQ ID NO: 384602 - DNA, 605 bp, Homo sapiens
taaggaggaaatagataattcttcacttaaaactttgcctcttttagattagtgaacagaacatattttcttgcccctcagtggactttatgttagccaattctactatgccatatcccagtgagacatgagtcttttcaccccttccttttagccttggtcgtgatttacaaggataaacacttgagcactcaagatacttaacatttgttaatacatgtaaatggttaattctatactgacaggcacatattaaattggttcattcctaataatgaagttatgtctgttattttagcacagccctcatgcttgccatatgtcatggatcatcagagatagttggcayggttcttcagcaaaatgttgacatctgtgctgaagctacatgtggaatgattgcagaacgttatgctgttgcttgtggatttaatctctaagtgtttacatttaaaggctaggtgagattttatagtttgtttcaggtagtttttgaatgacagtgagttagttcacttcatcagccagaaactaggcaaaaagctagactagttagaaagattaatggctccaggattctttattttagggctttagggacgcta

SEQ ID NO: 384603 - DNA, 584 bp, Homo sapiens
ttatagtttgtttcaggtagtttttgaatgacagtgagttagttcacttcatcagccagaaactaggcaaaaagctagactagttagaaagattaatggctccaggattctttattttagggctttagggacgctaatgttgtctacttgatttgaagtataacccctatgcatgggataaatataatgtcamaattttggtttttctaattagttatttgggtctcaaaatgtccactttaagcagaaaacctgatagtgtccccagggggctgtcttccataccttcattcttgaattttttaaaagaatctgaacctaagtccaaggaagacattccttttgtacaagtcagaaggattggggggtgggaaatggccattctcttcattttgctgtttccattgattctgttgctgcatcgttgccattgaaactgctcctgcagtctggtaatgattgacctttgtgaccaggatgcccttactaacacagattcctcagtcttcatggtatagacttccaagttatgacatgtttttaaagttcacgtacatattctcagccattgtttccaaagtacc

SEQ ID NO: 384604 - DNA, 584 bp, Homo sapiens
ttatagtttgtttcaggtagtttttgaatgacagtgagttagttcacttcatcagccagaaactaggcaaaaagctagactagttagaaagattaatggctccaggattctttattttagggctttagggacgctaatgttgtctacttgatttgaagtataacccctatgcatgggataaatataatgtcacaattttggtttttctaattagttatttgggtctcaaaatgtccactttargcagaaaacctgatagtgtccccagggggctgtcttccataccttcattcttgaattttttaaaagaatctgaacctaagtccaaggaagacattccttttgtacaagtcagaaggattggggggtgggaaatggccattctcttcattttgctgtttccattgattctgttgctgcatcgttgccattgaaactgctcctgcagtctggtaatgattgacctttgtgaccaggatgcccttactaacacagattcctcagtcttcatggtatagacttccaagttatgacatgtttttaaagttcacgtacatattctcagccattgtttccaaagtacc

SEQ ID NO: 384605 - DNA, 584 bp, Homo sapiens
ttatagtttgtttcaggtagtttttgaatgacagtgagttagttcacttcatcagccagaaactaggcaaaaagctagactagttagaaagattaatggctccaggattctttattttagggctttagggacgctaatgttgtctacttgatttgaagtataacccctatgcatgggataaatataatgtcacaattttggtttttctaattagttatttgggtctcaaaatgtccactttaagcagaaaacctgatagtgtccccagggggytgtcttccataccttcattcttgaattttttaaaagaatctgaacctaagtccaaggaagacattccttttgtacaagtcagaaggattggggggtgggaaatggccattctcttcattttgctgtttccattgattctgttgctgcatcgttgccattgaaactgctcctgcagtctggtaatgattgacctttgtgaccaggatgcccttactaacacagattcctcagtcttcatggtatagacttccaagttatgacatgtttttaaagttcacgtacatattctcagccattgtttccaaagtacc

SEQ ID NO: 384606 - DNA, 584 bp, Homo sapiens
ttatagtttgtttcaggtagtttttgaatgacagtgagttagttcacttcatcagccagaaactaggcaaaaagctagactagttagaaagattaatggctccaggattctttattttagggctttagggacgctaatgttgtctacttgatttgaagtataacccctatgcatgggataaatataatgtcacaattttggtttttctaattagttatttgggtctcaaaatgtccactttaagcagaaaacctgatagtgtccccagggggctgtcttccataccttcattcttgaatttttwaaaagaatctgaacctaagtccaaggaagacattccttttgtacaagtcagaaggattggggggtgggaaatggccattctcttcattttgctgtttccattgattctgttgctgcatcgttgccattgaaactgctcctgcagtctggtaatgattgacctttgtgaccaggatgcccttactaacacagattcctcagtcttcatggtatagacttccaagttatgacatgtttttaaagttcacgtacatattctcagccattgtttccaaagtacc

SEQ ID NO: 384607 - DNA, 517 bp, Homo sapiens
  misc_feature (1)...(517): n = A,T,C or G
nnnnnnnntatgctgctagtattaaanatatatgacggaaaacgcatscaatcttctcactgtttacataaattctaggtttctcctatttacctcaagcacgtatggagcgaattcttaccttttaatattgccatggcattcacattgaacgtaagttgaactctcttatatggtagctgggttcagattcccttgacaatttccagttctaaccctcacagttcctcagtgtggctggcccagatattgatcctacacagctgcctcctcctggtgactagccactgtggaaccattggatacaacctacctgactcaccccacagacctcacagcccacttggacagcccccacaagccagagtgacctgctcagttgcagctgcagccaagaaatgtgcctgctggcactcaccccactgaccagagccccgtggaaaacttatttgggtaatgttctgggcccaataaaggctggagtcccacagaccccttttctgtctcttgctcccca

SEQ ID NO: 384608 - DNA, 568 bp, Homo sapiens
gatgacatagaaatctgtaaggtgttgcatatttcttgcagtccccaaaaggacattttactactttctaactagctccaaggaaatggtgtgagtcaaagcaaaatgggtgacacccagtattgcaattgtgattttcatacaaaaaattatttacrtaaggtgatctatgaaatgagatgtggtaacacataggatcttgtgtgcaatattttgttagtagggatctcagaaatgagaaaataccaacttgcatcttctttgtggaacttacaaaaaataaaggtagggttttgtcttccacagcagctggaaatgaacatagtgactaagcatcattctaacaaagatttgttggttcagagtttaaggaggtagataaagagtagtagtagtccaagccagatgctgacatctattagttttctgcccttggtgtgactgatgagctcagtaatagagtataattaggttatctgatttaatgatttaatatatttataaataaatttcattacaaaatataaaatagcttagatgctctgaattacaagccacaaagaataga

SEQ ID NO: 384609 - DNA, 568 bp, Homo sapiens
gatgacatagaaatctgtaaggtgttgcatatttcttgcagtccccaaaaggacattttactactttctaactagctccaaggaaatggtgtgagtcaaagcaaaatgggtgacacccagtattgcaattgtgattttcatacaaaaaattatttacataaggtgatctatgaaatgagwtgtggtaacacataggatcttgtgtgcaatattttgttagtagggatctcagaaatgagaaaataccaacttgcatcttctttgtggaacttacaaaaaataaaggtagggttttgtcttccacagcagctggaaatgaacatagtgactaagcatcattctaacaaagatttgttggttcagagtttaaggaggtagataaagagtagtagtagtccaagccagatgctgacatctattagttttctgcccttggtgtgactgatgagctcagtaatagagtataattaggttatctgatttaatgatttaatatatttataaataaatttcattacaaaatataaaatagcttagatgctctgaattacaagccacaaagaataga

SEQ ID NO: 384610 - DNA, 607 bp, Homo sapiens
gtaaatttgccttgctgtaaaaacttgttgctggagtgctgacggttctttgtggcaccgaaaattattttccamaaatttgagggcccacccaacattcccattctcctctgggggagggtccagtcctctcccttgaggaggtgcaccccgctgcctcgttgcagtggccataaaggtaaggaatcaagactcaactggtgcgattaataaacccgggctctcagcaacgtggaaagaaacaggccagcaactctggggaaaggatcttcacataccgtggcgaccaggtaactgtgcacagaccgaggtaagaaatgtcgcaggggtgacaaagtatttccttggtggtcgggatattctggaggttgaaagtgtgtgtgaatgatcacaagcactactgcttgtggtgctgtttgtgtggatgatactaagcattattgctgtgaggagtgagtgggtcctatctgcggttttttatttgaataaaaaacctttgaagaggaattcactgtatcctcatagggctcagggcagatcttgctgtggggtttataccatgatgccaatgcaaagagggacggaaaattcctgggagggaagcagc

SEQ ID NO: 384611 - DNA, 607 bp, Homo sapiens
gtaaatttgccttgctgtaaaaacttgttgctggagtgctgacggttctttgtggcaccgaaaattattttccaaaaatttgagggcccacccaacattcccattctcctctgggggagggtccagtcctctcccttgaggaggtgcaccccgctgcctcgttgcagtggccataaaggtaaggaatcaagacwcaactggtgcgattaataaacccgggctctcagcaacgtggaaagaaacaggccagcaactctggggaaaggatcttcacataccgtggcgaccaggtaactgtgcacagaccgaggtaagaaatgtcgcaggggtgacaaagtatttccttggtggtcgggatattctggaggttgaaagtgtgtgtgaatgatcacaagcactactgcttgtggtgctgtttgtgtggatgatactaagcattattgctgtgaggagtgagtgggtcctatctgcggttttttatttgaataaaaaacctttgaagaggaattcactgtatcctcatagggctcagggcagatcttgctgtggggtttataccatgatgccaatgcaaagagggacggaaaattcctgggagggaagcagc

SEQ ID NO: 384612 - DNA, 607 bp, Homo sapiens
gtaaatttgccttgctgtaaaaacttgttgctggagtgctgacggttctttgtggcaccgaaaattattttccaaaaatttgagggcccacccaacattcccattctcctctgggggagggtccagtcctctcccttgaggaggtgcaccccgctgcctcgttgcagtggccataaaggtaaggaatcaagactcaactggtgcgattaataaacccgggctctcagcaacgtggaaagaaacaggccagcaactctggggaaaggatcttcacataccgtggcgaccaggtaactgtgcacagaccgaggtaagaaatgtcgcaggggtgacaaagtatttccttggtggtcgggatattctggaggttgaaagtgtgtgtraatgatcacaagcactactgcttgtggtgctgtttgtgtggatgatactaagcattattgctgtgaggagtgagtgggtcctatctgcggttttttatttgaataaaaaacctttgaagaggaattcactgtatcctcatagggctcagggcagatcttgctgtggggtttataccatgatgccaatgcaaagagggacggaaaattcctgggagggaagcagc

SEQ ID NO: 384613 - DNA, 456 bp, Homo sapiens
gaaaagcgaaaacaaaagacaaaacttawgttattcaccttccaacagatggctccaaacccatgtacccctaaacagagcttccagtgggccagaaactataaaggttccaaaccctcctttaaaggacccaagcctccattgggaggatcaaggctctcgtctaccagtccatctaaatagcatgggggagtaaaatcaaagaatcccagaactgagagtggggaagggcaaggtaggcactacaaatgtggaagaacaggccacttcaagagagaatgtcccaaattagaaaaggaaaaagaagcccttccactcatggcttttgaggaagaataatggtgtcaggggttctgtctcttttatcttgagtcccaccaggagcccttgataagtctagaagtgggacctaagcatgagtttataacctttttagtcaattcaggagtggctcga

SEQ ID NO: 384614 - DNA, 456 bp, Homo sapiens
gaaaagcgaaaacaaaagacaaaacttatgttattcaccttccaacagatggctccaaacccatgtacccctaaacaragcttccagtgggccagaaactataaaggttccaaaccctcctttaaaggacccaagcctccattgggaggatcaaggctctcgtctaccagtccatctaaatagcatgggggagtaaaatcaaagaatcccagaactgagagtggggaagggcaaggtaggcactacaaatgtggaagaacaggccacttcaagagagaatgtcccaaattagaaaaggaaaaagaagcccttccactcatggcttttgaggaagaataatggtgtcaggggttctgtctcttttatcttgagtcccaccaggagcccttgataagtctagaagtgggacctaagcatgagtttataacctttttagtcaattcaggagtggctcga

SEQ ID NO: 384615 - DNA, 422 bp, Homo sapiens
aaactataaaggttccaaaccctcctttaaaggacccaagcctccattgggaggatcaaggctctcrtctaccagtccatctaaatagcatgggggagtaaaatcaaagaatcccagaactgagagtggggaagggcaaggtaggcactacaaatgtggaagaacaggccacttcaagagagaatgtcccaaattagaaaaggaaaaagaagcccttccactcatggcttttgaggaagaataatggtgtcaggggttctgtctcttttatcttgagtcccaccaggagcccttgataagtctagaagtgggacctaagcatgagtttataacctttttagtcaattcaggagtggctcgatcctctgtttgtttcccccccatctaatattgcctgctcttcagaggaacttttggtgtgt

SEQ ID NO: 384616 - DNA, 456 bp, Homo sapiens
gaaaagcgaaaacaaaagacaaaacttatgttattcaccttccaacagatggctccaaacccatgtacccctaaacagagcttccagtgggccagaaactataaaggttccaaaccctcctttaaaggacccaagcctccattgggaggatcaaggctctcgtctaccagkccatctaaatagcatgggggagtaaaatcaaagaatcccagaactgagagtggggaagggcaaggtaggcactacaaatgtggaagaacaggccacttcaagagagaatgtcccaaattagaaaaggaaaaagaagcccttccactcatggcttttgaggaagaataatggtgtcaggggttctgtctcttttatcttgagtcccaccaggagcccttgataagtctagaagtgggacctaagcatgagtttataacctttttagtcaattcaggagtggctcga

SEQ ID NO: 384617 - DNA, 456 bp, Homo sapiens
gaaaagcgaaaacaaaagacaaaacttatgttattcaccttccaacagatggctccaaacccatgtacccctaaacagagcttccagtgggccagaaactataaaggttccaaaccctcctttaaaggacccaagcctccattgggaggatcaaggctctcgtctaccagtccatctaaatagcatgggggagtaaaatcaaagaatcccagaactgagagtggggaagggcaaggtaggcactacaaatgtggaagaacaggccacttcaagagagaatgtcccaaattagaaaakgaaaaagaagcccttccactcatggcttttgaggaagaataatggtgtcaggggttctgtctcttttatcttgagtcccaccaggagcccttgataagtctagaagtgggacctaagcatgagtttataacctttttagtcaattcaggagtggctcga

SEQ ID NO: 384618 - DNA, 422 bp, Homo sapiens
aaactataaaggttccaaaccctcctttaaaggacccaagcctccattgggaggatcaaggctctcgtctaccagtccatctaaatagcatgggggagtaaaatcaaagaatcccagaactgagagtggggaagggcaaggtaggcactacaaatgtggaagaacaggccacttcaagagagaatgtcccaaattagaaaaggaaaaagaagcccttccactcatggcttttgaggaagaataatgstgtcaggggttctgtctcttttatcttgagtcccaccaggagcccttgataagtctagaagtgggacctaagcatgagtttataacctttttagtcaattcaggagtggctcgatcctctgtttgtttcccccccatctaatattgcctgctcttcagaggaacttttggtgtgt

SEQ ID NO: 384619 - DNA, 602 bp, Homo sapiens
taacctttttagtcaattcaggagtggctcgatcctctgtttgtttcccccccatctaatattgcctgctcttcagaggaacttttggtktgtggggtaaagggagaaggatttaaagcaaaaattttagaaaacacagaagtcagataccaggctcaatcagctcatattcagtttttgttaatccctaaagcagggactaatttactaggcagggatttaatgttgaagttaggcataggcctgcaactcagcacaagaggattcctcacctcattaaagctactcaccactgcagatgaaaaatatattaattctaatgtctgatccaaagaaggaaactgagggaaactctgagtccctccaagcacatcaaggtaaaaaaccccagggaagtagtaaggaggaaacaataccccattcccctagagggtaggatacggttgaaacctataattgaaggtcttattaaagatgggcttcttgggccctctatgtccccttataacaacccaatattgccagccaagaaattagatgggtcatatcggctggtacagcaccttagggctattaaccaaatagtccaaactacccatcca

SEQ ID NO: 384620 - DNA, 602 bp, Homo sapiens
taacctttttagtcaattcaggagtggctcgatcctctgtttgtttcccccccatctaatattgcctgctcttcagaggaacttttggtgtgtggggtaaagggagaaggatttaaagcaaaaattttagaaaacacagaagtcagataccaggctcaatcagctcatattcagtttttgttaatccctaaagcagggactaatttactaggcagggatttaatgttgaagttaggcataggcctgcaactcagcmcaagaggattcctcacctcattaaagctactcaccactgcagatgaaaaatatattaattctaatgtctgatccaaagaaggaaactgagggaaactctgagtccctccaagcacatcaaggtaaaaaaccccagggaagtagtaaggaggaaacaataccccattcccctagagggtaggatacggttgaaacctataattgaaggtcttattaaagatgggcttcttgggccctctatgtccccttataacaacccaatattgccagccaagaaattagatgggtcatatcggctggtacagcaccttagggctattaaccaaatagtccaaactacccatcca

SEQ ID NO: 384621 - DNA, 626 bp, Homo sapiens
tctggtgaagatatagagaaggtagctggcttctctacacatattctcaaccatctgcagttcgaggggttatgagtctcaaagggaaagcttcagtatgtagaacctgawattaaatatttagaccacttttaagtgcagagaagtgaagaatagggcctgaacgagttgagggaatcgtgtccctacccttgcctcaaacttaaacaagaactcaggaaatttttagggttatttggatactgctgcttatggattaactcacatgcactaaacagtaaaattctatatccaaaacttgcccaggggaagactgaccatttcctgtggacttctgaggaagtccatcaggttgaagagctgaaaaaaggcttataacagcccctgtcttagccttaccttccctagaaaagccattccacctttttgtcaacgtggataatggggtagctttaggagtgctcacttaagaacatggaggccattggcagaccatggtggccttcctgtcaaaagtcttagatccagttacttgtgagtggcctcaatacatccaatccattgtggctacagcactaatggtcaaagaaagcaggaagttaacctttggaggaaaattgacagta

SEQ ID NO: 384622 - DNA, 626 bp, Homo sapiens
tctggtgaagatatagagaaggtagctggcttctctacacatattctcaaccatctgcagttcgaggggttatgagtctcaaagggaaagcttcagtatgtagaacctgaaattaaatatttagaccacttttaagtgcagagaagtgaagaatagggcctgaacgagttgagggaatcgtgtccctacccttgcctcaaacttaaacaagaactcaggaaatttttagggttatttggatactgctgcttatggattaactcacatgcactaaacagtaaaattctatatccaaaacttgcccmggggaagactgaccatttcctgtggacttctgaggaagtccatcaggttgaagagctgaaaaaaggcttataacagcccctgtcttagccttaccttccctagaaaagccattccacctttttgtcaacgtggataatggggtagctttaggagtgctcacttaagaacatggaggccattggcagaccatggtggccttcctgtcaaaagtcttagatccagttacttgtgagtggcctcaatacatccaatccattgtggctacagcactaatggtcaaagaaagcaggaagttaacctttggaggaaaattgacagta

SEQ ID NO: 384623 - DNA, 657 bp, Homo sapiens
tggtttattaattccaccagggatgttgtcaaaggaatagcagaacaattgaggccaactagccagatgrcctgggaaaacagaatggccctggatatgatattagctgaaaaaggtggtgtttgtgttatcattaaaactcagtgatacacctttatccattgggggcaaacaacactgcccccaatgggagcataacaagggccctacaaggatttaccactttatccaatgaattagctaaaaattctggggtcaataaccctttctccagatggctagaaaggtgtttcagtaaatgggaagaaatcatagcctcaattcttacttctcttacagaagtaacggctgtactcattcttgttgggtgttgtgtcataccatgcatccatgggctagtgcaaaggcttatagaaacaacactttctaaaacctcccttagctgtcctccaccttattcagataggcttttctttttagaggatcaagttgaaaaaaaaaaaaaagccaagacatgttaaaaaggtttgaagaggaagggctataaaaattgaaagagggaattgtagaatacagtgaattcctcttcaaaggttttagcctgttaatgtcctttaaagttcaagagagggaagattgttaagtacagtgagttct

SEQ ID NO: 384624 - DNA, 596 bp, Homo sapiens
tgctattggaatcccatgaggagtaccagatacatttaagcctaagatcaaatagctacaggatttgaatcaatattttggtgggtgacaataaaaatgtagatttgatgaattacatctataataatcaacagtggtttattaattccaccagggatgttgtcaaaggaatagcagaacaattgaggccaactagccagatggcctgggaaaacagaatggccctggatatgatattagctgaaaaaggtggtgtttgtgttatsattaaaactcagtgatacacctttatccattgggggcaaacaacactgcccccaatgggagcataacaagggccctacaaggatttaccactttatccaatgaattagctaaaaattctggggtcaataaccctttctccagatggctagaaaggtgtttcagtaaatgggaagaaatcatagcctcaattcttacttctcttacagaagtaacggctgtactcattcttgttgggtgttgtgtcataccatgcatccatgggctagtgcaaaggcttatagaaacaacactttctaaaacctcccttagctgtcctccaccttattcag

SEQ ID NO: 384625 - DNA, 596 bp, Homo sapiens
tgctattggaatcccatgaggagtaccagatacatttaagcctaagatcaaatagctacaggatttgaatcaatattttggtgggtgacaataaaaatgtagatttgatgaattacatctataataatcaacagtggtttattaattccaccagggatgttgtcaaaggaatagcagaacaattgaggccaactagccagatggcctgggaaaacagaatggccctggatatgatattagctgaaaaaggtggtgtttgtgttatcattaaractcagtgatacacctttatccattgggggcaaacaacactgcccccaatgggagcataacaagggccctacaaggatttaccactttatccaatgaattagctaaaaattctggggtcaataaccctttctccagatggctagaaaggtgtttcagtaaatgggaagaaatcatagcctcaattcttacttctcttacagaagtaacggctgtactcattcttgttgggtgttgtgtcataccatgcatccatgggctagtgcaaaggcttatagaaacaacactttctaaaacctcccttagctgtcctccaccttattcag

SEQ ID NO: 384626 - DNA, 596 bp, Homo sapiens
tgctattggaatcccatgaggagtaccagatacatttaagcctaagatcaaatagctacaggatttgaatcaatattttggtgggtgacaataaaaatgtagatttgatgaattacatctataataatcaacagtggtttattaattccaccagggatgttgtcaaaggaatagcagaacaattgaggccaactagccagatggcctgggaaaacagaatggccctggatatgatattagctgaaaaaggtggtgtttgtgttatcattaaaactcagtgatacacctttatccattgggggcaaacaacactgcccccaatgggagcataacaagggccctacaaggatttaccactttatccaatgaattagctaaaaattctggggtcaataaccctttctccagatggctagaaaggtgtttcagtaaatggraagaaatcatagcctcaattcttacttctcttacagaagtaacggctgtactcattcttgttgggtgttgtgtcataccatgcatccatgggctagtgcaaaggcttatagaaacaacactttctaaaacctcccttagctgtcctccaccttattcag

SEQ ID NO: 384627 - DNA, 657 bp, Homo sapiens
tggtttattaattccaccagggatgttgtcaaaggaatagcagaacaattgaggccaactagccagatggcctgggaaaacagaatggccctggatatgatattagctgaaaaaggtggtgtttgtgttatcattaaaactcagtgatacacctttatccattgggggcaaacaacactgcccccaatgggagcataacaagggccctacaaggatttaccactttatccaatgaattagctaaaaattctggggtcaataaccctttctccagatggctagaaaggtgtttcagtaaatgggaagaaatcayagcctcaattcttacttctcttacagaagtaacggctgtactcattcttgttgggtgttgtgtcataccatgcatccatgggctagtgcaaaggcttatagaaacaacactttctaaaacctcccttagctgtcctccaccttattcagataggcttttctttttagaggatcaagttgaaaaaaaaaaaaaagccaagacatgttaaaaaggtttgaagaggaagggctataaaaattgaaagagggaattgtagaatacagtgaattcctcttcaaaggttttagcctgttaatgtcctttaaagttcaagagagggaagattgttaagtacagtgagttct

SEQ ID NO: 384628 - DNA, 578 bp, Homo sapiens
actagccagatggcctgggaaaacagaatggccctggatatgatattagctgaaaaaggtggtgtttgtgttatcattaaaactcagtgatacacctttatccattgggggcaaacaacactgcccccaatgggagcataacaagggccctacaaggatttaccactttatccaatgaattagctaaaaattctggggtcaataaccctttctccagatggctagaaaggtgtttcagtaaatgggaagaaatcatagcctcaattcttacttctcttacagaagtaacggctgtactcattcttgttgggtgttgtgtcataccatgcatccatgggctagtgcaaaggcttatagaaacaacactttytaaaacctcccttagctgtcctccaccttattcagataggcttttctttttagaggatcaagttgaaaaaaaaaaaaaagccaagacatgttaaaaaggtttgaagaggaagggctataaaaattgaaagagggaattgtagaatacagtgaattcctcttcaaaggttttagcctgttaatgtcctttaaagttcaagagagggaag

SEQ ID NO: 384629 - DNA, 552 bp, Homo sapiens
gagttctgagttcctcttcaaagaacaaatatgtgaatatgttcagcttctctattctttgttctccattttaaagtttaacttcctcattatttatgcatccttgcccctagtttcagtaaatgaccccctcctagtccctatcacctactctatccttagccattcttagtcacctgctctctccttagtcatccttagtcgcccgctctgtaaccatccttcctgcagaaactacccaccccgccactctggcttgcacccctgtcctctttgaagtagccagtcaaaattagcttagagtgttccgtccaaccctagccaacaggggagagacacaaaagtagggactagctgcattaggaataagaaccctttcccctctcttatccagtgtgctcttgccattgctccatccgcaagactcacccttctatagaagtaaatttgccttgctggagtgctaactcttctttgtgtcaccaaaaagttatttccaacatgaagstgcacccttggtggagggaacatctgacgaagttcaatgtttgg

SEQ ID NO: 384630 - DNA, 583 bp, Homo sapiens
tagctgcattaggaataagaaccctttcccctctcttatccagtgtgctcttgccattgctccatccgcaagactcacccttctatagaagtaaatttgccttgctggagtgctaactcttctttgtgtcaccaaaaagttatttccaacatgaaggtgcacccttggtggagggaacatctgacgaagttcaatgtttggggaaagcaatatctggaaagattgaacagtcagcaggagaaacacctaggaaaattacaaggcctgtgaaagaaacatctgagaaatttgcatggccacaagaaagrccttcaaagaccacacgggaggaaaaagaaacatctgtaaagactgaatgagtggcaggagtaacatttaataaaattgaagttttggaagaaggaacatctaagatgatcacatgtcctacaaaaaaacagctacaaaagcaagtacaaatggtaagatgcttgagtgaactttgtagagtttattggcactctgggttgcctaatggaaatagtgtggtatgggagtagttgggaatggcttgaatgtctagataacgcaagcttaggcaaca

SEQ ID NO: 384631 - DNA, 376 bp, Homo sapiens
aagaaacatctgtaaagactgaatgagtggcaggagtaacatttaataaaattgaagttttggaagaaggaacatctaagatgatcacatgtcctacaaaaaaacagctacaaaagcaagtacaaatggtaagatgcttgagtgaactttgtagagtttattggcactctgggttgcctaatggaaatagtgtggtatgggagtagtygggaatggcttgaatgtctagataacgcaagcttaggcaacacattttaatagtgtagaaatgagtagatcttattctgtaggccctggaaaaattcccaaaatagttctggctgtaaataatagatgaactaactaacaattgctaaaaccatagaaaccaaagttg

SEQ ID NO: 384632 - DNA, 606 bp, Homo sapiens
aaagtttgtataaaaaaccatttagaaagctgaatttggcctgtggcctatagtttttggcccttcatatagwagatagatggaggataatcacgtaaaaagattgaaagattaagcttttgtagtagttcatgtgatagtcttttttttttgtaaacaatctgtggcctagtatcaatctattatgaaagtttgatccatcaagggtaaaatgaataaagttcagaagctcaatttacacatttaaacatgtaggtccttctttggcattattttattttgattaatttttttaacttaaaaaataagaacagtaatttgtagggtttctttttccctgtgaaagccatcagttaaggggccacgtttaacaaggaaatataaatataaaataaataagtttgtatttccagtggcactggaaagataaagcaaaggcagaaaagaggtgcagttaatatggtttagtgataattgagtttaaaaagctaggggacagataaaatctcaggtcattcataagttttcagattgtgcacaagcatttacaatgctcatggggaaggagtaggaatttgtcaggttaacatgggaagtgcaaacagt

SEQ ID NO: 384633 - DNA, 606 bp, Homo sapiens
aaagtttgtataaaaaaccatttagaaagctgaatttggcctgtggcctatagtttttggcccttcatatagtagatagatggaggataatcacrtaaaaagattgaaagattaagcttttgtagtagttcatgtgatagtcttttttttttgtaaacaatctgtggcctagtatcaatctattatgaaagtttgatccatcaagggtaaaatgaataaagttcagaagctcaatttacacatttaaacatgtaggtccttctttggcattattttattttgattaatttttttaacttaaaaaataagaacagtaatttgtagggtttctttttccctgtgaaagccatcagttaaggggccacgtttaacaaggaaatataaatataaaataaataagtttgtatttccagtggcactggaaagataaagcaaaggcagaaaagaggtgcagttaatatggtttagtgataattgagtttaaaaagctaggggacagataaaatctcaggtcattcataagttttcagattgtgcacaagcatttacaatgctcatggggaaggagtaggaatttgtcaggttaacatgggaagtgcaaacagt

SEQ ID NO: 384634 - DNA, 495 bp, Homo sapiens
tacacatttaaacatgtaggtccttctttggcattattttattttgattaatttttttaacttaaaaaataagaacagtaatttgtagggtttctttttccctgtgaaagccatcagttaaggggccacgtttaacaaggaaatataaatataaaataaataagtttgtatttccagtggcactggaaagataaagcaaaggcagaaaagaggygcagttaatatggtttagtgataattgagtttaaaaagctaggggacagataaaatctcaggtcattcataagttttcagattgtgcacaagcatttacaatgctcatggggaaggagtaggaatttgtcaggttaacatgggaagtgcaaacagtcatgggacagaccaacagttttctttacatattgagttcaatgaaacatttgtgagggatactttcagtaggtaattggattatatgcatttctagctggagatagaactctggttgaagatgca

SEQ ID NO: 384635 - DNA, 606 bp, Homo sapiens
aaagtttgtataaaaaaccatttagaaagctgaatttggcctgtggcctatagtttttggcccttcatatagtagatagatggaggataatcacgtaaaaagattgaaagattaagcttttgtagtagttcatgtgatagtcttttttttttgtaaacaatctgtggcctagtatcaatctattatgaaagtttgatccatcaagggtaaaatgaataaagttcagaagctcaatttacacatttaaacatgtaggtccttctttggcattattttattttgattaatttttttaacttaaaaaataagaacagtaatttgtagggtttctttttccctgtgaaagccatcagttaaggggccacgtttaacaaggaaatataaatataaaataaataagtttgtatttccagtggcactggaaagataaagcaaaggcagaaaagaggtrcagttaatatggtttagtgataattgagtttaaaaagctaggggacagataaaatctcaggtcattcataagttttcagattgtgcacaagcatttacaatgctcatggggaaggagtaggaatttgtcaggttaacatgggaagtgcaaacagt

SEQ ID NO: 384636 - DNA, 606 bp, Homo sapiens
aaagtttgtataaaaaaccatttagaaagctgaatttggcctgtggcctatagtttttggcccttcatatagtagatagatggaggataatcacgtaaaaagattgaaagattaagcttttgtagtagttcatgtgatagtcttttttttttgtaaacaatctgtggcctagtatcaatctattatgaaagtttgatccatcaagggtaaaatgaataaagttcagaagctcaatttacacatttaaacatgtaggtccttctttggcattattttattttgattaatttttttaacttaaaaaataagaacagtaatttgtagggtttctttttccctgtgaaagccatcagttaaggggccacgtttaacaaggaaatataaatataaaataaataagtttgtatttccagtggcactggaaagataaagcaaaggcagaaaagaggtgcagttaatatggyttagtgataattgagtttaaaaagctaggggacagataaaatctcaggtcattcataagttttcagattgtgcacaagcatttacaatgctcatggggaaggagtaggaatttgtcaggttaacatgggaagtgcaaacagt

SEQ ID NO: 384637 - DNA, 495 bp, Homo sapiens
tacacatttaaacatgtaggtccttctttggcattattttattttgattaatttttttaacttaaaaaataagaacagtaatttgtagggtttctttttccctgtgaaagccatcagttaaggggccacgtttaacaaggaaatataaatataaaataaataagtttgtatttccagtggcactggaaagataaagcaaaggcagaaaagaggtgcagttaatatggtttagtgataattgagtttaaaaagctaggggacagataaaatctcaggtcattcataagttttcagattgtgcacaagcatttacaatgctcatggggaaggagtaggaatttgtcaggttaacatgggaagtgcaaacagtcatgggacagaccaacagttttctttacatattgagttcaatgaaacatttgtgagggatactttcagtaggtaattggattataygcatttctagctggagatagaactctggttgaagatgca

SEQ ID NO: 384638 - DNA, 326 bp, Homo sapiens
ccagcctagatctgtgggattatggctttcgttaagtttagaacatatttagccaatttttcctcaaatttttgattctgcctctcctcctayctctttggggacttatatactacctgctggaagtttgctcatcgttcactagtgtctcaaatttgtgaatcttttctttcatgatggcgaattaatctatgctcatatctactcagtgtagctttcatctccagcattgtaatttgtatctctaaaagtgcaatttggtttttaaaagtatcttctattgctttatttatcttcttgatttttatagttgagttacttataaa

SEQ ID NO: 384639 - DNA, 326 bp, Homo sapiens
ccagcctagatctgtgggattatggctttcgttaagtttagaacatatttagccaatttttcctcaaatttttgattctgcctctcctcctatctctttggggacttatatactacctgctggaagtttgctcatcrttcactagtgtctcaaatttgtgaatcttttctttcatgatggcgaattaatctatgctcatatctactcagtgtagctttcatctccagcattgtaatttgtatctctaaaagtgcaatttggtttttaaaagtatcttctattgctttatttatcttcttgatttttatagttgagttacttataaa

SEQ ID NO: 384640 - DNA, 548 bp, Homo sapiens
caccacatattttcttcgattgtggatatattttaggtagaattttatgtctggctttcactttagcctggtccctacctcaagcataaggtaaagattttccatagtttcttttctggtactactgcctgccagtgtggggtcatgtcctagtctatcttgagggaacccccttattcattattgtcagagtgagactgttaagtcttgatttccctggacaacttcattgcatgacttttaatatgatttttaaatataccctttactggacaataaattatatagttatctgagtaagagatatgatcagaaagaggcattgcctcattcagcttttctgtttggtgaactcgcatatgttctcctcacccaccagtcacctctaaacygtattgttccaagacaacaaacagaactcgagtgtgtatctttcaccactggatttgtctttgctccataaagcttaatgcttaatagggtttctgttagcattttctctatttattttcccataaaatatcacaggccttcttcatatggaatta

SEQ ID NO: 384641 - DNA, 564 bp, Homo sapiens
catttaaagtattactaaaaaaagaaacaaaacatatatgggataacagatattagatttttcagcctagtctcagattttaatataattatttttaaggatacttgccttattttataaagatgaatatttatgtctaatgaatatgtaaacttgtttayaaaaagtaacgtcattttaattagttaactctaaatgatctgtccttattgaggagtaattttgactgttatatttttaaaataataattttcaacttataattttactggataacttccagtattcttttccataactgttgttgaagttactggtaacagaatctttctaactagaagatgttctttctcattatttttcaagtatgtgcatcatttggaagagagttcagtaataaattaaatacctcagaactagaaagaaaaaacatattcaagaatatagaaattttactggaataataaaccaatatacgaagaagtagatctcaaagtgaattctatgttctaacaaaatgaattttaagataagtatatttaatggcagattgactttaaacca

SEQ ID NO: 384642 - DNA, 564 bp, Homo sapiens
catttaaagtattactaaaaaaagaaacaaaacatatatgggataacagatattagatttttcagcctagtctcagattttaatataattatttttaaggatacttgccttattttataaagatgaatatttatgtctaatgaatatgtaaacttgtttacaaaaagtaacgtcattttaattagttaactctaaatgatctgtccttrttgaggagtaattttgactgttatatttttaaaataataattttcaacttataattttactggataacttccagtattcttttccataactgttgttgaagttactggtaacagaatctttctaactagaagatgttctttctcattatttttcaagtatgtgcatcatttggaagagagttcagtaataaattaaatacctcagaactagaaagaaaaaacatattcaagaatatagaaattttactggaataataaaccaatatacgaagaagtagatctcaaagtgaattctatgttctaacaaaatgaattttaagataagtatatttaatggcagattgactttaaacca

SEQ ID NO: 384643 - DNA, 564 bp, Homo sapiens
catttaaagtattactaaaaaaagaaacaaaacatatatgggataacagatattagatttttcagcctagtctcagattttaatataattatttttaaggatacttgccttattttataaagatgaatatttatgtctaatgaatatgtaaacttgtttacaaaaagtaacgtcattttaattagttaactctaaatgatctgtccttattgaggagtaattttgactgttatatttttaaaataataattttcaacttataattttactggataacttccagtattcttttccataactgttgttgaagttactrgtaacagaatctttctaactagaagatgttctttctcattatttttcaagtatgtgcatcatttggaagagagttcagtaataaattaaatacctcagaactagaaagaaaaaacatattcaagaatatagaaattttactggaataataaaccaatatacgaagaagtagatctcaaagtgaattctatgttctaacaaaatgaattttaagataagtatatttaatggcagattgactttaaacca

SEQ ID NO: 384644 - DNA, 380 bp, Homo sapiens
ctaattttgatgaagcccagtacattttcttttatcactgtgcttttggtgccatatctaagaaactactgccaaatcaaaggccataaagatttattgttattttttattctaagagttttatagttttgcaattcagaaacataaaatcaaatactgcatgttcttacttaaaaatgggaaataaataatgtgtacacatraacaaggagtgtaaaatgataagacactgtagactcagaagggtgagaaggtgggaggggtaagggtgatgagaaattacttagtggatacagtgtacattgttccagtgataaacacactaaaagctcagacttcactcctaccccatatacccaagtaacaaaattgcacttgca

SEQ ID NO: 384645 - DNA, 380 bp, Homo sapiens
ctaattttgatgaagcccagtacattttcttttatcactgtgcttttggtgccatatctaagaaactactgccaaatcaaaggccataaagatttattgttattttttattctaagagttttatagttttgcaattcagaaacataaaatcaaatactgcatgttcttacttaaaaatgggaaataaataatgtgtacacatgaacaargagtgtaaaatgataagacactgtagactcagaagggtgagaaggtgggaggggtaagggtgatgagaaattacttagtggatacagtgtacattgttccagtgataaacacactaaaagctcagacttcactcctaccccatatacccaagtaacaaaattgcacttgca

SEQ ID NO: 384646 - DNA, 556 bp, Homo sapiens
ttcaccccaaactgaaactctgtactcattaagcaayaactcctcattctccctttcctcccaagtccctggtaggaataaattttatgacattttaattaatttaagtgtaaaaaactaaaagcagctggtggctatcatactggacctcacagttctaacaccatcagtatcaacccctggacagatataatcattcctaagctgcctttacatttattattattctatttatggtaatctgtaatctattctcccacaaagctggactattcctgtaagaacatatcttataccatttcattcccagctctgaatcctccagtggttacctatcacaattaacaaagaaatccaagctctttactatggtctgtgtttatctgctcctcagactgtgcattctcctttcctcctcccagtgcctgcagcctgactggactttgtagtgatctttgagctcatcaagtgctgtctgtattcagactctgcacagtgtctcttctctctgccctctagacattcgcttaacttactctgtcataccattctgacc

SEQ ID NO: 384647 - DNA, 556 bp, Homo sapiens
ttcaccccaaactgaaactctgtactcattaagcaacaactcctcattctccctttcctcccaagtccctggtaggaataaattttatgrcattttaattaatttaagtgtaaaaaactaaaagcagctggtggctatcatactggacctcacagttctaacaccatcagtatcaacccctggacagatataatcattcctaagctgcctttacatttattattattctatttatggtaatctgtaatctattctcccacaaagctggactattcctgtaagaacatatcttataccatttcattcccagctctgaatcctccagtggttacctatcacaattaacaaagaaatccaagctctttactatggtctgtgtttatctgctcctcagactgtgcattctcctttcctcctcccagtgcctgcagcctgactggactttgtagtgatctttgagctcatcaagtgctgtctgtattcagactctgcacagtgtctcttctctctgccctctagacattcgcttaacttactctgtcataccattctgacc

SEQ ID NO: 384648 - DNA, 556 bp, Homo sapiens
ttcaccccaaactgaaactctgtactcattaagcaacaactcctcattctccctttcctcccaagtccctggtaggaataaattttatgacattttaattaatttaagtgtaaaaaactaaaagcagctggtggctatcatactggacctcacagttctaacaccatcagtatcaacccctggacagatataatcattcctaagctgcctttacatttattattattctatttatggtaayctgtaatctattctcccacaaagctggactattcctgtaagaacatatcttataccatttcattcccagctctgaatcctccagtggttacctatcacaattaacaaagaaatccaagctctttactatggtctgtgtttatctgctcctcagactgtgcattctcctttcctcctcccagtgcctgcagcctgactggactttgtagtgatctttgagctcatcaagtgctgtctgtattcagactctgcacagtgtctcttctctctgccctctagacattcgcttaacttactctgtcataccattctgacc

SEQ ID NO: 384649 - DNA, 318 bp, Homo sapiens
gtaagaacatatcttataccatttcattcccagctctgaatcctccagtggttacctatcacaattaacaaagaaatccaagctctttactatggtctgtgtttatctgctyctcagactgtgcattctcctttcctcctcccagtgcctgcagcctgactggactttgtagtgatctttgagctcatcaagtgctgtctgtattcagactctgcacagtgtctcttctctctgccctctagacattcgcttaacttactctgtcataccattctgacctgctcaagtgtcatcttctcaaaaagattgttccagagc

SEQ ID NO: 384650 - DNA, 416 bp, Homo sapiens
ttggttgtgtctttacctgattaatatatcaagatgagactgatattatatgatagaattaattaggaaggagtcccactttgattttttggaatactttctgtagaattacagccaactcatttttgtatacatgataaaatcatgctgtgaatgcatctggtttagcactttttataattggtagtttttttttatcaccaattcaatttgcttgcacatttttggtttcttcaagacttctgtttattcctgattcaatcttgggaggttgtatatttctaagagtttattcatttcctctagactttctagttggtgtgcacagagatatttatagtagtctgcaagtatcytttgtatttttgtgggattggttgtcacaaatgtaacatttaaatagatgcataatgaaa

SEQ ID NO: 384651 - DNA, 337 bp, Homo sapiens
gtgcctatttatgtagaactcaaatgacagctgatttttatttttattatatatattttttgagatagggtcttgctttgttgcccaggctggagtgcagtggtgcaatcactgctcactgcagcctcaaactcccaagctcaagcaatccttccaccttggcctcccaaatagctaggacaacaggtgcacatcaccatgcccaccttttttttttttaacttttgatagaggctgggtcttgctatgttgcccaggttgctcttgaactmctgggctcaaagaatcctctcatttcagcctcttcaatggctggtattacaagcatgagccacca

SEQ ID NO: 384652 - DNA, 438 bp, Homo sapiens
tctacaaaacatatcttgattacataattacagttgaataagaaaaataagttcaagagattataatgcatgtattgtatttctgaaaaaatactgacagtaaatattgtcttctcaccacaaaaatartaactatgtgaggcaaagcatttgacaattagctaaaattaggcattgacaatgtatatttacttcaaaatactatttcacaaaataaatacatatttcatctgtgaatttaaaaatatatttataaaaactattaaaaatgacaatgtttcaaattctgaccggtgtttttgtcataaacctgtctgaatagtatgaaagatacataatttctgtgctgttttgtcacctagtcagtcatgaccatatgaactctaatatttaccaccatgttcggcacccagcacagagcatgggagaagccaatgt

SEQ ID NO: 384653 - DNA, 438 bp, Homo sapiens
tctacaaaacatatcttgattacataattacagttgaataagaaaaataagttcaagagattataatgcatgtattgtatttctgaaaaaatactgacagtaaatattgtcttctcaccacaaaaataataactatgtgaggcaaagcatttgacaattagctaaaattaggcattgacaatgtatatttacttcaaaatactatttcacaaaataaatacatatttcatctgtgaatttaaaaatatatttataaaaactattaaaaatgacaatgtttcaaattctgacckgtgtttttgtcataaacctgtctgaatagtatgaaagatacataatttctgtgctgttttgtcacctagtcagtcatgaccatatgaactctaatatttaccaccatgttcggcacccagcacagagcatgggagaagccaatgt

SEQ ID NO: 384654 - DNA, 438 bp, Homo sapiens
tctacaaaacatatcttgattacataattacagttgaataagaaaaataagttcaagagattataatgcatgtattgtatttctgaaaaaatactgacagtaaatattgtcttctcaccacaaaaataataactatgtgaggcaaagcatttgacaattagctaaaattaggcattgacaatgtatatttacttcaaaatactatttcacaaaataaatacatatttcatctgtgaatttaaaaatatatttataaaaactattaaaaatgacaatgtttcaaattctgaccggtgtttttgtcataaacctgtctgaatagtatgaaagatacatartttctgtgctgttttgtcacctagtcagtcatgaccatatgaactctaatatttaccaccatgttcggcacccagcacagagcatgggagaagccaatgt

SEQ ID NO: 384655 - DNA, 438 bp, Homo sapiens
tctacaaaacatatcttgattacataattacagttgaataagaaaaataagttcaagagattataatgcatgtattgtatttctgaaaaaatactgacagtaaatattgtcttctcaccacaaaaataataactatgtgaggcaaagcatttgacaattagctaaaattaggcattgacaatgtatatttacttcaaaatactatttcacaaaataaatacatatttcatctgtgaatttaaaaatatatttataaaaactattaaaaatgacaatgtttcaaattctgaccggtgtttttgtcataaacctgtctgaatagtatgaaagatacataatttctgtgctgttttgtcacctagtcagtcatgrccatatgaactctaatatttaccaccatgttcggcacccagcacagagcatgggagaagccaatgt

SEQ ID NO: 384656 - DNA, 578 bp, Homo sapiens
tgggacaactggagtttctggtgctggtggtaatgatagggaagrcacaaaaagggcagctcttgctgtgtttcacatgattaaaccactctgaagagagtaaataagtttgcatcccagatcactgaagaaattttttaattcaaaagatgccatgatctttaaaatttttccagataaaatgaccaaggagttgactagttaggtgacaaagactgaaacctctaaagtgtaaactgcacccaataaaaaagtacattatacaagtgtgagaaattcctcaagattttaacattaatatgaaaaagattatttcacatgtgaaatccacaggtgtcattctattatttttgaatatttaacattcacaccaaaaaaaagattctgaatgaaaacttaagttgagctgtaagtatgtaataaaaaattaagtttaacattctccacttaccattaactcttctaaaagtttaatttctaagacatatcttctaactaattttatattttccacacattgtgttaatttttttttttttttgagatgaagtctcgctctgtcatcaggctggaatgca

SEQ ID NO: 384657 - DNA, 578 bp, Homo sapiens
tgggacaactggagtttctggtgctggtggtaatgatagggaagacacaaaaagggcagctcttgctgtgtttcayatgattaaaccactctgaagagagtaaataagtttgcatcccagatcactgaagaaattttttaattcaaaagatgccatgatctttaaaatttttccagataaaatgaccaaggagttgactagttaggtgacaaagactgaaacctctaaagtgtaaactgcacccaataaaaaagtacattatacaagtgtgagaaattcctcaagattttaacattaatatgaaaaagattatttcacatgtgaaatccacaggtgtcattctattatttttgaatatttaacattcacaccaaaaaaaagattctgaatgaaaacttaagttgagctgtaagtatgtaataaaaaattaagtttaacattctccacttaccattaactcttctaaaagtttaatttctaagacatatcttctaactaattttatattttccacacattgtgttaatttttttttttttttgagatgaagtctcgctctgtcatcaggctggaatgca

SEQ ID NO: 384658 - DNA, 578 bp, Homo sapiens
tgggacaactggagtttctggtgctggtggtaatgatagggaagacacaaaaagggcagctcttgctgtgtttcacatgattaaaccactctgaagagagtaaataagtttgcatcccagatcactgaagaaattttttaattcaaaagatgccatgatctttaaaatttttccagataaaatgaccaaggagttgactagttaggtgacaaagactgaaacctctaaaktgtaaactgcacccaataaaaaagtacattatacaagtgtgagaaattcctcaagattttaacattaatatgaaaaagattatttcacatgtgaaatccacaggtgtcattctattatttttgaatatttaacattcacaccaaaaaaaagattctgaatgaaaacttaagttgagctgtaagtatgtaataaaaaattaagtttaacattctccacttaccattaactcttctaaaagtttaatttctaagacatatcttctaactaattttatattttccacacattgtgttaatttttttttttttttgagatgaagtctcgctctgtcatcaggctggaatgca

SEQ ID NO: 384659 - DNA, 651 bp, Homo sapiens
tcgctctgtcatcaggctggaatgcagttgtgcaatctcagctcactgcaacctctgcctcctgggttcaagtgattctcctgcctcagcctcctgaatggctaggtcaacaggtgcatgccaccatgcccagctaatttttgtatttttagtagagatggggtttcaccatatgggccaggaaggtctcaacttcttgacctagtgattctcccacctcagcctcccaaagtgctgggattataggtgtgagccaccacacacagactgtgttaaaatttaataaaagtttggttttacaaagataataaattctgactgatttattcctctcacctgtgaacactgcatgccttttatctcaattaacagatctgaaakttacattgacaaactttcatcagaacctacaaagtactgtgtgaagtgacatggcacaaaacaaacagcaataaagatgtaaccataacacaaagaataaaaagaagggctgtgatgcatacacagttgggataaacataagtagacacacaaacaaaactaaagataatcagaaaataagcagaatgtctctttaaattcagaaagagtcaattttgcagcataagaacaatgtcctctccatatacagaatcgattttatttcttcac

SEQ ID NO: 384660 - DNA, 651 bp, Homo sapiens
tcgctctgtcatcaggctggaatgcagttgtgcaatctcagctcactgcaacctctgcctcctgggttcaagtgattctcctgcctcagcctcctgaatggctaggtcaacaggtgcatgccaccatgcccagctaatttttgtatttttagtagagatggggtttcaccatatgggccaggaaggtctcaacttcttgacctagtgattctcccacctcagcctcccaaagtgctgggattataggtgtgagccaccacacacagactgtgttaaaatttaataaaagtttggttttacaaagataataaattctgactgatttattcctctcacctgtgaacactgcatgccttttatctcaattaacagatctgaaatttacattgacaaactttcatcagaacctacaaagtactgtgtgaagtgacatggcacaaaacaaacagcaataaagwtgtaaccataacacaaagaataaaaagaagggctgtgatgcatacacagttgggataaacataagtagacacacaaacaaaactaaagataatcagaaaataagcagaatgtctctttaaattcagaaagagtcaattttgcagcataagaacaatgtcctctccatatacagaatcgattttatttcttcac

SEQ ID NO: 384661 - DNA, 484 bp, Homo sapiens
tacacctaatgtttatattaagagtaaaatatttgtatatttaacaccatgtaagtaaaaaactaacagtctgtatgagtttaygggcagagaggccacttgttcaacatatatatgaacaatttttaaaaatattcattcaggacttagaaatgtgggatttcttattatactactatgtaattattattatgaccataaaaaacctctgtagcaagtaataatttacttgtacatttttaaataactaaaaatgtttaattggattgtctgtaacacaaaaaataaatgcattatgtaatgaatacctcatttactctgatgtgattacaagttgtatgcctgtatgaaaatattctatatatgccataaataggtaaacaatactatgttcctacaaaaatttaaaacgttaaacaaatgtacatttttacccattgaaacaatactcttaaacttttcagtttaatgccacaggcaaaag

SEQ ID NO: 384662 - DNA, 484 bp, Homo sapiens
tacacctaatgtttatattaagagtaaaatatttgtatatttaacaccatgtaagtaaaaaactaacagtctgtatgagtttacgggcagagaggccacttgttcaacatatatatgaacaatttttaaaaatattcattcaggacttagaaatgtgrgatttcttattatactactatgtaattattattatgaccataaaaaacctctgtagcaagtaataatttacttgtacatttttaaataactaaaaatgtttaattggattgtctgtaacacaaaaaataaatgcattatgtaatgaatacctcatttactctgatgtgattacaagttgtatgcctgtatgaaaatattctatatatgccataaataggtaaacaatactatgttcctacaaaaatttaaaacgttaaacaaatgtacatttttacccattgaaacaatactcttaaacttttcagtttaatgccacaggcaaaag

SEQ ID NO: 384663 - DNA, 484 bp, Homo sapiens
tacacctaatgtttatattaagagtaaaatatttgtatatttaacaccatgtaagtaaaaaactaacagtctgtatgagtttacgggcagagaggccacttgttcaacatatatatgaacaatttttaaaaatattcattcaggacttagaaatgtgggatttcttaytatactactatgtaattattattatgaccataaaaaacctctgtagcaagtaataatttacttgtacatttttaaataactaaaaatgtttaattggattgtctgtaacacaaaaaataaatgcattatgtaatgaatacctcatttactctgatgtgattacaagttgtatgcctgtatgaaaatattctatatatgccataaataggtaaacaatactatgttcctacaaaaatttaaaacgttaaacaaatgtacatttttacccattgaaacaatactcttaaacttttcagtttaatgccacaggcaaaag

SEQ ID NO: 384664 - DNA, 484 bp, Homo sapiens
tacacctaatgtttatattaagagtaaaatatttgtatatttaacaccatgtaagtaaaaaactaacagtctgtatgagtttacgggcagagaggccacttgttcaacatatatatgaacaatttttaaaaatattcattcaggacttagaaatgtgggatttcttattatactactatgtaattattattatgaccataaaaaacctctgtagcaagtaataatttacttgtacatttttaaataactaaaaatgtttaattggattgtctgtaacacaaaaaataaatgcattatgtaatgaatacctcatttactctgatgtgattacaagttgtatgcctgtatgaaaatattctatatatgccataaataggtaaacaatactatgttcytacaaaaatttaaaacgttaaacaaatgtacatttttacccattgaaacaatactcttaaacttttcagtttaatgccacaggcaaaag

SEQ ID NO: 384665 - DNA, 470 bp, Homo sapiens
acatgcttttacacaaacaacaggaaaaaaggagcagaatgaagcagttttacagttgaattacctcactatttgcttttcaaaaaatctacatttttttcaaggaaaaacgtataycttgaatgtaattataactctccaaaaaataatcttccactcctcttaaacttatatacaaataaattatccaacagttttagctttggattactttctatacagaacattctgatttagtgtaacgtcttaagtgccagtgccttaattcttcctattgtgaattttctaaagtttacaaagacttaattttgactaaatatttttacacatgtattccatctgcaaaaatatcttttattataaactgcatggtgttttttaagctgtagtttctgaacaaatgtttttccacatttattacatttgtatggtttccttcaacataaattctctgacgctgaacaagtttg

SEQ ID NO: 384666 - DNA, 470 bp, Homo sapiens
acatgcttttacacaaacaacaggaaaaaaggagcagaatgaagcagttttacagttgaattacctcactatttgcttttcaaaaaatctacatttttttcaaggaaaaacgtatatcttgaatgtaattataactctccaaaaaataatcttccactcctcttaaacttatatacaaataaattatccaacagttttagctttggattactttctatacagaacattctgatttagtgtaacgtcttaagtgccagtgccttaattcttcctaytgtgaattttctaaagtttacaaagacttaattttgactaaatatttttacacatgtattccatctgcaaaaatatcttttattataaactgcatggtgttttttaagctgtagtttctgaacaaatgtttttccacatttattacatttgtatggtttccttcaacataaattctctgacgctgaacaagtttg

SEQ ID NO: 384667 - DNA, 576 bp, Homo sapiens
gttttagctttggattactttctatacagaacattctgatttagtgtaacgtcttaagtgccagtgccttaattcttcctattgtgaattttctaaagtttacaaagacttaattttgamtaaatatttttacacatgtattccatctgcaaaaatatcttttattataaactgcatggtgttttttaagctgtagtttctgaacaaatgtttttccacatttattacatttgtatggtttccttcaacataaattctctgacgctgaacaagtttgagtaattcctttagagttttcttctagcataaaatctgtacattatatagggcaagtaaaggtattacaaccctctttatatttgtaatgtttgtctccagagtactcttttttaagggtttaaattttccaaggtctttcaaaagtaattacatttataataattttattaagtatgaacttcctgatgttgactatgatgtgagcaaatagaagtggcttttccacactctgtacaatttttcaagtataaacgcctttatgtgccataaggtatgagcatgttagaagttttgaca

SEQ ID NO: 384668 - DNA, 576 bp, Homo sapiens
gttttagctttggattactttctatacagaacattctgatttagtgtaacgtcttaagtgccagtgccttaattcttcctattgtgaattttctaaagtttacaaagacttaattttgactaaatatttttacacatgtattccatctgcaaaaatatcttttattataaactgcatggtgttttttaagctgtagtttctgaacaaatgtttttccacatttattacatttgtatggtttccttcaacataaattctctgaygctgaacaagtttgagtaattcctttagagttttcttctagcataaaatctgtacattatatagggcaagtaaaggtattacaaccctctttatatttgtaatgtttgtctccagagtactcttttttaagggtttaaattttccaaggtctttcaaaagtaattacatttataataattttattaagtatgaacttcctgatgttgactatgatgtgagcaaatagaagtggcttttccacactctgtacaatttttcaagtataaacgcctttatgtgccataaggtatgagcatgttagaagttttgaca

SEQ ID NO: 384669 - DNA, 483 bp, Homo sapiens
actggttaaaggctttcccacattctttacatttgtgggatttctcttcagtatgaactctcttatrtcgagtaaacttgagcaacaagaaaaagttttgccacattcttgacatttgtagggtatctctccagtatgaactctcttatgtttagtaaagcttaaggactggtaaaaggctttgcaacattcttcacatttctggattcctctccagtatgaattctcttatgtatagtgaggcctgaagactgcttaaaaagctttgccacatgcttcacatttgtagggtttctctccagtatgatttctcttatgttcattcagttttgaggagtgtttaaagactctgacacattcttcacatttatagggtttctcttcagtacgaattctctgatgtatagtaagctcagaggaccacttaaaagctttgccacattcttcacatttgtacagtttctcttcagtatgaactatcat

SEQ ID NO: 384670 - DNA, 483 bp, Homo sapiens
actggttaaaggctttcccacattctttacatttgtgggatttctcttcagtatgaactctcttatatcragtaaacttgagcaacaagaaaaagttttgccacattcttgacatttgtagggtatctctccagtatgaactctcttatgtttagtaaagcttaaggactggtaaaaggctttgcaacattcttcacatttctggattcctctccagtatgaattctcttatgtatagtgaggcctgaagactgcttaaaaagctttgccacatgcttcacatttgtagggtttctctccagtatgatttctcttatgttcattcagttttgaggagtgtttaaagactctgacacattcttcacatttatagggtttctcttcagtacgaattctctgatgtatagtaagctcagaggaccacttaaaagctttgccacattcttcacatttgtacagtttctcttcagtatgaactatcat

SEQ ID NO: 384671 - DNA, 483 bp, Homo sapiens
actggttaaaggctttcccacattctttacatttgtgggatttctcttcagtatgaactctcttatatcgagtaaacttgagcaacaagaaaaagttttgccacattcttgacatttgtagggtatctctccagtatgaactctcttatgtttagtaaagcttaaggactggtaaaaggctttgcaacattcttcacatttctggattcctctccagtatgaattctmttatgtatagtgaggcctgaagactgcttaaaaagctttgccacatgcttcacatttgtagggtttctctccagtatgatttctcttatgttcattcagttttgaggagtgtttaaagactctgacacattcttcacatttatagggtttctcttcagtacgaattctctgatgtatagtaagctcagaggaccacttaaaagctttgccacattcttcacatttgtacagtttctcttcagtatgaactatcat

SEQ ID NO: 384672 - DNA, 504 bp, Homo sapiens
cagcaatggttgttcacagaatacatcaaatcagtatttgaattagcttttgaattataaggacaaatggatcaagtcttgactctttagtagataaatcttattaggctgagatgtgttttcccctgtttytccacaaggagattacaaatttgcaaacctcagctgctctcattttatgctgtcaccaagccaaaagctgaagctcataaatcagtgtgtctaagtgttcactagttatatacctttttgtagtttaagctatctttccaacttcctaaatcatcaccttcatttgaccttgtttttttccactatcacttctttattgactacataaagaatataagttcttattttgttattgttcattttagtctaatttcatcaaaatatcataatcctttaatttccttttaatttcaaagattaaatgaaacctacatagaaatgagtgtaagatttgcatttgcgttattttggtattaatttgctatcctccct

SEQ ID NO: 384673 - DNA, 598 bp, Homo sapiens
ttcttcatatctgtagggtttctctccactatgaattatcttatgtacattaaggtctaaagacttcttaaaagctttgccacattcttgacatttgtagtgtttctcttcagcatgaactatgttattttgaataaggtttgaggaacagtaaaacgctttgccacatttttcacaattgtatggtttctctccagcatgaattttcttatatatagtaagatttgaagacccttaaaagctttgatgcattcttgacaactgtagtgcttctctccagtatgaactatcatgtttagtaaagcttaaggaccagtaaaaggctttaccacattcttcacatttgtagggtttctcttcagtatgaattctcttttgaatmgtaagccccaaagactgcttacaagctttgccacattcttcacatttgcagggtttctctcccgtatgaattctcttgtgtatagtaaggtttgaagaccacttaaaagctttgccacattcttgatatttgtagggtttctctcccctatgaattatcatatgtttagtaaagcttaaaacccaataaaaggctttatcacattcttcgaatttg

SEQ ID NO: 384674 - DNA, 504 bp, Homo sapiens
cagcaatggttgttcacagaatacatcaaatcagtatttgaattagcttttgaattataaggacaaatggatcaagtcttgactctttagtagataaatcttattaggctgagatgtgttttcccctgtttttccacaaggagattacaaatttrcaaacctcagctgctctcattttatgctgtcaccaagccaaaagctgaagctcataaatcagtgtgtctaagtgttcactagttatatacctttttgtagtttaagctatctttccaacttcctaaatcatcaccttcatttgaccttgtttttttccactatcacttctttattgactacataaagaatataagttcttattttgttattgttcattttagtctaatttcatcaaaatatcataatcctttaatttccttttaatttcaaagattaaatgaaacctacatagaaatgagtgtaagatttgcatttgcgttattttggtattaatttgctatcctccct

SEQ ID NO: 384675 - DNA, 598 bp, Homo sapiens
ttcttcatatctgtagggtttctctccactatgaattatcttatgtacattaaggtctaaagacttcttaaaagctttgccacattcttgacatttgtagtgtttctcttcagcatgaactatgttattttgaataaggtttgaggaacagtaaaacgctttgccacatttttcacaattgtatggtttctctccagcatgaattttcttatatatagtaagatttgaagacccttaaaagctttgatgcattcttgacaactgtagtgcttctctccagtatgaactatcatgtttagtaaagcttaaggaccagtaaaaggctttaccacattcttcacatttgtagggtttctcttcagtatgaattctcttttgaatagtaagccccaaagactgcttacaagctttgccacattcttcacatttgcagggtttctctcccgtatgaattctcttgtgtatagtaaggtttgaagaccacttaaaagctttgccacattcttgayatttgtagggtttctctcccctatgaattatcatatgtttagtaaagcttaaaacccaataaaaggctttatcacattcttcgaatttg

SEQ ID NO: 384676 - DNA, 598 bp, Homo sapiens
ttcttcatatctgtagggtttctctccactatgaattatcttatgtacattaaggtctaaagacttcttaaaagctttgccacattcttgacatttgtagtgtttctcttcagcatgaactatgttattttgaataaggtttgaggaacagtaaaacgctttgccacatttttcacaattgtatggtttctctccagcatgaattttcttatatatagtaagatttgaagacccttaaaagctttgatgcattcttgacaactgtagtgcttctctccagtatgaactatcatgtttagtaaagcttaaggaccagtaaaaggctttaccacattcttcacatttgtagggtttctcttcagtatgaattctcttttgaatagtaagccccaaagactgcttacaagctttgccacattcttcacatttgcagggtttctctcccgtatgaattctcttgtgtatagtaaggtttgaagaccacttaaaagctttgccacattcttgatatttgtagggtttctctcccctatgaattatcatatgtttagtaaagcttaaaamccaataaaaggctttatcacattcttcgaatttg

SEQ ID NO: 384677 - DNA, 591 bp, Homo sapiens
ttgtgcatggacccaaatttaaatttcaccacttcaaaatatattgttgaaattttaagaggtttttatataatcctgaaggcacccacaaakaaaatgtctgtataggtacaaaaaaggaaataagaaagaagtgacagcctatccatacaaaaatcaaaaagacacaaaggaagatagaatgagaaacagacctacaagaatcattaaacaataaaataacaataatctttgtcttcagaaaataaatattttaaaaatagacttgccaatcaatacacatacattgaatagtgggattatataaaattttatataccaagatccaacttgcctttcttcaagagtcacttgagatctagtagtgacatcagcctgaaagtggcaagtggaagaagacattttaggcaaacattaaccaaatgagagcagaagagatcaaaattgtattatacaaaatatatcgtaagtcaacaactctcttattttataaaatatactctatgtcaaaattcacaagagaaaaaaggtcattaaacaataataaagatataatttattgaaaatgtatgacaaatatgtgcatacata

SEQ ID NO: 384678 - DNA, 591 bp, Homo sapiens
ttgtgcatggacccaaatttaaatttcaccacttcaaaatatattgttgaaattttaagaggtttttatataatcctgaaggcacccacaaagaaaatgtctgtataggtacaaaaaaggaaataagaaagaagtgacagcctatccatacaaaaatcaaaaagacacaaaggaagatagaatgagaaacagacctacaagaatcattaaacaataaaataacaataatctttgtcttcagaaaataaatattttaaaaatagacttgccaatcaatacacatacattgaatagtgggattatataaaattttatataccaagatccaacttgcctttcttcaagagtcacttgagatctagtagtgamatcagcctgaaagtggcaagtggaagaagacattttaggcaaacattaaccaaatgagagcagaagagatcaaaattgtattatacaaaatatatcgtaagtcaacaactctcttattttataaaatatactctatgtcaaaattcacaagagaaaaaaggtcattaaacaataataaagatataatttattgaaaatgtatgacaaatatgtgcatacata

SEQ ID NO: 384679 - DNA, 591 bp, Homo sapiens
ttgtgcatggacccaaatttaaatttcaccacttcaaaatatattgttgaaattttaagaggtttttatataatcctgaaggcacccacaaagaaaatgtctgtataggtacaaaaaaggaaataagaaagaagtgacagcctatccatacaaaaatcaaaaagacacaaaggaagatagaatgagaaacagacctacaagaatcattaaacaataaaataacaataatctttgtcttcagaaaataaatattttaaaaatagacttgccaatcaatacacatacattgaatagtgggattatataaaattttatataccaagatccaacttgcctttcttcaagagtcacttgagatctagtagtgacatcagcctgaaagtggyaagtggaagaagacattttaggcaaacattaaccaaatgagagcagaagagatcaaaattgtattatacaaaatatatcgtaagtcaacaactctcttattttataaaatatactctatgtcaaaattcacaagagaaaaaaggtcattaaacaataataaagatataatttattgaaaatgtatgacaaatatgtgcatacata

SEQ ID NO: 384680 - DNA, 591 bp, Homo sapiens
ttgtgcatggacccaaatttaaatttcaccacttcaaaatatattgttgaaattttaagaggtttttatataatcctgaaggcacccacaaagaaaatgtctgtataggtacaaaaaaggaaataagaaagaagtgacagcctatccatacaaaaatcaaaaagacacaaaggaagatagaatgagaaacagacctacaagaatcattaaacaataaaataacaataatctttgtcttcagaaaataaatattttaaaaatagacttgccaatcaatacacatacattgaatagtgggattatataaaattttatataccaagatccaacttgcctttcttcaagagtcacttgagatctagtagtgacatcagcctgaaagtggcaagtggaagaagacattttaggcaaacattaaccaaatgagagcagaagagatcaaaattgtattatacaaaatatatcrtaagtcaacaactctcttattttataaaatatactctatgtcaaaattcacaagagaaaaaaggtcattaaacaataataaagatataatttattgaaaatgtatgacaaatatgtgcatacata

SEQ ID NO: 384681 - DNA, 622 bp, Homo sapiens
tctgattttcatgatacaattactatataaatttcctcttgctgctgtaaccagttaccacaaacttcatatcttacaataaagtgactggtaatcctacagtactggagctcagaagccttaaatgagactcacagggctaacatcaagttttgggcagggctgcagtctttctgagggctctgtggcagaatctatrtacttgatttttttcagcatccagcggccacctttattccttggaacatgacctcattcttatatcttttatttttttttgagatggagtctccttctgtcgcccaggctggagtgcattggcatgatctcagctcactgcaacctctgcctcccgggttcaagcgattctcctgcttcagcttcctgagtagcttggactacaggcatgtgccaccatgcccagttaattttttgtatttttagtagggatggggtttcaccatgttagccaggatggtctcgatctcctgacctcgtgatccacccaccccggcctcccaaagtgctgggattaggcgtgagccaccgcactgggtcctcattcttgtatcttaaaagtcagtgatgttgagtaatttctcatgccaccacctccatggtt

SEQ ID NO: 384682 - DNA, 622 bp, Homo sapiens
tctgattttcatgatacaattactatataaatttcctcttgctgctgtaaccagttaccacaaacttcatatcttacaataaagtgactggtaatcctacagtactggagctcagaagccttaaatgagactcacagggctaacatcaagttttgggcagggctgcagtctttctgagggctctgtggcagaatctatatacttgatttttttcagcatccagmggccacctttattccttggaacatgacctcattcttatatcttttatttttttttgagatggagtctccttctgtcgcccaggctggagtgcattggcatgatctcagctcactgcaacctctgcctcccgggttcaagcgattctcctgcttcagcttcctgagtagcttggactacaggcatgtgccaccatgcccagttaattttttgtatttttagtagggatggggtttcaccatgttagccaggatggtctcgatctcctgacctcgtgatccacccaccccggcctcccaaagtgctgggattaggcgtgagccaccgcactgggtcctcattcttgtatcttaaaagtcagtgatgttgagtaatttctcatgccaccacctccatggtt

SEQ ID NO: 384683 - DNA, 622 bp, Homo sapiens
tctgattttcatgatacaattactatataaatttcctcttgctgctgtaaccagttaccacaaacttcatatcttacaataaagtgactggtaatcctacagtactggagctcagaagccttaaatgagactcacagggctaacatcaagttttgggcagggctgcagtctttctgagggctctgtggcagaatctatatacttgatttttttcagcatccagcggccacctttattccttggaacatgacctcattcttatatcttttatttttttttgagatggagtctccttctgtcgcccaggctggagtgcattggcatgatctcagctcactgcaacctctgcctcccgggttcaagcgattctcctgcttcagcttcctgagtagcttggactacaggcatgtgccaccatgcccagttaattttttgtatttttagtagggatggggtttcaccatgttagccaggatggtctcgatctcctgacctcrtgatccacccaccccggcctcccaaagtgctgggattaggcgtgagccaccgcactgggtcctcattcttgtatcttaaaagtcagtgatgttgagtaatttctcatgccaccacctccatggtt

SEQ ID NO: 384684 - DNA, 622 bp, Homo sapiens
tctgattttcatgatacaattactatataaatttcctcttgctgctgtaaccagttaccacaaacttcatatcttacaataaagtgactggtaatcctacagtactggagctcagaagccttaaatgagactcacagggctaacatcaagttttgggcagggctgcagtctttctgagggctctgtggcagaatctatatacttgatttttttcagcatccagcggccacctttattccttggaacatgacctcattcttatatcttttatttttttttgagatggagtctccttctgtcgcccaggctggagtgcattggcatgatctcagctcactgcaacctctgcctcccgggttcaagcgattctcctgcttcagcttcctgagtagcttggactacaggcatgtgccaccatgcccagttaattttttgtatttttagtagggatggggtttcaccatgttagccaggatggtctcgatctcctgacctcgtgatccacccaccccggcctcccaaagtgctgggattaggcgtgagccaccgcactgggtcctcattcttgtatcttaaaagtcagtgatrttgagtaatttctcatgccaccacctccatggtt

SEQ ID NO: 384685 - DNA, 614 bp, Homo sapiens
aaggatgcaaccatcatattatgaatgtttcttaaaatttaaattatataattccacttataaacctagattcaaatataaatcatattatttgactggaatataaaatacatttttatatattaatatatatataaatggaatccaagaattccacttataaatctatattcaaacataaatataaatgtatactccaaatataaatctatatycaaacaaagaacgtggaagatatatttgaatatatatttcaaatattggtataataaatataccaatatttatatatttaatatatattaatataatatatattaaatatattataccaatatttatatattttatatataaatataatatatattaaataaataaatatattatataaataaatatatattttatatatattaaaaattaaatattggtataatatattataccaatatattatatataaatatatacacatatatttatatatatacaatatataaatatattataccaatatttacaaaagccaaaaggcagaagtaacccagatatcccttgactgataaacaaattaaaaatgtgacatatacatacagtggaatattattcag

SEQ ID NO: 384686 - DNA, 614 bp, Homo sapiens
aaggatgcaaccatcatattatgaatgtttcttaaaatttaaattatataattccacttataaacctagattcaaatataaatcatattatttgactggaatataaaatacatttttatatattaatatatatataaatggaatccaagaattccacttataaatctatattcaaacataaatataaatgtatactccaaatataaatctatatccaaacaaagaacgtggaagatatatttgaatatatatttcaaatattggtataataaatataccaatatttatatatttaatatatattaatataatatatattaaatatattataccaatatttatatattttatatataaatataatatatattaaataaatawatatattatataaataaatatatattttatatatattaaaaattaaatattggtataatatattataccaatatattatatataaatatatacacatatatttatatatatacaatatataaatatattataccaatatttacaaaagccaaaaggcagaagtaacccagatatcccttgactgataaacaaattaaaaatgtgacatatacatacagtggaatattattcag

SEQ ID NO: 384687 - DNA, 548 bp, Homo sapiens
gaatattattcagccttaaaatagtaaatctgtcacattcttacataaacattgagatattatgtcaactgaaataagatagtaataaagtgacagatactatatgattccatgatatgagtcatcataagtagtcaaatagaaacagaaaggagaatggtattactcaaggtctaaagagagggtaaaatgggcagttgttacttaatgggtattgtcttaattttagaagacgtaaaagttctagaggtctttacataacaatgtaaatactcttaacractaaaatgtacaccttttttgaggtaggttctcactctgtcctgcaggctggaatgaagtcatataatcatagctcactgcagcctcaacctcccatgcacaagtgattctcctgccacggcctcacaaggagctaggaccacaggtggacaacccaacacctggctaattttaaatttttgtggggaagggctctctatatgctgcccaggctggtctcaagttcctcggcttaagcaatacttctgcgtcagtttcccaaagta

SEQ ID NO: 384688 - DNA, 548 bp, Homo sapiens
gaatattattcagccttaaaatagtaaatctgtcacattcttacataaacattgagatattatgtcaactgaaataagatagtaataaagtgacagatactatatgattccatgatatgagtcatcataagtagtcaaatagaaacagaaaggagaatggtattactcaaggtctaaagagagggtaaaatgggcagttgttacttaatgggtattgtcttaattttagaagacgtaaaagttctagaggtctttacataacaatgtaaatactcttaacaactaaaatgtacaccttttttgaggtaggttctcactctgtcctgcaggctggaatgaagtcatataatcatagctcactgcagcctcaacctcccatgcacaagtgattctcctgccacggcctcacaagragctaggaccacaggtggacaacccaacacctggctaattttaaatttttgtggggaagggctctctatatgctgcccaggctggtctcaagttcctcggcttaagcaatacttctgcgtcagtttcccaaagta

SEQ ID NO: 384689 - DNA, 548 bp, Homo sapiens
gaatattattcagccttaaaatagtaaatctgtcacattcttacataaacattgagatattatgtcaactgaaataagatagtaataaagtgacagatactatatgattccatgatatgagtcatcataagtagtcaaatagaaacagaaaggagaatggtattactcaaggtctaaagagagggtaaaatgggcagttgttacttaatgggtattgtcttaattttagaagacgtaaaagttctagaggtctttacataacaatgtaaatactcttaacaactaaaatgtacaccttttttgaggtaggttctcactctgtcctgcaggctggaatgaagtcatataatcatagctcactgcagcctcaacctcccatgcacaagtgattctcctgccacggcctcacaaggagctaggaccacaggtggacaacccaacacctggctaattttaaatttttgtggggaagggctctctataygctgcccaggctggtctcaagttcctcggcttaagcaatacttctgcgtcagtttcccaaagta

SEQ ID NO: 384690 - DNA, 566 bp, Homo sapiens
tacacaaattctgctgagcagcatccaggtattgacactcctccagacagaattctatggctacatccctgaatgtcaacagtccctgaaaacacacacacacccacttcaagtggccatrggcagaattcttaaattgactcaagataaaatgagtgaagagaactgattctgactgatacgaccaaaattgtcctataaaataattcccaacaaagaaatattctctgttgcattctctatctctgagaaaagagagcataagattcacaataccagtgtagtgtattgatgatattttttgaatgataaagtacaaaattaacaacaggaacatagacatgtacatttttgagtgctccatttaatcatacagtataagttctgcatatttctcagattaaaaagtcaggcttagttataaagtacctctcaaattttaatgtgtacaacaataaactggagatctttttatgcagattttgtttcaagaaacctgaggtaaaacctgagtttctgaatttctaacaagctcacaagtgacaccaatctttctggcccaagat

SEQ ID NO: 384691 - DNA, 547 bp, Homo sapiens
tattttaatcctgttccacatggagttgatggagcacacagacagaacttcaacattacatattcccctttttcatgaatatctaagaaccccacctcttccccagtaggaatcttgkgtatccatacctttccatgtgcaccagcaccagcaacaaagggtatttttctttttttttttttctttggagatggagtctccctctgttgcccaggctggagtgcagtggcacgatgtaggctcactgcaacctccagaacctccacctcctgggttcaagtgattctcttgcctcagcctcccaagtagctgggattacaggcacccgccaccatgcccagctattttttgtatttttagtagtgacagggtttcaccatgttggccaggctggtcttgaactcctgacctcaggtcatccacccacatcggcctctcaaagtgctgggataataggcatgagccaccgcgcccagccaaagggaatatttttaatattacgagtcataattaatgatgagaattccgcatggcagagaagaagcca

SEQ ID NO: 384692 - DNA, 547 bp, Homo sapiens
tattttaatcctgttccacatggagttgatggagcacacagacagaacttcaacattacatattcccctttttcatgaatatctaagaaccccacctcttccccagtaggaatcttgggtatccataccttyccatgtgcaccagcaccagcaacaaagggtatttttctttttttttttttctttggagatggagtctccctctgttgcccaggctggagtgcagtggcacgatgtaggctcactgcaacctccagaacctccacctcctgggttcaagtgattctcttgcctcagcctcccaagtagctgggattacaggcacccgccaccatgcccagctattttttgtatttttagtagtgacagggtttcaccatgttggccaggctggtcttgaactcctgacctcaggtcatccacccacatcggcctctcaaagtgctgggataataggcatgagccaccgcgcccagccaaagggaatatttttaatattacgagtcataattaatgatgagaattccgcatggcagagaagaagcca

SEQ ID NO: 384693 - DNA, 547 bp, Homo sapiens
tattttaatcctgttccacatggagttgatggagcacacagacagaacttcaacattacatattcccctttttcatgaatatctaagaaccccacctcttccccagtaggaatcttgggtatccatacctttccatgtgcaccagcaccagcaacaaagggtatttttctttttttttttttctttggagatggagtctccctctgttgcccaggctggagtgcagtrgcacgatgtaggctcactgcaacctccagaacctccacctcctgggttcaagtgattctcttgcctcagcctcccaagtagctgggattacaggcacccgccaccatgcccagctattttttgtatttttagtagtgacagggtttcaccatgttggccaggctggtcttgaactcctgacctcaggtcatccacccacatcggcctctcaaagtgctgggataataggcatgagccaccgcgcccagccaaagggaatatttttaatattacgagtcataattaatgatgagaattccgcatggcagagaagaagcca

SEQ ID NO: 384694 - DNA, 547 bp, Homo sapiens
tattttaatcctgttccacatggagttgatggagcacacagacagaacttcaacattacatattcccctttttcatgaatatctaagaaccccacctcttccccagtaggaatcttgggtatccatacctttccatgtgcaccagcaccagcaacaaagggtatttttctttttttttttttctttggagatggagtctccctctgttgcccaggctggagtgcagtggcacgatgtaggctcactgcaacctccagaacctccacctcctgggttcaagtgattctcttgcctcagcctcccaagtagctgggattacaggcacccgccaccatgcccagctattttttgtatttttagtagtgacagggtttcaccatgttggccaggctggtctygaactcctgacctcaggtcatccacccacatcggcctctcaaagtgctgggataataggcatgagccaccgcgcccagccaaagggaatatttttaatattacgagtcataattaatgatgagaattccgcatggcagagaagaagcca

SEQ ID NO: 384695 - DNA, 635 bp, Homo sapiens
ggaaagctcaaagggatacactctgaaaggagggctttaagatttctatgctgacatctcacagatcagaaaatgtctcctatgggttttctgtacattctcaatccaaaatctggctctctcctgtgawtcccagggagagctcagctcttatgtacagattacaggtaagatcaacctgactcttcattctttggtgttacagcaaggagagtaaaaaaaaaaaaaagtttccatcataaagtctgctctaggacatgatatgtcagcctaaaaagaaaaggttaaggcaacactcatttaagtagagaatttatttgggccaagcctgaggattgaaatctgggagcatagattcaagttaccttgaatgtacactttacttagcagcagttacaagtggatttacaaaggcaaaagagagggacagggagtggactgaaacaaagttgtttgtcagaaattcttctcgatctacaaaaatacattgatgactaattggctatatatttttaagctgtgaggtattgcttataacatctagtgtggcattattaggttaatttatatctacttgtagggatagcaaacagtttcaagaggcaaacatgtagctcaaaggaggcagtagaaca

SEQ ID NO: 384696 - DNA, 635 bp, Homo sapiens
ggaaagctcaaagggatacactctgaaaggagggctttaagatttctatgctgacatctcacagatcagaaaatgtctcctatgggttttctgtacattctcaatccaaaatctggctctctcctgtgattcccagggagagctcagctcttatgtacagattacaggtaagatcaacctgactcttcattctttggtgttacagcaaggagagtaaaaaaaaaaaaaagtttccatcataaagtctgctctaggacatgatatgtcagcctaaaaagaaaaggttaaggcaacactcatttaagtagagartttatttgggccaagcctgaggattgaaatctgggagcatagattcaagttaccttgaatgtacactttacttagcagcagttacaagtggatttacaaaggcaaaagagagggacagggagtggactgaaacaaagttgtttgtcagaaattcttctcgatctacaaaaatacattgatgactaattggctatatatttttaagctgtgaggtattgcttataacatctagtgtggcattattaggttaatttatatctacttgtagggatagcaaacagtttcaagaggcaaacatgtagctcaaaggaggcagtagaaca

SEQ ID NO: 384697 - DNA, 635 bp, Homo sapiens
ggaaagctcaaagggatacactctgaaaggagggctttaagatttctatgctgacatctcacagatcagaaaatgtctcctatgggttttctgtacattctcaatccaaaatctggctctctcctgtgattcccagggagagctcagctcttatgtacagattacaggtaagatcaacctgactcttcattctttggtgttacagcaaggagagtaaaaaaaaaaaaaagtttccatcataaagtctgctctaggacatgatatgtcagcctaaaaagaaaaggttaaggcaacactcatttaagtagagaatttatttgggccaagcctgaggattgaaatctgggagcatagattcaagttaccttgaatgtacactttacttagcagcagttacaagtggatttacaaaggcaaaagagagggacagggagtggactgaaacaaagttgtttgtcagaaattcttctcgatctacaaaaatacattgatgactaattggctatatatttttaagctgtgaggtattgcttataacatctagtgtggcattattaggttaatttatatctacttgtaggratagcaaacagtttcaagaggcaaacatgtagctcaaaggaggcagtagaaca

SEQ ID NO: 384698 - DNA, 635 bp, Homo sapiens
ggaaagctcaaagggatacactctgaaaggagggctttaagatttctatgctgacatctcacagatcagaaaatgtctcctatgggttttctgtacattctcaatccaaaatctggctctctcctgtgattcccagggagagctcagctcttatgtacagattacaggtaagatcaacctgactcttcattctttggtgttacagcaaggagagtaaaaaaaaaaaaaagtttccatcataaagtctgctctaggacatgatatgtcagcctaaaaagaaaaggttaaggcaacactcatttaagtagagaatttatttgggccaagcctgaggattgaaatctgggagcatagattcaagttaccttgaatgtacactttacttagcagcagttacaagtggatttacaaaggcaaaagagagggacagggagtggactgaaacaaagttgtttgtcagaaattcttctcgatctacaaaaatacattgatgactaattggctatatatttttaagctgtgaggtattgcttataacatctagtgtggcattattaggttaatttatatctacttgtagggatagcaaacagtttcaagaggyaaacatgtagctcaaaggaggcagtagaaca

SEQ ID NO: 384699 - DNA, 540 bp, Homo sapiens
cctgggtaggattgcacttttgcaataatggaaatgggagcaatgtttcagctacgtttctatttataatggtgacaaaaaaatactgctggattcccagcatgggtctggatagagtgccaaagagttctcattgtgacagcccaactcactcagaaacaccatgagacacttttgggtgtcccttctgaagacagacaccgaaagcattgaagagaaaaacagctctcagtctgaataaaattgtattaagaggttaaaggtatctgaaagaaaaattcagattacatataatattagccaagtcgaccagaaaatactcccctgagacagtttctctctaaacacccaaaatgcacagcygctctcaacacaagaaacacagtgttatgaagaaagggggcatattctcagcagaatttcttaagatttttcttccatctctgctgctctctcatctgctggccattggattgaggatctacactggaacacatcaggcaaccttcgccagcactttttgataaagaattggaattt

SEQ ID NO: 384700 - DNA, 622 bp, Homo sapiens
ttttagctttagttgtgataaaacatgtttaagcattttctatttgaaataaaactttaatttcatgctttgtcggtttagtttccctaaataaatagaaaatagtaaaatatcacatactaaaaaaatcaacttctttggtaataaataagtgcaactgtcagaccaaaacrtagttacattttacccaatgtcatgctgaccaattcgatcaaacgccacttccttataactaagagagatgcaaagatgtagactttatgttgagtgagacaggtaaggattactaggaggtagataattgttttactaatcaaggtcgattttcattactattttgtctctatgttaattaatggtcttgattcaagaaaatttttttaaaaactcatcttttcagtcaggcaaaatattaacaaaaaggcatagaaatgaaggcatttaacacagtcatagtttacattttaaaattaaaatacttctagaaataacaaagaaagaaaaaagacacatataaaaacaaacgaacttaatttttggtgcaaagcactcattactaagcctaacacaaatattttggtgaaggctttctaacactgacattcttctcatgacttaaaag

SEQ ID NO: 384701 - DNA, 572 bp, Homo sapiens
tctaaaaattccttctgacacattattctttgtcaccaaaatggttgtgatgaaataattgcctttgcaggactgttgtcttaaataaccaatactcctgtttcattgttcttgaactttaaccataatagaaattttatttcctaattatgtcacttaggtrtgattatcatagcttcatattttcaaaaatggttctaaaaaaactaaaccactgaccatctttgtttcccaaagagtaataagttaacactatcatctagcatactgtaaatagatgaaaaataaaaatgtagagcaggggtgtccaatcttctggcttccctgggacacactagaagaattgtcttgagccatacataaaatacaccaatgatgataaaaaaatcacaaaaaactcataatgcttttagaaagtttatgaacttgtttagggctgtgctgaaagccatactgggccacgtgaagcctgtaggccgtgagttggacaagcttgatggacagtcatttattttagctgcacacccaagactaaggccaagagctttcagagaaagtagcttataggatgt

SEQ ID NO: 384702 - DNA, 572 bp, Homo sapiens
tctaaaaattccttctgacacattattctttgtcaccaaaatggttgtgatgaaataattgcctttgcaggactgttgtcttaaataaccaatactcctgtttcattgttcttgaactttaaccataatagaaattttatttcctaattatgtcacttaggtgtgattatcatagcttcatattttcaaaaatggttctaaaaaaactaaaccacwgaccatctttgtttcccaaagagtaataagttaacactatcatctagcatactgtaaatagatgaaaaataaaaatgtagagcaggggtgtccaatcttctggcttccctgggacacactagaagaattgtcttgagccatacataaaatacaccaatgatgataaaaaaatcacaaaaaactcataatgcttttagaaagtttatgaacttgtttagggctgtgctgaaagccatactgggccacgtgaagcctgtaggccgtgagttggacaagcttgatggacagtcatttattttagctgcacacccaagactaaggccaagagctttcagagaaagtagcttataggatgt

SEQ ID NO: 384703 - DNA, 572 bp, Homo sapiens
tctaaaaattccttctgacacattattctttgtcaccaaaatggttgtgatgaaataattgcctttgcaggactgttgtcttaaataaccaatactcctgtttcattgttcttgaactttaaccataatagaaattttatttcctaattatgtcacttaggtgtgattatcatagcttcatattttcaaaaatggttctaaaaaaactaaaccactgaccatctttgtttcccaaagagtaataagttaacactatcatctagcatactgtaaatagatgaaaaataaaaatgtagagcaggggtgtccaatcttctggcttccctgggacacactagaagaattgtcttgagccatacataaaatacaccaatgatgataaaaaaatcacaaaaaactcataatgcttttagaaagtttatgaacttgtttagggctgtgctgaaagccatactgggccacrtgaagcctgtaggccgtgagttggacaagcttgatggacagtcatttattttagctgcacacccaagactaaggccaagagctttcagagaaagtagcttataggatgt

SEQ ID NO: 384704 - DNA, 541 bp, Homo sapiens
  misc_feature (1)...(541): n = A,T,C or G
atgacattgaggtttgggcaattaataatcccattgcccaaatagggtacattatacatcacaagtacttttaaacccctgtaccccttctccctccattttggaatccttagtgtttattgttctcatctttgcttccatgtgtacccaatgtttagcttccacttataagtgagaaaatgtagtatttggttttctgttctgtgttaatttgcttaggatcatgaccttgagctgtatccatgttgctgcaaagagtattacatgattcttcttcagtggctgcatagtattggatggtgtgtaattacataatttttaaaatccatcttaaaatttatgagcacatggtttcattccatgtctttgctattgtgactagtgctgcaataagcatacgagtgcaggtgtaatttatttgtatttgggtatacrcccagtagtgaggctgctgggtcaaatggtaactttggttttagtcctttgagaaacccccaaaatacattttacaaannnnnnnnnnnnnnnnnnnnnnnnnnnn

SEQ ID NO: 384705 - DNA, 561 bp, Homo sapiens
aatgacatttttagtcatttttcatcttatctgatcatatgacttgaattaatgtttagatctgctaagggcaaacaccaccatggaattaaatttgcaagagggaagaaggaggaagcaggagaaggtggrtagagtcttcagactagggtgcagatcttacatctgtagagggaaagagggaaggaaggctgattggggtagaaagagactgcagcatggttccaagaatgctttggcctaggtcactgcggactccttaaattaaagttactcattggagactgtcacaactcactggaaacgtcctcacatacaatccccatgtagctctatgactgttggaaacatgactgctgcacaagtgtagaagtgcttccagagacagagggctaaagccaggctgtcgttgacttatgctgtctgattcaggatatctgcattgcaaacttccttggtcattaaaatccattacccccacctcctaaccccaccacagcacacacatatttgtccaaacaggttcttcataccagctcttccaaaattcccatgatcctc

SEQ ID NO: 384706 - DNA, 561 bp, Homo sapiens
aatgacatttttagtcatttttcatcttatctgatcatatgacttgaattaatgtttagatctgctaagggcaaacaccaccatggaattaaatttgcaagagggaagaaggaggaagcaggagaaggtggatagagtcttcagactagggtgcagatcttacatctgtagagggaaagagggaaggaaggctgattggggtagaaagagactgcagcatggttccaagaatgctttggcctaggtcactgcggactccttaaattaaagttactcmttggagactgtcacaactcactggaaacgtcctcacatacaatccccatgtagctctatgactgttggaaacatgactgctgcacaagtgtagaagtgcttccagagacagagggctaaagccaggctgtcgttgacttatgctgtctgattcaggatatctgcattgcaaacttccttggtcattaaaatccattacccccacctcctaaccccaccacagcacacacatatttgtccaaacaggttcttcataccagctcttccaaaattcccatgatcctc

SEQ ID NO: 384707 - DNA, 561 bp, Homo sapiens
aatgacatttttagtcatttttcatcttatctgatcatatgacttgaattaatgtttagatctgctaagggcaaacaccaccatggaattaaatttgcaagagggaagaaggaggaagcaggagaaggtggatagagtcttcagactagggtgcagatcttacatctgtagagggaaagagggaaggaaggctgattggggtagaaagagactgcagcatggttccaagaatgctttggcctaggtcactgcggactccttaaattaaagttactcattggagactstcacaactcactggaaacgtcctcacatacaatccccatgtagctctatgactgttggaaacatgactgctgcacaagtgtagaagtgcttccagagacagagggctaaagccaggctgtcgttgacttatgctgtctgattcaggatatctgcattgcaaacttccttggtcattaaaatccattacccccacctcctaaccccaccacagcacacacatatttgtccaaacaggttcttcataccagctcttccaaaattcccatgatcctc

SEQ ID NO: 384708 - DNA, 561 bp, Homo sapiens
aatgacatttttagtcatttttcatcttatctgatcatatgacttgaattaatgtttagatctgctaagggcaaacaccaccatggaattaaatttgcaagagggaagaaggaggaagcaggagaaggtggatagagtcttcagactagggtgcagatcttacatctgtagagggaaagagggaaggaaggctgattggggtagaaagagactgcagcatggttccaagaatgctttggcctaggtcactgcggactccttaaattaaagttactcattggagactgtcacaactcactggaaacgtcctcacatacaatccccatgtagctctatgactgttggaaacatgactgctgcacaagtgtagaagtgcttccagagacagagggctaaagccaggctgtcgttgacttatgctgtctgattcaggatatctgcattgcaaacttccttggtcattaaaatccattacccccacctcctaaccccaccacagcacacacatatttgtccaaacagrttcttcataccagctcttccaaaattcccatgatcctc

SEQ ID NO: 384709 - DNA, 274 bp, Homo sapiens
gtcaaacaacacaataacaaaatgggcaagagatttgagtagacgacaataaccaaagatatattaatgattgataaacactgaaaartgcatcattaaccacctgggaatggaatttaaaaatcaaaatgcaataatactgcacagaaactataatggatccaaaaaaatgtcaattctgaatgtttgagaggacatgcaacaccctgaattatcatatttaggtgggagtataaagtggataatcagtttggattgcagtttggcagttaaa

SEQ ID NO: 384710 - DNA, 352 bp, Homo sapiens
tattccattcttacttactgaagagaaatgaaaacatgtgcatacaaatgaacatagcagctttacttgtaataatcaaggaatagaaacatttgtaaatggttcaccaacaggctaaaggataaacatattgtagtatttccatacaatagaawaaaatagaaagaaccactgattttgcaacataggtgatcctaaaatatattgagagaatgaaccaacagtaggcatattataaaagtttattactacaaaattctagaaactgaatttatagtggtaggttgcagatcaatggctgcttggagccagaggttttggtaaggaatacaaaagaacttttgaggtgata

SEQ ID NO: 384711 - DNA, 310 bp, Homo sapiens
attgttgatgacttgtcttctatctcctggactcaatgtgttcacctgaaattcacctgtttccarctaactgagagctccccacatcatgcctgtctttctgatttttgggcctgcctgcaagcttcttgaggctaaccagtgcttctcaaccacacataggaacaaagaaggagttaggggtggagagttaatgattctaaggcaatccttaagcaataagagatggggattccagcatccccatctctttgtaaagttattttgagacaatctccatacctccatcattactgagcacaatagcagt

SEQ ID NO: 384712 - DNA, 310 bp, Homo sapiens
attgttgatgacttgtcttctatctcctggactcaatgtgttcacctgaaattcacctgtttccaactaactgagagctccccacatcatgcctgtctttctgatttttgggcctgcctgcaagcttcttgaggctaaccagtgcttctcaaccacacataggaamaaagaaggagttaggggtggagagttaatgattctaaggcaatccttaagcaataagagatggggattccagcatccccatctctttgtaaagttattttgagacaatctccatacctccatcattactgagcacaatagcagt

SEQ ID NO: 384713 - DNA, 310 bp, Homo sapiens
attgttgatgacttgtcttctatctcctggactcaatgtgttcacctgaaattcacctgtttccaactaactgagagctccccacatcatgcctgtctttctgatttttgggcctgcctgcaagcttcttgaggctaaccagtgcttctcaaccacacataggaacaaagaaggagttaggggtggagagttaatgattctaaggcaatccttaagcaataagagatggggattccagcatccccatctctytgtaaagttattttgagacaatctccatacctccatcattactgagcacaatagcagt

SEQ ID NO: 384714 - DNA, 493 bp, Homo sapiens
tcatccccagtgatatttcctgttctgatgtctactttgctcatcacagttttagtgggttttggtttgtttgtttttctttttttttttcggttcaaataagtttcttataaagagcatatagttgagtcagtgtttttaatcctgtcttatgatctctgccttttaataagaatattttgtcaatttatatttaatgtaattatcaatatgattggrtgtgtaactactctcttgctatatgttttctaaatatctcatcatttctgttcattttccccctttttctgccttcttttgaattgagaatttagtttttaagatccgcttttatctccactattaacttttaaccgttccattttgttttaattttaatgattgatatagggctcataaaatagacagttcttgttttccttagttttgatatgcaaaggctttagttatcatgctttagttacatagcacaagccccaaaacaaaacagttt

SEQ ID NO: 384715 - DNA, 493 bp, Homo sapiens
tcatccccagtgatatttcctgttctgatgtctactttgctcatcacagttttagtgggttttggtttgtttgtttttctttttttttttcggttcaaataagtttcttataaagagcatatagttgagtcagtgtttttaatcctgtcttatgatctctgccttttaataagaatattttgtcaatttatatttaatgtaattatcaatatgattgggtgtrtaactactctcttgctatatgttttctaaatatctcatcatttctgttcattttccccctttttctgccttcttttgaattgagaatttagtttttaagatccgcttttatctccactattaacttttaaccgttccattttgttttaattttaatgattgatatagggctcataaaatagacagttcttgttttccttagttttgatatgcaaaggctttagttatcatgctttagttacatagcacaagccccaaaacaaaacagttt

SEQ ID NO: 384716 - DNA, 439 bp, Homo sapiens
tttgtttgtttttctttttttttttcggttcaaataagtttcttataaagagcatatagttgagtcagtgtttttaatcctgtcttatgatctctgccttttaataagaatattttgtcaatttatatttaatgtaattatcaatatgattgggtgtgtaactactctcttgctatatgttttctaaatatctcatcatttctgttcattttccccctttttctgccttcttttgaattgagaatttagtttttaagatccgcttttatctccactattaacttttaaccrttccattttgttttaattttaatgattgatatagggctcataaaatagacagttcttgttttccttagttttgatatgcaaaggctttagttatcatgctttagttacatagcacaagccccaaaacaaaacagtttaggtacagcag

SEQ ID NO: 384717 - DNA, 493 bp, Homo sapiens
tcatccccagtgatatttcctgttctgatgtctactttgctcatcacagttttagtgggttttggtttgtttgtttttctttttttttttcggttcaaataagtttcttataaagagcatatagttgagtcagtgtttttaatcctgtcttatgatctctgccttttaataagaatattttgtcaatttatatttaatgtaattatcaatatgattgggtgtgtaactactctcttgctatatgttttctaaatatctcatcatttctgttcattttccccctttttctgccttcttttgaattgagaatttagtttttaagatccgcttttatctccactattaacttttaaccgttccattttgttttaattttaatgattgatatagggctcataaaatagacagttcttgtttyccttagttttgatatgcaaaggctttagttatcatgctttagttacatagcacaagccccaaaacaaaacagttt

SEQ ID NO: 384718 - DNA, 560 bp, Homo sapiens
tgatcctcccacctcagcttcctggatagctgggactatatgtacgtatcaccactcctggctaattttttgtagtttttgtagagacagggttccgtcatgttgcccaaactggtctcaaactcctgggctcaagtgatctgcccaccttggcctcccaaagtgctggaattaccggtgtgagmcactgcacctgactgacaagtgtttttaatgattgcaggaacaagtttatgtttttccattaattattaagataactttgcccagtttcaacttgcacagtggttactaaggccccccactgatgtgcataaagagtaccatctgtacatttttttaacttaaaacactcaaccttcaaataatatttataatacctgctatatagttttaaaatattgcaattctgaagccagcattaccatgatactaaaacccagcaacctataatcctgaaatgtaagacctcaaactatgagaatcctagaagtaatgctaggaaacaccattctgaaaatcagccttgggaaagaatttatgactaagtcctcgaaagc

SEQ ID NO: 384719 - DNA, 560 bp, Homo sapiens
tgatcctcccacctcagcttcctggatagctgggactatatgtacgtatcaccactcctggctaattttttgtagtttttgtagagacagggttccgtcatgttgcccaaactggtctcaaactcctgggctcaagtgatctgcccaccttggcctcccaaagtgctggaattaccggtgtgagacactgcacctgactgacaagtgtttttaatgattgcaggaacaagtttatgtttttccattaattattaagataactttgcccagtttcaacttgcacagtggttactaaggccccscactgatgtgcataaagagtaccatctgtacatttttttaacttaaaacactcaaccttcaaataatatttataatacctgctatatagttttaaaatattgcaattctgaagccagcattaccatgatactaaaacccagcaacctataatcctgaaatgtaagacctcaaactatgagaatcctagaagtaatgctaggaaacaccattctgaaaatcagccttgggaaagaatttatgactaagtcctcgaaagc

SEQ ID NO: 384720 - DNA, 350 bp, Homo sapiens
ttccattgtcaataatacatctctttttctccaactgtttttaagttttctttttaraaacaactttcttcaacttaatctttttattcattttgctttgattccactgcgcttcttttacctgttggtttatagttttaccaagttttaaaaatatctcaaccactgcctttacaaatagtttttgccctccccccatttcctgggatttcaattatgtgtgttgttaagctgcttaatattttctaatcccataatttctgtcttttcttggtctgtttctgttaatttttttttcttgttttggatgaatttttttgtttatatgcatttctgttatttttttaatg

SEQ ID NO: 384721 - DNA, 581 bp, Homo sapiens
gaaacaactttcttcaacttaatctttttattcattttgctttgattccactgcgcttcttttacctgttggtttatagttttaccaagttttaaaaatatctcaaccactgcctttacaaatagtttttgccctcccccmatttcctgggatttcaattatgtgtgttgttaagctgcttaatattttctaatcccataatttctgtcttttcttggtctgtttctgttaatttttttttcttgttttggatgaatttttttgtttatatgcatttctgttatttttttaatgtctaagggaaattctgaattctacattgttaggatctggatttcgttttatttaaagagagatgaactttgttttcaaatgcagttatctgagatcagtggtgatattgtttacttttaaatgtgattataatggcttcagagccttgactctagagctgattcacccctctactaaggtgtgattattctgagaactctatctgatgttataagtttctcactctggctggagcacatactggttcttctaaggcccatatgacctccaggaatttctctggccca

SEQ ID NO: 384722 - DNA, 581 bp, Homo sapiens
gaaacaactttcttcaacttaatctttttattcattttgctttgattccactgcgcttcttttacctgttggtttatagttttaccaagttttaaaaatatctcaaccactgcctttacaaatagtttttgccctccccccatttcctgggatttcaattatgtgtgttgttaagctgcttaatattttctaatcccataatttctgtcttttcttggtctgtttctgttaatttttttttcttgttttggatgaatttttttgtttatatgcmtttctgttatttttttaatgtctaagggaaattctgaattctacattgttaggatctggatttcgttttatttaaagagagatgaactttgttttcaaatgcagttatctgagatcagtggtgatattgtttacttttaaatgtgattataatggcttcagagccttgactctagagctgattcacccctctactaaggtgtgattattctgagaactctatctgatgttataagtttctcactctggctggagcacatactggttcttctaaggcccatatgacctccaggaatttctctggccca

SEQ ID NO: 384723 - DNA, 581 bp, Homo sapiens
gaaacaactttcttcaacttaatctttttattcattttgctttgattccactgcgcttcttttacctgttggtttatagttttaccaagttttaaaaatatctcaaccactgcctttacaaatagtttttgccctccccccatttcctgggatttcaattatgtgtgttgttaagctgcttaatattttctaatcccataatttctgtcttttcttggtctgtttctgttaatttttttttcttgttttggatgaatttttttgtttatatgcatttctgttatttttttaatgtctaagggaaattctgaattctacattgttaggatctggatttygttttatttaaagagagatgaactttgttttcaaatgcagttatctgagatcagtggtgatattgtttacttttaaatgtgattataatggcttcagagccttgactctagagctgattcacccctctactaaggtgtgattattctgagaactctatctgatgttataagtttctcactctggctggagcacatactggttcttctaaggcccatatgacctccaggaatttctctggccca

SEQ ID NO: 384724 - DNA, 581 bp, Homo sapiens
gaaacaactttcttcaacttaatctttttattcattttgctttgattccactgcgcttcttttacctgttggtttatagttttaccaagttttaaaaatatctcaaccactgcctttacaaatagtttttgccctccccccatttcctgggatttcaattatgtgtgttgttaagctgcttaatattttctaatcccataatttctgtcttttcttggtctgtttctgttaatttttttttcttgttttggatgaatttttttgtttatatgcatttctgttatttttttaatgtctaagggaaattctgaattctacattgttaggatctggatttcgttttatttaaagagagatgaactttgttttcaaatgcagttatctgagatcagtggtgatattgtttacttttaaatgtgattataatggcttcagagccttgactctagagctgattcacccctctactaaggtgtgattattctgagaactctatctgatgttataagtttctcactctggctggagcacatactgkttcttctaaggcccatatgacctccaggaatttctctggccca

SEQ ID NO: 384725 - DNA, 484 bp, Homo sapiens
ttctctggcccattgctaatgaagactcatttttctatctcatggagttttactttatgtaggcacagttcrgttctcactcaaggactccagagaacctctacgtaaatctccacagttctctctctgtgcagccctcttctctctgtcagtctgccttgatgattctagtcaccttggcctccataaactttgatatcttgctcttaaattcagcaaatcatgatattctctctcggattgtctcataccatgctggaggctggaaatcactttcagtaagtatgctggcactataaagggtatatattgttttctttctctgagaaatcacagttttgtgctgcctatttttttcatgcaatgaaaacagtttatatacttgttctggatttctaaacgtttacaaaagttgcataattctggtaatcattaattcttcatcagcaacagttgaattctcagagacttgtttaactgccca

SEQ ID NO: 384726 - DNA, 484 bp, Homo sapiens
ttctctggcccattgctaatgaagactcatttttctatctcatggagttttactttatgtaggcacagttcggttctcactcaaggactccagagaacctctacgtaaatctccacagttctctctctgtgcagccctcttctctctgtcagtctgccttgatgattctagtcaccttggcctccataaactttgatatcttgctcttaaattcagcaaatcatgatattctctctcrgattgtctcataccatgctggaggctggaaatcactttcagtaagtatgctggcactataaagggtatatattgttttctttctctgagaaatcacagttttgtgctgcctatttttttcatgcaatgaaaacagtttatatacttgttctggatttctaaacgtttacaaaagttgcataattctggtaatcattaattcttcatcagcaacagttgaattctcagagacttgtttaactgccca

SEQ ID NO: 384727 - DNA, 484 bp, Homo sapiens
ttctctggcccattgctaatgaagactcatttttctatctcatggagttttactttatgtaggcacagttcggttctcactcaaggactccagagaacctctacgtaaatctccacagttctctctctgtgcagccctcttctctctgtcagtctgccttgatgattctagtcaccttggcctccataaactttgatatcttgctcttaaattcagcaaatcatgatattctctctcggattgtctcataccatgctggaggctggaaatcactttcagtaagtatgctggcactataaagggtatatattgttttctttctctsagaaatcacagttttgtgctgcctatttttttcatgcaatgaaaacagtttatatacttgttctggatttctaaacgtttacaaaagttgcataattctggtaatcattaattcttcatcagcaacagttgaattctcagagacttgtttaactgccca

SEQ ID NO: 384728 - DNA, 484 bp, Homo sapiens
ttctctggcccattgctaatgaagactcatttttctatctcatggagttttactttatgtaggcacagttcggttctcactcaaggactccagagaacctctacgtaaatctccacagttctctctctgtgcagccctcttctctctgtcagtctgccttgatgattctagtcaccttggcctccataaactttgatatcttgctcttaaattcagcaaatcatgatattctctctcggattgtctcataccatgctggaggctggaaatcactttcagtaagtatgctggcactataaagggtatatattgttttctttctctgagaaatcacagttttgtgctgcctatttttttcatgcaatraaaacagtttatatacttgttctggatttctaaacgtttacaaaagttgcataattctggtaatcattaattcttcatcagcaacagttgaattctcagagacttgtttaactgccca

SEQ ID NO: 384729 - DNA, 491 bp, Homo sapiens
atttttttctctctgcattcctcatagaacagatccagtattagctaagggatcctctggggcaggagtggggtggcattgcartttgtatctttttttaaatccatgtttttgtaatggaataccatcacactaattttcttactccctaagtactggataattgtttctcctcctatcagcattcacttttctaaaggtaatgtggctcagatttagattcctaggtttctaaatcttcatttctaatctctatattatcacatgctggttaattcttttctcttttgctcttttccacttctgtgagcttcattctgtttggaactcagagtatatgaaatgaacagagtacatcagcctgaattctcttacaacttcaaattctttccattttatggttagacaacactgagttactctatagtgactttcctacttttattaatatcatggtcacattattccataaaatctaacaattttaagaa

SEQ ID NO: 384730 - DNA, 491 bp, Homo sapiens
atttttttctctctgcattcctcatagaacagatccagtattagctaagggatcctctggggcaggagtggggtggcattgcagtttgtatctttttttaaatccatgtttttgtaatggaataccatcacactaattttcttactccctaagtactggataattgtttctcctcctatcagcattcacttttctaaaggtaatgtggctcagatttagattcctaggtttctaaatctwcatttctaatctctatattatcacatgctggttaattcttttctcttttgctcttttccacttctgtgagcttcattctgtttggaactcagagtatatgaaatgaacagagtacatcagcctgaattctcttacaacttcaaattctttccattttatggttagacaacactgagttactctatagtgactttcctacttttattaatatcatggtcacattattccataaaatctaacaattttaagaa

SEQ ID NO: 384731 - DNA, 491 bp, Homo sapiens
atttttttctctctgcattcctcatagaacagatccagtattagctaagggatcctctggggcaggagtggggtggcattgcagtttgtatctttttttaaatccatgtttttgtaatggaataccatcacactaattttcttactccctaagtactggataattgtttctcctcctatcagcattcacttttctaaaggtaatgtggctcagatttagattcctaggtttctaaatcttcatttctaatctctatattatcacatgctggttaattcttttctcttttgctcytttccacttctgtgagcttcattctgtttggaactcagagtatatgaaatgaacagagtacatcagcctgaattctcttacaacttcaaattctttccattttatggttagacaacactgagttactctatagtgactttcctacttttattaatatcatggtcacattattccataaaatctaacaattttaagaa

SEQ ID NO: 384732 - DNA, 491 bp, Homo sapiens
atttttttctctctgcattcctcatagaacagatccagtattagctaagggatcctctggggcaggagtggggtggcattgcagtttgtatctttttttaaatccatgtttttgtaatggaataccatcacactaattttcttactccctaagtactggataattgtttctcctcctatcagcattcacttttctaaaggtaatgtggctcagatttagattcctaggtttctaaatcttcatttctaatctctatattatcacatgctggttaattcttttctcttttgctcttttccacttctgtgagcttcattctgtttggaactcagagtatatgaaatgaacagagtacatcagcctgaattctctyacaacttcaaattctttccattttatggttagacaacactgagttactctatagtgactttcctacttttattaatatcatggtcacattattccataaaatctaacaattttaagaa

SEQ ID NO: 384733 - DNA, 453 bp, Homo sapiens
gtccaggccttgctgctttgtgcagccttggtacttggtgccctgtgtcccagccactacatctgtggctaaaaggggycaaggtacagttcagaccattgcttctgtaggtacaagccccaagctttgttggcttccatgtggcattgagcctgtgagtgcacagaagtcaagaattggggtttggtaacctccacctagatttcagaagatgtaaggaaaagcctggatatacaggcagaagtttgctgcaggggtggagccctcatggagaacctctgttagggcagtgcagaaaagaaatgtgaggtcagagctttcacacacagtacccaatggggcactgcctagtggagctgtgagaagagagccactgttctccagatcccagaatggtagattaaccaacagcttgcactgtacatctggagaagctgcagacattcaatgcca

SEQ ID NO: 384734 - DNA, 453 bp, Homo sapiens
gtccaggccttgctgctttgtgcagccttggtacttggtgccctgtgtcccagccactacatctgtggctaaaaggggccaaggtacagttcagaccattkcttctgtaggtacaagccccaagctttgttggcttccatgtggcattgagcctgtgagtgcacagaagtcaagaattggggtttggtaacctccacctagatttcagaagatgtaaggaaaagcctggatatacaggcagaagtttgctgcaggggtggagccctcatggagaacctctgttagggcagtgcagaaaagaaatgtgaggtcagagctttcacacacagtacccaatggggcactgcctagtggagctgtgagaagagagccactgttctccagatcccagaatggtagattaaccaacagcttgcactgtacatctggagaagctgcagacattcaatgcca

SEQ ID NO: 384735 - DNA, 609 bp, Homo sapiens
taagaggaaaaaatggctttgtgtgtggggtccaggccttgctgctttgtgcagccttggtacttggtgccctgtgtcccagccactacatctgtggctaaaaggggccaaggtacagttcagaccattgcttctgtaggtacaagccccaagctttgttggcttccatgtggcattgagcctgtgagtgcacagaagtcaagaattggggtttggtaacctcyacctagatttcagaagatgtaaggaaaagcctggatatacaggcagaagtttgctgcaggggtggagccctcatggagaacctctgttagggcagtgcagaaaagaaatgtgaggtcagagctttcacacacagtacccaatggggcactgcctagtggagctgtgagaagagagccactgttctccagatcccagaatggtagattaaccaacagcttgcactgtacatctggagaagctgcagacattcaatgccagcccattaaagcagcttggaatggggctgtaccctgcaaaggcacaggggcagaactgcccaagaccatgggagcctacttcttgcaccagtgtgacctgaatgtgagacacagggtcaaaggagat

SEQ ID NO: 384736 - DNA, 453 bp, Homo sapiens
gtccaggccttgctgctttgtgcagccttggtacttggtgccctgtgtcccagccactacatctgtggctaaaaggggccaaggtacagttcagaccattgcttctgtaggtacaagccccaagctttgttggcttccatgtggcattgagcctgtgagtgcacagaagtcaagaattggggtttggtaacctccacctagatttcagaagatgtaaggaaaagcctggatatacaggcagaagtttgctgcaggggtggagccctcatggagaacctctgttagggcagtgcagaaaagaaatgtgaggtcagagcyttcacacacagtacccaatggggcactgcctagtggagctgtgagaagagagccactgttctccagatcccagaatggtagattaaccaacagcttgcactgtacatctggagaagctgcagacattcaatgcca

SEQ ID NO: 384737 - DNA, 465 bp, Homo sapiens
gaaaagcctggatatacaggcagaagtttgctgcaggggtggagccctcatggagaacctctgttagggcagtgcagaaaagaaatgtgaggtcagagctttcacacacagtacccaatggggcactgcctagtggagctgtgagaagagagccactgttctccagatcccagaatggtagattaaccaacagcttgcactgtacatctggagaagctgcagacattcaatgccagcccatkaaagcagcttggaatggggctgtaccctgcaaaggcacaggggcagaactgcccaagaccatgggagcctacttcttgcaccagtgtgacctgaatgtgagacacagggtcaaaggagattattttggagctttaaaattcaatgactaccctgctggattctggacttgcatggggcctttagcccttttgttttgtccagttctcctatttggaataggag

SEQ ID NO: 384738 - DNA, 465 bp, Homo sapiens
gaaaagcctggatatacaggcagaagtttgctgcaggggtggagccctcatggagaacctctgttagggcagtgcagaaaagaaatgtgaggtcagagctttcacacacagtacccaatggggcactgcctagtggagctgtgagaagagagccactgttctccagatcccagaatggtagattaaccaacagcttgcactgtacatctggagaagctgcagacattcaatgccagcccattaaagcagcttggaatggggctgtaccctgcaaaggcacaggggcagaactgcccaagaccatgggagcctacttcttgcaccagtgtgacctgaatgtgagacayagggtcaaaggagattattttggagctttaaaattcaatgactaccctgctggattctggacttgcatggggcctttagcccttttgttttgtccagttctcctatttggaataggag

SEQ ID NO: 384739 - DNA, 465 bp, Homo sapiens
gaaaagcctggatatacaggcagaagtttgctgcaggggtggagccctcatggagaacctctgttagggcagtgcagaaaagaaatgtgaggtcagagctttcacacacagtacccaatggggcactgcctagtggagctgtgagaagagagccactgttctccagatcccagaatggtagattaaccaacagcttgcactgtacatctggagaagctgcagacattcaatgccagcccattaaagcagcttggaatggggctgtaccctgcaaaggcacaggggcagaactgcccaagaccatgggagcctacttcttgcaccagtgtgacctgaatgtgagacacagrgtcaaaggagattattttggagctttaaaattcaatgactaccctgctggattctggacttgcatggggcctttagcccttttgttttgtccagttctcctatttggaataggag

SEQ ID NO: 384740 - DNA, 465 bp, Homo sapiens
gaaaagcctggatatacaggcagaagtttgctgcaggggtggagccctcatggagaacctctgttagggcagtgcagaaaagaaatgtgaggtcagagctttcacacacagtacccaatggggcactgcctagtggagctgtgagaagagagccactgttctccagatcccagaatggtagattaaccaacagcttgcactgtacatctggagaagctgcagacattcaatgccagcccattaaagcagcttggaatggggctgtaccctgcaaaggcacaggggcagaactgcccaagaccatgggagcctacttcttgcaccagtgtgacctgaatgtgagacacagggtcaaaggagattattttggagctttaaaattcaatgacyaccctgctggattctggacttgcatggggcctttagcccttttgttttgtccagttctcctatttggaataggag

SEQ ID NO: 384741 - DNA, 552 bp, Homo sapiens
tttatgtagcttcagaaagaggagttaaacacataggtgaagtcttccctccaccaggttctaaaatgtaagattcatggccttctgaaaacactcccttaccaatgtgaggctggaaccatagaacaggtggaggayttagtaggtattggctcaacatttaaagtacaatctttttccttaataggtattttcataccttataaacacatgtatgaccttggatgtccaattaaatcccaggaaaaaaggacagattcttgatgaaactaggcaaataatgagacagcaagtaaaaagggctccccagcagaacctccgaccagcttgcacactgacaggagtgcacactgaggtggagcctcaggaagtttgcagcggggaggagcctggcctcttctgttccaggacggaggctgggattcaatctatgaggcaggaagctgggtagcaggagtctctgtttctccttttttcccttttgcccaataaattccatttttcttacccttcaaagcgtcggtgagcctaatatatcatggctgtgtgaca

SEQ ID NO: 384742 - DNA, 552 bp, Homo sapiens
tttatgtagcttcagaaagaggagttaaacacataggtgaagtcttccctccaccaggttctaaaatgtaagattcatggccttctgaaaacactcccttaccaatgtgaggctggaaccatagaacaggtggaggacttagtaggtattggctcaacatttaaagtacaatctttttccttaataggtattttcataccttataaacacatgtatgaccttggatgtccaattaaatcccaggaaaaaaggacagattcttgatgaaactaggcaaataatgagacagcaagtaaaaagggctccccagcagaacctccgaccagcttgcacactgrcaggagtgcacactgaggtggagcctcaggaagtttgcagcggggaggagcctggcctcttctgttccaggacggaggctgggattcaatctatgaggcaggaagctgggtagcaggagtctctgtttctccttttttcccttttgcccaataaattccatttttcttacccttcaaagcgtcggtgagcctaatatatcatggctgtgtgaca

SEQ ID NO: 384743 - DNA, 552 bp, Homo sapiens
tttatgtagcttcagaaagaggagttaaacacataggtgaagtcttccctccaccaggttctaaaatgtaagattcatggccttctgaaaacactcccttaccaatgtgaggctggaaccatagaacaggtggaggacttagtaggtattggctcaacatttaaagtacaatctttttccttaataggtattttcataccttataaacacatgtatgaccttggatgtccaattaaatcccaggaaaaaaggacagattcttgatgaaactaggcaaataatgagacagcaagtaaaaagggctccccagcagaacctccgaccagcttgcacactgacaggagtgcayactgaggtggagcctcaggaagtttgcagcggggaggagcctggcctcttctgttccaggacggaggctgggattcaatctatgaggcaggaagctgggtagcaggagtctctgtttctccttttttcccttttgcccaataaattccatttttcttacccttcaaagcgtcggtgagcctaatatatcatggctgtgtgaca

SEQ ID NO: 384744 - DNA, 630 bp, Homo sapiens
tcaatatagcattttctcctttttttgttgttttaatggcataatatgctatgtgtgaggtcaacatgaggatagacaaaaagaataagtttataaatgtggttatattgtcccctaacctaggaaaaaatgacaatattgacattaaaatttgcattgtttgcctctggctttcatgggaattgttttgtttgtttgtttgtttttgtttgtttttttgtttttggtttttacagttggtatgccattttttaatgttacctataactakcattagaattgtatgggagcttttgtttcttttgttttggaggatgtgattcttaaaatgaaattaattttttagaacataaaatatatcaaggaaaggacatttctaagagtaatactggaaaagaacagttaatcggtgaattcaccagtaagtttaagtcaatttaaaattaacttagcaaattatatgttcatagcactctgtggaccagtagggaatacaaaaatgaaaaaatcctgacactgttttatcagtgaaaagagacaggtcattaacttactaaaatgtatggcagagtaatgtatgtgctaaattatgacatatacaataaaggctgcgggaaccaaaggatatgt

SEQ ID NO: 384745 - DNA, 630 bp, Homo sapiens
tcaatatagcattttctcctttttttgttgttttaatggcataatatgctatgtgtgaggtcaacatgaggatagacaaaaagaataagtttataaatgtggttatattgtcccctaacctaggaaaaaatgacaatattgacattaaaatttgcattgtttgcctctggctttcatgggaattgttttgtttgtttgtttgtttttgtttgtttttttgtttttggtttttacagttggtatgccattttttaatgttacctataactatcattagaattgtatgggagcttttgtttcttttgttttggaggatgtgattcttaaaatgaaattaattttttagaacataaaatatatcaaggraaggacatttctaagagtaatactggaaaagaacagttaatcggtgaattcaccagtaagtttaagtcaatttaaaattaacttagcaaattatatgttcatagcactctgtggaccagtagggaatacaaaaatgaaaaaatcctgacactgttttatcagtgaaaagagacaggtcattaacttactaaaatgtatggcagagtaatgtatgtgctaaattatgacatatacaataaaggctgcgggaaccaaaggatatgt

SEQ ID NO: 384746 - DNA, 630 bp, Homo sapiens
tcaatatagcattttctcctttttttgttgttttaatggcataatatgctatgtgtgaggtcaacatgaggatagacaaaaagaataagtttataaatgtggttatattgtcccctaacctaggaaaaaatgacaatattgacattaaaatttgcattgtttgcctctggctttcatgggaattgttttgtttgtttgtttgtttttgtttgtttttttgtttttggtttttacagttggtatgccattttttaatgttacctataactatcattagaattgtatgggagcttttgtttcttttgttttggaggatgtgattcttaaaatgaaattaattttttagaacataaaatatatcaaggaaaggacatttctaagagtaatactggaaaagaacagttaatcggtgaattcaccagtamgtttaagtcaatttaaaattaacttagcaaattatatgttcatagcactctgtggaccagtagggaatacaaaaatgaaaaaatcctgacactgttttatcagtgaaaagagacaggtcattaacttactaaaatgtatggcagagtaatgtatgtgctaaattatgacatatacaataaaggctgcgggaaccaaaggatatgt

SEQ ID NO: 384747 - DNA, 392 bp, Homo sapiens
taatcggtgaattcaccagtaagtttaagtcaatttaaaattaacttagcaaattatatgttcatagcactctgtggaccagtagggaatacaaaaatgaaaaaatcctgacactgttttatcagtgaaaagagacaggtcattaacttactaaaatgtayggcagagtaatgtatgtgctaaattatgacatatacaataaaggctgcgggaaccaaaggatatgtcaatgagtttcagtaaaggttcagggacatcttcagagaggacagaacagtggaattttttaatttaaattttatgggggatggtaggaaattccaggtggacagatggtttgactaaatgcatggtagttagaatgtgttggctttattcatgaaacaatgaat

SEQ ID NO: 384748 - DNA, 392 bp, Homo sapiens
taatcggtgaattcaccagtaagtttaagtcaatttaaaattaacttagcaaattatatgttcatagcactctgtggaccagtagggaatacaaaaatgaaaaaatcctgacactgttttatcagtgaaaagagacaggtcattaacttactaaaatgtatggcagagtaatgtatgtgctaaattatgacatatacaataaaggctgcgggaaccaaaggatatgtcaatgagtttcartaaaggttcagggacatcttcagagaggacagaacagtggaattttttaatttaaattttatgggggatggtaggaaattccaggtggacagatggtttgactaaatgcatggtagttagaatgtgttggctttattcatgaaacaatgaat

SEQ ID NO: 384749 - DNA, 392 bp, Homo sapiens
taatcggtgaattcaccagtaagtttaagtcaatttaaaattaacttagcaaattatatgttcatagcactctgtggaccagtagggaatacaaaaatgaaaaaatcctgacactgttttatcagtgaaaagagacaggtcattaacttactaaaatgtatggcagagtaatgtatgtgctaaattatgacatatacaataaaggctgcgggaaccaaaggatatgtcaatgagtttcagtaarggttcagggacatcttcagagaggacagaacagtggaattttttaatttaaattttatgggggatggtaggaaattccaggtggacagatggtttgactaaatgcatggtagttagaatgtgttggctttattcatgaaacaatgaat

SEQ ID NO: 384750 - DNA, 392 bp, Homo sapiens
taatcggtgaattcaccagtaagtttaagtcaatttaaaattaacttagcaaattatatgttcatagcactctgtggaccagtagggaatacaaaaatgaaaaaatcctgacactgttttatcagtgaaaagagacaggtcattaacttactaaaatgtatggcagagtaatgtatgtgctaaattatgacatatacaataaaggctgcgggaaccaaaggatatgtcaatgagtttcagtaaaggttcagggacatcttcagagaggacagaacagtggaattttttaatttaaattttatgggggatggtaggaaattccaggtggmcagatggtttgactaaatgcatggtagttagaatgtgttggctttattcatgaaacaatgaat

SEQ ID NO: 384751 - DNA, 573 bp, Homo sapiens
atccagtactgctaaagtctacaacagtgcccgtaatgtcctaggccttcatattcactcacctctcactcacttacccagagcaacttccagctgtgcaagctccattcatggtaagtgccctctacaagtgtaccccttttttttttttactgcaccttttctatgataagatgcaaaatacctaccactgtgttacagttgcctgcagtatttagtacagtaacatgctgtacagatttgtagcctagsagcaacaggctacatatactctatcatatactctagcagagtagtaggctatcccatctatgtttgtgtaagtacactctgagatatttgcacaataacaaaactgcctaaagacatatttctccaaatttattccatcatcaagtgattcatgcctgtatgcacacatatgcaggggcatgcagagagggcaattcctgtgtcccaggcactgctttatgcttgataaatctgttattcaccctcactacaatcttacccagagacaggcaccattattttccccatttcacaaataaataaactgaacacaggtaattt

SEQ ID NO: 384752 - DNA, 473 bp, Homo sapiens
ttcatggtaagtgccctctacaagtgtaccccttttttttttttactgcaccttttctatgataagatgcaaaatacctaccactgtgttacagttgcctgcagtatttagtacagtaacatgctgtacagatttgtagcctagcagcaacaggctacatatactctaycatatactctagcagagtagtaggctatcccatctatgtttgtgtaagtacactctgagatatttgcacaataacaaaactgcctaaagacatatttctccaaatttattccatcatcaagtgattcatgcctgtatgcacacatatgcaggggcatgcagagagggcaattcctgtgtcccaggcactgctttatgcttgataaatctgttattcaccctcactacaatcttacccagagacaggcaccattattttccccatttcacaaataaataaactgaacacaggtaatttatgtaac

SEQ ID NO: 384753 - DNA, 573 bp, Homo sapiens
atccagtactgctaaagtctacaacagtgcccgtaatgtcctaggccttcatattcactcacctctcactcacttacccagagcaacttccagctgtgcaagctccattcatggtaagtgccctctacaagtgtaccccttttttttttttactgcaccttttctatgataagatgcaaaatacctaccactgtgttacagttgcctgcagtatttagtacagtaacatgctgtacagatttgtagcctagcagcaacaggctacatatactctatcatatactctagcagagtagtaggctatcccatctatgtttgtgtaagtacactctgagatatttgcacaataacaaaactgcctaaagacatatttctccaaatttattccatcatcaagtgattcatgcctgtatgcacacatatgcaggggcatgcagagagggcaattcctgtgtcccaggcactgctttatgcttgataaatctgttattcaccmtcactacaatcttacccagagacaggcaccattattttccccatttcacaaataaataaactgaacacaggtaattt

SEQ ID NO: 384754 - DNA, 505 bp, Homo sapiens
tcagagttttttttggggggggggtattttgatgttatgctattgaatatctagattttattggctacatttgaacaatgttgtggcaggcagttcagtaacttcaggatgactatttttctgttgttgttttaaatcttctctttaractttgttgagttagtctagagccatctgtaatttggagctaaatgagcactgtcactagggcatgaacctccagtggtctttactgaatatcctggaagtacagaggggattcccttctctggctggtcagagctaacatgtcttcctgtcatgtgatgccagggaagtgttcttccaactccctggtagtcctttgctgagctccttagaatttcatcctatgtacatttggcttagggacttgggagaaaccttaggctgattattggttcctttttctgtaaacgttctcttctactacatattccagctgcttaacattttggtttttatctggttcctcagtgcaatgaca

SEQ ID NO: 384755 - DNA, 505 bp, Homo sapiens
tcagagttttttttggggggggggtattttgatgttatgctattgaatatctagattttattggctacatttgaacaatgttgtggcaggcagttcagtaacttcaggatgactatttttctgttgttgttttaaatcttctctttagactttgttgagttagtctagagccatctgtaatttggagctaaatgagcactgtcactagggcatgaacctccagtggtctttactgaatatcctggargtacagaggggattcccttctctggctggtcagagctaacatgtcttcctgtcatgtgatgccagggaagtgttcttccaactccctggtagtcctttgctgagctccttagaatttcatcctatgtacatttggcttagggacttgggagaaaccttaggctgattattggttcctttttctgtaaacgttctcttctactacatattccagctgcttaacattttggtttttatctggttcctcagtgcaatgaca

SEQ ID NO: 384756 - DNA, 391 bp, Homo sapiens
atttgtccctcacaaaagattgcagacaactgctgctgagttctgagagtttrtccttcacttaggaatccattgattctgggttctgaatatttgtccttcacataggattccagaacagtgctgctggcttctgagtgattgtcccgcacgtaggattccagaacactgctacgagggtctgaatgttcttccctcacaaagacttccagaacactgctgctggtttctgtttgtttgtccctcacaaaggattccagagcactgctgctggttatttagtgtttgttgcacacataggattccagatcacttctgtgaaggtctgaatgtttagccctgagataggattccagtacacactggctcggttctgagtgtttgtaccaca

SEQ ID NO: 384757 - DNA, 391 bp, Homo sapiens
atttgtccctcacaaaagattgcagacaactgctgctgagttctgagagtttatccttcacttaggaatccaytgattctgggttctgaatatttgtccttcacataggattccagaacagtgctgctggcttctgagtgattgtcccgcacgtaggattccagaacactgctacgagggtctgaatgttcttccctcacaaagacttccagaacactgctgctggtttctgtttgtttgtccctcacaaaggattccagagcactgctgctggttatttagtgtttgttgcacacataggattccagatcacttctgtgaaggtctgaatgtttagccctgagataggattccagtacacactggctcggttctgagtgtttgtaccaca

SEQ ID NO: 384758 - DNA, 391 bp, Homo sapiens
atttgtccctcacaaaagattgcagacaactgctgctgagttctgagagtttatccttcacttaggaatccattgattctgggttctgaatatttgtccttcacataggattccagaacagtgctgctggcttctgagtgattgtcccgcacgtaggattccagaacactgctacgagggtctgaatgttcttccctcacaaagacttccagaacactgctgctggtttctgtttgtttgtccctcacaaaggattccagagcactgctgctggttatttagtgtttgttgcmcacataggattccagatcacttctgtgaaggtctgaatgtttagccctgagataggattccagtacacactggctcggttctgagtgtttgtaccaca

SEQ ID NO: 384759 - DNA, 391 bp, Homo sapiens
atttgtccctcacaaaagattgcagacaactgctgctgagttctgagagtttatccttcacttaggaatccattgattctgggttctgaatatttgtccttcacataggattccagaacagtgctgctggcttctgagtgattgtcccgcacgtaggattccagaacactgctacgagggtctgaatgttcttccctcacaaagacttccagaacactgctgctggtttctgtttgtttgtccctcacaaaggattccagagcactgctgctggttatttagtgtttgttgcacacataggattccagatcacttctgygaaggtctgaatgtttagccctgagataggattccagtacacactggctcggttctgagtgtttgtaccaca

SEQ ID NO: 384760 - DNA, 447 bp, Homo sapiens
aagtgatttaacttacaaaattaagtacatacagggttttacttttaatgtacaggttttaaaagataatgttagatacattatgaaatggtgcataatgaaataattcccataatatattaacttcttggctaaaaattttttggataaagtccagtawccatttcaatatcaatgaatgtctatgtaaatatattctttgctgagggaccttagaaggtaactttgaggtgggaagatggtttatgttttcgaatttaagaagactcatttttctgaagatgcaagttctttatcagttttacataaaccaaataaagttatcaacgttttaacatttttaaaattacacacgctgtcttttactattgtgatgacatttaacaaattttgtaacggagtagaaaagtcttgcccttctagatttcaaaatgtgctattaatttg

SEQ ID NO: 384761 - DNA, 557 bp, Homo sapiens
taaaatcattacaatgtaatgatttttggagataaccagagttaatgtggtgatgcagaggctgaatgtttacaagagaaggtgcagtgcatgggaaagcacagaaaagtgagaaagaagggattgctattgatttactttccattgtttaagttcataggatattatataaggtattcaattsagctgagaaatatgtaatttcatgaattataaattgtttttgctgttttacaggctggccacacaccacttttattggccataaggaaaagaagtgagcaaattgtggaatttttactgacaaaaaaatgcaaatgcaaatggagttgataagtttaaatggtatagtagtttttttattaaaaaacacttgagtagtgtgctagagtaataacactcaagtcagaaatattaaattaataacatttacttaaaattattagattatacagaaaaatatcaagacaaattatcagttaggaagaaaagcaattatttggactggtcaacacaaagaacagtatacagtaggattttcttcttttattatactg

SEQ ID NO: 384762 - DNA, 557 bp, Homo sapiens
taaaatcattacaatgtaatgatttttggagataaccagagttaatgtggtgatgcagaggctgaatgtttacaagagaaggtgcagtgcatgggaaagcacagaaaagtgagaaagaagggattgctattgatttactttccattgtttaagttcataggatattatataaggtattcaattcagctgagaaatatgtaatttcatgaattataaattgtttttgctgttttacaggctggccacacaccacttttattggccataaggaaaagaagtgagcaaattgtggaatttttactgacaaaaaaatgcaaatgcaaatgsagttgataagtttaaatggtatagtagtttttttattaaaaaacacttgagtagtgtgctagagtaataacactcaagtcagaaatattaaattaataacatttacttaaaattattagattatacagaaaaatatcaagacaaattatcagttaggaagaaaagcaattatttggactggtcaacacaaagaacagtatacagtaggattttcttcttttattatactg

SEQ ID NO: 384763 - DNA, 557 bp, Homo sapiens
taaaatcattacaatgtaatgatttttggagataaccagagttaatgtggtgatgcagaggctgaatgtttacaagagaaggtgcagtgcatgggaaagcacagaaaagtgagaaagaagggattgctattgatttactttccattgtttaagttcataggatattatataaggtattcaattcagctgagaaatatgtaatttcatgaattataaattgtttttgctgttttacaggctggccacacaccacttttattggccataaggaaaagaagtgagcaaattgtggaatttttactgacaaaaaaatgcaaatgcaaatggagttgataagtttaaatggtatagtagtttttttattaaaaaacacttgagtagtgtgctagagtaataacactcaagtcagaaatattaaattaataacatttacttaaaattattagattatacagaaaaataycaagacaaattatcagttaggaagaaaagcaattatttggactggtcaacacaaagaacagtatacagtaggattttcttcttttattatactg

SEQ ID NO: 384764 - DNA, 557 bp, Homo sapiens
taaaatcattacaatgtaatgatttttggagataaccagagttaatgtggtgatgcagaggctgaatgtttacaagagaaggtgcagtgcatgggaaagcacagaaaagtgagaaagaagggattgctattgatttactttccattgtttaagttcataggatattatataaggtattcaattcagctgagaaatatgtaatttcatgaattataaattgtttttgctgttttacaggctggccacacaccacttttattggccataaggaaaagaagtgagcaaattgtggaatttttactgacaaaaaaatgcaaatgcaaatggagttgataagtttaaatggtatagtagtttttttattaaaaaacacttgagtagtgtgctagagtaataacactcaagtcagaaatattaaattaataacatttacttaaaattattagattatacagaaaaatatcaasacaaattatcagttaggaagaaaagcaattatttggactggtcaacacaaagaacagtatacagtaggattttcttcttttattatactg

SEQ ID NO: 384765 - DNA, 559 bp, Homo sapiens
ttaaattaataacatttacttaaaattattagattatacagaaaaatatcaagacaaattatcagttaggaagaaaagcaattatttggactggtcaacacaaagaacagtatacagtaggattttcttcttttattatactgactgattcttatttgtaatctgatgtttttggttgcattatcttctattagctaaagtggttctgtattagttttaagaagtatgaatttttagtttactttataattcaatattgaatgattaacacctttatagtatttttctaacttctgtttttcatacacttttaaaaaatgcaatatttgctgggcatggtagctgttgtctgttatcccagcaactttgggaggccaagtgggtagatcacctgaggccaggagtttgagaccagcctagccaacatggtaaaacctcatctcaatgaaaaatataaaaattagccaaccrtggtggcacaagcctgtagtcccaggtactcaggacaatattattcctaatattgttttaagtcttcagattgctctcacttgtccga

SEQ ID NO: 384766 - DNA, 642 bp, Homo sapiens
cgtaaggggtgctttctataagtaaggatgggcgaaaccagcaaatagtctgggggccattcatttgtgaataatagttcataaatttcctaaatgctgaacatttgagaatggtctactgtgatatgtagaatcctcctgttttgtaaatttcaagtgattgtcataatgatatgactgtcaagagaatgtttggattaagcttgaagctgaattgagcttatcaatttatamcttcatttgtgaaattctgacatatatatatatatttatatgtatatattttactttcatgagatttacttcattttgaaaagttactacagattatttagccattaaaaagttaataagggaatactatcaacaattttatgctcattaattcaacaatctagaagaattggatgaattccttggaaaacacaaattgccaaaattcagctaagatcaaacagacaatccaaatagctatataagcattggagaaaacaaatttataatttaaaaactctcaaaaaattatctccagggcaaaataacctcactggagaactccaccatacattcaaagaagaaccaacattgattctacataaccttcttcagaatacagacaaggagggcacaacccccatctca

SEQ ID NO: 384767 - DNA, 607 bp, Homo sapiens
agaggactctaggcccccagtttyccataagaaaggagcagcctgaaaccacacaaatatgagccatttcttaggaaccaggaaggattactgagagttcagcaatcccagagggaaaattcaagaccccgaaagaatagcagattaaggaactacgcctatggggtagaatcaggctctaactgaggaactgtccctggtcccaagagtctgaggatggcaatggatttgtgtgtctattctggataatcttctccactcccctgattattttgaagaacagtagtatctattgcagttatcccgtccttatcttgccattttattttgtgttgtgagatcaggtaatttttctgttcagtttacaggtcactggattaacaagtatatttgaggggctgcacttggaaaatacattcaagtgggcttcatctgcatctgtaattgatttagagaatgagatccagaactctgagcctaaaacagttgctgtcattggctgaaactttacagacctgaaaagaagttgagtatattttgtattgggagctgagtattaactgtagtagataataattccccacaatgaattatgcttgtccatatc

SEQ ID NO: 384768 - DNA, 626 bp, Homo sapiens
tagtgtagactttttttacatataaatatgaacatatgctatgtttatataaaccaaatgatctctatattcctcttctttgatttgtttacaaaaagattgaaaaaaatgactgaaaactttgacaattactcagaattctttgttttaaaacgtgtaaaaataaagatgaaattattggtttaaaaatgtgtacacaaagtaaactgaaaaatgtgtgcaactacattataagaaaattatacaacatcttaatataagatttagaaaaataattaacttttaccgtttagatgtagtaaaagattggcactactaatacgttaaaaattggaggccgggagtgatggttcatgcctgtaatcccagcactttcagagggtgaggcaagaggatcacctgaggtcaggagttygagaccagcctgaccaacatggggagaccccgtctctactaaaaatacaaaattagctgggcccagtggcgcatgcccgtaatcccagctacttgggaagctgaggcaggataattgcttgaacctgagaggtggaagtttcagtgagccgagattgtgccattgcactccagcctgggcaaaaagagtgaaactccttctaacaaaaaaa

SEQ ID NO: 384769 - DNA, 626 bp, Homo sapiens
tagtgtagactttttttacatataaatatgaacatatgctatgtttatataaaccaaatgatctctatattcctcttctttgatttgtttacaaaaagattgaaaaaaatgactgaaaactttgacaattactcagaattctttgttttaaaacgtgtaaaaataaagatgaaattattggtttaaaaatgtgtacacaaagtaaactgaaaaatgtgtgcaactacattataagaaaattatacaacatcttaatataagatttagaaaaataattaacttttaccgtttagatgtagtaaaagattggcactactaatacgttaaaaattggaggccgggagtgatggttcatgcctgtaatcccagcactttcagagggtgaggcaagaggatcacctgaggtcaggagtttgagaccagcctgaccaacatggggagaccccgtctctactaaaaatacaaaattagctgggcccagtggcgcatgccygtaatcccagctacttgggaagctgaggcaggataattgcttgaacctgagaggtggaagtttcagtgagccgagattgtgccattgcactccagcctgggcaaaaagagtgaaactccttctaacaaaaaaa

SEQ ID NO: 384770 - DNA, 626 bp, Homo sapiens
tagtgtagactttttttacatataaatatgaacatatgctatgtttatataaaccaaatgatctctatattcctcttctttgatttgtttacaaaaagattgaaaaaaatgactgaaaactttgacaattactcagaattctttgttttaaaacgtgtaaaaataaagatgaaattattggtttaaaaatgtgtacacaaagtaaactgaaaaatgtgtgcaactacattataagaaaattatacaacatcttaatataagatttagaaaaataattaacttttaccgtttagatgtagtaaaagattggcactactaatacgttaaaaattggaggccgggagtgatggttcatgcctgtaatcccagcactttcagagggtgaggcaagaggatcacctgaggtcaggagtttgagaccagcctgaccaacatggggagaccccgtctctactaaaaatacaaaattagctgggcccagtggcgcatgcccgtaatcccagctacttgggargctgaggcaggataattgcttgaacctgagaggtggaagtttcagtgagccgagattgtgccattgcactccagcctgggcaaaaagagtgaaactccttctaacaaaaaaa

SEQ ID NO: 384771 - DNA, 576 bp, Homo sapiens
ggactattataagtcatctttaagttcttaacatatgaaaaatgtctatgatattatgttgttaataaaaaggacataaataggtcaaaatgtcagtggtgaccatgtaatggtaattgaataatgggtgatttctacttttatatgttttacatgtacatatatttttgcagtgagcatgtttaactttcaaaatatgaaatataatgatgaatgttttttaaagttaagcaataataatgaagtcttcctttttcctttaataagtatcagaataaattttctttaacagttatgaaktcatgatttgaataggatcatattaatcattggacctctggatctcttggcctggatcccaaatgttcattggtgaaatctttgtcttcactcctgactgactgataagggatttattggtgatctgactcctgatccagtgctccaaatgataatccattgaagtatagtaagggtatacttactttgattcacatggttgctgaacccccactgcctatacgctctaccaattctgctggcttcttctcttgttggaatgattatattaagggt

SEQ ID NO: 384772 - DNA, 555 bp, Homo sapiens
agaaatagccaaaagcagagctgaacggaaagaaattaagacaaaaaagatcattcaaaagattgacaaatccaggaattgtttttttytaattactaaaataaatagacggacagctagactaataaggaagaaaagagagaagactgaaataaacacaattagaaacaacaaagggaatattaccactgaccctgcagaaatatacataaccaccagataatattatgaacacctctgtgcacacaaactagaaactctgggaaaacaaatggataaacttgcagacacatacactttcccaagactgaactaggaagaaagtgaatccctgaactgaccaataataagcaccaaaattgaatcagtaataaatagcctaacaacaacaacaaagcccaggaccagagagatacacagccaaattctatcagatatacaaagaagagctggtatcatttctactgaaacaattcaggagtaactggttctatgaggctactatcatcttgataccaaaacctggcagagacacaacaaaaaaaaggaaacttc

SEQ ID NO: 384773 - DNA, 555 bp, Homo sapiens
agaaatagccaaaagcagagctgaacggaaagaaattaagacaaaaaagatcattcaaaagattgacaaatccaggaattgtttttttctaattactaaaataaatagacggayagctagactaataaggaagaaaagagagaagactgaaataaacacaattagaaacaacaaagggaatattaccactgaccctgcagaaatatacataaccaccagataatattatgaacacctctgtgcacacaaactagaaactctgggaaaacaaatggataaacttgcagacacatacactttcccaagactgaactaggaagaaagtgaatccctgaactgaccaataataagcaccaaaattgaatcagtaataaatagcctaacaacaacaacaaagcccaggaccagagagatacacagccaaattctatcagatatacaaagaagagctggtatcatttctactgaaacaattcaggagtaactggttctatgaggctactatcatcttgataccaaaacctggcagagacacaacaaaaaaaaggaaacttc

SEQ ID NO: 384774 - DNA, 601 bp, Homo sapiens
atattgacaaatgggatctaattcaactacagagcttccacacagcaaaagatacgatcaacagacaacctacagaatggaagaaaattttttgcaagctatgtatctgatgaaggtctaatatccagcatgtattaggaacttaaacaaatttacaagaaaaaaaaccatacaaccacattagaaagtagrcaaatgacatgaacacttttcaaaagaaaacatacacgcagccaacaaccataagaagaaaagctcaacatcactgatcactgatcattagataaatgcaaatcaaagccacaatgagataccatctcacaccagtcagaatggccattattaaaaagtcaaaaaataacaggtgctggtgagattgtggagaaaagtgaatacttacatactgttggtgggagtgtaaattagttcaaccattttggaaaacaatgtggcgattccttagagacttaaaatcagaactaccatatgaacctgcaatcccattactgtgatatacccaaagaaacataattataaatataaattgttctatcataaggacacatacacgtgtatgttcactgtagcgccattcacaaga

SEQ ID NO: 384775 - DNA, 601 bp, Homo sapiens
atattgacaaatgggatctaattcaactacagagcttccacacagcaaaagatacgatcaacagacaacctacagaatggaagaaaattttttgcaagctatgtatctgatgaaggtctaatatccagcatgtattaggaacttaaacaaatttacaagaaaaaaaaccatacaaccacattagaaagtagacaaatgacatgaacacttttcaaaagaaaacatacacgcagccaacaaccataagaagaaaagctcaacatcactgatcactgatcattagataaatgcaaatcaaagccacaatgagataccatctcacaccagtcagaatggccattattaaaaagtcaaaaaataacaggtgctggtgagattgtggagaaaagtgaatacttacatactgttggtgggagtgtaaattagttcaaccattttggaaaacmatgtggcgattccttagagacttaaaatcagaactaccatatgaacctgcaatcccattactgtgatatacccaaagaaacataattataaatataaattgttctatcataaggacacatacacgtgtatgttcactgtagcgccattcacaaga

SEQ ID NO: 384776 - DNA, 601 bp, Homo sapiens
atattgacaaatgggatctaattcaactacagagcttccacacagcaaaagatacgatcaacagacaacctacagaatggaagaaaattttttgcaagctatgtatctgatgaaggtctaatatccagcatgtattaggaacttaaacaaatttacaagaaaaaaaaccatacaaccacattagaaagtagacaaatgacatgaacacttttcaaaagaaaacatacacgcagccaacaaccataagaagaaaagctcaacatcactgatcactgatcattagataaatgcaaatcaaagccacaatgagataccatctcacaccagtcagaatggccattattaaaaagtcaaaaaataacaggtgctggtgagattgtggagaaaagtgaatacttacatactgttggtgggagtgtaaattagttcaaccattttggaaaacaatgtggcgattccttagagacttaaaatcagaactaccatatgaacctgcaatcccattactgtgatatacccaaagaaacataattataaatataaattgttctatcataaggacacatacrcgtgtatgttcactgtagcgccattcacaaga

SEQ ID NO: 384777 - DNA, 634 bp, Homo sapiens
gaaaaactaacaagtataaaattaatacatcttcatttaatccattttcatgtattttattccttacaattgttcctaagaatgtatgggtactaaatattgtgggcattaaagggaggtagatcaagtacaattaacccctatttaagaatatttcagttagtgttgaccaaactgaatttatttcatgacagtcattgattaaytctaccctactcctggtttctactttttttgtgtacatgacatgcagaggcaatgcgtactaaataaagacagattcagactcctacattttcaacacaagtttagaggccaactatcctcaacacgatttatttatttaaagaatatgttcagcatggatgaattccagagcatgcagtattttgctcttcgttaataaaaaatatttttggacaaacagcttactttctagcatttgttcatattgactgaattgctgggattccagatttacactaaagcaatcactgctagtggtgagtcaactttatgtcctatttctccatgactaagtttaatagtttgtgtgtttcctttctgaatataccggatatatcatggccaaaatatgtttgtctaattttgttattcatgctaaacttctcat

SEQ ID NO: 384778 - DNA, 577 bp, Homo sapiens
tagtggaaaattagggacattagtacaattaacctgaaacaccaagaaagggagaaagtaaagctgggcaggagaaataaatttaaaaagatgtctttactgctgactttaaatgtggactgtggcttttgtggttaagaccccacttaagtttttggcttaaggctcatgccaaactcagctttataargtcccacaattcttccaacaaaaataatggcttctcaaagataataaagcagtactttgtttcccattagttttatctttcttgcctatatgttcttcaagagccctataaggaatgtgtatttttcagagaagttgtgggtgtctctgtgctacatgccattaaaaatcaaaacccaactctgatttctaactttggctgaaatattaatcccacttgtctggactctataatttatctagagcatttacaagagtgactttttagttctcaagtaactcagcaaataatgtatttattttgttccctttttttcaaagaaaaaatggaactttccaaattagcatctaagcaaattggagacacattggggagggctggcctacc

SEQ ID NO: 384779 - DNA, 605 bp, Homo sapiens
gtgctacatgccattaaaaatcaaaacccaactctgatttctaactttggctgaaatattaatcccacttgtctggactctataatttatctagagcatttacaagagtgactttttagttctcaagtaactcagcaaataatgtatttattttgttccctttttttcaaagaaaaaatggaactttccaaattagcatctaagcaaattggagacacattggggagggctggcctaccaacactttttagtcaaacataaaataggcaacmgctactatatgggagaatgtgagcaatagttctggggtgaagaaatcttcctcaatgtgactgaaaatacacttagtgctagagaagtctaggcactaggtcagatccaaagggcaagtattttaaattaatgaaatttctttcttttacaccaagcttctacaacctgtgacccaatgtggcccaggacggctttgaatgtcatccaacacaaatttgtaaaatttcttaaaacattatgaaatttttttgcagtttattttatttttattaattttttttagctcatcagctatcattagtgttaatgtattttatgtgtgacccaagaca

SEQ ID NO: 384780 - DNA, 605 bp, Homo sapiens
gtgctacatgccattaaaaatcaaaacccaactctgatttctaactttggctgaaatattaatcccacttgtctggactctataatttatctagagcatttacaagagtgactttttagttctcaagtaactcagcaaataatgtatttattttgttccctttttttcaaagaaaaaatggaactttccaaattagcatctaagcaaattggagacacattggggagggctggcctaccaacactttttagtcaaacataaaataggcaaccgctactatatgggagaatgtgagcaatagttctggggtgaagaaatcttcctcaatgtgactgaaaatacacttagtgctagagaagtctaggcactaggtcagatccaaagggcaagtattttaaattaatgaaatttctttcttttacaccaagcttctacaacctgtgacccaatgtggcccaggacggctttgaatgtcrtccaacacaaatttgtaaaatttcttaaaacattatgaaatttttttgcagtttattttatttttattaattttttttagctcatcagctatcattagtgttaatgtattttatgtgtgacccaagaca

SEQ ID NO: 384781 - DNA, 503 bp, Homo sapiens
cacatccaaagattcaggtccataaatgtattaaataatgcttacatactttcactgaggcataaatggtcaattgtattaaaagcagagacaaccagaaactttctcccaaaaaataaaataaattacctaattcwtgaaacccataatgtaacacaaaataattaatgtggaaataattaaagaaaaacagattcaaagatttaaatataaaattactgattatttcttatataatttattgtccatatatgtgcattgtattttaaattctaatttagttttctgaaaatatgtttttatattcttgaatacagctggaaattagagagcactaccatgtttgcaaatatattctgatatggaaaaggcacaagattctacataatccaaaaacagagggtcttgcatccattttctggatagttcagctgaatacagatttgcttttatttttgagggtaacactttcataaactaaatagactttaattccacctgtg

SEQ ID NO: 384782 - DNA, 565 bp, Homo sapiens
tttctctcctcttggtcttccaattaacaagttggcaacagctcaaactcttatctgactcactgtgatattaaatccaacatggtatagtagggatatattgaattttatatttttacttttgattaaaatttgaaaatttatcatgcaatgttgttgttcggggatagaaaagagtttgaaatatttctggacgggaaaaaagtgttaattgaatgcttattggttaggttatttaaaaccattcatgataagaaatcatcagaataagcatgctttactttaccttgaaataaaattaatttcattttaaagtcttttaatgytccttaatattgaatatacaatgctgagataagtaaagtggtatttattcaccatttctcaggcaagtttaagcaaaattgaaaattttaattgcatctgatttgaccattgctaagatgattagtttttcttatcataaggacataattttaatatttacttttggaatatgagtagaaaaatgaggagaaaggatgagcaagaagggaaggatgaagaggcaaaggaggtcagtggg

SEQ ID NO: 384783 - DNA, 496 bp, Homo sapiens
ctttcaatgtttgagaactattattccatatgattattaaaataaaataccaatttcactattaaagaaaacatgtgatttacccactcttttacaatcttaaataaaatgataactattatwgtccctatgtagctgttatttttttttttttaaaaagcctaaggttccctaaatcgccaagttttccagcaacacatgtaaaaaaacatatttgtgctgcaatttaaatggactagtaaaaagaacgttcaaccatttggagctgaaatattcatgagctactcagagaacaatgaaactaaatatcttcagatgtcctagaggaacaagagtcaaggaaacgcatgagtaatgagagactattctattttaaactttttctttattcatccttttttcccattagatgataatatacaatttaatcttgctacattatgaatagaacgtgacaagctcactagtctatgctaaaaattctatcaaagctttt

SEQ ID NO: 384784 - DNA, 496 bp, Homo sapiens
ctttcaatgtttgagaactattattccatatgattattaaaataaaataccaatttcactattaaagaaaacatgtgatttacccactcttttacaatcttaaataaaatgataactattatagtccctatgtagctgttattttttttttttwaaaaagcctaaggttccctaaatcgccaagttttccagcaacacatgtaaaaaaacatatttgtgctgcaatttaaatggactagtaaaaagaacgttcaaccatttggagctgaaatattcatgagctactcagagaacaatgaaactaaatatcttcagatgtcctagaggaacaagagtcaaggaaacgcatgagtaatgagagactattctattttaaactttttctttattcatccttttttcccattagatgataatatacaatttaatcttgctacattatgaatagaacgtgacaagctcactagtctatgctaaaaattctatcaaagctttt

SEQ ID NO: 384785 - DNA, 598 bp, Homo sapiens
ggaaaaacacgtagtcactagggaatctttgttttaaactaacacttatgattatatgttgaaaaacttcatcaaagtatcgatgacataatcttccagaagtagtttattgttagtgctgcttgaagtgattaaattaatgaatataacctcaagaayggtgggccaaagaagatataatgtttcattcacttaaaaaatcagttgcagtgtttcttaaaatgtacatgacaacattgcatcaaatttaacttggagtgccaataaaaaatttagaatcttagatctcacatccaaatcaactaaatcagaaatgtaggggaaaaaaagacaagtgaatatgcatttcaaataagcttctcatatgattccaatgaatgagtttaagatgaattgaagaatatatatgtgcatatatatatatatatatatatataaacacacacacacacccacacacacacacaccccatatatactccaaacttaaaccaatcaaacttggcagggtacggtggccctcaactgtaatcccagcactttgggaggccaaggtggtggatcacttgaggtcaggagtttgagactaggctggcca

SEQ ID NO: 384786 - DNA, 598 bp, Homo sapiens
ggaaaaacacgtagtcactagggaatctttgttttaaactaacacttatgattatatgttgaaaaacttcatcaaagtatcgatgacataatcttccagaagtagtttattgttagtgctgcttgaagtgattaaattaatgaatataacctcaagaatrgtgggccaaagaagatataatgtttcattcacttaaaaaatcagttgcagtgtttcttaaaatgtacatgacaacattgcatcaaatttaacttggagtgccaataaaaaatttagaatcttagatctcacatccaaatcaactaaatcagaaatgtaggggaaaaaaagacaagtgaatatgcatttcaaataagcttctcatatgattccaatgaatgagtttaagatgaattgaagaatatatatgtgcatatatatatatatatatatatataaacacacacacacacccacacacacacacaccccatatatactccaaacttaaaccaatcaaacttggcagggtacggtggccctcaactgtaatcccagcactttgggaggccaaggtggtggatcacttgaggtcaggagtttgagactaggctggcca

SEQ ID NO: 384787 - DNA, 598 bp, Homo sapiens
ggaaaaacacgtagtcactagggaatctttgttttaaactaacacttatgattatatgttgaaaaacttcatcaaagtatcgatgacataatcttccagaagtagtttattgttagtgctgcttgaagtgattaaattaatgaatataacctcaagaatggtgggccaaagaagatataatgtttcattcacttaaaaaatcagttgcagtgtttcttaaaatgtacatgacaacattgcatcaaatttaacttggagtgccaataaaaaatttagaatcttagatctcacatccaaatcaactaaatcagaaatgtaggggaaaaaaagacaagtgaatatgcatttcaaataagcttctcatatgattccaatgaatgagtttaagatgaattgaagaatatatatgtgcatatatatatatatatatatatataaacacacacacacacccacacacacacacaccccatatatactccaaacttaaaccaatcaaacttggcagggtacggtggccctcaactgtaatcccagcactttgggaggccaaggtggtggakcacttgaggtcaggagtttgagactaggctggcca

SEQ ID NO: 384788 - DNA, 505 bp, Homo sapiens
aatgagcattgcatatccctttaaactatcaattattctgtgatgtagttacatgtgtttctgaaaaatgattttacaaatctctatgagtggaaaaaataacttttgaaacccttgaatgattactggcaggtggcaggtggcgtgtgtaacagagaagttagaagttttttgcatgctttctggtttagagtagacaagtctatytcagacttgcaaatctcatgggccaatttagaaaatctcttagaagataaactttgctgtcttgtacggcgtgtcactagatgctaggctataccttgcatatcaatgttgccgtggttgatgcaatgtgtcctgctaggctagaaaaaatgaagagccctacgttgacaagagacattggcagagcagagctgaaagcagaggtgctgatctcctttagttcaagtgctatcatcatctctaggaattaactttactcttttgggtctcagacttcagaggaataactacaaacaaa

SEQ ID NO: 384789 - DNA, 505 bp, Homo sapiens
aatgagcattgcatatccctttaaactatcaattattctgtgatgtagttacatgtgtttctgaaaaatgattttacaaatctctatgagtggaaaaaataacttttgaaacccttgaatgattactggcaggtggcaggtggcgtgtgtaacagagaagttagaagttttttgcatgctttctggtttagagtagacaagtctatctcagacttgcaaatctcatgggccaatttagaaaatctcttagaagataaactttgctgtcttgtacggcgtgtcactagatgctagkctataccttgcatatcaatgttgccgtggttgatgcaatgtgtcctgctaggctagaaaaaatgaagagccctacgttgacaagagacattggcagagcagagctgaaagcagaggtgctgatctcctttagttcaagtgctatcatcatctctaggaattaactttactcttttgggtctcagacttcagaggaataactacaaacaaa

SEQ ID NO: 384790 - DNA, 588 bp, Homo sapiens
tattcataatctacatcatatctccccgggacttccaatgagataacaaaattaagctacatgtttatcccctatagtgtctcatcataaattataaaatgctcaaagtaaaatgaaagcccacattaaaaatgacagggctgaatatgcccttttaatatgcaatttcagaaagagaagttgggaattagagtaaacaaaagaaacattcrtttccacgtcacccctttttattctttctccttgttcggtggtcccacattcaatctaaaaccatgtaaatggtatcacttttaatagaaaatagaaagtatgagcaattgtacagatgtactctgaggagtaaagcctaaagtaaaagaagacttttttagtgctgtacttagagtgctcattaaagcaaataaagcttgcttctatggatttgtaaccaataaagaaagactgtggcttggtgagaagaagtaaacttgcaattgtataagtctagtgtttctcattcaagaagcaatctaccattaatcctaagccatgttggagaaatagagaatgcagttggcttgaactttcaggccactaaacagcaaa

SEQ ID NO: 384791 - DNA, 550 bp, Homo sapiens
aaaggtgtagctaaaggcatcagcttggagataatcatgtgtattaatgaggttctgcctttcaagatgtgatgtatactttgaactaaacatcataggacctgtgacaatgattgatgacagatagatatctgggaggcaaggagtgcaacgagtggtcctgcttattatcactcccagtgaccctgctaggggaatcaatggtgtctgctttcaaatcttacagttcttttcgtctaaagatcgcagtttccagagagaagatacattcatcaggagacgctataaagatcccactaagccaaagactacagctactaccttatcatattgtgcttaaatcttgtggaaaataataggcaaagtaaagagttgccacactggcagggagaattgacactaatcctcatgagaaggtaggtgtgctgcyacctaatggaggaagggagaatatgtttataattcaaggacatttcttagtactggcatatccagttttaactgtgtatgagcaattaccacaatctacctaagaaagatagtaaagagc

SEQ ID NO: 384792 - DNA, 550 bp, Homo sapiens
aaaggtgtagctaaaggcatcagcttggagataatcatgtgtattaatgaggttctgcctttcaagatgtgatgtatactttgaactaaacatcataggacctgtgacaatgattgatgacagatagatatctgggaggcaaggagtgcaacgagtggtcctgcttattatcactcccagtgaccctgctaggggaatcaatggtgtctgctttcaaatcttacagttcttttcgtctaaagatcgcagtttccagagagaagatacattcatcaggagacgctataaagatcccactaagccaaagactacagctactaccttatcatattgtgcttaaatcttgtggaaaataataggcaaagtaaagagttgccacactggcagggagaattgacactaatcctcatgagaaggtaggtgtgctgctacctaatggaggaagggagaatatgtttataattcaaggacatttcttrgtactggcatatccagttttaactgtgtatgagcaattaccacaatctacctaagaaagatagtaaagagc

SEQ ID NO: 384793 - DNA, 589 bp, Homo sapiens
ctcatggttaagagtttgaagaaagctgtacctctatcagataatgtaaaatctaatgaaagattctaggatatcaatggactattttattgatatgaaatctcaatctaaaacttttaaaagtttcttcattttctttactataacactccatcgtttggctatataatcttcaataatatttgactaaattttcataaattttaaaaaatctrttttatagtccttcagagttaaatgcataatcaaccagtttgcttgcaacatgcatctaaaccagaatgaagagccacattctttggtctatttcatgttctctccatcttgatcttaattgcattattgctaatattagtatattaattttttcatcttacattattttaagtggtgcagaaatgtgtaataaaacactcaaatgtatctgcaaacaagttctatttttatataatgatggttgcttgacggaggctgaaaaagttgactagtaggcagagagggatgacagtgcttgatattcacttgctggatgaaagtctaaaagaaataagaaaagtgatttaaaggtagcagagtaaaagttgaggtc

SEQ ID NO: 384794 - DNA, 607 bp, Homo sapiens
tatctgcaaacaagttctatttttatataatgatggttgcttgacggaggctgaaaaagttgactagtaggcagagagggatgacagtgcttgatattcacttgctggatgaaagtctaaaagaaataagaaaagtgatttaaaggtagcagagtaaaagttgaggtcccataatacacatagatgagatkggttctagaaatagcctgcctgtatattttgattaaagagtaaggtttaaatatcctggctgttgagagaagaaaaactaaacacacacacacttgttgaaaggtgtggaaatctctggtttagaatttgatatcagttccaagaaagtggcatctcttatagaatactagtaagctataccacatagtttgattctgaacttggcatagatatgtgacatgggaataaatgtacacgtgcaaaccagctcatttgatgaggtcaaaatgaagccttttgactaaaaccaccagcttttgaccaaaggtaagttgtcctttcccactagctttttatccagtactaccaccttattttggttcctcattctggtggactgtggtcattagtaaaatactgtcatcaagcagaaatc

SEQ ID NO: 384795 - DNA, 553 bp, Homo sapiens
ctataagcattatagtctcataagcaaatgtcatgagcttcttctagctttttcttcatgctcacaaaatggttgaaggagatccaagcatcatgtttctagttaaaaagaaggtgcagagtaaaaggcaaaaggcaaacggacaagccaaccaagtttgttctctttcctagatgttctacttggtgacttcagcttatatctcattaatgtgcatcataggattatctcygcaagggaacctggaaaatatagaaatttgtttgtgttaagctgggcaccttgccacctccataaaaatgtgctctataggtacagagcaggagataatcattattaataggcaacttatagtctctgtttcaagaggtcattctggtacctgagaaaattgacaatctctggtctaaactcttacaggcctctcttgccttcatttaagatgaacttgatagaataaagattattgttgttctctaatctcctgggtatgagacagagaggtaacagatggaatgatttctttctggcttccatagcaaaccaaagcatg

SEQ ID NO: 384796 - DNA, 638 bp, Homo sapiens
atcctggtggaaaaaaacagctaatgaataattaatgaatcactgaggggatggagacaaaaagttacattcactcttcagacctaccatgtcactctcaaaggagtctattgcttgttctttttctgtatgcatgtctcccagtacatgcttgatgcctgaaacactctatcttactagataractaagtggcctgaatgtggtgtgggcacatcttcctcctagctattatttgctgctctctttcttgcttacttataagaaagaacaagtaccttcaagcaatatctacaccttataaatgtaatctacctccatcaaagaaaatggggggggcgtgggaattggcaatgtgtcacttagttctatacctgtgaaataatacaacatggaggctagcatgttgcctcagtgagacagcagatactcagaaagagaaataccaagatatgggagcttccatcacccttctaagggggatgctaaattggaaatttaattccaactacctacatatttggctctgatagtcaagtagctcaccaaaaagaactaatgcatttttatagtagccatgaatatcttcattgcatttcactcatctatagagggcaacaagcagaaataaaaattcaac

SEQ ID NO: 384797 - DNA, 401 bp, Homo sapiens
cagtagccagtatgaaactgaagcctcttgaccacagcctccatgagagtaatggaatcttgaccccctagtgaaccacagcctccatgagagtaaaattcaagatggagccttgacacccagtggagcctcgagatgactgcagtcttccaccaacagcttgattcatgaaagaccatcagccagagccacccagctaaggtgattctaggcccctactcctagaaaataaatatttgctgttttgactgccaagtgtttgattaatttgttacgcagcaatagataaataatgcagcctaacactgtcctggtcatttttaaaaaagaaattgttttaatttyactaaatcacaaattttaaaacattgatacagcaaggagaaactttccagaaaaaa

SEQ ID NO: 384798 - DNA, 576 bp, Homo sapiens
aaaaacaacaacaaaagagaaaaacaatatttcagaaagactttctgcatcagatagtgatgagttgcattgttttagaatgaaagcaagaagcatggttttgataaaatttttatctattttatttaattgattaaaaattaatgatgagagaataaaataggcaaacattttttgatgcttacatttaaaagaagagagaaatttgataattaaatggattcaaacaatagccctgaagagaattctaaggggtcattttgtttacttctcctttttgcttgtttttaacatacaagaaatatgaagcccaggaaggttaaatagttggcaaaaactgcaaagcccattaaaggcagagcttggagaggacccaagtttcttgacatctaatttactattakttcatattatatcatcctaacttagacgtttcttatagcaaagtaaacctttggtttgaaaattgcatgtccaagtacttgccaatgggtctcttgtaattttggggggtgaggactgggaggtggggagtagtgaaatgaatgtttgaaatgtaaaaaaaggaactgaatc

SEQ ID NO: 384799 - DNA, 655 bp, Homo sapiens
acctgtctataacatgtagtttcaacttgtttatctttggaacattctactttcggtatatttggggttgatattccttgatagggagaaattaagtcactatttgcactgtttatagaattttatttacccacacagtattatactttccataaatttatagtacattcaggcatgaaaaaatgttttgaagctattataaaaatgctttgactatggatgattaataatctgaaaagaacaagttatcttgtttataggtatgaaattaatcwagagcgtaatgaaatggctaaagaatttcattaatattaaactgtcttaatagatatagaatgttcagaactacaaattataaatcttttgtttagaaaacacacattaggagggacagtcagtaatatggttttgctgtgtccccaccccaatttcatcttgaattgtagctaccataatccccatgtgtcatgggaggaacccagtgggaggtcattgaaccaagagggcgagtttttcccatgctgttcttgcgatagtgattaagtctcatgagatgtgatggttttataaagggtagttcccccgcacatgccttattgtctgccaccatgtaagagtgccttattcctccttcaccttctgccatgattgagag

SEQ ID NO: 384800 - DNA, 563 bp, Homo sapiens
aaagccccaagtcttggaagcttccatgtggtgttggtcctgcaggtgcacagaagacaagaactgaggtttgggaacttccacctagatttcagaggatgtatggaaatgcctggatgtccaggcagagttgtcctgcaggggcagagccctcataaacaacccttgctagggcaatgaggaaaagaaatgtggggttggatcctctacacagagtccccagtgggtcactgcctagtagagctaagagaagagggccaccattccccagcacccccaatggtaggggctgacagttagcaccatgtgcctggaaaagccacagtcaatgccagccatgaaaacagcctggatgtgagacatgaagtcaaaggagttcatttcrgaactttaaggtttaatgactgccctattagactttggacttgcacctatagcccctctgttttggccaatttctcccatttggaatgggcatatttacacaatgcctgtacctccattgtatctagaaagtaactaacttgcttttgattttacaggctcataggtggaagggactt

SEQ ID NO: 384801 - DNA, 547 bp, Homo sapiens
tttcaccacaggtctgttttcaaatagataatgagattatataaataattaccttatataaacataaggttactcattattgaaagcaattttctttttttgtttctggtttattatggttaagagtgagcctttgttttagatatttgaaaacaaaatgtgtgtgtgcgtgtgcttktgtgtgtgtgtgtgtggatatgtgtatctagggaggtcctcaaattcaaaaattataatacaaggttgtaatgtcagcacttcctattgcatagttttataatggggatatatagctatgcattaaaatgcattattgaaatggaaaatcaggatgtgttaaaaatgaattagtaattatattaagatctgaatgggaactagcatacaatgtaacttaagcttttgaaaaataaaaaaaaacagaaaataattaatgataagttagtttcagtattacattgataaatatttccagaataagctataaaaaataaggaggtagatttattattttaaggttcatactaaaagattgtaatatttactt

SEQ ID NO: 384802 - DNA, 595 bp, Homo sapiens
tcattcttcagaaggtaaatgtgctctggcatgccttaacttataacaaattaatcaactcaatacctgctacattttccctcacaatttggaatatataaagaggcacatactactatggaccaatacctggtcatatatgagattgaaggacctttacttacgaggcttaaaaataaagactgcccttcatgtcagttgcaggtttatatctagttctatagtattaactgaggtgtcttttcctatgttttctgtgcatgatgactttttaaaaatcaaagacagagcagcagccagagtagtctagtttcatggcacacagaatggaggatattgctgaacccagatttaaaaaaaaaaagaagtcaattcttatttttttaagtatggccctgagctcatctcagagcataaacaatagaatttagaatatcttttatgactccgtctggcacctcctaaactagatcaagattctctagctcagggaagaagggcaaaggatgagaaggcacagagaggatataaacagagagkttggtagtgccaggctctgaagaaggtccaacttggaaggtcatttcagacaggc

SEQ ID NO: 384803 - DNA, 608 bp, Homo sapiens
attccatagttatagcccatgttaataggagggactgtggtgctgcaacaagagctcttgaaagaaaactaaaagaattgagttataaatctgtcactgagactgtgaagtttaatcctagaagaaagttttgtcacttctcagggcctcccatttcctcacctataaataaagtgaggatatgagactcaagtatttcaatagggatctactggcatttgaggaggcacaataatttcttatataggactgcccctggcatcacagaaatttagcatttctgacttcaggcaccaaaagcctayaactctttccagttcttataataactgtatttcccaatgtccctatgcactacctagcagaaaggagtggcttggttgacagccactggtagatgatctcaagttctgtgaggccctatggctctattgggccaggactgtcagcatcagcacatggcttgagagcaggagcagaggaggtaatctcaggtcagctctgccattgtaaagcccattcaagatcatattcttgaatggaagtcatattgttggcatctttaataggcctcttggaacattgtttaagaaagaagttttcagact

SEQ ID NO: 384804 - DNA, 596 bp, Homo sapiens
ctctgccattgtaaagcccattcaagatcatattcttgaatggaagtcatattgttggcatctttaataggcctcttggaacattgtttaagaaagaagttttcagactgaatttacataatgttcagaaaagataaatgtgctgaaataccacacagcagccaccactatccaatcagcaatagggtcagggtggccactccaatagccctacccaagggatgagcctatatgcagcgaccataataagcaatgggaagagcttccaatggataacaaatccacagcctggtactctctgcctcctccctattaccagtaaccccagtgaactcaagatacgcctcctggtcctcagttcctaactccttgcatgaaacctctccaacccttctacctaaccaaaaaaaaaaaaaaaaaaaaaaataccatatcttaagtmctggctcaggagccatgttgcccatgaaggccactcttccaatccctcagtccaaacagattgtccttctctctaaataaatgtagcatttatagtctctaatgaacttttcattaagttgtacagtcatcgactgttccataatcacaccatg

SEQ ID NO: 384805 - DNA, 596 bp, Homo sapiens
aaaaactctcaaaaactaggcaytgaagaaacatacatcaacataacaaaggccatgtattattacaaacccacagctaacatcatactgaatggggaaaagctgagagcctttcctctaacaatgaaacaagacaagaatgcccactttcaaaactcctgttcaacatagtgctggaagccctttacagagcaaccaggcaagaaaaagaaatagacattcaaattggaaaagaggaaactctattttctctttttgcagataatatgatcttatatctagaaaattctaaagacttcacaataaattattagatcttatcaatgaattcagtatatttgcagtaaaagcaacatacaaaaatcaggagcatttctatacaccaattatgaactagctgaaaaataaattaagaatgcaatcacatttacaattgctacaaaaaagataataaaatatttaggaataaactgaatgaaggagataaaagatctctacaagaaaaactacaaaacggaaccaaacaaacggacagacatctcatgttcatggatcagaagtattactatcatgaaaatgaccatactgcccaaagc

SEQ ID NO: 384806 - DNA, 603 bp, Homo sapiens
taaaaataagacctcaaactattaaaccactagaaaaaaaaagcataggaggaaaacttcaggacattggtctaggcaaagattttacagccagatctcaaaagcacaggcaacaaaacaaaaatagacaaataagactatattaaactaagatgcttctgcttagcaaaggaaatgatcaacagagtgaagagataacctgtccaatgggagaaaatacttgaaaactattcatctgacaatgtagtagtattcagtatataaaaagaacttaaacaactcaacattaaaaaaatagataatcctattaaaaattgggcaaagtaaatgtacagacatttctagtcaaatgacccacaggtatatgaaaaaaaatgttcaacatcattaatccttagggaaatgcaaatcaaaaccatcatgaaatatcatcttaccccaattataatgcctatgatmaaaaagacaagagataacaagtactaatgagaatgtgaagaaaatgaaatcattgtacactgatgttggtggactttgttcactctcttttattcttttattaataaagtataaatatattatatatataaagtatataaatga

SEQ ID NO: 384807 - DNA, 488 bp, Homo sapiens
tgagctgctgattctaccagtcttattatagccacattcaattatttaattgtactaatgctatttatttctgtaaatttattttcagagagtgatctaaagggtaaaaatcaggctctaagttatgttttgatagctttcagttcggaatcaacattcatcatgcataaggcatgaaagtatggttaaaatggtttattaactcttgtgaatcataagcataaaagaatcaattgatatatttctagtaaatgtaataaaccccaagataatgcagtacttaggtcaatcttttacatcaagtaatcccaggaaaactggagattgtaaataaatctcagatatcttgctcattttagtttttgtttatctggatgcatttygctcaatccctgaaactcatagtttcacagactcattgagattttcatgaactataaaagcaattaaatatttaaatacaaaattctcaaattcaagatattact

SEQ ID NO: 384808 - DNA, 418 bp, Homo sapiens
gagcctggtaactccattgggtggctagacccagaagaacaataacagtcactgcaatctggctctcaggaagcccatccctaggggaaagaggagaacaccacatcaaggaatcactamgtgagacaaaataatctgaatagtaggagtttcagatctttctgctagtgggtagtttctcacagcagagacccaattgcagtgccaggtgcagtagggaaagtctgcacctataccccaataggcaagcagcctctgtgaccatgaagggccttggaaaaggagtccttgttccccctggcactccactgcagacacagctggggcttcccccacaggaacacacatggatacacctgtagacagcctttctggaacactccagggtgagtatcgcccacaagaggagcaaacccca

SEQ ID NO: 384809 - DNA, 552 bp, Homo sapiens
acagtcactcattatttatgtttctaatagaaaaagtaaagagattcttcatttcaatttcatattctacttctgtttacacctagcacactatcattttattatggttaggatacgatattgctaagagcgttgaagaatctattatcaagcttgaagttacttttaaaaaagaaatatgtaagaggtaaaaagrtgaaaaaaagaagaaaagaggactaggaaaatgaggtaagaagagtggggaggcaggataggacagaacgagaacaaaattgaaaaagagagggtaaggcagagaagattgaagattgagcagatacgtatagggcagaaagtgagaagtagagaaacaggataagaaggcaaagaggacatatagtgaagaatggaaggaagaggaaataagtggaactctagattccactgagaagtgtgggatagttaactgtgttgacagacgtgtagattggtgttggttagactcaaactctatcatgcagtaactcgatgaacttgggctagttttttaaccttggggatggcaacata

SEQ ID NO: 384810 - DNA, 552 bp, Homo sapiens
acagtcactcattatttatgtttctaatagaaaaagtaaagagattcttcatttcaatttcatattctacttctgtttacacctagcacactatcattttattatggttaggatacgatattgctaagagcgttgaagaatctattatcaagcttgaagttacttttaaaaaagaaatatgtaagaggtaaaaaggtgaaaaaaagaagaaaagaggactaggaaaatgaggtaagaagagtggggaggcaggataggacagaacgagaacaaaattgaaaaagagagggtaaggcagagaagattgaagattgagcagatacgtatagggcagaaagtgagaagtagagaaacaggataagaaggcaaagaggacatatagtgaagaatggaaggaagaggaaataagtggaactctagattccactgagaagtgtgggatagttaactgtgttgacagacgtgtagattggtgttggttagactcaaactctatcatgcagtaactygatgaacttgggctagttttttaaccttggggatggcaacata

SEQ ID NO: 384811 - DNA, 516 bp, Homo sapiens
ccctccctccctccctccctccttctcttcccttcccctcccctcccctccccttttctttcyttctttctttctttctttctttctttctttctttctttctttctttctttctttctttctttctttctctttcttctttctcatttcaacagagtcagtggatcactgtagcttcaaactcctgggctcaaggcatcctcccacatcaggcttctgagtagctggaattacaggcacacaccatcatgcccagttaattttttgtactttttgtagaggcagggttttgccatgttgcccaggctggtcttgaactcctgagctcaagtgatctgcccacctcgacctcccaaggtgctgggattacaggtgtgagccaccatgcccagcctcaacattcttaaaaaacagaaagtccaactcaaaacttcatatctggccaaactaacctaataaggaaaggagaaataagattcttttcagacaaacaaatgctgagagaattcattacca

SEQ ID NO: 384812 - DNA, 516 bp, Homo sapiens
ccctccctccctccctccctccttctcttcccttcccctcccctcccctccccttttctttccttctttctttctttctttctttctttctttctttctttctttctttctttctttctttctttctttctctttcttctttctcatttcaacagagtcagtggatcactgtagcytcaaactcctgggctcaaggcatcctcccacatcaggcttctgagtagctggaattacaggcacacaccatcatgcccagttaattttttgtactttttgtagaggcagggttttgccatgttgcccaggctggtcttgaactcctgagctcaagtgatctgcccacctcgacctcccaaggtgctgggattacaggtgtgagccaccatgcccagcctcaacattcttaaaaaacagaaagtccaactcaaaacttcatatctggccaaactaacctaataaggaaaggagaaataagattcttttcagacaaacaaatgctgagagaattcattacca

SEQ ID NO: 384813 - DNA, 563 bp, Homo sapiens
gcctcctctctgctgacagctgcagagacaactggatgacctgcctgcagagaagagtttcccactccaggatctcctctctgctaggagctgaacacctgttgggacaccctggctgtggaaaggagctgccccctgggggagactgagctgttctatcactcaataaagctcctcttcatctagctcaccctccacttgtctgtgtaccccattcttcytggtcacaggagaggaactcaggacccatcaaatggtggggctaaaagaactgtaacacaaacagggctgaaacatgcctcttgcttgccacattatgagtgaaaagaagagaagagctgcggcccttcaggtagccaagacttgggagctacccaagccaggactgtgactgtctctttggggccctgcgattcctggtgtcttcaagtgtccaggtgccactgtgttccccagtgccagtgtggaagctgcttgctgtgcacctggtccagttgcagcctcgtagggagccgatgcccatgacagcacctggagctgctcaccccactgcagcagctggc

SEQ ID NO: 384814 - DNA, 563 bp, Homo sapiens
gcctcctctctgctgacagctgcagagacaactggatgacctgcctgcagagaagagtttcccactccaggatctcctctctgctaggagctgaacacctgttgggacaccctggctgtggaaaggagctgccccctgggggagactgagctgttctatcactcaataaagctcctcttcatctagctcaccctccacttgtctgtgtaccccattcttcctggtcacaggagaggaactcaggacccatcaaatggtggggctaaaagaactgtaacacaaacagggctgaaacatgcctcttgcttgccacattatgagtgaaragaagagaagagctgcggcccttcaggtagccaagacttgggagctacccaagccaggactgtgactgtctctttggggccctgcgattcctggtgtcttcaagtgtccaggtgccactgtgttccccagtgccagtgtggaagctgcttgctgtgcacctggtccagttgcagcctcgtagggagccgatgcccatgacagcacctggagctgctcaccccactgcagcagctggc

SEQ ID NO: 384815 - DNA, 563 bp, Homo sapiens
gcctcctctctgctgacagctgcagagacaactggatgacctgcctgcagagaagagtttcccactccaggatctcctctctgctaggagctgaacacctgttgggacaccctggctgtggaaaggagctgccccctgggggagactgagctgttctatcactcaataaagctcctcttcatctagctcaccctccacttgtctgtgtaccccattcttcctggtcacaggagaggaactcaggacccatcaaatggtggggctaaaagaactgtaacacaaacagggctgaaacatgcctcttgcttgccacattatgagtgaaaagaagagaagagctgcggcccttcaggtagccmagacttgggagctacccaagccaggactgtgactgtctctttggggccctgcgattcctggtgtcttcaagtgtccaggtgccactgtgttccccagtgccagtgtggaagctgcttgctgtgcacctggtccagttgcagcctcgtagggagccgatgcccatgacagcacctggagctgctcaccccactgcagcagctggc

SEQ ID NO: 384816 - DNA, 642 bp, Homo sapiens
tgtacaaaaatgagacagtcctgctggtctggatctgtgtcagcctggtgtctttcactaggggatgggtaaataaaacatgtttgtgtagggtggaataccacgcagccgtcagaagtaatgaactgggtcttcattgagcaactgggaagatctcacaggcaatccagaaggaagaaatgtaagacacagaatggaattgataccaggaatccatttgtttaaatttcaaaaacacaaacagcactgtgcttttaaagagcattcatatgtctaaataaccaaaaccccaaacatttgaatgaaagaatgttttgacccctcaagtttgacacaggagacattttgatggtggcttattatccagaactgtttgctatagagatgcttgcctctccctgtgcccctagggtgggatttggggatggggtgaggagtctgctttgctgtaacttggcagtaagagcaaactataagtttaatggctgctttagaggccacatcaagtatcttcatgtcaaaatggtttcataaagatgtcacttgctctcccagaaataagttaaaagycctgttatggtaagccctctgggctatggaggggcgaatcttatcttctctgtgagagtcatttgccctgtg

SEQ ID NO: 384817 - DNA, 556 bp, Homo sapiens
aaaatgtggctgactccaggactggcacagggaaaatacaaagagtctctggacatcttgttgcaccagaaagcagagaagtgttgaaggactgactaatgagacttgatgaaaggacaccactactgtcttggtggggctcccagtggccaaatttggtttttctctttatttttttgagacagagtctttctctatcatccaggctggagtgcagtggcatgatcttggctcactacaacctctgcctcccgcgtttaagcgattyttctgcctcagcctcctgagtagctgggattacaggcatgcttcaccacacccggctttttttttttttttttttttttttttgtatttttggcagagatggagtttcaccatgttggccaggctggtcttgaactcctgacctaaagtgatctgcctgcctcggcctcccaaagtgctgggattacaggtgtgagccaccacgcccagtggaatggccaaatttgaaataatttgggcaccaaatataataatgatggtattagattataagacatttactgaagga

SEQ ID NO: 384818 - DNA, 556 bp, Homo sapiens
aaaatgtggctgactccaggactggcacagggaaaatacaaagagtctctggacatcttgttgcaccagaaagcagagaagtgttgaaggactgactaatgagacttgatgaaaggacaccactactgtcttggtggggctcccagtggccaaatttggtttttctctttatttttttgagacagagtctttctctatcatccaggctggagtgcagtggcatgatcttggctcactacaacctctgcctcccgcgtttaagcgattcttytgcctcagcctcctgagtagctgggattacaggcatgcttcaccacacccggctttttttttttttttttttttttttttgtatttttggcagagatggagtttcaccatgttggccaggctggtcttgaactcctgacctaaagtgatctgcctgcctcggcctcccaaagtgctgggattacaggtgtgagccaccacgcccagtggaatggccaaatttgaaataatttgggcaccaaatataataatgatggtattagattataagacatttactgaagga

SEQ ID NO: 384819 - DNA, 528 bp, Homo sapiens
ccatttactgacttaactaatttaagctgaatgcaaatgtcagattttaatttgtyccttaccaggtttttaagtatgtaatacatcatatctaaagaccaatattggcaaccataaacaggaaaagacaactgtaaatttattagagtcacaactacacttactccaccaccaataattgtgggcttcaatgagttagttgacatctctttgattcagtgctctgggttttctatgtaagttgtaacagtttgaatgcaaccgttttgttactgagggagcagcatcaactgatactttccctgaatgaagaaaatttaagattttaccaaaggtaaataaacaaaaacaaaaacaaaaacttccatatggagctttaaataaatttcctggattgaggtcttaggccacgtccttacaactgcagagacctacaagtgcaggcctcttacatatattaattattttgaaacttttttcatatatggatttgaactctcaatcagaaatacaatgcttgattataca

SEQ ID NO: 384820 - DNA, 573 bp, Homo sapiens
tggtttgcctctgtgtccccacccaaatcttacctcaaattttaatctccacatgtcaggggagggaccaggtgggaggtcattgaatcatgggcgcggtttctcccatgctgttttcatgatagtgagtgagttctcataagagctgatggttttaaagtgaggcacttcatcgtgctcgcacatactccctcctgccaccttgtgaagaaggtgaagaaagtgcctgcttccgcttgcaccatgattgtgtttcctggggcctccccagccatgcagaactgtaagtcaattaaacctcttttccttataaattacccaacttcaggaaagttcttcatagcagtgtgaaaatggactaatacacttaytaatattcaaaaagtaatgtactaagtgatcacttgctctagttttgaactacaaactttggcaggtataaaactttagataaatgagagagagaaagaagatagacacagatgtactcatataatgcattcagtgttttctttactcaactcttcactaattagatttgaaatggtcgaaagaaagaaaatgaagactgta

SEQ ID NO: 384821 - DNA, 603 bp, Homo sapiens
tttatgacagagtattaacaaagccagatctctatgtggccaattatttaatttcattggtccataatttcttcatctttaaattgtaaattatattatatatatattttttcagygtgcattacatggtactattataactaatgaattgtataaatttgttttttcaaaacactgaacagagaaagaatgttgttatttactatgttacctttccaaacatgtgttgacaccaaaatcacctgggatcctggttaaaaatccagagttctgagttctattccagggattctgattccaaatgtctgtagtgggtccaggaatctacattcctcacaagtgctcaatataatccctgagtatgatctaaggtctataatttttaaaaaagagaatactgctttcaagatattagcttatataatagctgttagtttaaatatttggcgtcatttgtaactgcattggtttaaacttctctaagtagtataaaaagtgaccaaatattttttcctagtaacttatagattattttccactctcaaaaaccctagtttttaacttttttgtgtgtataatagactctttgtagaatttaatgaa

SEQ ID NO: 384822 - DNA, 540 bp, Homo sapiens
acatttaagaggatatcccttttcttagttctaattacatttgaactgctgatggtcataytagagaacaaatgtatcaccaaaatgaatattggtgagtttctttagaccaggagcaaaaacctttttgctacaattcatgattatgcagatagggcactgtacaccctgtgttaaggtcactttagggaactaaagagccaaactaccaaattagctcatctggattagtgcagattaagacaaggatttatgtggcattcttgtttcaagggtactgggtacggacttaatgaacacctcagtaactacttggaaaactgaattgaagttgtgattaaataaatgcaaacattctaaaaatctgttcatctttcttgggccctaccctaagctatagccttcttgttggcaccaatccttcttactgctatagagatccagtgaatctcatggataaattaatggaaactggtacaaactagtgaatacacacaggatgcaaaacaaaatcctccgggagatgataagacctgctgc

SEQ ID NO: 384823 - DNA, 601 bp, Homo sapiens
tggactataaaatggccctcagctctgcaatcccttatgtattgtgcgtcctttgtagtcctctatagatgaagatagttacacctgaatggcttatgaagtagaaaacaagcctcgtgctttctagtaattctgtttatttctacataccacttcagtaagaagtattctgtattgttctaggtggagttcctaagcagaactgctaatccagaatgacatttaggattctgaatgtcaaaataagtttagtactccatggagaaaatttaatgagttgttaaaaaattcctctccatcctgtgctggagagaatcaatgcagactgggctggaggcccagtcctttaaagattactggatataattaatgatttactagaatgaatgtattctcttgggagaaaatatgattgtctgctatttattagctgaagacaatttaaaaatttattctcccttggatgtaatacctataaagtgccattggagtggttttcaaagtgagaaaaagcatgcagcagttarcattttcacttttctattctatctgtgatagttcccagccagtgataaatgctcagtgtatgaccactataaag

SEQ ID NO: 384824 - DNA, 673 bp, Homo sapiens
cctacattttgagtagtttttatcaaaatttatggaataaaaataacagtgcatttactgaacgcgctataaatgcatagcagataaacttttatgtttgcatttgttcctcacaaaatttttgcatgagtaaataaaggaatatatatgctttagctcagttacaagcagaaataatattttcctttattttacatctttctttaaactcaaaattcctatgataaaagcataataaaattatggaaagattataaatgaatgatttcttattctaggaaatatatttcaatttagtttttttaaattagaagtactgaatatataatcttaaattggccacagcagtattcactttcttgtttttattatttgtttttaagcaagaaaatttataagatgttcaaagcaaaatataaaaaaatattataggccgggtgtggtggctcacacctgtaatcccagcactttgaggccaaggtgggcagatcatgaggtcaggartttgagatcagcctggccaacatagtgaaaccccatctctaccaaaaatacaaaaaattagccaggtatggtggtgggcacctgtaatcccagctactggggaggctgaggcaggagtatctcttgaacctgggaggtggaggttgcagtggctgagatcacaacattg

SEQ ID NO: 384825 - DNA, 516 bp, Homo sapiens
tgacattaacctttgattccaatgatgtgagccaaactaagagacttggtattgatcagatttctaacatattgatgatttaagctgtatcatagtatatcagcataataaaactgttatataaccagaatagaatggtctttctagagcttaaatttcaagttgaaatggtatatgaattaatttctcrtctttttaacacatgtaacattcttcaattttgtttttaggtagacttaatgcttacatgtttaatactgttgagtaaaacaagtactttgcctcattttgattaaaaggttttggtaccatgaattatgaattttataagtgatatggtctggatctgtgttcctacccaaatttcatactgaaatgtaattgccagtgttggaggtggggactgataggaggtgactggatcgtggtgtggttttctcatgaatggtttagcaccatcccccttggtactgtcctcatgatagtgagctctcatgatatctgattgtttaaaag

SEQ ID NO: 384826 - DNA, 591 bp, Homo sapiens
tatagcaatgtgagaatggaataataagtaaccaaatgttytattaatttagaatttattaattctaaagaaacagaagtgatagaagagattgagaagcaagtaaaaaacaggaagaaacaacaacaacaacaacaacaaaagaatgaagaaagaacaaaaggaaatatccagctcactataaaacatgggtactatggcaaaacaattttgggacagacatattccaattttcaatcacttaatagaaactatctaatatgataattaatgtagactctcggaaactctttttgtagctgatgggtaggtcttttagccatcactgctgttatttatcagatttctacagtattgactggaacatcaacaattcaatttctactgcattaggattttcttatatttaaatgtatctgcttttagcattttccaggcctaagattgtaatgttctatgtttaaaaattctaaaatcttacttgagtatgtgtctagatacttaaatgaattcctctttttctgtgttaagaaaaaatttggacttgcccataggcagccaaagtctgcctgcaaatctgtaacactactg

SEQ ID NO: 384827 - DNA, 591 bp, Homo sapiens
tatagcaatgtgagaatggaataataagtaaccaaatgttttattaatttagaatttattaattctaaagaaacagaagtgatagaagagattgagaagcaagtaaaaaacaggaagaaacaacaacaacaacaacaacaaaagaatgaagaaagaacaaaaggaaatatccagctcactataaaacatgggtactatggcaaaacaattttgggacagacatattccaattttcaatcacttaatagaaactatctaatatgataattaatgtagactctcggaaactctttttgtagctgatgggtaggtcttttagccatcactgctgttatttatcagatttctacagtattgactggaacatcaacaattcaatttctactgcattaggattttcttatatttaaatgtatctgcttttagcattttccaggcctaagattgtaatgttctatgtttaaaaattctaaaatcttacttgagtatgtgtctagatacttaaatgarttcctctttttctgtgttaagaaaaaatttggacttgcccataggcagccaaagtctgcctgcaaatctgtaacactactg

SEQ ID NO: 384828 - DNA, 611 bp, Homo sapiens
atcatgtaatgtgccagttcaatcaaaaacattggttttataattttgtgctgctacatatccacagatgaacaaaaggctaaaatgaccagttgtgtaatacaattaagcacataaatattgtttctcttttccgtgtaggctcaattatgctttatactgttactatgcatatcagtatcacaaaatagaaacttttgttttggtccttaatggtattagaagtttatgcagaatccatatttttgcttataaatgctgagaagttctaagcttaaacatttgttaataagctgcctgcaactctatattctccctctttgtcttctaagaaaaacagaggaaaaggttcttgataacatgaaaaagatatgctraaaatccagatatttgtttcatatcttccctgctttatttcaggctgattgtaaaatacctataaggatgactcatcattcttcatcacataccatgactaataaacaattagaaagaagagagctggtgggtgcataacacgtaatttcaaatgatcataggcacagataacattaggttattgctagaaatagatagtacaaataaagtataagttcagacaagttggaagg

SEQ ID NO: 384829 - DNA, 482 bp, Homo sapiens
ttccttatcagtgaacgtgttcaagcaagcaaaacctgaatgaccatcctgttatgaacattayagaatcaattctggttttgactgatgggaggctggaatgtatgactactaagatgttgtccaactctaagattacaaattttaatgcattaagcaattaattattttgtaactgtatttaaaaaattaatggacaggcttctgtgtatcaagtagtaggaacacactgggaatactagaaaaaaatatatagccctcatgttgaaggaggtgacagacaaaccaataacaataatacagtgtggtacatgctgtgatggtgataaggacgggaagttgtggaggtacgtcaacatctcttgccacactaggaagccaatcaacactgcctggaagagggtttaaaggacaagtaggaggtagtcaaagaaaggacaagaagctttctaggaagaaagagcctagatgaccaaatccta

SEQ ID NO: 384830 - DNA, 451 bp, Homo sapiens
aaataggtactacatgagtaaaaaccttctgagtcatacatatttaaaaagaaaaatggatggatgcaaaacatttgtattacatgcattttaaagtatactaacctactacatctgtggagcatcaacgatctagttaattatgttaaatactagtttttctccagggaaaggtaaatattagtcatatataagtaaygtatgagtcatataaagcagagtcatttctcttctttctttttttctaggggtggatttggggcaggctgcttgtgttgtgctgtgcccactgcagctgtaattgtgattcagaggaattctaagttgaaagtagccttattcatgatatcagttgagttgggccaaaaggaagcatacagagaatccttgtcatctgaaattcccttgcaacccaagtttgatccaactggatcagccttcatatactgtt

SEQ ID NO: 384831 - DNA, 623 bp, Homo sapiens
taatattttgaatacagtttgtttttgaatcatgctgtattgaaaccccatctctactaaaaaatgcaaaaattagttgggtgtggtgaaacgcacatgtaatcccagctactcaggaggctgaggcaggagaatcacttgaacccaggaggtggaggttgcagtgagctgagatggtgccattgcactccagcctggttgacagagcaagaccctgtctctggaaaaaaaaaaaaaaagagagagactaagcaagatttttcttggagatggggcttccagttgtggggaggaggaacactggaagagggacaagtaagttggaatgtctttccagacacattatggaatacataaagaagtcaggctcctgtgtcataaaactsaactttaaaaaaaaaaatcccacagtatcattttgtttttgctatgaaagtatatatttgggagtgcacgtagaagaaatgaaatccagtctatttaaaagaatattaaagatatcaggatgctgatttgtgttaaagagcaattagcaagaagtagctatagtcaaatgataaattgaggcctaaaacttgcaagcaaacaaatgggcagtttcaggttagactttccctgactcc

SEQ ID NO: 384832 - DNA, 649 bp, Homo sapiens
tctcttttgtcattttgaagtggttttgtttactatctgttcaagagacaggctgactttggcacaaaagtttgtttttgtccctggtttaccttctttatacttccatttgacaacatgcttttctgcatatttacttctcagcatattttagtagcaaggcttaggtgcaagagaccamtggaaagattgatcgtttaccactggaattgtcttatttgaactttgctacctttagcaaaggtttggactgattgtcgacccaggactaaaaatcttcagattctctgtgcatattaaatcagattaaagacctgtgtcagtctgtgcagactgttctaacaaacataaaagaacagaaatttatttttcccagttctggaagcagtgaagttcaagatcaaggcagcagcagattggttttgctgaggtcctgcttcctgttttttcctccgccttcatatggcaggcagaaggtgtaagagcgctctctgtgatctcttgtataaaggcacagtccactttttatatttctgggatctcttttataggggcagtaatcaccttccaaaggccccacctccaaatatcacattgggggattaggatctcaacatatgaatttggggtggtggggacactagcattc

SEQ ID NO: 384833 - DNA, 550 bp, Homo sapiens
actacgctattatgacaaaagaatggacagctaagatgcttctcgtatcatccttttcacaaaaatccattacccattgaggcctatcgtaatcgtaagtttatttcaggaatcactgatttcttctcttccaacccaaatcttacatttccttttwggttcatttaaaattgtgcctttttcataatggcttccaaaattcccacaagcacataatgtcataaagctctttcctttctcagaatcgccaacatataaatcaaaaaacaaaaaccatcattatactataatgcctgttattagatacgggcttggtccatttttcagtaatttacattcagttatttattctaatatttgcgaatttgaaaagcatatgacatgattctgataaaatgattaagaacctataaagtgccagtctttttgagtacattattttattcaacaattctgagagtcatgtgcctccattttacagttgaggaaataggcctaattaggtttagtaaagtgcccaggggaacacagctggtaagtggtagagcag

SEQ ID NO: 384834 - DNA, 610 bp, Homo sapiens
tctttttgagtacattattttattcaacaattctgagagtcatgtgcctccattttacagttgaggaaataggcctaattaggtttagtaaagtgcccaggggaacacagctggtaagtggtagagcagaaattcaatccctggacttctcagctaattagtttgtaattcagcctaacacttagaaggtatcagaagaggaagagataaacatagaactaagaattttccatttacacttacaagatagcagaaagggaagagataaattaaacacagaattaagaattttctatttttccaggagagggagtttagacagactacttgttatgtaagtaggctgtgcataaaacagataagattaaaaatatagatttttactgtcagaattatttcagattccatcagttcatatttaaataatatatatgtataaacaagcattcctggaggtgaggaaaacatcttaattttaattactatctatctggtttaatcttggcagaggatatagaatatatgagtgcaatataggctcatgkgtttttaaagaactttgctgtttgacaatttgggcttattatgattgttttgaaacatcttgttg

SEQ ID NO: 384835 - DNA, 493 bp, Homo sapiens
ctaaactgttgagtgaaaaaaggcagaaacagaacagtatgggcatctctacaacacattgcaatgagggcatgtgggggcaggagaatggaagtggagctcagaaatgaaaggaaaaaaagttaaaataacgtaaagtatgaaaaaagatttgcatgatctgatgataatgagccaaagaagtgaggattatgagaaggttaattctttgcatctgtggttcaaaacaaccaccaccataacaggttatgaaataagaacctgcactgccccccagcaccatctatggggaaggggctatgaaagtagacatgaaggttgtggctacccctggcttttgggttttttttttttttttttttttttttactccacagagctgtgctaaaacacagattctgggcctcacctttgtgtaattctactcaraagtctagaggtaagccatcagtccaacatgcattcattagcatcccaggtgatgctggcgcta

SEQ ID NO: 384836 - DNA, 599 bp, Homo sapiens
taaagcactgccttgggacattgtatggaggggaagcatttggtttagaaaagaggaattagttttccatatcttggaaatatgctgaccaatacatattccagcagcaaaattcatctggatctacaagctcttattgtccactgagtgcctcttctccagagtaactcattccagttgtcttttggattggcaaaatttggagtgccaagattgctgtcactaaatcaacacgcagatctagggtgagagtattggagtggaatcatttttattccaaaaatccacctctttatttctcatggactagtttcaggagaatttaggttcaatttcaggagtccccccagcaccaaatggtacaatctcctaaatagcaacaatgccatcatcaggctaatgattggctacatgagcaaaggaattttgcatatcattgtctaactgcatattttcccaggaattatagtctacattagttgttcattgtcygatttgattgctaaatcaagtcaacaagattaagcagaaataagtgaagacatcataagagtaggaattatgtatcagagagggctcaaatatgatgcctataatgt

SEQ ID NO: 384837 - DNA, 513 bp, Homo sapiens
gcttccattactctttctttctttgttcccatggaatttttattcatactctcccctgtccactgccagaatttgcttttccacagtgaaatctgtttacttacatagatcccctactagcgcatgggatttttaaggtagggacaatgccttattcacctcagtgtctacaatttctggccaagtccctaacacatcagtaggtgctcagcaaatttgctgaatgaatgatcagtccctaagggtcagtttgcttaaacaatcaatagcagacaaaacctgactggcctttgggactaccatggtttcctatgcaagacccattgggcattttcactgggagaagacaatgatgactgttactgctccttaccaactcaaaatatccatgggagctgagggatgggtaggaggtcctcctaacttcctgartttagcttcccaactgcagtggtcttctcaaagctgactgcagagacaggattgaccctgcacacaagaggtctgtctgag

SEQ ID NO: 384838 - DNA, 561 bp, Homo sapiens
cactggccctgacggcatccacacagcctttgctgtcatagagtgacccttctggctcctttgattagtgattggctctcctccatagcaagggctggcaaagggttcctaactctgtttaagtgaaatctgaaacrggttgccaatggtgcctctcttcaagaccccagagccagcctggaaggaacaccatgaaaatgttgcaatagtcaatgagtagaatgtggacttttgtgtcaaccacactaagggtcgtacttttttcattaagaaagtattaacgtgtgttttttgagaagggaggaagaatgtgtgctattcctttattcttgctattaaatcataaagctgggttatataagatcctggaaactcagcctttatgaacagaattaataaaagtttgaaatgtcattgatctctcagtgtttcacttgataaagcaataaaatgctattcacagctgcatgaggctacacccttcttttgaatgcagatgctattacttctcctttgttttctttgaattgctttgtccaccctagaactttttgagtgaca

SEQ ID NO: 384839 - DNA, 561 bp, Homo sapiens
cactggccctgacggcatccacacagcctttgctgtcatagagtgacccttctggctcctttgattagtgattggctctcctccatagcaagggctggcaaagggttcctaactctgtttaagtgaaatctgaaacaggttgccaatggtgcctctcttcaagaccccagagccagcctggaaggaacaccatgaaaatgttgcaatagtcaatgagtagaatgtggacttttgtgtcaaccacactaagggtcgtacttttttcattaagaaagtattaacgtgtgttttttgagaagggaggaagaatgtgtgctattcctttattcttgctattaaatcataaagctgggttatataagatcctggaaactcagcctttatgaacagaattaataaaagtttgaaatgtcattgatctctcagtgtttcacttgataaagcaataaaatgctattcayagctgcatgaggctacacccttcttttgaatgcagatgctattacttctcctttgttttctttgaattgctttgtccaccctagaactttttgagtgaca

SEQ ID NO: 384840 - DNA, 576 bp, Homo sapiens
tttagttaacaggcaaatatcccatgggaggtatatgtcaataggttatacaacattactgtcagtcttttacaacttagcgtgaattaattttccttcaggaaatcagtcatctctggagcagagacaggaggccaggtgttaataggagcaaagagaagaaaaggcctgggcagtgcttggasataaaagacctgaacgatcagacccttccatgggctccctttaagaagagcagggagagaccaagggctaaagttgggagactgagaaaatgcagcccaccggggcattacttatttctccagctctgatccgctgttgtactaggggtctaatccggcctgtgtctgcctccttcttgaatagcccagagcattcatctaaacagccttcctacagcagctccccactttaggtgtggccagacaggagttctagaccaggttgtctcctgggacattgacaccgcagccaagtttattggtgctgaggcagacacagttggtgtggttggttcaggggctagcattggaatagcgtttggcagcttgatcattggttattccaggaacc

SEQ ID NO: 384841 - DNA, 606 bp, Homo sapiens
agacctacaactttttttcagtgaaattcctttctaggatgttcacttgtgatttgaggctttaaataaataaatcctagtggagaggttgagtatagtgggaatcaattgcagtcacatcttctaactcaaaatacagagaagcttatgggctttccttttctctctcaaataaatcttaccctttcttttaccttcctctgagagaatggagaacagagtaattaactctctaataaatgtagctccatagacaatgagctgtcttacagagtgtaagacagctaatgatttaaacttctttctccttaaagagcagggcatatggcctgggacaatgttttaagctctccacctcattttttatgcacacattcttctgatgtttctcaaaatcagtaagaaaaataataactatgaattcacaattttcatcagtcacaaattagttttgttggctgggctgrtcagatggggatctccacaggcagctctggttatataagtttagccattgctctaaggaatcatacaaacaccactacggtacccattgttgtaatatttaaaaatctgtatttgaaacacacagacaatattctagac

SEQ ID NO: 384842 - DNA, 451 bp, Homo sapiens
gaaattgcctggatgcaagcacaattcggacagatcaagaaaagccaagagtacagaatcaagttatactggaagaaaacattgcttttctaagccttcaggacaaacatttcagcatcaggtcacagcagcagattaataaatggaaaaaaaagttataggaactgatgagaaggttgaaggagagaattaccatcccagccaagcaaaaagcggtactttctcaaggacagaaacagcaggaggcagtgatgcgtgacttgcaaatcacaagctgtggatacaacrgaagttgaacttccaagatattgaatctgaaaagcttcaagaggaaaattctaccttgagaaataaaattgccattctaagtgaagaaggcagcattctcaaccttaaatagggaaattaaatggatctcaggaagaaatacggcagaaataaaaactgtaaa

SEQ ID NO: 384843 - DNA, 551 bp, Homo sapiens
ctttcttttgtaaattgctcagtctcaagtatgtctttattaacagggtgaaaatggactaatacacatctcaaaaaaaagataaattagcaactaaacgatatttttaaaatatgatrtgagtctaacaaaacaaataaggctaaatatgactaaggtctcttgctagttctaatcatttttcagttagttgtttggaacagttttggtaagcaatcatgatcggcaagtaatggcaggtttgctgcttctttccaatatgtgtaatacgtatttgtgttttgctgcatttatctcagaaaaatgttgaataatagtaggaatcctggttgtttctgactctggtttccttgttaattacaatgtttgttctaggttggcctgcctcttttatagttagaggagttattgatcacataatttgtaataataatatgattaacatgagaatagttgagagtttctactttttgagtatttgtggtgcaagtgtgaattaatgtaatacattcattaaacaagtgagctaatgagaaatacaatttcaggca

SEQ ID NO: 384844 - DNA, 551 bp, Homo sapiens
ctttcttttgtaaattgctcagtctcaagtatgtctttattaacagggtgaaaatggactaatacacatctcaaaaaaaagataaattagcaactaaacgatatttttaaaatatgatatgagtctaacaaaacaaataaggctaaatatgactaaggtctcttgctagttctaatcatttttcagttagttgtttggaacagttttggtaagcaatcatgatcggcaagtaatggcaggtttgctgcttctttccaatatgtgtaatacgtatttgtgttttgctgcatttatctcagaaaaatgttgaataatagtaggaatcctggttgtttctgactctggtttccttgttaattacaatgtttgttctaggttggcctgcctcttttatagttagaggagttattgatcacataatttgtaataataatatgattaacatgagaatagttgagagtttctactttttgagtatttgtggtgcaagtgtgaattaatgtaatacrttcattaaacaagtgagctaatgagaaatacaatttcaggca

SEQ ID NO: 384845 - DNA, 591 bp, Homo sapiens
aatgcactttcttgaaagcctggttggaatagatatgacattataatgtaatgtaaatactctttggattgtaaatggtataaataatrttgatgaaataaacaaggtatagaggcagggcttcgtggcttacatatgtaatcccagcactttgggaggccaaggtgggaggattgcttgggcctaggagttcaagagcagcctggacaacagtggaaccccatctctacaaaaagtaagaaaatcagccgggcatggtggtgcatgcctgtagtcctagctacttgggaggcttaggtggggggaggatcgcttgagcccaggaggtcgaggctgcagtgagctgtgatcacaccattgcactccagcctgggcgacagagcaagaccttatcttaaacaaaaacaaaaaaacaaaaacaatcaaacaaaaacaaaaaaagccaagttatagagtattacatgtgaaaagtgtaatgccatttatataaatgtagaagccatataaaacagctttatatagatacaagggttttagcaaagggacagaatgcgaatgaggagaatacacatcaaattaacagcagttatt

SEQ ID NO: 384846 - DNA, 591 bp, Homo sapiens
aatgcactttcttgaaagcctggttggaatagatatgacattataatgtaatgtaaatactctttggattgtaaatggtataaataatgttgatgaaataaacaagktatagaggcagggcttcgtggcttacatatgtaatcccagcactttgggaggccaaggtgggaggattgcttgggcctaggagttcaagagcagcctggacaacagtggaaccccatctctacaaaaagtaagaaaatcagccgggcatggtggtgcatgcctgtagtcctagctacttgggaggcttaggtggggggaggatcgcttgagcccaggaggtcgaggctgcagtgagctgtgatcacaccattgcactccagcctgggcgacagagcaagaccttatcttaaacaaaaacaaaaaaacaaaaacaatcaaacaaaaacaaaaaaagccaagttatagagtattacatgtgaaaagtgtaatgccatttatataaatgtagaagccatataaaacagctttatatagatacaagggttttagcaaagggacagaatgcgaatgaggagaatacacatcaaattaacagcagttatt

SEQ ID NO: 384847 - DNA, 591 bp, Homo sapiens
aatgcactttcttgaaagcctggttggaatagatatgacattataatgtaatgtaaatactctttggattgtaaatggtataaataatgttgatgaaataaacaaggtatagaggcagggcttcgtggcttacatatgtaatcccagcactttgggaggccaaggtgggaggattgcttgggcctaggagttcaagagcagcctggacaacagtggaaccccatctctacaaaaartaagaaaatcagccgggcatggtggtgcatgcctgtagtcctagctacttgggaggcttaggtggggggaggatcgcttgagcccaggaggtcgaggctgcagtgagctgtgatcacaccattgcactccagcctgggcgacagagcaagaccttatcttaaacaaaaacaaaaaaacaaaaacaatcaaacaaaaacaaaaaaagccaagttatagagtattacatgtgaaaagtgtaatgccatttatataaatgtagaagccatataaaacagctttatatagatacaagggttttagcaaagggacagaatgcgaatgaggagaatacacatcaaattaacagcagttatt

SEQ ID NO: 384848 - DNA, 591 bp, Homo sapiens
aatgcactttcttgaaagcctggttggaatagatatgacattataatgtaatgtaaatactctttggattgtaaatggtataaataatgttgatgaaataaacaaggtatagaggcagggcttcgtggcttacatatgtaatcccagcactttgggaggccaaggtgggaggattgcttgggcctaggagttcaagagcagcctggacaacagtggaaccccatctctacaaaaagtaagaaaatcagccgggcatggtggtgcatgcctgtagtcctagctacttggraggcttaggtggggggaggatcgcttgagcccaggaggtcgaggctgcagtgagctgtgatcacaccattgcactccagcctgggcgacagagcaagaccttatcttaaacaaaaacaaaaaaacaaaaacaatcaaacaaaaacaaaaaaagccaagttatagagtattacatgtgaaaagtgtaatgccatttatataaatgtagaagccatataaaacagctttatatagatacaagggttttagcaaagggacagaatgcgaatgaggagaatacacatcaaattaacagcagttatt

SEQ ID NO: 384849 - DNA, 633 bp, Homo sapiens
catctcaaaaaaaaaaaaagaaaaaggaaagctcacttgtrcctcttcccatgatctgatttctattgccaagattagttttgcctgttctagaactttatataaatggaattaaacagtaatgtacacttttgtgcctagcatctttcactcagcctgcacctgtggtggtgtctgtattgattgttctttgtattgctgaatagtataacattgcatgaatttgtttatccatttttgtgttgattgacatttgggttgcttccaatttggggctatcgtaaataagacttatgagcattcctttttttaacttatgttttcatttctcatgggtaaatacccaggattggaatcctgggttataaagtagatctgtgtttaactttttaaaaatctaccaaacaattctcaaaaattattatgtcacactattttatattcaccaacagtatgagtttcagttgctccacatcctcaccaacatttggtgatatcaacctttgattttagcttttctagtggatgttaaatgttatttcattgttattttaatttgcattctcctcataactaataataccaagaatctttcatgtcgttattagccattgtatatcttttcttttttca

SEQ ID NO: 384850 - DNA, 633 bp, Homo sapiens
catctcaaaaaaaaaaaaagaaaaaggaaagctcacttgtgcctcttcccatgatctgatttctattgccaagattagttttgcctgttctagaactttatataaatggaattaaacagtaatgtacacttttgtgcctagcatctttcactcagcctgcacctgtggtggtgtmtgtattgattgttctttgtattgctgaatagtataacattgcatgaatttgtttatccatttttgtgttgattgacatttgggttgcttccaatttggggctatcgtaaataagacttatgagcattcctttttttaacttatgttttcatttctcatgggtaaatacccaggattggaatcctgggttataaagtagatctgtgtttaactttttaaaaatctaccaaacaattctcaaaaattattatgtcacactattttatattcaccaacagtatgagtttcagttgctccacatcctcaccaacatttggtgatatcaacctttgattttagcttttctagtggatgttaaatgttatttcattgttattttaatttgcattctcctcataactaataataccaagaatctttcatgtcgttattagccattgtatatcttttcttttttca

SEQ ID NO: 384851 - DNA, 633 bp, Homo sapiens
catctcaaaaaaaaaaaaagaaaaaggaaagctcacttgtgcctcttcccatgatctgatttctattgccaagattagttttgcctgttctagaactttatataaatggaattaaacagtaatgtacacttttgtgcctagcatctttcactcagcctgcacctgtggtggtgtctgtattgattgttctttgtattgctgaatagtataacattgcatgaatttgtttatccatttttgtgttgattgacatttgggttgcttccaatttggggctatcgtaaataagrcttatgagcattcctttttttaacttatgttttcatttctcatgggtaaatacccaggattggaatcctgggttataaagtagatctgtgtttaactttttaaaaatctaccaaacaattctcaaaaattattatgtcacactattttatattcaccaacagtatgagtttcagttgctccacatcctcaccaacatttggtgatatcaacctttgattttagcttttctagtggatgttaaatgttatttcattgttattttaatttgcattctcctcataactaataataccaagaatctttcatgtcgttattagccattgtatatcttttcttttttca

SEQ ID NO: 384852 - DNA, 615 bp, Homo sapiens
ccggccaacagtgtttttaaagagaatcacccccttgtaaacaaacaaaaacaaacaaacatgctgctaagaaattattccaagttggagagaagagcaacaggtgagttccactctattcctcccttgagtttttcctcttctttttgtctggcattcactgcctggatcagcatgcatgctgtatcacagaatatcttctagttttacagaggtagcttgagggaaagaatacagaccatagctattttcagataagaagcttatgttctttaaatacatttatttgttttacattttkttatatttctgattttactttattagtttgactaatttttttttttaatttcagccttatttaacttaaggagaatgagatattgttcatgcttaattaagcatattaaaacttttaaaaccttaagaacttgaaaaactatgcatttgataggttggattttaaaaaactatatggctttaattatgctttttttttcctccttaacatagtaagttatgatgtaacatcagcaagagatatgctgctgttagcatgttctcaggatgaacaaaaaaaatgggtaactcatttagtaaagaaaatccctaaga

SEQ ID NO: 384853 - DNA, 370 bp, Homo sapiens
atttttgtgaggtaggaaaagaataacattaattccacttcacatattgaaagtctaacatacaaagagattaaatatctcctttcttttgccaaatgttaatgaattgtcttatgagaattaagatatgatacttkctcccaagctatactgtttcccataaagtatttgagatgttggagattcaagggaaaaaatataaatgcttagaaataaagtgtataatgcaaagattgtgaataaagtgacacttgtatgttaatcctataaattggtttcttgtaccatgtaggatggtttggctattaaattgaattaagtggttcatttgcctggataactgtgagtgtagaatataactttcacttag

SEQ ID NO: 384854 - DNA, 370 bp, Homo sapiens
atttttgtgaggtaggaaaagaataacattaattccacttcacatattgaaagtctaacatacaaagagattaaatatctcctttcttttgccaaatgttaatgaattgtcttatgagaattaagatatgatactttctcccaagctatactgtttcccataaagtatttgagatgttggagattcaagggaaaaaatataaatgcttagaaataaagtgtataatkcaaagattgtgaataaagtgacacttgtatgttaatcctataaattggtttcttgtaccatgtaggatggtttggctattaaattgaattaagtggttcatttgcctggataactgtgagtgtagaatataactttcacttag

SEQ ID NO: 384855 - DNA, 370 bp, Homo sapiens
atttttgtgaggtaggaaaagaataacattaattccacttcacatattgaaagtctaacatacaaagagattaaatatctcctttcttttgccaaatgttaatgaattgtcttatgagaattaagatatgatactttctcccaagctatactgtttcccataaagtatttgagatgttggagattcaagggaaaaaatataaatgcttagaaataaagtgtataatgcaaagattgtgaataaagtgacacttgtatgttaatcctataaattggtttcttgtaccatgtaggatggtttggctattaaattgaattaagtggttcattygcctggataactgtgagtgtagaatataactttcacttag

SEQ ID NO: 384856 - DNA, 581 bp, Homo sapiens
ttaataatagctagtcagtgtttggaactgagacttttgtctagaattgtatagaggtaaagagcatggatttacgtaggcttagtagaagaactaattttaaaataaatggtcacatcataagacytaagtcaggttatcaataaatatttataagtgtctgtaacttgcaaggccatgtcaggtaatgttcagcagtccccaacttcaatctagaatggagatggctaccaaaaagtatctttggattcctaggacccacagagattgactcagtgggtttgattgttaccctggattcatgggtaacactaaatggttacccatgggtaatctaaagcacagctagatttctgaacctttatttcaggatagctgaaaaacatagagatgagacattaaagcccccagtcctctaacagctacctccgaccagttctttgtttagcataaggattaccttcacctaggaactttttgaagtgtccagtgccctcctttgtgctctgattttcttctgttttgcattgtttgagaagttatgttgttattactgtttttatgaggggaatggtgttagg

SEQ ID NO: 384857 - DNA, 581 bp, Homo sapiens
ttaataatagctagtcagtgtttggaactgagacttttgtctagaattgtatagaggtaaagagcatggatttacgtaggcttagtagaagaactaattttaaaataaatggtcacatcataagacctaagtcaggttatcaataaatatttataagtgtctgtaacttgcaaggccatgtcaggtaatgttcagcagtccccaacttcaatctagaatggagrtggctaccaaaaagtatctttggattcctaggacccacagagattgactcagtgggtttgattgttaccctggattcatgggtaacactaaatggttacccatgggtaatctaaagcacagctagatttctgaacctttatttcaggatagctgaaaaacatagagatgagacattaaagcccccagtcctctaacagctacctccgaccagttctttgtttagcataaggattaccttcacctaggaactttttgaagtgtccagtgccctcctttgtgctctgattttcttctgttttgcattgtttgagaagttatgttgttattactgtttttatgaggggaatggtgttagg

SEQ ID NO: 384858 - DNA, 466 bp, Homo sapiens
ttgaaaccagcctcagcaacatagagagacctcatatctacataaattaaaaaatatatatatattagctgggmactgtggcctgcacctatagtccctgctacttgggagactgaggtggggaatggtttgagcccaggagtttgaggttgcaatgagctatgattgcaccactgctcttcagtctgggcaacagagtaagaccctacctcaaaaacaaaacaacaacaaaaaacctcacataacagttaccagctatgttggtcaagtttcttaaccatctgtgtttcagtttctcacgtgtatgatcaaggatggtaatagaatttacttcataaaattaagattatataattatatatataatttagaacaaaatttaaaaacatgttgaactgcaagtgcctttgagacatgtaagtagatggttgaatcggtcagagcaaagatctgagctgaattaggc

SEQ ID NO: 384859 - DNA, 618 bp, Homo sapiens
tttttaactatacttttgctactactcaaatgatatatactgtatcaaaagtgtatgyccttgccaagttctctaaagtttgtgaaatacaatagaatatgcagcaaaattttaagtctgtttcctttccagatactttttctctgaagaactactgtggaacattacttatattgtttaatagtactataaagttgtttccacacttgtatgattagcacgtaatgttcaaactgtgccatgaatgtgctggtagaaacaaaacagttttaaggacaattaaaacaacaacatcctgttatgaagtaaagacacagtttttaccatctttattgtctggaagaaactgtagtaggaataaaagaggcgacgaagagttaaagtacattttatgtttttaggctaaaactgattaaaaaaaaagatcattgtagggtcaaagaaattgatatatatagtgtaattttggctacattaaatccaggcatttggccttttaaattagctagcatattttacaatcttgttgcctcttaccccacaacctctatgttatgatgattttaggttagtatgttaaaacaaggagaattcctggactgtcacaggagtgaaatt

SEQ ID NO: 384860 - DNA, 183 bp, Homo sapiens
gtatccacaggagaatagcctctaactcacactaatcaaatgcacatgaggttgtcatacaaatcacaacgctaatttattaatttaacatggtyttctccagtatttaaaatatatgggaccaaagagtacttgcaaagtcaatgagaactgttttgggcactaattcttgcaggtagctac

SEQ ID NO: 384861 - DNA, 583 bp, Homo sapiens
tgtgaaacaagttaaaatacaatctggcaagagatagtgctaatatagtaaaaacaaaaatccacatgaactacagcaaaatttttaaaaagttgaatttcaccagggacttggaatccattagaaaaccatcaaagggaaatcctaaacytaaaaactataataaaaattaagaactcaaaagatagtcttaatgggagattagtgaaaacagaacagaggattcttaaaatggaagactggttactagaaagcatccaaatgaatacacaaagtgacaaaaaaaaaaagaaaaaaagaatggaaacagaatagagtgcaaaagacatatgtaatccagtggaaaggcctaaaaaaaaagtatagagtccccttatgagaatggaaggccaagatggatggatcacctgaggtcaggagttcaagaccagcctggccaacagctgaaactctgtctctattaaaaaatacgaaaattagccaggcatggtggcgtgcgcctgtaatcccagctattcaggaggcagaggcagggtgaattgcttgaacctgggaggtggaggctgcagtgagccaagttcgc

SEQ ID NO: 384862 - DNA, 583 bp, Homo sapiens
tgtgaaacaagttaaaatacaatctggcaagagatagtgctaatatagtaaaaacaaaaatccacatgaactacagcaaaatttttaaaaagttgaatttcaccagggacttggaatccattagaaaaccatcaaagggaaatcctaaacctaaaaactataataaaaattaagaactcaaaagatagtcttaatgggagattagtgaaaacagaacagaggattyttaaaatggaagactggttactagaaagcatccaaatgaatacacaaagtgacaaaaaaaaaaagaaaaaaagaatggaaacagaatagagtgcaaaagacatatgtaatccagtggaaaggcctaaaaaaaaagtatagagtccccttatgagaatggaaggccaagatggatggatcacctgaggtcaggagttcaagaccagcctggccaacagctgaaactctgtctctattaaaaaatacgaaaattagccaggcatggtggcgtgcgcctgtaatcccagctattcaggaggcagaggcagggtgaattgcttgaacctgggaggtggaggctgcagtgagccaagttcgc

SEQ ID NO: 384863 - DNA, 620 bp, Homo sapiens
tgtattattattcagttgaaaaaattcagttttcattgtgattttttttgagccatgagttatttagaaatgaattaactgattttcaaatatttgtgtatttcttagcatttttttgttactgattttgttattcattctcctgaggtcagagaactatactttatgatttcaatccttgagttacatggagagttgctttgtgtcctagcatagggtcagttttggtagatattccaggtatgctggaaaacagagttattttattattttgatgttgttttttaatatataccaattaggataagtgagttaactttgtttttcgtatcttctggtatcttctatatattctttttaaaaattttggctaataagggaagtatgttaaaacctgcaggcaaggtctgtttctccatttagttctgtttacttttgttttatgtattttgaattttgttatcaggcatgtattaatttagaattttgtatattcttggtgaattgacccttttattaccccgagtgtctggtgatgcctcttacttaatgcctatttgatagtagatataggtgcrctgttatccttccatgtatatttcattctgtgtatatttgca

SEQ ID NO: 384864 - DNA, 595 bp, Homo sapiens
tgtgcttgtttgcagatgacataatctcatatgtagaaaaacctaaagactccaccaaaagactcttagaactaatgaactcagtaaattcccagatacacaatcaacatacaaaaatcagtagcacttctatacaccaatagcaattaatttgaaaaagaactcaagaaagcaattccacttacaataacttcaaaacaaacaaacaaaaacctaggaataaattttctttgaccaaagaagtcaaagatctctacaaggaaaactatataaaacattgatgaaaacaactaaagaggacacacataaaaaatgaacagatatcccaygctcatgaattagaataagtattgttaaaatgtctacactacccaaagcaatctacagatttaactcaatccctatcaaaataccaagggcattctttggtagaaatagaaaaagcaatcctaaatttcatatggatccacacaagaccctgagtagataaagcaatcctgagctaaaagaacgaagctggaagcataaaacaaagttattttaaattatactacaaagctacagtaataaaacagcatggtactggcataaaaac

SEQ ID NO: 384865 - DNA, 595 bp, Homo sapiens
tgtgcttgtttgcagatgacataatctcatatgtagaaaaacctaaagactccaccaaaagactcttagaactaatgaactcagtaaattcccagatacacaatcaacatacaaaaatcagtagcacttctatacaccaatagcaattaatttgaaaaagaactcaagaaagcaattccacttacaataacttcaaaacaaacaaacaaaaacctaggaataaattttctttgaccaaagaagtcaaagatctctacaaggaaaactatataaaacattgatgaaaacaactaaagaggacacacataaaaaatgaacagatatcccatgctcatgaattagaataagtattgttaaaatgtctacactacccaaagcaatctacagatttaactcaatccctatcaaaataccaagggcattctttggtagaaatagaaaaagcaatcctaaatttcatatggatccacacaagaccctgagtagataaagcaatcctgagctaaaagaaygaagctggaagcataaaacaaagttattttaaattatactacaaagctacagtaataaaacagcatggtactggcataaaaac

SEQ ID NO: 384866 - DNA, 521 bp, Homo sapiens
aaataggaaggagcttcacctgctcccccccaggtagctaccgaatgagagtctctgcagagctgtcagccagcacttagttgacaccagcccagctccaggctgcaagtgacttgggggaggattggagacatgcctggcacactacatgcttggcacactaaagcagtcctcatttatgagatggggaacaacctcacctgccagtcctgtttctgccttttttacttttagttatagaaatttctaaaaaagaagagaaaaccctagagagatcactccttgcctcaatatggtccccatccttgctcttcctgttctggagacaacttcctctttctcctctccttcccagcccagtacttccctcccttctcctccctgccatccccttcacacacaagctcttttttccctctggtgtagttcgaccctatagtaatttcttkctaattcagatcagtgtgcctgtgttaccatggcaacctgctgctaccaaggcttcaacaaagtcacttctc

SEQ ID NO: 384867 - DNA, 455 bp, Homo sapiens
agcactcgatgagtatttgtgaactgaagtttgtctgaagttcctgcaggagggtgaggattactgcagaggggtgccattgccgaggctcaccccagcctaagccacccatgagccacaaaatgccactagagattcctggtatggcaccttcctagcccctgcaccaagcaaataattctgtactttaaataaaggagggacggctgagggagaatacttcaggccctccctgtctacttctgcagcacttcccagcccaagagcccttggagggcatttgtgacctggagcattaggagggtcagtctgtctgggctgagtaatggtccaggccctggtcagctcaggctgtgtgtgtgtgtgtgtgtgtgtgtgtgtgtgtgtgtgtgtgtgtgtgwgagagagagagagagagagagagcgcacgcgcttagtaatcagataattccggt

SEQ ID NO: 384868 - DNA, 617 bp, Homo sapiens
acttggctgtaaaacatcacttgctaatgcctctttagtgaccttctcaaaccttacccatctcccgtgaccctttcacatctctcctgtcctaagtgaatgttcccacttatgaactgtggagcacttgttgcctaaagtattcattggctaatagttttttttttgttgttttttttttttttttagcatttaaggcatcattccattgtgtccagattccactgtttctgctttgaagtcagcttaatttatggcttaatacctttaatcaacttttttaaattctcaattattaactcttcaaatactgcttctattgcacttccctactcttctccttctgggacttctttgtctaacttctttgtctcttaccccagcttctgctttttctrtctttcatctcccaatattgtactctggatattgtcttctgatccattgaaagttcatgaattctctcttcagctatctattctccacctaactccatccactgagttactaattttgatagttgtatttacagttctagaattttcttttttatatactttatatgtctctgtcaaaatcctcaatctttcatctctcaatgaacacaacaagcataa

SEQ ID NO: 384869 - DNA, 516 bp, Homo sapiens
gcccaggtgtgtgtttgctggaccatgtggaggaagctgaagagacgtgagctgaaggcagagggtgagtccaaggtgggatcttgggacaggtacgagaagttaggcaaaaatgggataattctagccttcataaccttagataatagttcacattattatttagttaatagaactgtacccacattaaatttcttaaatttttttaagagataaagtctcactctgtcacccaggctgsagtgcagtggtgcaatcatggctcactgcttcctggaactcgtgggctccagcaatcctcctgcctcagcctcctgactaggtgggactataggcacacgccaccatgcctggctaatttctttgacttttctctagagaccgggtccacctaggtttcccaggctggtctcagacttctagactcaagtgaacctgaacctcccgcctcgacctctcaaattgctgggattacaggtgtgagccaccacacccggcctaaatttcttatgtgcc

SEQ ID NO: 384870 - DNA, 622 bp, Homo sapiens
tttgctttttgccctatctttcattagaaacttttcgcaaatgtctgttaaatgctaccccagtgactttgggcttggtcatgctacttgctttggtcaatgaaatgtgagtagacatcaagtataccaccatcacacagaaattttattttttattttattttttatagagacagggtctcactacattgcctaggctggtctcgaactcctgggctcaagcaatcctcctgcctcagcctccaaaaatgctgggattacaggtgtgagtcaccacgcctggccatgcagaagttttaaatgtgtctttgtggtctagctttctccccatccctgagcctctgccctctgccatgcatgatacagagagtggctgctcgctgactactagtcctggaaagacagytgggagccaagtggagccagcagagttggtgatatggctgcatatgatcagcagtcctcatggcccatgtgtaaaaaagaaagaaatctcagtggttataagccactgagatttgtgatcctatctgtgggttaaattatatacataaatttatatatacataggaatatttctagacagattcaccagacaatggaagtagaagaaatcagcgaa

SEQ ID NO: 384871 - DNA, 601 bp, Homo sapiens
tcaattttacattataataagcactttacagggttaagaattcgcaaacctcacttttaattgctaagtatatttcactatatagatatatcattcctggcttgatcatttccttagtgttgaacaaatatattaattataattttttactaccgtaagtaatatctcagacacttctgggcataaagtattttctgtatttatgacttttccttgggatatattcctattagcagaattgctgggtcaaaggacatgaacatatttaggctcttgatatactgccagaatgctttacaaaaaaattacatggatttatactccccccagcgatatcaaggcagccatatcattgggaatttttwaaatttcagctcacatgagaagcaaaaatttctcattactaggaggctcaatatcttttcacatgtttattagtcatttacattttcttccttttgaattatctgttccttttcatttgttcattcatcaaagtcttagtacttcaccaattgattggtatataatttcttccacatatactaagctcagaaagtctatttctttgtgcttttatacctaacaatagtaacatatc

SEQ ID NO: 384872 - DNA, 624 bp, Homo sapiens
tgcagtgaatgctgggtgcatcttcatgttgggttctgagtccttttgacatgagcacattgtctggtgttgtacgagagagcaaaataaggaaactggtgttctatgcttatcttgtacattttccccacacttggaatcagccattcctccagggagtgcaggttcacagtctgggctctaagagaattataaggtcaatgtggtcatcatcttttagtattaagtcagatattctaaattattatttacttcttacatttggcccaagagtttaaccagatattttgggaaagagagaaggaattaaataaataaatctcatggttagaactgaagtgataactatactttcacaaggaaatataacttataacccatgcggaatagaaaattatttttgctcctttagatttctgaaggaatgaaatgagctgtgrgaagaaactttaactggagcatcttaccagtattattcatgttttaactctgcttcagtagtttttcaggtttattacaaacctgcagtagccaactgaattaattatctctaaacagggatttagccagtggactaggcacactgaagctttgtgagaggggaaattgatattcacatttttt

SEQ ID NO: 384873 - DNA, 582 bp, Homo sapiens
ttggtatgattggttaattactttatagtcatgccctatctttgatttgttagacttcccatgctttaaatcttgatatacgtagggcctttaaaatggtcaactaaaaagtcaccattcctctacgttttttcgtgacttgatttgtaaaacacagaatgggattactgttttgccatgcatctgtatttagcagatgattactagataataattataattttttatgttataaaaaagaaagtatataaactcaaaaaagctcacttttttgtctarattgtttttgctcttatacaatagaatacatatttaagttgtatttttatttgcatttaataatttattaattaaatgtatttctttgtcagatttcaaatgattgaggtgacttgtaagaatttgttttatgccctgttgctgatcaaatcattggtcttccctatagctccttacaaaattatgcaatcagtgttccatttggagtaaacatttagtgtcttatcttgatagagtaattggctacatttctctttctatgcatgaagttgtgtaaaaggaccaattcacatgtataattgg

SEQ ID NO: 384874 - DNA, 406 bp, Homo sapiens
aaagatacaatttgaaagagaaatgtaaattaaacttatataaagaagttttcagtaacttggatctaaaagtttatgatttgctttaaagataaaggaaagaaagaaagaagaaaaagaagaaagagaaagaagaaagaaaaaagaaagaaagacgaaagaaagaaagaagcaaagaaggaaggagagagagaaagaaaagaaaagaaaagagaaaaaggccatggtgtcacagttttgatctttgggaaactgaccacccaagattccttaggtggtggtgacagwaagtagacagcagtcaacaccgtggacccttcagcatggagggatttgatttgtgtcccagcgttctggctcatttcagcctctgcgaggccccacctcagtccagcagagcgtccca

SEQ ID NO: 384875 - DNA, 406 bp, Homo sapiens
aaagatacaatttgaaagagaaatgtaaattaaacttatataaagaagttttcagtaacttggatctaaaagtttatgatttgctttaaagataaaggaaagaaagaaagaagaaaaagaagaaagagaaagaagaaagaaaaaagaaagaaagacgaaagaaagaaagaagcaaagaaggaaggagagagagaaagaaaagaaaagaaaagagaaaaaggccatggtgtcacagttttgatctttgggaaactgaccacccaagattccttaggtggtggtgacagaaagtagmcagcagtcaacaccgtggacccttcagcatggagggatttgatttgtgtcccagcgttctggctcatttcagcctctgcgaggccccacctcagtccagcagagcgtccca

SEQ ID NO: 384876 - DNA, 406 bp, Homo sapiens
aaagatacaatttgaaagagaaatgtaaattaaacttatataaagaagttttcagtaacttggatctaaaagtttatgatttgctttaaagataaaggaaagaaagaaagaagaaaaagaagaaagagaaagaagaaagaaaaaagaaagaaagacgaaagaaagaaagaagcaaagaaggaaggagagagagaaagaaaagaaaagaaaagagaaaaaggccatggtgtcacagttttgatctttgggaaactgaccacccaagattccttaggtggtggtgacagaaagtagacagcagtcaacaccrtggacccttcagcatggagggatttgatttgtgtcccagcgttctggctcatttcagcctctgcgaggccccacctcagtccagcagagcgtccca

SEQ ID NO: 384877 - DNA, 550 bp, Homo sapiens
ggaccccagtccgagggaactgacacttggatgggcaaatggtgtctcaggtagccatcggagggcctgggggccccatgcagatgttggggggctgtctgtgcttttgcacacatctgcctccctcataagggccaggtgggccttggctcccacttctgcatcacaggggcagagtgaagccgagtgggtgctgggaatgaagcccagctgagcccccaggccttccttccccatcctcctcttccacccagtgataaaagatgcccccaaatcagattaaaatgacatgttttggtggttcctataacttgaaggatgttgctctatctactttcctgaaagttgtcatctctgtgaagccccagatgaacttggacgttatgtctgtcttcgctctttgaggcggggcccactgtattckggggtgagctccattatcccacctttgccaaagtacacagcaagggtcaagtagaggcctctggccttaagtagcaccttctgagtcccctttcctgcaggtctgagtggccaaaaagaaccttgg

SEQ ID NO: 384878 - DNA, 443 bp, Homo sapiens
gaatcgtgtcccccaaaattcccttgttgaagtcctaacccccaggatctcagaatgtggccttatttggaaatagtgttattgcagatgcaatcagttaagatgagatcatacaggagtagtatggtccctggtcagtccctactccaatatgactgaagccctcataggaaggggaagtgtgtgtacacacacacacacacacacacacacacacacacacacacaygcaggacactgtgtaaagactggagttctgctgccaaagccaaggaaatactagaaatgagggaagactcctggaacacatccttccctaatgccttcagagggagcctggcttagccgacacctcagtcttgactttctggcctccggaaccatgagtctcattgttcattcccatggttctaagccacccagtttgtgatgctttgttacag

SEQ ID NO: 384879 - DNA, 540 bp, Homo sapiens
agtaaatggtagatggcaatgagatgagcgtggggccactgtacaacagagaagcagagaagtatccgtggaggaggtggaattttctttttcctcataagcttaattttggctttatttaaacaaaatgacacatacttataaaaattgataaaagtaaaaaatgaatagttcmctcattcccctatgcacttccattcccgacaggtgaccactgtttagagttggcttggtataattaattccaggaggtggattttaaactgggtcttaaaggatgagatttggtcagtggagggagtgggataagaatgatgtgctgggactctgtggagtgggaagagttaactatagatggacacagtcccattatcattgtgaaattctaattctctaatatcctcaggtcccttgagtttctggcagccttcatcatttaaaaaaaaaaaaagaaagaaaagaaaaaaaaaaggaggaaaaaaagagttaattcattccagacacctgggttccctcagttgtcttttttttttttttttt

SEQ ID NO: 384880 - DNA, 540 bp, Homo sapiens
agtaaatggtagatggcaatgagatgagcgtggggccactgtacaacagagaagcagagaagtatccgtggaggaggtggaattttctttttcctcataagcttaattttggctttatttaaacaaaatgacacatacttataaaaattgataaaagtaaaaaatgaatagttccctcattcccctatgcacttccattcccracaggtgaccactgtttagagttggcttggtataattaattccaggaggtggattttaaactgggtcttaaaggatgagatttggtcagtggagggagtgggataagaatgatgtgctgggactctgtggagtgggaagagttaactatagatggacacagtcccattatcattgtgaaattctaattctctaatatcctcaggtcccttgagtttctggcagccttcatcatttaaaaaaaaaaaaagaaagaaaagaaaaaaaaaaggaggaaaaaaagagttaattcattccagacacctgggttccctcagttgtcttttttttttttttttt

SEQ ID NO: 384881 - DNA, 540 bp, Homo sapiens
agtaaatggtagatggcaatgagatgagcgtggggccactgtacaacagagaagcagagaagtatccgtggaggaggtggaattttctttttcctcataagcttaattttggctttatttaaacaaaatgacacatacttataaaaattgataaaagtaaaaaatgaatagttccctcattcccctatgcacttccattcccgacaggtgaccactgtttagagttggcttggtataattaattccaggaggtggattttaaactgggtcttaaaggatgagatttggtcagtggagggagtgggataagaatgatgtgctgggactctgtggagtgggaagagttaactatagatggacacagtcccattatcattgtgaaattctaattctctaatatcctcaggtcccttgagtttytggcagccttcatcatttaaaaaaaaaaaaagaaagaaaagaaaaaaaaaaggaggaaaaaaagagttaattcattccagacacctgggttccctcagttgtcttttttttttttttttt

SEQ ID NO: 384882 - DNA, 580 bp, Homo sapiens
ccgtccatatttgagagtcgattaatggcatctcaggacctacggaggttctctgaacaatatggaccacctttcttaaaatctgtagttacgatcttcataaatacaccacaaggtaccaaatccttaaactgccagataagggcagaagttscaagagctccaactaccatatgagggtatttcattctgaactaggctgcaagcatgccaccataggggccctagagggccgtgacagggtgattttcagctcctaggactgttcttttcaagtgtttgattagctctgcaaaatcagccagaccttgctctgatgtcaggagatccaagtgtccagaatccttgaatgggtcatcacagggcagggactctccgcagtatcgctgttccgcatacaccaacatagctttcagttcctcagccccatcccacatgaaccacgtattactgcagaaccagatgatgtccccgtcatatttctttcagtatttatttgctattagatactgctgttaaacagttttcacagtatgaaatccaaaatgatcaaccctctgttggaagtggagaaccgagt

SEQ ID NO: 384883 - DNA, 580 bp, Homo sapiens
ccgtccatatttgagagtcgattaatggcatctcaggacctacggaggttctctgaacaatatggaccacctttcttaaaatctgtagttacgatcttcataaatacaccacaaggtaccaaatccttaaactgccagataagggcagaagttgcaagagctccaactaccatatgagggtatttcattctgaactaggctgcaagcatgccaccataggggccctagagggccgtgacagggtgattttcagctcctaggactgttcttttcaagtgtttgattagctctgcaaaatcagccagaccttgctctgatgtcaggagatccaagtgtccagaatccttgaatgggtcatcacagggcagggactctccgcagtatcgctgttccgcatacaccaacatagctttcagttcctcagccccatcccayatgaaccacgtattactgcagaaccagatgatgtccccgtcatatttctttcagtatttatttgctattagatactgctgttaaacagttttcacagtatgaaatccaaaatgatcaaccctctgttggaagtggagaaccgagt

SEQ ID NO: 384884 - DNA, 525 bp, Homo sapiens
gcaaacactgaatcaactctttccatccctttcttctgtcctccaatgtccctttgaaggtctggagatacttcagagtccatctgtacctttctttaaccccaacatggtaactatttctcttttgaaagcagcttaaagggttttaacttggggacacacactgctgtcaccactggatatgcactggaaaagcagggtaagggaaaggactgtttccaaatacacctaactaattrccccgaaaattgcttgaaagtccaggcctgttctttgtaatcacatatgatgagtgtagagaaagttacagtcgctcttgtggctctgaatttcaagcaggatttttcttgttcttgttttgcctcgatttcaggcctgtttgtcttctacgaattcctcaaatttctggaccatggaagcttctttcttgaatattctgttttgtttttctgtttaattatttctttaatggagggagaggcatgtcttcagttcttcagttagccaacttgattcagcagtctc

SEQ ID NO: 384885 - DNA, 525 bp, Homo sapiens
gcaaacactgaatcaactctttccatccctttcttctgtcctccaatgtccctttgaaggtctggagatacttcagagtccatctgtacctttctttaaccccaacatggtaactatttctcttttgaaagcagcttaaagggttttaacttggggacacacactgctgtcaccactggatatgcactggaaaagcagggtaagggaaaggactgtttccaaatacacctaactaattaccccgaaaattgcttgaaagtccaggcctgttctttgtaatcacatatgatgagtgtagagaaagttacagtcgctcttgtggctctgaatttcaagcaggatttttcttgttcttgttttgcctcgatttcaggcctgtttgtcttctacgaattcctcaaatttctggaccatggaagcttctttcttgaatwttctgttttgtttttctgtttaattatttctttaatggagggagaggcatgtcttcagttcttcagttagccaacttgattcagcagtctc

SEQ ID NO: 384886 - DNA, 525 bp, Homo sapiens
gcaaacactgaatcaactctttccatccctttcttctgtcctccaatgtccctttgaaggtctggagatacttcagagtccatctgtacctttctttaaccccaacatggtaactatttctcttttgaaagcagcttaaagggttttaacttggggacacacactgctgtcaccactggatatgcactggaaaagcagggtaagggaaaggactgtttccaaatacacctaactaattaccccgaaaattgcttgaaagtccaggcctgttctttgtaatcacatatgatgagtgtagagaaagttacagtcgctcttgtggctctgaatttcaagcaggatttttcttgttcttgttttgcctcgatttcaggcctgtttgtcttctacgaattcctcaaatttctggaccatggaagcttctttcttgaatattctgttttgtttttctgtttaattatttctytaatggagggagaggcatgtcttcagttcttcagttagccaacttgattcagcagtctc

SEQ ID NO: 384887 - DNA, 613 bp, Homo sapiens
tatcacaagacagagatccaactctaagatatcccagcgctgtctatgccctgttacatggcatagattgcaccrgcagcccagcctgccttcctcctccgcttgtgcctccatgctcttgttctctccttcctctccccattgtccattcttgtcttccttttaggtcaccggcacattaaatcatctgtagaccctgggggagtccccattcttctctgctgagtttgctttcccttaaattgaggattgggctaactctttgggtaattgagcaagtaattggtgggcctattggatacggttcatgttttttcaaagtagtagggtgagagggaccacatgcctataaccactgtcttctctccattcctgaatcctattctttaacatcatatgggaaatcattaattcagaaactcattctttccaacactacttactaatcaagcattaagaaaatattcttgtctctttgatttaaaaaggaggctgagattatacaatatatctatattaccatgtgcacatgattacatccaaaccttactcacgttcccttggacacgcctaacacaccaatgccagaggggctcaatgccagatgcgctta

SEQ ID NO: 384888 - DNA, 635 bp, Homo sapiens
gatttttatatatggtgctaggtaaggacctaaatttttttttttttttattgtttttggcatgtggatatccaattatcccactacgatttgttgaaagattctccttttgaggatttttttctgaacgattattatctaaagtgtgttgttgctttagggtcacagtatgcttgtgtgcatctgttaccatgtcactgtggtccttcgctgagtgcccttaggggactagaatctttccaataaaccacgtttgagatcgtatgagtcagcgtgcagtgtagcccacacttgagagtgtggatttatgtgcacagtcactttgctctgggtggaagtaggttatagttgacttactttctcggtgcttgttcctacagcccctcttttcatgtgttgctcaatctccctatcccttcttggtgcttgcacatctcagaccctttagccagaccctttagccaaacccttgccaataacagtatttttgttctcagttctgttccctctggttgyggagactttgaataaaaatgcacacacctattcagtgggatttagctggaaaaggtgaccttccaacctcacgtcaacttctggctcctcaaacagtaggttggcagtaaggcaggaaa

SEQ ID NO: 384889 - DNA, 514 bp, Homo sapiens
tgctgcttttgggaaaagggccggtctagcctgctsttacagcagccatgttttgttccacctgttattgtggtgggacctgccaaactgcggttcttctctcagtggacctgatccagctcatatgcagagagaagaaatgggatcctgggggaggcggccataagctttggagtcagaggagaatctggatactagttctgacagtaacctgctatgtaactttaggcaagtcacctcacttctctaagcctcaattgcctcacctgtgggaaggaaggggtaatgcttaccttttgagattaccaaaaattaaatgagatatatatttaaagtgtcgcctgcctagtaccaggcgagggctcagtatacgctagcttttcttacaattcagagatacccatagttaaaagttgatttcagaagtgtttttgtttatgtataagattggtaaaaggacgtttttctttgccctatatcatgaacctgtcccaagcgtctgcactgcacaggt

SEQ ID NO: 384890 - DNA, 514 bp, Homo sapiens
tgctgcttttgggaaaagggccggtctagcctgctcttacagcagccatgttttgttccacctgttattgtggtgggacctgccaaactgcggttcttctctcagtggacctgatccagctcatatgcagagagaagaaatgggatcctgggggaggcggccataagctttggagtcagaggagaatctggatactagttctgacagtaacctgctaygtaactttaggcaagtcacctcacttctctaagcctcaattgcctcacctgtgggaaggaaggggtaatgcttaccttttgagattaccaaaaattaaatgagatatatatttaaagtgtcgcctgcctagtaccaggcgagggctcagtatacgctagcttttcttacaattcagagatacccatagttaaaagttgatttcagaagtgtttttgtttatgtataagattggtaaaaggacgtttttctttgccctatatcatgaacctgtcccaagcgtctgcactgcacaggt

SEQ ID NO: 384891 - DNA, 514 bp, Homo sapiens
tgctgcttttgggaaaagggccggtctagcctgctcttacagcagccatgttttgttccacctgttattgtggtgggacctgccaaactgcggttcttctctcagtggacctgatccagctcatatgcagagagaagaaatgggatcctgggggaggcggccataagctttggagtcagaggagaatctggatactagttctgacagtaacctgctatgtaactttaggcaagtcacctcacttctctaagcctcaattgcctcacctgtgggaaggaaggggtaatgcttaccttttgagattaccaaaaattaaatgagatatatatttaaagtgtcgcctgyctagtaccaggcgagggctcagtatacgctagcttttcttacaattcagagatacccatagttaaaagttgatttcagaagtgtttttgtttatgtataagattggtaaaaggacgtttttctttgccctatatcatgaacctgtcccaagcgtctgcactgcacaggt

SEQ ID NO: 384892 - DNA, 562 bp, Homo sapiens
caatatttggacatacttatagtacataagtattttatattttagtaaaacattaattggtgtttaactgaaaatcaaatctaactaagtgtcctgtattttatctcgcaaccctaagagtgaggtctacaaagctgcctggaagccctgagtgcgtgtgtaagtgggtggggcttgacaagggtgagtttaccaacaggttgctccagtttcattgcataaatgattacatctcttcaggtctttcctcttagattccccaaagaaaagtattccaaactctccagcctggtgagtttgaacttggctgccagagttmtaggagccaagcgggaagaataccaagcagctcagtaggcatcatcttaagtttcatatggctcttcaatttcagtacagtagccctagtcttgtgttaatctcatggccttgatgaaagatggctgcaaattctttgcaccctcccacccctccccactcagggatggagcctaatccccttcccttaaatctagactggccctagtgactggcatgatttatagaatgcaacagaaataat

SEQ ID NO: 384893 - DNA, 576 bp, Homo sapiens
ttgcaggttgtggccacttcgtgccctatctctcttctgtggtgtcccttgaatttccycctttttacttcccctggcaactcctccgtatgtcgctgtcccagcctctcaagtgattctcccatcttcagttttatcctctctagactatctccctattattttccctaaaacacaaccttgatcatgctcatgctcggtcctaaattgtcaacggtttgcaggtgctaccaaaaacaagtctaaatgtcttagatcaaccagtgtcaccaacaggccctatgttctcttgcatcggtacctttgttctgtcgttagcttcagaatataagtgctggaagagaccatctggtccaatctcattttacaaatgaggaaactgaggcctggatagattgagtgactgaccagcacctagtcagagatcaagtttgactcatgaaaaagaagcctagagcagcctcggggttggtatcagacaagattctaccagttggccacccgttgaataccctctctacacaactctgatccttaaagctgtggatctttgagtcccatcaagcacggcctcct

SEQ ID NO: 384894 - DNA, 576 bp, Homo sapiens
ttgcaggttgtggccacttcgtgccctatctctcttctgtggtgtcccttgaatttcctcctttttacttcccctggcaactcctccrtatgtcgctgtcccagcctctcaagtgattctcccatcttcagttttatcctctctagactatctccctattattttccctaaaacacaaccttgatcatgctcatgctcggtcctaaattgtcaacggtttgcaggtgctaccaaaaacaagtctaaatgtcttagatcaaccagtgtcaccaacaggccctatgttctcttgcatcggtacctttgttctgtcgttagcttcagaatataagtgctggaagagaccatctggtccaatctcattttacaaatgaggaaactgaggcctggatagattgagtgactgaccagcacctagtcagagatcaagtttgactcatgaaaaagaagcctagagcagcctcggggttggtatcagacaagattctaccagttggccacccgttgaataccctctctacacaactctgatccttaaagctgtggatctttgagtcccatcaagcacggcctcct

SEQ ID NO: 384895 - DNA, 576 bp, Homo sapiens
ttgcaggttgtggccacttcgtgccctatctctcttctgtggtgtcccttgaatttcctcctttttacttcccctggcaactcctccgtatgtcgctgtcccagcctctcaagtgattctcccatcttcagttttatcctctctagactatctccctattattttccctaaaacacaaccttgatcatgctcatgcycggtcctaaattgtcaacggtttgcaggtgctaccaaaaacaagtctaaatgtcttagatcaaccagtgtcaccaacaggccctatgttctcttgcatcggtacctttgttctgtcgttagcttcagaatataagtgctggaagagaccatctggtccaatctcattttacaaatgaggaaactgaggcctggatagattgagtgactgaccagcacctagtcagagatcaagtttgactcatgaaaaagaagcctagagcagcctcggggttggtatcagacaagattctaccagttggccacccgttgaataccctctctacacaactctgatccttaaagctgtggatctttgagtcccatcaagcacggcctcct

SEQ ID NO: 384896 - DNA, 518 bp, Homo sapiens
cacatatcccagctctgtgctctctgtggtacagtgaacgcatcgtagattcagattggaattcaagctctgcccaggaagcatcagagcctgctctccactcccaacatcacctacttccctcccttccccacacctactaacaacatcattagtcacaagaaaaccctaagcaaaggaagaatttgacaagcaaaaaatatcaaactttgaggtctacaggcagatctatcytacaccagtgaattctaaaatgtaaaatgcttcccaatgtatgccgctgaagagtgaagtgagagcaatcattatttcctagacggtttttgagctgggcaacctgggagtcacagaggtgagcaagaacttggggtgggtgggagagagatattaaggaactaaaaaaacctcagaggcaggaaaatgcaatggaaaggcccagcaccggcgcaggtgggagatctgggggaaagagcagagctggggaaaggtagttttggagtcacctccaaaagtaaggc

SEQ ID NO: 384897 - DNA, 580 bp, Homo sapiens
ggagggaaaccagaggcacctccccgagcggagaaaccagtttggccggtccggcggagcggaggcaaaagggcggctgcagaggaagggtgcacggacgcggggcggggaaaggcgggggagccactagcgagccgcgagagccgggaggtgccgccgccaactagacacgcttccccgggcccccggccagcccccgtgcgccatgcagcgctagcgcggcggccagggctggggccgggcgggcggyggcagcggccaggtgcgcagcgagcgctccgagcggcgcgcaccaggcggatgccccagccggggcccagcgaacgccaggtaagcaggggtgcggcgccgggggccccccagaccttcccaagccccttggcccggcggtgtcctgcaggttccctggccgctcccgccgcactttggagatccgggatgcggcggcagcagctgtcagcgccctcggactcccgagcccgcacaggtgggatttgggtggaggtgctgggagcccccgaggcctcggggacggcgagacacggccggctgggcaggcagcgctgcggagagttccgtg

SEQ ID NO: 384898 - DNA, 601 bp, Homo sapiens
caaatattaatgtaaaatcactcaaataaacgtaaatagtaactttgacaacctttacaaatttggaaagggacatggttctataagatcatccaatagtttaatcaacctttatgaatgtaaaaaagagaaaaatatatatacataaaaaaatcatgcaataggagggatttaacctagtcagtgattcacggatcagtactcaaaggaagcgattactggctgaacaataaagggtgggtagcagttccagatgaggaggggagatgaagacgcataaggtgaagctggcaaagtaggaagaagccagaccttgtagggccttgtaggcctcagtaaggaacatagtctctattctcaggaccatgggaagccaagcacgtggtccgggaacaggagcttggcttccaattgactgcaacagtaacctgctstcctttgtctaatgacttgtctctgtgaaatttccttatcacatggttgtgttgggcttgcaggtgtacaaagcacttctacaaattttggtagttttactgaacatatcttgaaatgtttttgagttttggaagagcagatattattagttttgctactgaggaga

SEQ ID NO: 384899 - DNA, 613 bp, Homo sapiens
acttaaaatgtatgtaatattttgagtgtgcattatgcctcaataaagttgaacaaaacacccccccccgccaaaaaaaaaccaccaaagttccacagatctctagggcaggggcaaaatgcttcacttttttgctaaagcatagcaagagtcacctttccttcagtttccaagacgttcctcatctccatctgagaccacctcagcctggacttcattgtccatatcactatcagtattttggtcaaaaccatttaacaagtctctaggaagttctaaactttcccacatcttcctgtcttcttctgaaccctccaaactattccaacctctacctgttacccaattccaaagtcacttccacatatttaggtatctttacagcagcaccaatttactgtattagtttgttctcacactgctataaagaattactggagactgastaatttataaagcaaagaggtttaattgactcacagttcctcatggctgggaggcctcaggaaacttacaatcatggcagaaggggaagcaaacatgtccttcttcaactggtggcaggagagagaagtgcagagtggagagggaaaaagccccatataaaaccatc

SEQ ID NO: 384900 - DNA, 581 bp, Homo sapiens
acatgtgcaccctcattgcttttgggtactgtcaactgaaggtggcaccatgattggaacacagatggatgagagctgatgcatgggcccccacacatagtttaagcccaaggatgggtggtggatttctgatagcctagagttatgaactcatcttgtgtctgacrtgactgtcaccaaaagaagtgtgacaacaccactttggcagcccaatcttttgcaaccccatgaaagaaatactgcagaagccagtagaagcaatccacttgccaggttgccctcctggaaccagggtccacccatgagagccaacgacaaccacatcagcctttgtgctccttggggcatctggtcaatctcctgcatgggatagaagctccgggaataccccaaaggggagaagcagagaagagggcctatgcccttccttgtccaggcttggagtgcctcgcttggatgatactgctagccccaactggtcccagacatcagagaggaagtgtggtcctcctgaggtttggggcccaggacaggggctctgcttgctctgatctaaaagcagtactgtttctaggtttact

SEQ ID NO: 384901 - DNA, 539 bp, Homo sapiens
ggtttttatgcctttcctgttagaggcaacagatggttcccaacaacaaaaaaaataccagtcactcttgataaaatatgtgcacgccaaaccgaaaaaacagagatggacagcaaattggcaaccattaccactacagtttatatttggcatttgaagacactgattgtatatacagaagtcacatcttgccataataaaatcttttcttgatttgaaaaaaaaaaaaaaagcaaacaggataggtgcagtggctcacgcctgtaatcccaacactttaggaggctgaggcaggtggagcacctgaggtcaggagttcgagaccagcctggccaacatggtgaaaccttgtctctactaaaatacaaaaactagccaggtgtggtggtgcgtgcctgtaatcccagctactcgggaggctgaggcgggagaatcacttgaacccgggaggcagaggttgcagtgagccaagatctcaccaccacactscagtctaaaaaaaaaaaaaaaaaaaaaaaaagcaaacaaatctttatatg

SEQ ID NO: 384902 - DNA, 539 bp, Homo sapiens
ggtttttatgcctttcctgttagaggcaacagatggttcccaacaacaaaaaaaataccagtcactcttgataaaatatgtgcacgccaaaccgaaaaaacagagatggacagcaaattggcaaccattaccactacagtttatatttggcatttgaagacactgattgtatatacagaagtcacatcttgccataataaaatcttttcttgatttgaaaaaaaaaaaaaaagcaaacaggataggtgcagtggctcacgcctgtaatcccaacactttaggaggctgaggcaggtggagcacctgaggtcaggagttcgagaccagcctggccaacatggtgaaaccttgtctctactaaaatacaaaaactagccaggtgtggtggtgcgtgcctgtaatcccagctactcgggaggctgaggcgggagaatcacttgaacccgggaggcagaggttgcagtgagccaagatctcaccaccacactgcagtctaaaaaaaaaaaaaaaaaaaaraaaagcaaacaaatctttatatg

SEQ ID NO: 384903 - DNA, 464 bp, Homo sapiens
tgccaatccaagagatgagtccatctctctgccctcagtttggggttgctctaggaggctttatggggtgcagtggcccccagaccactaggctgtcactgaagttgatgcctttcctacagggacaaggaacccagcagacctgcctcctgcctcgttctgccacctggggaaggcagggttctgcctttgagcctaaagagttttctaccccagggctgagagtgtgagtggaagtcargaggaaccagctctaggtaaagccctaggatgggccttctggtcaacgtccagcaggtctcagctcctctttctgctcccatggaaagaatcagaagtggggtatttggcatcgttttgcctgaagaagagatggaaaggcttggaggtgcacccaatggtgagccagaataaagaggagcccaaaatttttccagggaaggcaggtccaaatgacctactta

SEQ ID NO: 384904 - DNA, 547 bp, Homo sapiens
tcacccccactaagaactaaatagtgttatacagacaaaatggatgtgaggagctcattgtgggagtaaaaggagatgtctgtgcccagggaatttgagaaggcctaaaatatccatcagcatggcttgctgtaacctactgtctgtggacctagtctttggccaggaggcctggcattgttgcagctatcctaacagcagcctaaagaagggacaaaaggctgagagtatctcaaataaaccaagccagggccaagtctgaaccatgttccaaccctggccttttttggttatacgatacaataaattcctgttattgtcttcagttgagttgggtcagattttctgatcattgcagccaaaagcatgctaagctggtacactcagtgagcttggaagcacagcaagaggaggaagtgagtaagtcccagtaggaatgcacctctctggggaccagggcactygagtctgagggtcagggcatgctccccatgctttctgcttggacaggatctggatctttgctttctgttttcagaattctgga

SEQ ID NO: 384905 - DNA, 570 bp, Homo sapiens
agggaagcattgagaggggagtcttatggctcaagcctggcagcagagtgccttacttccacccataatcatacaccacacacagcagtggtgaagcctgggagagcccctccatcccatttgaactgcccaagagagagagagagaaacaaacaaacaaacaaacaaacagaagaggatggaactctggagagcaataaracaatctgtaagccaaggataaaaagaagccacaaagaagattgagatgggtaatcagacaactaaagacaaaaaccagagtggagacagagattaaaggaagagggagttccaagtaggggaacaagaacacttaaccatctccccatctcattagatggtgctgtggattaaaggagctgggaaatgtgaaagtgttatcaaaatggtgaaacactgtacccatgtgtgagacagactctgataatttgtttgcctctggggcctcttgagagccccacctgtaacattcagcccctggaattgccaggccccaccctgctccttccctttctgcactcccagcagatggggtagcagggaaggttg

SEQ ID NO: 384906 - DNA, 559 bp, Homo sapiens
tggatatgggctgtctgactcccccgaccctgcctgaatgcagagctctgacgaggtaggttggccacraagccaggctcaactgatgcacaaaggaaaaataaatatatcccctctcaccccagagcagctgaggtacccacaacaaacatggatctgtgtgtgaggcttctgcatgggcagaggctgctatttttagggagacccactgattaggattgtgcaggaggttccagccgcctggatggccccatgatggaggccaagggctggcctcaggcacagcaccagcttcctgccccatccatgacaagaactccctcctcgaccaaacatactcattactccttactctgatgagcccccatccttggccaactgagtccagttttagcaaagaatttattgagaatccccccaccttgatatcaagttcctcttccccacaccctgcacacctaggcaagttcctcttagtgattttccatctacttccttaccctgtcattggctataaatccccacttgtcccttttgcgtttggagttgagtttactct

SEQ ID NO: 384907 - DNA, 559 bp, Homo sapiens
tggatatgggctgtctgactcccccgaccctgcctgaatgcagagctctgacgaggtaggttggccacgaagccaggctcaactgatgcacaaaggaaaaataaatatatcccctctcaccccagagcagctgaggtacccacaacaaacatggatctgtgtgtgaggcttctgcatgggcagaggctgctatttttagggagacccactgattaggattgtgcaggaggttccagccgcctggatggccccatgatggaggccaagggctgscctcaggcacagcaccagcttcctgccccatccatgacaagaactccctcctcgaccaaacatactcattactccttactctgatgagcccccatccttggccaactgagtccagttttagcaaagaatttattgagaatccccccaccttgatatcaagttcctcttccccacaccctgcacacctaggcaagttcctcttagtgattttccatctacttccttaccctgtcattggctataaatccccacttgtcccttttgcgtttggagttgagtttactct

SEQ ID NO: 384908 - DNA, 493 bp, Homo sapiens
ctcacagttttggcccccaggccaatggctcttaaccctgggtggttcactggaatcccctgggaagcttgatactaaaacagtcatcccttggccctatttgaaactccctgaaacatcacccctctaaatgggggtccttgtgtctgtttttaccctggtgattctggggaagcaacatctcagctaagcttctcagtcttctttaggcctagtaggagcagcaggaattggaggagggaaagttgtgtcacaaaagagttatttttaaaatcatcagttaccctgagtatctttccatggtayatggtgtgccattaccttggacagacttacatcatctttgtaaaaagagctgtgttcctccatcagctgccacacagccaaaattctactcaaagagatccattgtgttggagtgaggcattgtgtctccagtgtctagcacagtctggtacatattaagcgtataggccaggataggccaggttat

SEQ ID NO: 384909 - DNA, 604 bp, Homo sapiens
tgcccacactcattcactaattcaacaaatgtgtatattgagctcttcctctgtgccagacactatgctgggcatccagggctctgaggaaagcagcccaatttaggtactgacctaaaggactggagatataacacgcttcttctccaacttctttcaaaaggatttgttgatttaagagacctcagagagaaggcaatgcttaacccaaagttaccacttctctaatagagaaatttcagatcttgctgtttattggaaaagaggcaatactttagccaacaaaaacctttccattattccccaaatcaacaatagctagcatgcagctcaaaaaaaaattaaaaagtgtttccaaaggacattttctcatttagctatgcagagcagtgattaccacagagggggtgccagaagatacatggggcacaagaaaaggatgtgagaactcctaatcccttagaactgtttcagcctatacatcttctactttctgtataagctttataacatatattagtacaaatttacatgtacaaaatttataaataaataacawaagcaaaaactaggatgggtgctcaaaaatgttttactgatagga

SEQ ID NO: 384910 - DNA, 630 bp, Homo sapiens
ttctaagtcatgagtcttaaatcataaatccaactgtagtacttcacagtcagtttcaactctataaaccttatattaattctgcctaagagcacatgaatgctaatattttcaattgtataaactttttgttattgatgttataaatctgagttttaaaagtagctaactttataacttttagaaattttcatcatactttgagacctcagtctcttcatctttcaagtaaaagggttgggctggatctctaagtgtccttctggccctaacatcctatgggtctgggtgccaaggctttaaacaatgtccagtgagaaaataaagaggatgcaaactctgaccctgggctgtgaatgagtatgctactcccagatttacccagaaggatgttctgtgccctaaagagtggccaagtgagtttatggtctggttatcttggctatttgctcttttctagaattgcaatatgtgaataaatttaaaacactttagttttccaactartaaatataggttgaattggaaaatggaaattttgaagtattcttatttgcaaaacacaatactacaactcagttcttcatttatattgcatggatcaaaaataaaatgaaatgacaaaaatta

SEQ ID NO: 384911 - DNA, 422 bp, Homo sapiens
tgagctcctcatggagaaataatttaatagctgaagatcgtttgagacagttcctggcatgcaaaagtcttaaagataatgtaactagtgttgactagccatttagagaggaaaagattgggcttagagccagattgctagagcctgagcatgttggcttgtcacttacagctatgagaccttgggcgggtcacttcagctctgtttccttattccctaagatgggaataatgagagygctgctttgtgggtagtcgtgaggaatgaatgagttaatccacatacaggacctagaacagcacctgtcacatagtaaattctcaataaaaatcttagccattatgatccctaggctctgaagtaaaaaattatttcccctatctcataaggttgttgggaggtttatatgagacaacctataa

SEQ ID NO: 384912 - DNA, 616 bp, Homo sapiens
tttggcacctactgagtaatcattcaatgtttgtattcagccaaggtcctaaatccttgagttaaaaaaccactccactttggctagagtccctggcttcttttgaattcaaaagattctgatgtttctataagattcaaagtagttttaaagattaaccttgctcaaacaagtataatagatttcatgcttttttccccccattttagtcttaatttttagatgtctacttttggaagtacagtaagttttaatttgttctcagtaagttttagaaatgatcatttggtatatttcactactggttaaataaaggtttcacaagtatggcaaattgacttttaggaaagattttgaaaaatgtttatcatggcttactagtgcgttattctcatrggttgggtgagccatatcagaatcacttacgcaacttttttcaaaatatatgtccacaaacaaattcatctcacctccaccttcccttgatctctaggcagtcacaagccttttaggaaaatggagaaggcatgtgaggcataattacacagacaagcacatcccagatgattctggtcttaaccctaactcagtcattcccaaaatttgcagcacattg

SEQ ID NO: 384913 - DNA, 416 bp, Homo sapiens
ttggcctggggcaagcgggccgcgggggcgcagtaagaggctacgtggaagataatttaggtctcttgaaatctaaaatctcacagcgtctgttcaaggccggggagaatttcctccagtctagatagaacatcagcagttggttaaaatacacacagacatgtgtgtatttgggtccttttctattttggatctgaatctctaaagtcacttttggaatttccataagcctgtctttttgtaaacagatttttytgggattcccccaccccgactcctgtcttgcgctgcttgttcttccagcttgaccctgtccaggtatccctccctctctccctccctccttcttttcctccttccctctctccctacacacatacatttgccccagtttgcaccttttttttttttttttt

SEQ ID NO: 384914 - DNA, 523 bp, Homo sapiens
cacatgccagcctcacacccttcaaaacattgtaaagatttgagcatccaaaagtcaggttctagccagcagggttaagactctaaaataataatcatattgtatcagtattgaaatttattttatgctaggtactctgctatgtgctttaacacagtatctcatttaatctatgtgctttaatctcagtatctcatttagcaacaagaggactttgagatatatattaatactcttattttacacatgagaaaaccaaagcagagaggagtgattaagggtttatttgcctttggtcacaaggctaatgagtagtagaccaggactcaaaccgctgtctagctccaaagcctgtaatatgaacccctctgaacaaggaggagataaaggccattcccaaccacgaggacctgaaaactcatcatctagtgagggacagttgcagtagctctctcttatttatcacttagggrcccaggtctgtgtttacagaggtctacaattctgcaaagagagcactatg

SEQ ID NO: 384915 - DNA, 580 bp, Homo sapiens
agaagccttgctttcagtgtattttggcttttgatgtgccttcctcactaagtttattcatttttagctttttatttaaagggagagatatgtgactctttctttcgcttgaacactttgaggccattgcagggttactaattggcctgattttaatattgttgtgtctcagagaatagggagacccaaggcaggagaaagagagagagagagagagagagagagagagagagagagacaggggaatgtctggtcagtggggtagatcactataacaaatagagtaactacaaaacatttgaaatactgtgagaattgccagtatgtgacacaaagacacaaagggagcacaccctgttgggaaaatggcactgatagacttgctgaagataaggttgccacaaaccttcaatttktaaaaagaaaaatactcaatagaagaagccaaaaccctggctgcatctacagagaattacataccctcactttatatacagatacaaattcaatagaggaaacagcacccatgtatgtcaaccgtggctctcctgtttggttcacattgagcatgggaagacag

SEQ ID NO: 384916 - DNA, 580 bp, Homo sapiens
agaagccttgctttcagtgtattttggcttttgatgtgccttcctcactaagtttattcatttttagctttttatttaaagggagagatatgtgactctttctttcgcttgaacactttgaggccattgcagggttactaattggcctgattttaatattgttgtgtctcagagaatagggagacccaaggcaggagaaagagagagagagagagagagagagagagagagagagagacaggggaatgtctggtcagtggggtagatcactataacaaatagagtaactacaaaacatttgaaatactgtgagaattgccagtatgtgacacaaagacacaaagggagcacaccctgttgggaaaatggcactgatagacttgctgaagataaggttgccacaaaccttcaatttgtaaaaagaaaaatactcaatagaagaagccaaaaccctggctgcatctacagagaattacataccctcactttatatacagatacaaattcaatagaggaaacagcacccatrtatgtcaaccgtggctctcctgtttggttcacattgagcatgggaagacag

SEQ ID NO: 384917 - DNA, 572 bp, Homo sapiens
ggatatttctacctccagaacccagcaagtccaagggagaactcattatctccctatcygaaaatcctgtttctcctccccaattcccgatctcaagaaatagtactgtatccacccagtactgatgtaggaaaccaaagcgcccttcttgactgtcttccctctctctcttaccttcactcaatcagaaattatttgggcatgttatttagctcctctgcatctcagtttcctcatctgtagaatgaggattataatagttcagactgggcctggtgcagtggctcatgcctgtaatccccagcactttgggaagctgaggtgggaggatcgcttgaacccaggagttcgagaccagcctggccaacgtagcaagaccttgtctttattgtctttaaaataataattttaaaaaatagtacagacctcacaaggttgtcattgtaagttttcaatgtccagtgcttgtgattgtgcctagcacatcataagtgtcatatatgggtgttctttctccttctcccaccacattaaacatctctagagtctgtttccttctccccattaccact

SEQ ID NO: 384918 - DNA, 557 bp, Homo sapiens
cttgctgtttttaagcatatgtgggttcctagatatcaggaaccaagggatgatcctttagtgccactcaccaggcagtcctagcacactaagggagggaaggtaagacacaagatgctttctctgtagtatgaaatgggggagtctgtggaaggtggtcacttaaagccctgggcagaatgacagtcaccaaagcagtkaccatgataagtgccaacgtagggcaacctcacgccaaggaagaaggtgtgaccttaggctggtggcactacctacctggatagctgcactccagtgtggagagccttaaactggattttactgtgggctgcagacacagtttgccataacctttggtgtaacagacacttaaagtcaaggtgcctgccaaaagataataactttaaatgtaaaattacaaatcattaagggtaacatgatacaaatagcaatagaagcattggcagtattttaccttgattttatttttgcttgtctttcgctgtcagccttgtctaaagttgctgctgagggcacctcattcacacaccatttac

SEQ ID NO: 384919 - DNA, 574 bp, Homo sapiens
aaaaaaactgacaaattaaattgtcgtaattcatawaccattcttgtatagaaaatgttgtaatcctgttaaatttctttgtttccttcctatataagcaagatttgaacttttaacttaggggcactgaccccatttctctggagtctgtgttatctgaatgactatctcagccttttacgtgaatcaattctttaaaccggcttctgatccttcagttatttcaggttgtcagtctctgttgcatgttagaataagcaggggagcactggaaaaatatgaatgctgcagcacctgagcagctctttgcacaccagtgttcacagcagcattattcacaatgccaaagggtggaaataacctaaatgtccaccaagagatgaacagatgaacaaaatgcgatacatacatgtaatggaacattattcagccttagtgaggaaggagattgtgacgcatgctacaacatggaggaatcctgaagacattatgctaagtgaaataagcctgacacaaggacaaatactatatgattccacttatatgagatgcctagaatagtcaaattcataca

SEQ ID NO: 384920 - DNA, 574 bp, Homo sapiens
aaaaaaactgacaaattaaattgtcgtaattcataaaccattcttgtatagaaaatgttgtaatcctgttaaatttctttgtttccttcctatataagcaagatttgaacttttaacttaggggcactgaccccatttctctggagtctgtgttatctgaatgactatctcagccttttacgtgaatcaattctttaaaccggcttctgatccttcagttatttcaggttgtcagtctctgttgcatgttagaataagcaggggagcactggaaaaatatgaatgctgcagcacctgagcagctctttgcacaccagtgttcacagcagcattattcacaatgccaaagggtggaaataacctaaatgtccaccaagagatgaacagatgaacaaaatgcgatacatacatgtaatggaacattattcagccttagtgaggaaggagattgtgacgcatgctacaacatggaggaatcytgaagacattatgctaagtgaaataagcctgacacaaggacaaatactatatgattccacttatatgagatgcctagaatagtcaaattcataca

SEQ ID NO: 384921 - DNA, 600 bp, Homo sapiens
ggtccttaatcccaggagtttgagaccagcctaggcaagagtgagaccctgtctctacaaaaaaaataagaaaaaaaaaatgttagctaagcatggyggcacatgtctgtagttgcacctgcctaggaagttgaggtgggagaatcacttaagtccgagagttcaaggctgcagtgagccatgatcactccactactagaggaaaagtccacatcaatacctatagcataaaaatataggagaggttattctcctctgaggccgctgaggtatgtcattgcttttgtgttttgaatgacttcagtttaaagattgagcaaaatagcatagaaagggcttgctaggatttcaagtctaactttgtaatgaatctggtgcttcgttacatggtggatagatgtagagataatagggacggctgtcttattgctaggaacaatggttttcttagcatgactctttatccctataagccatccaggattatatttcctagtcctgttgaccaagctggaagctgtctctccagcctccctcccagcttccatcctcacaacagcctcatcagagcctgactcaggatggggagttttcctttct

SEQ ID NO: 384922 - DNA, 568 bp, Homo sapiens
ccctgagtgtctcaatttccttatctgtgaaagggaatgataatagtgtgggaatttgatgagtatgtagtattcagaagagtcaatggcaggcagaaagcattccataattgtctcttatattatgaggctaattttctcattaatcaggcaaagtctggttcttacaactaggaactatgactgataattattaatatttccagttttaatgaggaaactgaggctcagaggaatacttaacattataaatgtaaagacctgtggatgcaagaaattaagaataaaattcagatttatcctaccctcaaactaacttcagtctgttttattccctgaattagtataggattacttaaaatatccttataccaaacaaatagaagtaacttacttcaaatgcagttgaatggggaaagaagattggaatagaaaattttcttctaactctgtcaatattacatttaggagrcctcttatcagactgaaatttcaatctccaataagaccacaagaaaaagaaaatgtctgtgtacataagatatggcatgaacccaataacttaaca

SEQ ID NO: 384923 - DNA, 599 bp, Homo sapiens
aaactcttgatataagggcttatctttcccccttacactcaccaggcagaatttcatctcttttgctgtggctgcaaaataaaatgcatgttccaaatgaaacagtcaagcatttcacatttgarctaagcttcttttgccatagtcaaaagcactttgcacgtcgatcaatgaaatcatcagaaatgggcaatcattttccacctgacatgttttcctttgtacaagccccactacaaatgaatatatttatcttttctaaatgttcctgtaatttctctaaggccaatgttgatgatttgatggaaaacacaggaaattgtcttttatactgtgcattgtaattgcaccatttacatactttatgcaaagctaatcattgtgcattatataccaaatgcttttttaattgcttcttttagaaactgaaaattttttattcttttctcttctaaattcactttttagttttaacatagaatatgaaaaatagcatttccattattttttaattgcatgtaacattgaatgttttaaatgtatacatcttagtaacacttataatttctccatttcagactgtgttatttttcattttt

SEQ ID NO: 384924 - DNA, 546 bp, Homo sapiens
tatttgtaaaattgatactttagaatttaaagaaataaaatatgattgtataataggcaaatttaggtctgaagttactattaaatctagagctgggtactttctctaaatacctggcctagtaaaacccaaaacacataagtatcttggaactgacagaagtcaaaacataatccagaaatttaaagttttttagttgttctcctatagtagaaaaaagaagcatggaaatctgaatctattatacactgattcctatacaaatataagtaaatgtrcttttgaaatgatacatctctctctggagaaagcttctgattggtatgctattgggcactgtcaatggctttgtcttgctaagtgtttacatcagtaacttagatgtacatgcataggacattcttatcaaatataggctggatacaaagctggaagtgccaaagaataagatactctacctactgcaggcatttaacataaatagatgcaattgactaagcagggataaattaaaagtcctgtgtttataagcaaagaatccaattt

SEQ ID NO: 384925 - DNA, 589 bp, Homo sapiens
cctcttcctccttcttggaatgcagatgtgaaagaatggccagtcatcccatggccattagatgccttgtgaaggtaaaaatcacatccaaaggatagtgatccttggatagaaggagcttactggatattaatggcattgagaaattgttgcatcagctctgggttgccttaatatgaaacatcttgttaagtgaaaactctttttaaaccactagagttatatttctgctgaattgagagaatctctagcgaacagttagggawggatttctaggatcaaaatttttaatgaggaatttgaaaaagataccctattgtcttttagggtcaagtgttcccaataaagaaaaaaacgttggttgttgagcctgtattttttaggctcctcaaaagcatttcaaattctccttttgtcattattgttttgaaatgtcttaaaaatgtttaagggaatatatccttatttatgttgtgtggctcttagcacgtcattttaaatcaaatacttaggtcttatttaagtcttaagaattatttcctcctttcatatccagcctagttcaagccttctggatcacccttaagtg

SEQ ID NO: 384926 - DNA, 556 bp, Homo sapiens
gaaagagaaatggagagcatattagagatctgcttctggggtaaaaactgatatataacacctaatatatagcattaatgggtgttgttactgaaactggagagttccctggctccccttgcagggcctgtgacaggggtgtggctctctacaccaccactgtgagctcaaacccctttcaggagcgggagcatgcagatgagcaggtgcgggagccagggcaagcgctttggggtctggccccatggtagtgtctaatggtgggtgcctgtgaccccagcgttacagtgytcttttagctctgctgtccacagactgcttaagtgttaaccagctcagtgccccctctgcttttctgtaatgggccagtgtgacattttctgtgtcatgagctcttgtccagtgtccccaggagtatcgagtcgcacacagacttgaagggtggtgaatgtcggggctttattgagtggtggaggtggctctcagtgggatgcatgggagctagaagggggatggagtgggatcttcccctggagtttggctgtccagcagccga

SEQ ID NO: 384927 - DNA, 634 bp, Homo sapiens
atgtacaacaaaataaataaggtcaccgttgtmtcaaatatatccttgtaatttagtaagcatgaaaatataaatagaaacgttagctcccccagattaccaaccacctactgcctaggtacccatatcctcaaagtgccaaagtaaaccacaaaaatcagaagcatcctcctggtggataaattttattgaaatatttcataacaagttgctatatattaacttttctataacatcaaatattttctcatcaaaatcagcataggtatatgtggagtagaagatgaaatttatttgaattttacaaattaaaaaaatgccaaagaaatgctagacattcagagagcagtctccctgtttcacaatattcactcctttccttatgacatgagaaatacattaatgaaaatatttgagaagcattaatacatgattttaaaagtcaccattatgaaggtaattagtaaatgcttttaatactaattagagtgactagagaaaaatgcatctagtagtctacatttacattatacattaaaagctgtcagtgcccccacccgggggccctttacttagacagtcagcatcctgcctagctcctataagtattggctgctaatagctcacagctgcc

SEQ ID NO: 384928 - DNA, 574 bp, Homo sapiens
atagaagaaaaggagaagagggctaaaagctgcaggtactactaggaatacaccaaaaaaataaaattcaactatctagaagccaattattcagcagtgaaattagcaagaatccccttgtatgtgaagaaaaagcgtaaattttaatgggaacaacactataaatcagcatttatcagtggtctaaaaataacaacaacaatcatatgtcctttaattagtccaaatctaatttttttttcattcttgagagagtagattgaaaataaatctttctayggatgaatctaaagcgtttctagattttggtcataaaaatgatgaaatgcatctagtgtgtcctagttaaaaaagcaggatgccaagaggaacattttagagagactattactaaggttaatactgttttttttaagttaaacataagccagttagttaatcaatcaaccagttctcaatttctaaggagttgagttagaccaggtgtagggtatgtatttatcaagctgcaaatagccttcacatcacaactggaaaatttatatttttaaataatactgttttaatgaaggta

SEQ ID NO: 384929 - DNA, 574 bp, Homo sapiens
atagaagaaaaggagaagagggctaaaagctgcaggtactactaggaatacaccaaaaaaataaaattcaactatctagaagccaattattcagcagtgaaattagcaagaatccccttgtatgtgaagaaaaagcgtaaattttaatgggaacaacactataaatcagcatttatcagtggtctaaaaataacaacaacaatcatatgtcctttaattagtccaaatctaatttttttttcattcttgagagagtagattgaaaataaatctttctacggatgaatctaaagcgtttctagattttggtcataaaaatgatgaaatgcatctagtgtgtcctagttaaaaaagcaggatgccaagaggaacattttagagagactattactaaggttaatactgttttttttaagttaaacataagccagttagttaatcaatcaaycagttctcaatttctaaggagttgagttagaccaggtgtagggtatgtatttatcaagctgcaaatagccttcacatcacaactggaaaatttatatttttaaataatactgttttaatgaaggta

SEQ ID NO: 384930 - DNA, 606 bp, Homo sapiens
aacacagagttaccatatgacccataaatcccactactttacttatttaagagaaataaaaatatacatttacacagaagcttgtacacaaatgttcagaccagcattattcataatagcctcaaagtgaaaataacscaactgtttatcaactgatggataaatgaaacatggtatatccatacaattgaatgctatttatcaataaaaagaaataaattactgatacatgctgcaatatgaaatcaaccttgaacatattttgcaaagtgaaagaatctagtcacaaaagaccacatattgtcagatttcatttatattaaatgtccataatagccagatcaatagagacagaacagagatgagcagttttctgagtcagaggtctggggaagagtgtgaataggaaatgaatgataatgtgtatggagtttcttatcgggttaatggaatatttctacaattagatttcggtgatgattttataactgtgaatatactaaaagtcacaaaatgtgttaaattggtgaattttatggtttgtgagttgtacttcaatcaaggtgtttaaaaaggagtcaaaatacccaccagagccaataaaat

SEQ ID NO: 384931 - DNA, 606 bp, Homo sapiens
aacacagagttaccatatgacccataaatcccactactttacttatttaagagaaataaaaatatacatttacacagaagcttgtacacaaatgttcagaccagcattattcataatagcctcaaagtgaaaataacgcaactgtttatcaactgatggataaatgaaacatggtatatccatacaattgaatgctatttatcaataaaaagaaataaattactgatacatgctgcaatatgaaatcaaccttgaacatattttgcaaagtgaaagaatctagtcacaaaagaccacatattgtcagatttcatttatattaaatgtccataatagccagatcaatagagacagaacagagatgagcagttttctgagtcagaggtctggggaagagtgtgaataggaaatgaatgataatgtgtatggagtttcttatcgggttaatggaatatttctacaattagatttcrgtgatgattttataactgtgaatatactaaaagtcacaaaatgtgttaaattggtgaattttatggtttgtgagttgtacttcaatcaaggtgtttaaaaaggagtcaaaatacccaccagagccaataaaat

SEQ ID NO: 384932 - DNA, 606 bp, Homo sapiens
aacacagagttaccatatgacccataaatcccactactttacttatttaagagaaataaaaatatacatttacacagaagcttgtacacaaatgttcagaccagcattattcataatagcctcaaagtgaaaataacgcaactgtttatcaactgatggataaatgaaacatggtatatccatacaattgaatgctatttatcaataaaaagaaataaattactgatacatgctgcaatatgaaatcaaccttgaacatattttgcaaagtgaaagaatctagtcacaaaagaccacatattgtcagatttcatttatattaaatgtccataatagccagatcaatagagacagaacagagatgagcagttttctgagtcagaggtctggggaagagtgtgaataggaaatgaatgataatgtgtatggagtttcttatcgggttaatggaatatttctacaattagatttcggtgatgattttataactgtgamtatactaaaagtcacaaaatgtgttaaattggtgaattttatggtttgtgagttgtacttcaatcaaggtgtttaaaaaggagtcaaaatacccaccagagccaataaaat

SEQ ID NO: 384933 - DNA, 606 bp, Homo sapiens
aacacagagttaccatatgacccataaatcccactactttacttatttaagagaaataaaaatatacatttacacagaagcttgtacacaaatgttcagaccagcattattcataatagcctcaaagtgaaaataacgcaactgtttatcaactgatggataaatgaaacatggtatatccatacaattgaatgctatttatcaataaaaagaaataaattactgatacatgctgcaatatgaaatcaaccttgaacatattttgcaaagtgaaagaatctagtcacaaaagaccacatattgtcagatttcatttatattaaatgtccataatagccagatcaatagagacagaacagagatgagcagttttctgagtcagaggtctggggaagagtgtgaataggaaatgaatgataatgtgtatggagtttcttatcgggttaatggaatatttctacaattagatttcggtgatgattttataactgtgaatatactaaaagtcayaaaatgtgttaaattggtgaattttatggtttgtgagttgtacttcaatcaaggtgtttaaaaaggagtcaaaatacccaccagagccaataaaat

SEQ ID NO: 384934 - DNA, 610 bp, Homo sapiens
ctgtggtagtacaggaaagatcaggcagtggatgggaccctaggtctcccaagagaatatgtcctttgtcttcagctaccaaggcrggtagagaaaggttatctggtgagggcagggttaggcatgactgagctcagattctccttgaaagggcttgaggcagctgctgtggggtatgagaggtgtggttctcaggccattgtagttatgttcccagggtgattatggctgcctctgctgtggcatgaaagtcgcaagggaagtggggcaaagctgacagttacaggcctcattcagctcccatgcaacccaaaaggctggtctcactcccactgtgccctattcaacagcaccaagtttgtttccaggagcaggtgagcagggctgagacctgccccaggctaccagcctcatggctgcaaaagaaagcagagctttcaggttttactcttccctgcctgcactggcttctgtgctgtgtctgcactccagattcaccccatcacccgagtcctgtccaggaaacttcacgttcagtcaacattgttaaaaagctcagctggaacttttcttctcactgtggtttttttcccagttcctctggcagccc

SEQ ID NO: 384935 - DNA, 610 bp, Homo sapiens
ctgtggtagtacaggaaagatcaggcagtggatgggaccctaggtctcccaagagaatatgtcctttgtcttcagctaccaaggcgggtagagaaaggttatctggtgagggcagggttaggcatgactgagmtcagattctccttgaaagggcttgaggcagctgctgtggggtatgagaggtgtggttctcaggccattgtagttatgttcccagggtgattatggctgcctctgctgtggcatgaaagtcgcaagggaagtggggcaaagctgacagttacaggcctcattcagctcccatgcaacccaaaaggctggtctcactcccactgtgccctattcaacagcaccaagtttgtttccaggagcaggtgagcagggctgagacctgccccaggctaccagcctcatggctgcaaaagaaagcagagctttcaggttttactcttccctgcctgcactggcttctgtgctgtgtctgcactccagattcaccccatcacccgagtcctgtccaggaaacttcacgttcagtcaacattgttaaaaagctcagctggaacttttcttctcactgtggtttttttcccagttcctctggcagccc

SEQ ID NO: 384936 - DNA, 502 bp, Homo sapiens
agttgcaaatctttcattaactactgaaagaaagcatatcagtggacaaagtttatcttaatctgaaatacaggaaaaaatatataggtgctcatattaaaatattgaataaatttacacataatatctttaactactgggttttttttaataatgggatcttctacatagaaccatttctcatatgactccaataaaagccaagcatagagctttataatatgttctatagttcatggctcaatctatactgatctaacctaacacakgtttcaagttcgtgtcaggaggaatatatacatgatgtgcctcttagagtaacccagttgaatactaaatgtcccatctcaacttttgacaggactatgacagaccatttaaacatgagatcctttacaatattgaagatatacattctgtattgtcaactgagtcctacactgtagatgcatgtccactgacattattcatgtgaggcaaaatctactacacagaagaaata

SEQ ID NO: 384937 - DNA, 572 bp, Homo sapiens
ttagatgccaggctacaaagtctgttcttcattcagtaggtgatggggacctgctggagactttttatcaggaaagtgatatgataaaaaggaaactttgagagccttaagttctgtacgtgattttgagatatgtgacaccacagtcaatcagaccagctggtagtccagacaggaggtaataagggcctgaactatgacagtgggaatgaaaatgagaaattagtaaagaacactgagctttgaacccattagaaagaacccatggcaactgatctgttcacagcagtagtgacacctccattaactgtactgtatcwcctctccaggagcataagaattgattggtcctagaagacacctcctaaaataagtgtaggcttgttctcccaccatctgcatggatagatgcacctacacaaaaccagtctttgacttaatttaaaaatcatatactacatgaacaagtcccctccccacccaaccaagatggtggatgcgaagtttttggcacgtagcatacctcgggcacttgacaagagcaaaatgcttcgtgcattttcccagatcca

SEQ ID NO: 384938 - DNA, 572 bp, Homo sapiens
ttagatgccaggctacaaagtctgttcttcattcagtaggtgatggggacctgctggagactttttatcaggaaagtgatatgataaaaaggaaactttgagagccttaagttctgtacgtgattttgagatatgtgacaccacagtcaatcagaccagctggtagtccagacaggaggtaataagggcctgaactatgacagtgggaatgaaaatgagaaattagtaaagaacactgagctttgaacccattagaaagaacccatggcaactgatctgttcacagcagtagtgacacctccattaactgtactgtatctcctctccaggagcataagaattgattggtcctagaagacacctcctaaaataagtgtaggcttgttctcccaccatctgcatggatagatgcacctacacaaaacmagtctttgacttaatttaaaaatcatatactacatgaacaagtcccctccccacccaaccaagatggtggatgcgaagtttttggcacgtagcatacctcgggcacttgacaagagcaaaatgcttcgtgcattttcccagatcca

SEQ ID NO: 384939 - DNA, 572 bp, Homo sapiens
ttagatgccaggctacaaagtctgttcttcattcagtaggtgatggggacctgctggagactttttatcaggaaagtgatatgataaaaaggaaactttgagagccttaagttctgtacgtgattttgagatatgtgacaccacagtcaatcagaccagctggtagtccagacaggaggtaataagggcctgaactatgacagtgggaatgaaaatgagaaattagtaaagaacactgagctttgaacccattagaaagaacccatggcaactgatctgttcacagcagtagtgacacctccattaactgtactgtatctcctctccaggagcataagaattgattggtcctagaagacacctcctaaaataagtgtaggcttgttctcccaccatctgcatggatagatgcacctacacaaaaccagtctttgacttaatttaaaaatcatatactacatgaacaagtcccctccccacccaaccaagatggtggatgcgaagtttttggcacgtagcatacctygggcacttgacaagagcaaaatgcttcgtgcattttcccagatcca

SEQ ID NO: 384940 - DNA, 559 bp, Homo sapiens
ctcacttaacaattttcaaaacacattggaaaactttatcaatagactggacagcaaagcagaagtaaaaatttcagagcttgaggatcagttttttgaaccaacacagtcagagagaaataaagaaaaataattttttaaaatgaacaatgtatttgagaaatacgggtttatgtaaagcaatcacamctaagatttactgtcattcctgagagagaagggcaaaaagtaaacaacctggaaagcatctttgagaaaatactccaggaaaatgttcccatcttgcaagagaggtagacatccaggtacaagaaatccagagaacacctgcacaatattatacaaaatgagaatcacaaaggcatatagtttccaggctattcacagtccacactaaagaaaaacatcttaaaggcagctactggaaatggtcagatcatgtacaaacaattccttcaggctaacagtggactttgcaccagaaaccttataaatcagataagattgggggcctattttcagcattcttaaagataagcaattccaatcaggaatttca

SEQ ID NO: 384941 - DNA, 555 bp, Homo sapiens
tctaaaccatttggcccactcaaatgaaggacaagaatgttctttcctgtggcaccaaggccaaggaatcattggttaaataaaattaggtgtaagatgctgagtaaagttgaagtcctgaacttactttgattatttgcatgggtgaacctgatgaggactcacctcctaatgacaaagcccattaatagggattgtttggttttggaggcaagagatggaaagctgataaagtcagagaaattaagaaaatcaygctaagtgattttgttcatccatggtggagcttttagaaacaaacaaacaaaaagcaaacagaactcttcttctgagaagcatagtaacttcttcctttcctttctgtactgcaggtatttatactgtagttattttttaaaagatgtgaagattctgtgtaatgcaaaaattcacaacatatcacagccaatgccccaagcaaacaaaaggggaaagtttttagctcctacatgtttcctgtgagattttgaaatacaacttcagactactaattacagtgaagttagatgaaaccaa

SEQ ID NO: 384942 - DNA, 592 bp, Homo sapiens
tttcagtgagaattcaattcattttatttcttctgcaggttaagttactgtaagtatagagtggattctggtaacatatrtctatgtttttttcattggatgagttttgcaaagttgcctcagagaatttccaaattgaaaagaagagatgtgtattggtagtttttatagacagagtgcacctaaatacagaaactgtatctagatcaacacaaatctctcaccacccatgggaaataattcaagagtgtatgctagaccaatagtgggtcaggaacattatcttcataagaaagatagcacattatacttacttctgattttcactattaattgtttgttaccttaggcaagtcgtctgggagaagggatttaataataagaaaatatgtgtgtccttcctttcctaagttggccaagggcacatttcactgcttgagttactctactcactaagaaataattcaagctctgtgcttctgtacaatttatgtttttcttggaaccacagtgtgaaaggatctatttgctatgctcactttaattttgcttaatattggaaggcctacatttatgcaattataattttaag

SEQ ID NO: 384943 - DNA, 592 bp, Homo sapiens
tttcagtgagaattcaattcattttatttcttctgcaggttaagttactgtaagtatagagtggattctggtaacatatgtctatgtttttttcattggatgagttttgcaaagttgcctcagagaatttccaaattgaaaagaagagatgtgtattggtagtttttatagacagagtgcacctaaatacagaaactgtatctagatcaacacaaatctctcaccacccatgggaaataattcaagagtgtatgctagaccaatagtgggtcaggaacattatcttcataagaaagatagcacattatacttacttctgattttcactattaattgyttgttaccttaggcaagtcgtctgggagaagggatttaataataagaaaatatgtgtgtccttcctttcctaagttggccaagggcacatttcactgcttgagttactctactcactaagaaataattcaagctctgtgcttctgtacaatttatgtttttcttggaaccacagtgtgaaaggatctatttgctatgctcactttaattttgcttaatattggaaggcctacatttatgcaattataattttaag

SEQ ID NO: 384944 - DNA, 597 bp, Homo sapiens
tccaaactttctttggcttctgaaagccaagaacacctctgtcttagtttgttctggctgctataacaacagataacaattatctgttgttgactagataatttatcaacaacagaattttattgcttacagttctagaggcttrtaagtccaagatcaaggtgccagcagattcagtgtttcttgaaggcttgttttcctgctccaaagattgcacctacttgcagtgtccttacttggcagaatggcataaaagttatagatttttctcaagccctcttataagggctctaatttcattcatgagggtggagttctcatgacctcatcatctcctaaaagccctacctttaaatactatggcactggggattaagcttcaacatgatttttgaagggacacaaacatttaaaccatagcaacaccccccaccatcttatgactactcattactttctctatactccctccatggacaatctcatcctgtccagagtctcaattaccaacaaattcctgtgattctcaaatttatctttcaagttcattcttctgagctctagatctttaagacatttataatggaaagttcagaa

SEQ ID NO: 384945 - DNA, 597 bp, Homo sapiens
tccaaactttctttggcttctgaaagccaagaacacctctgtcttagtttgttctggctgctataacaacagataacaattatctgttgttgactagataatttatcaacaacagaattttattgcttacagttctagaggcttgtaagtccaagatcaaggtgccagcagattcagtgtttcttgaaggcttgttttcctgctccaaagattgcacctacttgcagtgtccttacttggcagaatggcataaaagktatagatttttctcaagccctcttataagggctctaatttcattcatgagggtggagttctcatgacctcatcatctcctaaaagccctacctttaaatactatggcactggggattaagcttcaacatgatttttgaagggacacaaacatttaaaccatagcaacaccccccaccatcttatgactactcattactttctctatactccctccatggacaatctcatcctgtccagagtctcaattaccaacaaattcctgtgattctcaaatttatctttcaagttcattcttctgagctctagatctttaagacatttataatggaaagttcagaa

SEQ ID NO: 384946 - DNA, 597 bp, Homo sapiens
tccaaactttctttggcttctgaaagccaagaacacctctgtcttagtttgttctggctgctataacaacagataacaattatctgttgttgactagataatttatcaacaacagaattttattgcttacagttctagaggcttgtaagtccaagatcaaggtgccagcagattcagtgtttcttgaaggcttgttttcctgctccaaagattgcacctacttgcagtgtccttacttggcagaatggcataaaagttatagatttttctcaagccctcttataagggctctaatttcattcatgagggtggagttctcatgacctcatcatctcctaaaagccctacctttaaatactatggcactggggattaagcttcaacatgatttttgaagggrcacaaacatttaaaccatagcaacaccccccaccatcttatgactactcattactttctctatactccctccatggacaatctcatcctgtccagagtctcaattaccaacaaattcctgtgattctcaaatttatctttcaagttcattcttctgagctctagatctttaagacatttataatggaaagttcagaa

SEQ ID NO: 384947 - DNA, 592 bp, Homo sapiens
agttctagaggcttgtaagtccaagatcaaggtgccagcagattcagtgtttcttgaaggcttgttttcctgctccaaagattgcacctacttgcagtgtccttacttggcagaatggcataaaagttatagatttttctcaagccctcttataagggctctaatttcattcatgagggtggagttctcatgacctcatcatctcctaaaagccctacctttaaatactatggcactggggattaagcttcaacatgatttttgaagggacacaaacatttaaaccatagcaacaccccccaccatcttatgactactcattactttctctatactccctccatggacaatctcatcctgtccagagtctcaattaccaacaaattcctgtgattctcaaatttatctttcaagttcattcttctgagctctagatctttaagacatttataatggaaagttcagaactaaatgaatttayctaatttcgctatctatcctttcccaatccccatacacttgctctttagtctgttggcccagattagttgactagaacattatcagacttgcaatccaaacaaacatatag

SEQ ID NO: 384948 - DNA, 553 bp, Homo sapiens
cagcaatttttcaactactttcaacaagttgcatcagcaagatttgcattcacagtttacagactcaaatactgtggaggatggtctgaagaccagagaaagtctgaccacagagtattatttccttggaatacactaagtcctaagtggggaatgtctgaaaaataattaagtaacttaactaagaaactcagtcatcttggttggcctcctacagatacatttttgttgaaaagtgagggaggaaggtattagtttatactttaaatgtctcaatctctattatatctgtatataattaatatctattgtatataatagttctgtgtaattttattacatgtgtagattgcacatrtaggtccctgtaaccactaccacaatcaagatatggaactatttcactattccactactctgaagatctccctcacactactttataatcaatcacattcatcctacctgcctcaccactatcactaacctctaatctgttttccacctctataattttttttattttaggagtgttatgtaaatgaaataatta

SEQ ID NO: 384949 - DNA, 553 bp, Homo sapiens
cagcaatttttcaactactttcaacaagttgcatcagcaagatttgcattcacagtttacagactcaaatactgtggaggatggtctgaagaccagagaaagtctgaccacagagtattatttccttggaatacactaagtcctaagtggggaatgtctgaaaaataattaagtaacttaactaagaaactcagtcatcttggttggcctcctacagatacatttttgttgaaaagtgagggaggaaggtattagtttatactttaaatgtctcaatctctattatatctgtatataattaatatctattgtatataatagttctgtgtaattttattacatgtgtagattgcacatataggtccctgtaaccactaccacaatcaagatatggaactatttcactattccactactctgaagatctccctcacactactttataatyaatcacattcatcctacctgcctcaccactatcactaacctctaatctgttttccacctctataattttttttattttaggagtgttatgtaaatgaaataatta

SEQ ID NO: 384950 - DNA, 518 bp, Homo sapiens
tcacattcatcctacctgcctcaccactatcactaacctctaatctgttttccacctctataattttttttattttaggagtgttatgtaaatgaaataattagtatgtaatcttttaagattgagtctttcacacaccataatgcccttgtattgatagttcattccttgttattggaatagtatttcgtgatataaatgtacaatagtttgtttaatcattcacctattttagtatattttggttgtttcttgtttggggctatttcctatggactttaaaatatattaacagctcttttataatctttatcttttaagccaacatctgagactttgtaagrttttgtaagttatttctattgactagattctttaaaatcttaattatgggctgtgttatattttcatggcctaactgtttcaccctcctcttttttttccttgttctttcttatttttcttttctttttggcaaaatggctttgtttaattaatgaaacaggcttccatattag

SEQ ID NO: 384951 - DNA, 518 bp, Homo sapiens
tcacattcatcctacctgcctcaccactatcactaacctctaatctgttttccacctctataattttttttattttaggagtgttatgtaaatgaaataattagtatgtaatcttttaagattgagtctttcacacaccataatgcccttgtattgatagttcattccttgttattggaatagtatttcgtgatataaatgtacaatagtttgtttaatcattcacctattttagtatattttggttgtttcttgtttggggctatttcctatggactttaaaatatattaacagctcttttataatctttatcttttaagccaacatctgagactttgtaaggttttgtaagttatttctattgactagattctttaaaatcttaattatgggctgtgtyatattttcatggcctaactgtttcaccctcctcttttttttccttgttctttcttatttttcttttctttttggcaaaatggctttgtttaattaatgaaacaggcttccatattag

SEQ ID NO: 384952 - DNA, 572 bp, Homo sapiens
attttactttacatttcactgggagaaagtcacatttctaaattccagactaatagttgatgttggggctaatttagtttttagccaaacagaaatccaaaattccagktccagcacttggctatatcagaatttcccagtttccttgaaaatttttatcctttatagatattttgaaggtgcattttcaaatttgtcttcaagtcactaaagtaactctcaatagaaataagtaaattgagttcaccaattattctaatattaaaatttaattaaatttttaaataaaatttatgcaaaatttgaagcaatatctaagtataagtctcccttggagactttcttttcttagaatagaaaggccaggcataagagcaagagtaattaaaaacttatcagcaaccttttaaaatcaagtgtctgaaaaagttatttaatttaggttagaatttaacacaactactcttgattggctgttaaatgagtatccattaattattaaaaataacatttgaaggttaacatttagcaattttgatgaaatatactctgtattgaagtagaacactttt

SEQ ID NO: 384953 - DNA, 550 bp, Homo sapiens
agataagcacaatcaagagacctctagtgagattaaccaagaaaagaagaaagaagatccaaattatctcaattagaaaagaaatgggaggtactacaactaataccacaaaaatacaaaagatcattcaagggtactatgaacatcttcacatacacaaaccagaaaatgtgcgggagatggataaattcctgaaaatatgcaaccttcctagattaaaccagagagaaatagaaattctgaacagaacaataacagatagtgatattgaaacagtaattttaaaaaaatgctgacaaaataaagtccaggactagatgaattcacagttgaattctatcagacattcaaagaagtgatgccaatcctactgaaactattccaaaagatagagaaagagggaatccttcttaaatcattctatgaagtcaatattgccctaataccaaaaccaggaaaggacataacagcaaaaaaagaaaactacacaccaatatccrtaatgaacctagatgcaaaaatcctcaagaaactctagctaacctaatcc

SEQ ID NO: 384954 - DNA, 572 bp, Homo sapiens
ctggctatgcacggagtgataatgaggctttccttgattcatagttgaccgttgttgggtctaggaatagagcaaactattgacaaattccattcttttaagtatccaggttaattaattttgtcaacgtaagagtagtcttgtagaaccaaaattactctgatmctgccctacatcttatttagttccagaaatttggttccttgcaaagtgctccccactgccctcagccacacacacacacacacacacacacacacacacacacacccctatctcaagaagaactctcctgacaaacctctatttagcatctgctgtggccaactgattcgcactatcactggccacagggcctagggtccactgccattgccctgaccaagcatttttcccttggcacaatccaaagaaacaaatctctaccaatgccaaatttgtacgttactttcactcataactaaactgaagacagactatgtttcatgcataaaatgagaataatgcctctctttctataccaatcagacctagccctcaggccaacctgaggacctgatattgtaccatcc

SEQ ID NO: 384955 - DNA, 572 bp, Homo sapiens
tatttagttccagaaatttggttccttgcaaagtgctccccactgccctcagccacacacacacacacacacacacacacacacacacacacccctatctcaagaagaactctcctgacaaacctctatttagcatctgctgtggccaactgattcgcactatcactggccacagggcctagggtccactgccattgccctgaccaagcatttttcccttggcacaatccaaagaaacaaatctctrccaatgccaaatttgtacgttactttcactcataactaaactgaagacagactatgtttcatgcataaaatgagaataatgcctctctttctataccaatcagacctagccctcaggccaacctgaggacctgatattgtaccatcctgctctctcatcagatatattgcatatacctcctctctttgccttcattttatgctaagtacacaaaagccataaacatatatattcatataactcaatgcctgcaggtcattcagcagcacacaagagaaatggggctttcctgtagactcagccatcattccctgctactgttgta

SEQ ID NO: 384956 - DNA, 480 bp, Homo sapiens
gataatcttatgagatattattatagttccaattctgcacatgaggaaactgagatacagagagaatcaaaaacttattcaaagtcatgtagttaataaatggtttcagtttcagagacacaatccttaccaccatgcgcctatatttgtcaaagtaaactgactcttacaacaaatgatctcaaattcttaatagtttaacacagtaaccatttacttctcacctatatcackatctaacaagagttgtggggttgtggggcactttcttccacgcaatcactcaaggcctcagctacttctatctgtttgttcccctagccccagggctccaggaatcctcagcatctgactggcagataaggagacagaaagattgctataggccagatccaggtacacatcacttgtgtccaaatcctgctgaccagaacccaatcgcacaccccatttgactaaaagaaagacagggaaagatag

SEQ ID NO: 384957 - DNA, 647 bp, Homo sapiens
gattctgcagaagtaacacacactgagctgtcttaagacagttgccccaaagagctgcccactgggctagggtagctcagcagcaagagacaatgggctgtactgacagaggacagaggaggggcatttgaaacacttcgagctaccacttccctcccatataagttacctgtacagcaggtgatcttcttaataccacaatgaccagaaaaggtctttctagaactgctatgaaatctacttgagacaaaaatatcattgtcatcaagaaaaggaacacaaagaaaatggctgaagtcagtgactgaagaacaatgaaaccatttcttatttttatgtctcagagtttagcctggcacaatcatcccaaatttcttacacaggtaatatagagagaacatttaaactgattaaaaatccaacacacaatgaagataggctaacctaggccaacctytaagtactattataccaaaatgccataagcaaaacatgtaccctggagccaaatagcctgggttttaattcttatgggtaacactgagcaagttttttttttttttaacttttctgtgcttccatttcctcctctaaaaaattgaattcataataggacctttctcattggctcttgtgaggatcaaatt

SEQ ID NO: 384958 - DNA, 504 bp, Homo sapiens
ggtaataaaaaccagatcagacccaacgggattccaaatgaggaaaattcaaaaaccttgacaagtcatctctagcctttgaaatatcatgattctgattttcttaggaaaagtaagacaataagagataaataacattaataaatagacaatcaaaagagaattagtgtcagaatggaaaaagaagtttatgcgattaggaagctaactaaaacatcatgaagaaaatgacaacctggttattctttagaggcttattgtagccaagaygtaattcatgattcaatccacccttaaaaacaaaggtcagggcagaaatttagtaataggacagttttcctttgaaacataatttctgtctatctagtcccccttttctaccaaagagaaatgatagtaaaaccaatatgtgtgcaaataagtcttaggcttatttttttaggcttataatacgtgacctgattgaagtatcaagtacagaaagaactgattggccatataggc

SEQ ID NO: 384959 - DNA, 512 bp, Homo sapiens
tatgttctgtagcacactgattcccccctaccatagcacttaccgtattccattttaattacctattacttctctccacctctcactctgctgcatgcaaaaatagatttatacagtaagagataagtacaacaactagagaaaatattgtcatcctaaacatttatataatgttcagatgatagctcttcytacagctaatatatggtttttaagatacatcagttaaactggacaaatagagtcatacattttcaacacacacacacacacacacacacacacacacacacacacacccctctagttctgtgccctctcatcacacaattcttcagttttttttctaggcacttccaggactccccagggagtgattctcagaagactgggacttttaacaattttacaaaacttatttgttttttcatttcatgcttcagtagccaaagtaatatctcttgctattaccaatgccataatcagcagctttgccgctgaagtatgccacc

SEQ ID NO: 384960 - DNA, 535 bp, Homo sapiens
attattctgaataacatataattaccccaagggatggggtaattataccaccacacccatattatcaattaaagtctacctggagtgggcattaacraccagctgttgctcagccatagcatgagctggcaaagtgtgttccaacagcccaaagacacagatcttgcccatttcaaatcaagctggcatgcataaagtgataaagggaaccaaggggatattggctgaccactgacagtctccactacatcttgttagatcaatagtcatgccaaagggatattggattatcaagtctagtgatgtttacccaaaaatcttaatattaatcatctcctcaaagaaaagacaaactaagtaaaatagttgcatgtatcctattgagaggtcacagcatgctggcagccctcgcagccctcgctcactcttggtgcctcctctgcctgggctcccactttggctgcacttaagtaaatagttgcatgtaccctattgagaggtgacagcatgctggcagcccttgcagccctcgctc

SEQ ID NO: 384961 - DNA, 520 bp, Homo sapiens
cattttatttctgaagctgggtatatgagtacatggggagttgtattagtcttcttaacttttgcatatcttattactcttaataataaaaatactaaccatttacataaagataaaatatgcaagcaattatgggttatcttgcaaagtcagtcctgtaatatggactgactgaaaaagggatgaaactttaggaaatgatagcactcccaagaaaaaaagctctggtgtgcttaaaggtatwcattggaaatttcatatgcaaagtacttccaaattctgttatttgtcagtatatggaaattaatgtaaaaaatcaatgaagtttatgaaacttttaggagcgtaagaagcatcgacatgcatttaaatatgtggatgcactacacatgtattaaccagggtaggctactagataaaaaaataatatccaaacgttcagtggctcaactcaacagaaatgcatttcttgttaacatagcaattcgatgtggtatatggcaaacagacttttataaca

SEQ ID NO: 384962 - DNA, 520 bp, Homo sapiens
cattttatttctgaagctgggtatatgagtacatggggagttgtattagtcttcttaacttttgcatatcttattactcttaataataaaaatactaaccatttacataaagataaaatatgcaagcaattatgggttatcttgcaaagtcagtcctgtaatatggactgactgaaaaagggatgaaactttaggaaatgatagcactcccaagaaaaaaagctctggtgtgcttaaaggtatacattggaaatttcatatgcaaagtacttccaaattctgttatttgtcagtatatggaaattaatgtaaaaaatcaatgaagtttatgaaacttttaggagcgtaagaagcatcgacatgcatttaaatatgtggatgcactacacatgtattaaccagggtaggctactagataaaaaaataatwtccaaacgttcagtggctcaactcaacagaaatgcatttcttgttaacatagcaattcgatgtggtatatggcaaacagacttttataaca

SEQ ID NO: 384963 - DNA, 497 bp, Homo sapiens
aggaggctccaaggaggagagctcagtcacagggctctaggtgggcctttccattgattccttaacagtgcaggatgggtgtcagctgcaaatgagattcttgtaaagggcaaggacaggaacaggctaaggtttcaggggcakaggaagaaggagcagcagagggaggaggaaagatgaaaaaatgcctctagagaaacagtggagctgttggagcagaaatggtggaggcacagagagagcaacctgagtaggaattcctagcgtgcagtggggctgggtccactgtgtatggtgcagacatggagacagcaacccaagtgagctccaagcgtacagtgggcctgtgtccactgtgtccatagcagatggtgcaggcatggagacagcaacccaagtgagttctaagccaacagtggggctgtgtgccactgcagatgttgcaggcatggagccagcagcccagataagctccaagcctacagtggggttgtgtg

SEQ ID NO: 384964 - DNA, 497 bp, Homo sapiens
aggaggctccaaggaggagagctcagtcacagggctctaggtgggcctttccattgattccttaacagtgcaggatgggtgtcagctgcaaatgagattcttgtaaagggcaaggacaggaacaggctaaggtttcaggggcataggaagaaggagcagcagagggaggaggaaagatgaaaaaatgcctctagagaaacagtggagctgttggagcagaaatggtggaggcacagagagagcaacctgagtaggaattcctagcgtgcagtggggctgggtccactgtgtatggtgcagacatggagacagcaacccaagtgagctccaagcstacagtgggcctgtgtccactgtgtccatagcagatggtgcaggcatggagacagcaacccaagtgagttctaagccaacagtggggctgtgtgccactgcagatgttgcaggcatggagccagcagcccagataagctccaagcctacagtggggttgtgtg

SEQ ID NO: 384965 - DNA, 557 bp, Homo sapiens
ttgttttggctgttttagattccttgcattttctttgagttctaagatcagcttgtcaacttttgcaaaaagccatctgagattttgatggagattgcattgaatctgtagatcagtttgagaagtattgccatctttaaaatattaaagtcttcaatccatgaacatgggatgtcttttcatttatttaggtcttctttaatgttttcaatgatgttttgtgcttttcagtgtacaagtgttgtgcttcttttgtcaaatgtattgtgaagtaacttatttctcttgttgttttggatactttttycagttgattctcttatatttttaaattatacagtgatgtcattggcatatggtacaaatgtagtcttgatctgtccagtgtttacagtcccttcttctttggtctaattgtgttaggtagtttttctagaaaaatattaaacaaaaaatggctatataagcatccttgtgttatttctatttttaagggtatgtttatatggagatcacatacacactccacacactttctcacattaggtgagtttagg

SEQ ID NO: 384966 - DNA, 450 bp, Homo sapiens
atgagtatcttgttagtggctaatgcaccccatgctcatttaytattctgaaaatcctaggtgatatggtttggctgtgtcaccacccaaatctcatctcaaattgtagctcccataattcccacatgttgtgggagggacccagtggcagatatttgaatcatgggggtggttttccccatactgttctcgtggtagtgaataagtctcatgagatctgatggttttttaagaggtttcccctttaatttagctcttttctctcttgtctgccaccatgtgagatgtgcctttcaccttccaccgtgattgtgaggcctccccagccatgtggaaatgagtctattaacctctttttcttcataaatcacccagtctcaggatgtctttatcagcagcatgaaaacaaaataatacactaggtcccttaagaattatgctaaatctact

SEQ ID NO: 384967 - DNA, 450 bp, Homo sapiens
atgagtatcttgttagtggctaatgcaccccatgctcatttattattctgaaaatcctaggtgatatggtttggctgtgtcaccacccaaatctcatctcaaattgtagctcccataattcccacatgttgtgggagggacccagtggcagatatttgaatcatgggggtggttttccccatactgttctcgtggtagtgaataagtctcatgagatctgatggttttttaagaggtttcccctttaatttagctcttttytctcttgtctgccaccatgtgagatgtgcctttcaccttccaccgtgattgtgaggcctccccagccatgtggaaatgagtctattaacctctttttcttcataaatcacccagtctcaggatgtctttatcagcagcatgaaaacaaaataatacactaggtcccttaagaattatgctaaatctact

SEQ ID NO: 384968 - DNA, 360 bp, Homo sapiens
ttggaagaaattgatttcaatcctcatggatgactttgaggagttccatattttaatggaggaggtaattgcagatgtcacrgatataacaagaaaactagaattaaaaatggagcctgaagaagtggaatctgaaaaagatcactcttgggaagaattaaaaatggagctgcagtcttgaggaggagttgctgcttatgaatgaacaagtaaagtggtttctggaggtggaatctactcctggtgaagatactataacactgctgaaatgacaacaaaggatttagactattacataaacttattcgataaggcagcggcagggtttgagaggattgactccaatttcggaagaagttc

SEQ ID NO: 384969 - DNA, 360 bp, Homo sapiens
ttggaagaaattgatttcaatcctcatggatgactttgaggagttccatattttaatggaggaggtaattgcagatgtcacggatataacaagaaaactagaattaaaaatggagcctgaagaagtggaatctgaaaaagatcactcttgggaagaattaaaaatggagctgcagtcttgaggaggagttgctgcttatgaatgaacaagtaaagtggtttctggaggtggaatctactcctggtgaagatactataacactgctgaaatgacaacaaaggatttagactattacataaacttattygataaggcagcggcagggtttgagaggattgactccaatttcggaagaagttc

SEQ ID NO: 384970 - DNA, 642 bp, Homo sapiens
tcattaccaccttatacaaaaaatacttctacaaggccatctacccaacacttgcctatccaaccttggactggtgtcaccttgttattgatctttgtaaccaaggaaaattatttaaaaacaactatgtagtcctaatgttttcctttaaaaacctttatcttttctttacctccctgaatacacacatagtttactatggcatgcatagtcccattgcaatgctctgtccccagataagtatcttttcttttagagagcctctctctatttgttattgagggtgacatatatggtgtcaaaagtgggatctgaaaaagatcagtcttgggaagaatcagtgattcttggaaccagtgtgtggtactcacttcagtcctttgagctctgcttccatggctgtcatcttttctgccctggtgagttttctctcaggttgagcccctcttcttttggtagaggctttttaaatactatttgggatctgatttagataagcccwccttaataaaaaaagaaaaaacatacatcattcttgggatgaaaaaagactttttgtcttttctgatatgtcctttctggtataaatacaaatgtttttttccagattgagtactcttggtttccacagaatttacattc

SEQ ID NO: 384971 - DNA, 581 bp, Homo sapiens
tccaattatatcccactttcaagagacacatttaaaacttaatcacataaagttacaaataaagggataggaaaatactgtgcaaatgcaaattaaaagaaagtgaggtgtcagtgttaattttgtcagacaaaataaaaattgaggcaactattaaatagatcaagaattacttttttacaaaatgataaaaagagcactcaatgaaggcatgaaaatcagaaaactttgggtaaacataaagcgtcgaaatrtgtaaaacaaaaaaattagagatatactccaaatatggtgttagatttcaatgtacaccactgttaagattttttcagattaattagacaaaatgtacataaagagcttgaattctatgacttacaaaattgaatatgtgcttacatatatatgcagtcatgtgttgcatggcaatgaagataagttctgagaaatttcatcgtcgtacaaacgttacatagggtacttaaacagacctggatggtatagcctactacaccccaaggctatatggtattgcctactgcttctagtctacaagcctgtacagcatgttattgtaggca

SEQ ID NO: 384972 - DNA, 554 bp, Homo sapiens
gtcaagtccaggtcctcagtcaaggctgtgcaaaaactctgtgacatttcctccttcccacactgtatccttgggtccaggaaggcagaggagcctgtaagctattctcagaccatagccatacrgggagggccaacagactcagacaagctgggagagggaaaattattttttaaaaagtgaaagagatactactactaataagcaccacatcaatattttcacaagtgactcttccaatctttcaaagaacacttcatcctgacatcactttcactgttccacagccacaaatacctgaaaacaacagaagaaaaaagaaaactgagagaagtcacaaatttaaatggcctcacagtctaggaaggtgactaagacgggtgacactgaccaactaaaagcacaggactgcacatttgtgaatggcgatactggagattggagagcatcggcagtacaaaggaaactaccacctttccatcccagacagccttttcagtgaagcaacatggttaatccagaaaagctgtaaatccaggtgtttctgtttaatg

SEQ ID NO: 384973 - DNA, 474 bp, Homo sapiens
tctcaactcctcgtgggagggagcacgtgagcaaacaaggtgggaactagggtatatgagtgctggaaccagctggccactcctgcatcggcactcgctgggacccactgtgttstacccatcatgagagggagcacgcaggtgggcaggtgtgggagcagggcaagtgcttttctatgcaggcaggaacaaactttgtgcaggccctgaagcagcatctggggtgggtgatgcctgcaacccctgaagccccagagctcttttagctctgccatccatagatggcttaagtattaacagctcagtgggccctttgtatttgcactcatggctcttgagctcttatctattgttcaggaaaaatgaggttgcatgaatgaattgaaggatggtaaatacaggggattttattgtccccagtgaaagtggctctcagtgggaaggggagctgaaaaggggatgggacaagtaagt

SEQ ID NO: 384974 - DNA, 474 bp, Homo sapiens
tctcaactcctcgtgggagggagcacgtgagcaaacaaggtgggaactagggtatatgagtgctggaaccagctggccactcctgcatcggcactcgctgggacccactgtgttctacccrtcatgagagggagcacgcaggtgggcaggtgtgggagcagggcaagtgcttttctatgcaggcaggaacaaactttgtgcaggccctgaagcagcatctggggtgggtgatgcctgcaacccctgaagccccagagctcttttagctctgccatccatagatggcttaagtattaacagctcagtgggccctttgtatttgcactcatggctcttgagctcttatctattgttcaggaaaaatgaggttgcatgaatgaattgaaggatggtaaatacaggggattttattgtccccagtgaaagtggctctcagtgggaaggggagctgaaaaggggatgggacaagtaagt

SEQ ID NO: 384975 - DNA, 609 bp, Homo sapiens
tgaattgaaggatggtaaatacaggggattttattgtccccagtgaaagtggctctcagtgggaaggggagctgaaaaggggatgggacaagtaagtaatctccccctggagtccagccatctctagctggattcttctctgaagttatgccatcaagctctctgaagtctagtcacttctgtctgatgtccagccatagtccccaacgtccagtggcttctaccctctgccagctgagtstggggtctttataggcacaggatgggatggggtggggcgatgggtaatttaggaaaaggcaacatttgagcaggaaaacagggatagaagttctcactttgggcctcagtctcaggctttttgacttgagagtggggcttcgccagggatctgcccctgtctgcctagaatttttttgcctcctgtctctatcaataatatataagtataaactcaattttatttaaattatgacttagctgtgatgtttattgttatcagtcagaccttcaaaagtgactcagggatccaggctgtctccaccttgtgtgtccatcatcttaacacagtgttttcagagctccacattggaggatgagaaagcacaa

SEQ ID NO: 384976 - DNA, 602 bp, Homo sapiens
tttgggcctcagtctcaggctttttgacttgagagtggggcttcgccagggatctgcccctgtctgcctagaatttttttgcctcctgtctctatcaataatatataagtataaactcaattttatttaaattatgacttagctgtgatgtttattgttatcagtcagaccttcaaaagtgactcagggatccaggctgtctccaccttgtgtgtccatcatcttaacacagtgttttcagagctccacattggaggatgagaaagcacaaagaattatacaagagttgttcaacgcctcaggccaggagtgaatatatagcatttttactcatgatctattgcctagaacttattttctgaccacacccaactacaaagcagataggaagagcatatggatatttagtgagtattcattatctcagccacattctggtcaccaaatgtccctcttctccctcctttctccacaaaacaaacaaacactcactsttactccatgagagacaacacaaagtcccatcccgtccaggcacccagctcaaaagattagaatctccagaagatgcacggtggtctctgcattgagtcagatgtggc

SEQ ID NO: 384977 - DNA, 592 bp, Homo sapiens
ctttgggtttgcctgccacagataccagcctgccctctgcagaagaaatacacatatctataaaatatctgtggcttactttttaatttttttgaaacaggatctcattctgttgcccaggctggagggcagtgatgcaatcacagctcactgcagycttcacctcctggactcaagcaacccttctacctctgcctctgaagtagctgaaatgatgtgcaccaccacgtcaactaattttttatttttttttttgtagagacagaagtcttgctatgttgcccagtctggtcttgaactcctgggctcaagcaatctcccggccttggcctcccaaagtgctgggattataggtgtgagccacagcactgggccctgtgacccacttctatgactggatttacataacactctgcatagatcacctccccttgaattttctgcaaaaggtcttgtgctggaactggcctagaaaacgtgaacgtggcctggtcctgatacgttctcagacccagccctcacccagcagctcagggacctagatcagaaccactcttttcctgatcctctccttgtgtgagaatattctgag

SEQ ID NO: 384978 - DNA, 598 bp, Homo sapiens
agtctgttggaaagggcctctgaaacactcatctgccrttcattcactgaacatgcaaatgccccttctttgtgtcaacccccatcaaagctttggggacaaaaaatgaatgagactatgtctatctctcctctccaggaggtaacagtatagaggaagaaagataacagatatgaaactaacttcaacacaacttgcttaaattaccagttgggaaactgaggcccagagacactgtcttcctagtcctgtgtacaatgtatagagacatacacagaactactcccagctgcagatccaatggaatcctattaaagatacttcttttttttcgagacagggtctcactgttgcccaggctggagtgcagtgctgtgatttcggctcactgcagcctccacctcccaggctcaagcaatctctccatctcagcctcctgagtagttgggaccacaggcacatgccatcatgctggctagtttttttgttttttgttttttgttttgtatttttggtagagacagggtttcaccaggctgcccaggctgcccttgaactcctgagctcaagcaaatcacccacctcggcatcccaaagt

SEQ ID NO: 384979 - DNA, 582 bp, Homo sapiens
catctgattgggcacaggggtgctccttccttctgcatgagagaggctggtagatgtcctcaagaggcaagaagcacaaggtttcccttcttcaaagggaatcctgggttctgtttctctttacccggaataatagtttcaactgcaatttgaaaaggcagagaccaaagggaactccagggacttccttgtctttgaacctcattaaatggctctgatttcttttctctttgcttaagtagataataatattgccaataaatacakcccaatgtatcctctgccaaagactggattgatgccttaataaaggaaaaaaattatatttaggaaaagtaaattttacattccatatataatgagagtgcactgagtgtggaaaactgggcttcaagccatgagggatgtaaagatgagtagaacaaagttattcagcagaagtagtttacagtggaggaaaaccgctatgccgtggacaagcgcagccaggatgaacaaaaggctgagtatgtaaaggtcccgttgcagggtgctagaaggaagggcaggcatcaccgtgtgagagaaccgccttgaaactga

SEQ ID NO: 384980 - DNA, 467 bp, Homo sapiens
ttttgggttctggctgccatccttggcagaggaaatgaccaggccccagagagcctgtgcatgagcatgttttcagttttcagtggaggtctgagagcagagccacagcatctgtagcaggttttaaaaaaawatttttctggcattggctctggagcaagaggaaagcaacttacaaagggtatatgagtttctataggccagtgttctaatatgagaaaagtttatgtcttgcttataaaagccccctgcagatgtttctggtgggacagctcttctgggccagcttccatataagcactgactcagaggttcaggctttttccaacctgtagttcagccaccttcaacacttggcctccaagttactatggagggagaaacatgagtatagaggaggcacctttatttctaactgctctggactgaaagtgatgcatcatgacggttcactttgcattggtgag

SEQ ID NO: 384981 - DNA, 467 bp, Homo sapiens
ttttgggttctggctgccatccttggcagaggaaatgaccaggccccagagagcctgtgcatgagcatgttttcagttttcagtggaggtctgagagcagagccacagcatctgtagcaggttttaaaaaaaawtttttctggcattggctctggagcaagaggaaagcaacttacaaagggtatatgagtttctataggccagtgttctaatatgagaaaagtttatgtcttgcttataaaagccccctgcagatgtttctggtgggacagctcttctgggccagcttccatataagcactgactcagaggttcaggctttttccaacctgtagttcagccaccttcaacacttggcctccaagttactatggagggagaaacatgagtatagaggaggcacctttatttctaactgctctggactgaaagtgatgcatcatgacggttcactttgcattggtgag

SEQ ID NO: 384982 - DNA, 467 bp, Homo sapiens
ttttgggttctggctgccatccttggcagaggaaatgaccaggccccagagagcctgtgcatgagcatgttttcagttttcagtggaggtctgagagcagagccacagcatctgtagcaggttttaaaaaaaaatttttctggcattggctctggagcaagwggaaagcaacttacaaagggtatatgagtttctataggccagtgttctaatatgagaaaagtttatgtcttgcttataaaagccccctgcagatgtttctggtgggacagctcttctgggccagcttccatataagcactgactcagaggttcaggctttttccaacctgtagttcagccaccttcaacacttggcctccaagttactatggagggagaaacatgagtatagaggaggcacctttatttctaactgctctggactgaaagtgatgcatcatgacggttcactttgcattggtgag

SEQ ID NO: 384983 - DNA, 542 bp, Homo sapiens
tccaaaggcacacttctatgcaaggatttaactggacaggtgtccctgcatgtgaatgcccaatcttctaacagcctaactcagagaaagaaggcactgtgtcaaatgtattgagtagttgatggggcatcrcccggataagctcctcacccctggaccgaggtgttcattcccacagctgacataagtgttgcctgtgacaactcacaactgagtccctctcgggaaactgccttcagccaaagacagttgcctcacccaaggttatgcctggattccaggggcagcccacaagcaatgactggtcactgcagggatacaaaaccccataagatcccctggatccgctgaggccagtgttgcaactgcatcacagcccaacttctccatctgtctggttctgtctccctcaccccacgctggtgttgttcccagagcacacaccaatgaacttcctatgcgcaaatctctgtctcaccatctgttaccagggaaacccaaccaaaggcagtgcagccagggtaggaagtggtaagacctcc

SEQ ID NO: 384984 - DNA, 572 bp, Homo sapiens
ttggtttttttttcctttcttttyttttcttaagaggtgggtgggggtgttgacaaggaggaaagggaggaacccacaaatgtaatttcagcaacagttcccttaacaacgcccgcagatggatgaatttccgcacagtctggttctctgttccttttctgttcctgaagagaaacaattgagggagtgaaggatatgcagtgatgtttatctttccagctctgaactttcaaattctggaatcccccagggttggggaagggtgggtgtagtcacttcccaccgttgcagagggatgggagatgtagcaactcctgttggggcatggggcggggtgtgtgatttcctcccaaatcggaaatttatctcccgaatgggaggctgcagagagtcatcaaggacttatctccaggagcagacaccagagaggagccctgcccaatcctttaccccaaagggggcgtgcttagcccgaggaggaagaagagggttgccagctaagagtcagcaccaagggcacccgctctcattcatgtgtcaatgaagaattcctgccagacttccagtactgt

SEQ ID NO: 384985 - DNA, 572 bp, Homo sapiens
ttggtttttttttcctttctttttttttcttaagaggtgggtgggggtgttgacaaggaggaaagggaggaacccacaaatgtaatttcagcaacagttcccttaacaacgcccgcagatggatgaatttccgcacagtctggttctctgttccttttctgttcctgaagagaaacaattgagggagtgarggatatgcagtgatgtttatctttccagctctgaactttcaaattctggaatcccccagggttggggaagggtgggtgtagtcacttcccaccgttgcagagggatgggagatgtagcaactcctgttggggcatggggcggggtgtgtgatttcctcccaaatcggaaatttatctcccgaatgggaggctgcagagagtcatcaaggacttatctccaggagcagacaccagagaggagccctgcccaatcctttaccccaaagggggcgtgcttagcccgaggaggaagaagagggttgccagctaagagtcagcaccaagggcacccgctctcattcatgtgtcaatgaagaattcctgccagacttccagtactgt

SEQ ID NO: 384986 - DNA, 567 bp, Homo sapiens
gccatttgtctccacccccgactgcagagcacacctgccaacatgaggagatacaaaagagtagtgtgactggctatcagcctagctattggccatcactcttccacaccatctactggatcacagcctaagctgcaacaccaaaaattatcctactaatatatgcatctgtgaamccaaacacaagaattcacccaagcataaagatcctgtgcagagctctgatcctctgaaaacatccagaaacaaagccaactaagtataatcaacttacaccacagttaaaggaacactaacccttgcagatgggaaagaaccagttacaactctggcaatttaaaaagccagtgtccccttatctccaaatgagtccactagttccctagcaatggttttttgctcagtctgaaatgactgaaatgacagacatagaattcagaatctggatagcaaggaagctcactgagattcctgagaaagttggagcccaatcaatccagggaatccagtaaaatgttacaagagctgaaagacaaaatagccactttaagaaagaaccaaactgaa

SEQ ID NO: 384987 - DNA, 580 bp, Homo sapiens
atggggcggggtgtgtgatttcctcccaaatcggaaatttatctcccgaatgggaggctgcagagagtcatcaaggacttatctccaggagcagacaccagagaggagccctgcccaatcctttaccccaaagggggcgtgcttagcccgaggaggaagaagagggttkccagctaagagtcagcaccaagggcacccgctctcattcatgtgtcaatgaagaattcctgccagacttccagtactgtcctcgaccatgggcagaatcccagctgcccctcccagaacactccatgccactggaactcaggagcgcaggtcagttctgcaattgaaagcaaaggggaattttggtcctttccttggattgagtccagaattctgggatgaacagctcagctcctagaaattatgctctggaatttccaaaagctcaacaaatagccccaacatgcagggttgtctgttgagatgaagcatccttttactacccttagaacattacaacaggaaggaagtcccatcccttttttatagatgaggaaactgcaggttagagaggctaaatatatattaaatc

SEQ ID NO: 384988 - DNA, 566 bp, Homo sapiens
tgaatatatttgttccaggctaactgtccaaacttcatgatgcacacaatataagagtcataaaactccacctttaaaaaagtaattatagtgcacattggtatagtgctgcatataatgttataaatcaattaatagatagctacaaagacacaggtatcttctgaatgaagatgaaagtgggaaagtcacaaggatggccctcaataaatataaaatcacccctgcatcccactgcaggggtatcaggccaagatagtaggtacaataatacttgttgaatgaatgaatttaattcacttcttttatccrcaactcccaaatccctaatatttcaatagtggattatctttgaagataaggacacatgttatgaataggaataataataggattataacaaatcatatattattttaaactagtatcagtatggtcagaatttagggtcttaagccagggttcatgtaaataattgttcactcactctttgtgcatcatctgagtaatccaattacagacagatgggaaaataaaagtttccaaaacaggaatcaagagcattt

SEQ ID NO: 384989 - DNA, 566 bp, Homo sapiens
tgaatatatttgttccaggctaactgtccaaacttcatgatgcacacaatataagagtcataaaactccacctttaaaaaagtaattatagtgcacattggtatagtgctgcatataatgttataaatcaattaatagatagctacaaagacacaggtatcttctgaatgaagatgaaagtgggaaagtcacaaggatggccctcaataaatataaaatcacccctgcatcccactgcaggggtatcaggccaagatagtaggtacaataatacttgttgaatgaatgaatttaattcacttcttttatccgcaactcccaaatccctaatayttcaatagtggattatctttgaagataaggacacatgttatgaataggaataataataggattataacaaatcatatattattttaaactagtatcagtatggtcagaatttagggtcttaagccagggttcatgtaaataattgttcactcactctttgtgcatcatctgagtaatccaattacagacagatgggaaaataaaagtttccaaaacaggaatcaagagcattt

SEQ ID NO: 384990 - DNA, 592 bp, Homo sapiens
ccacacaagttccaaccagaaagaacaatgttggctcttccaactggaatggttcatgatacaaagcaagtagggaaggttgtaagaaaagatgaaagcaaaamattttcccctttaattaaaaaaaaaaaaaattttgagagaggatctagcattgttgcccaggttggagtgccctggggtaatctcggctcactacaacctcgacctcccaggctcaagcagtcctcctacctcagcctccagagtagctgggactataggcatgtgccactatgaccagctaatttttatatttttttagagatggggttttgctatgttgtccaggctggtctcgaactcctgggctcaagcaatccacctgcctctgcctccccaggttttaggattacaggcatgagtcactgaactctgcctcctctttaaactgtcaattagttgaaattagtaagtattgtgagtcatgatgtgctaatacaatggtagatatgatccttgaccttaaagttaaacatcaaagttgaaaaggtaaatatgtacatgagcagaatagaaaacaagttaaaaatacatacaaagcctgtcataa

SEQ ID NO: 384991 - DNA, 592 bp, Homo sapiens
ccacacaagttccaaccagaaagaacaatgttggctcttccaactggaatggttcatgatacaaagcaagtagggaaggttgtaagaaaagatgaaagcaaaaaattttcccctttaattaaaaaaaaaaaaaattttgagagaggatctagcattgttgcccaggttggagtgccctggggtaatctcggctcactacaacctcgacctcccaggctcaagcagtcctcctacctcagcctccagagtagctgggactataggcatgtgccactatgaccagctaatttttatatttttttagagatggggttttgctatgttgtccaggctggtctygaactcctgggctcaagcaatccacctgcctctgcctccccaggttttaggattacaggcatgagtcactgaactctgcctcctctttaaactgtcaattagttgaaattagtaagtattgtgagtcatgatgtgctaatacaatggtagatatgatccttgaccttaaagttaaacatcaaagttgaaaaggtaaatatgtacatgagcagaatagaaaacaagttaaaaatacatacaaagcctgtcataa

SEQ ID NO: 384992 - DNA, 582 bp, Homo sapiens
ataggttagctatgacacctgtgggttcttgagtcaggaaaacaggttttggagctagtaaattaggcttacattctaatcctgtttatttctatctgcagaattttgggcaagttacttatggtctatcaccatttcctcctctgtaaaatggacctgataatagtacctacctcagagcattgctggaaggattacataaataaatatacctatggaacaatgtcttatctcaaagtaatgtcagtcttgctattgtagcaccacgagctgatttctattatagcatttaagacccagatttataaattttatttacctgctttcatttctttgtaagctctttgagaataaacacttgagcacccttcatctctgtgtccttagtgtatcactgcagtgcattgtacaaaactactcaataaacatttgttaaatgaatgaataaatagatgatgaatggatgggtggaaggatagctggatatatggatggrtatatgcatatatagcactgtgtttgatcataagcaatcattttaagatcatgaagttatccctagtgacatctctctttttatca

SEQ ID NO: 384993 - DNA, 566 bp, Homo sapiens
ggtctggtgaaaaggaagctgtcataggagggatggatcccttagtttcagtacaagctttgtcactaactagctatgtgctttttaactgctggtckaagttcctttcctcctcatctgtgaaatgaggggctagggactcaatgttgtcttaaggtagcttttggctccaatattatatgattcaattgaattaaatgaatgtgaacataagtagtgagggctgggttctagagatggtacagaaatatactcccagcaagtaagagttgttaaggtcattaggagaaatgctttaaatttacattgcatcaagtcaatgaaaaaagaaactacatggggatactgaacaaatgtgaaaatcagaagacagatatttcaaaactttttggagagcatctgaaaggaatacaggagggaagtcagtaggagaaaggttgaatcaaagttttcccccctttggggaaacagctgcactgctgatgtcccttgccttgtaacagagttgtgtactgatttcagaatatggaaccacttgtagtattttttctctctactgattccaa

SEQ ID NO: 384994 - DNA, 535 bp, Homo sapiens
aagcaaggtaagttagaaatgtgataaagtgtcttagataaaggtatattttctttaaatagtatttattctttactcgttagattcagagactttgtgcattttcaatttttctcacatccacatgatacatatccacatagtatatactattaataatttatcttatcaaggtggctgatcaataggtgatatggagtcagaaaaaacctaggctccaactccagaacagttcattttctgtgtgaattttggcaaattacyaaacttctctggcctctaattttcaaatcattaaagcagatatgatgctcactcagtattactgtaaatttgaatgaaataatacatacaatacttgccatattggagttactcaatatgttattagattttttttgaatatggatctaactttagtaattttccagaaataaaaggtgtctttcaaagtgtagactaaataacaattctttatttcataccacactccatttctcaatggagagaaccttcaaagaatatggaaattgta

SEQ ID NO: 384995 - DNA, 493 bp, Homo sapiens
tcaccattggcctgggtcaccttcatgttatttattttatagtcatctaataaaaggtaaatagtatataaaacttgttggttaaataaattattgcttgaataatggctctgctttcttttaggcagccacaataaaaccttgactaacaaaaattaatataacacaaccttcaactgattatatttcttttcattttttactataatttatttgtaatggaatgcagcaaatcccaggaaacaagtttgactttacattttctgtcgaaattgaacaaagtgctaaaatatttctctgaggttagtgcatcatctttggccatctatatgggtgatattcttccttsagaaattatggttacaatgaggaccaaaggatcatttgaccttgaacttgcagagaaggatatattttatattccccagacaattcacttgagaacatttaaaaaaataatattttgaataattttagcaacatgaatcaaagc

SEQ ID NO: 384996 - DNA, 612 bp, Homo sapiens
atctcacagaaatagcattgtatccacacctgtgaagaacaagyatggttcgaggatatttctaactctggggagtgataaaagtatgacaccataagatatgcaatgctataaagacatgagttaattttaaaatactttctatactataaactattagacaaatatagggcagtgctattattataatgatgaatggcatacacatgatatcatatgaaataacctaaaatctgtttctaaaatatgaaaaaaaacttttccttataataaactctaatttctgaatcaccaaatcttattagggctgcttatacctatgaaaactataccaatatttaattgacttcaaaactgattaataaaagactgtctccaacatgtattttgaactaaatattttagcatccgcttaccatgtctatcaaaaatgcttaataaaacttttagtgtgaggctttattagtccttgatgttaaatgtctagaataatcttcttcttagggatcctttctaactgcaagtttaaattttaagggcttttaaatttgcctttttgttgttttgttggtttttcttttacagcaacaaatgagtccactacatgattac

SEQ ID NO: 384997 - DNA, 583 bp, Homo sapiens
agaataccaatcttacagaattctcatactaagttagttatacgaaagtacctggctcataataaatacttgatgaaatgttagttgaatttgaaatcatgaagaaaggtcttgtacacataatgagtaatataaacacaactttgagggagaaatttgaacctacctaagacaaaaaaaatttttttgaaccacttaaagaaactcggtttactgccaaagtgttacttcacatcatgatttctgttcattgaatgatgtccggcttacctctgtttcagaaagacttcttaactcacttttctattttccataactttgtttactttaaattwtataaccttttaaaaaaatctataattcagactttttgctaaattacacttccctttgcctcacattgtattgatttttttttaaagttttaagcagcataaaaaaatgtaccagagaaccagactagggaaaatactggcaacaatatattacaaagaatgaataattaaaaaatatatctttcaaatatgtacaactggcaaatgccaaaatcaaaaatggttacaacagcaataaaactagctag

SEQ ID NO: 384998 - DNA, 610 bp, Homo sapiens
agcagtatttttaagtcatttatatttgttaataaataatactgcagctagcattaaaaattattctgaagttactaagtgggctggatggagtctttttcagagttctgaatgacagaattcttagaattatggaaatggagaacaccttggagaggttatctagcccagtattcatttaaacaacagcatcagttgctctcacatattatggttaaaatataaaatgaaacacactaggtttgctatttgatagttaattagtcccatgctcaaggtcttaaaaactggatattcccattttagacacatgtcaagaagaagtattatttttttcctctctattcctctccctaattctttatgcccttagaattaagaacacataccacacaggaaatgactaaccaagagctctcattagattagaaaaaacattccattttcacttcgttgcccactgagtgaaggaaataggaaaagaaaaaaggcccatctgctttgcacttctgggcagtaataacagtatatasgtaaagagtgtaggttctggaattagaatatatgtgtaatttggggcaagttacttaacctctctataccttaattt

SEQ ID NO: 384999 - DNA, 560 bp, Homo sapiens
atttttgtggggagcagggagacagggtcttgctatgtcactcaggctagagtacaatagtgagatctcagctcactgcaacatctgcctccagggctcaagcgatcctcccaccttagcctcttgagtagctgagactacagacacacaccaccacacctggctaatttttgtattttttgtagagatgaggttttgccacgttgtccaggttggtstcaaagtcctgggctcaagcaatctgcctgcctaggcctcccaacgtgctgggattacaggtgtgagccactatgcctggccttggtataagtgttttagtaaacatttttgatgtttaagtggtggtggttggatttcagaagcaaatgatactcattccactttgggtacagttgagaaaatcagagtgatatcaagtggtaacacttccttcatattgccaggagcgtagtatgtgtttctagagttacacccatcaaattacagttgaacacattacccttaggaggcaatcaatatatatttgttcagtgaaccaaaaaggaaaaaatcatatatgt

SEQ ID NO: 385000 - DNA, 576 bp, Homo sapiens
taaaaccatagctgtttagggactgaccctatgtggctaaaacttttcagtctgaattttatacttttccctttgattcacagttattatttaaaaactggcaaactatcaaatgttttgcaagacatttccttacaaagagctaaaagttyttgaattgtagttaagaagctaaaatcattctaagaaggaatcacagaactgaaatatctgtttttcctacttactttataagctttgattggatattactgagttcagttatttacttaactaccctataaaactcatacttttattacaactttaatactcaaatgattagctatttcacaagttttgcatgtataaatttgaatgcataatatagaaataacatgtttctatattattctattccaattcattattcagtcaaaagatggaatctttaaacacttctgacctgtggaagctctttcatgatgtaatagaagcctttattctcttctccaagtagggcactagctggcaaccgtatatcttcaaagaatagttctgcggtatcctaagagaccatacaaaaaatgtagagaa

SEQ ID NO: 385001 - DNA, 527 bp, Homo sapiens
agatactgtctgatgcataaaatctattcactgggtaaacaaattggaagcatggagaattcattatttaataagggtgaaggaactggcaaatttgcgaatgacagcattggtgtaagctactctaattttatttgagagctatgaaacaaaatgcctacttttcctggggagatttgggaagacgtcactgagaaggtgacttttctttaggatacatacttaactcttccttggaacattataagacagtgatcctcaaacttttttttttttttttttttttttgaaacaaagtctcactctgtcccccaggctggagtgcaggggcccaatcttggctcactgctgcaacctccgcctcccgtgttcaagcaattctcctgcctcagctttcctgagtagctgggactacaggcaygcaccaccacacccggctgatctttttagtagagacgggggtttcaccatattgaccaggctgggctcaaactcctgacctcgtgatctgcccgcctcggtctccc

SEQ ID NO: 385002 - DNA, 399 bp, Homo sapiens
atccttcaatattcaagttattcatgcccttttagttgaagatgtctgtaacctattccttccccacacccaaaacatctctgtgcttttacagcacttatattggcagtgtgttagtttctgttcttccccaatggtttgtggctctgtttagaacacatattacatagttaacgatagctgacaatgtaacccaaaggtaatgattaataaatcttggtcaacaggaatgaactgatttactaaaataaacttacttacttttctgatagataatcagcatgggggaaaaattttgtcaaaatattagtgggaattgttttttactctatctccttttccctcttctaccaycagacatttacgagacatctcttatatgtcaactattgggtcttg

SEQ ID NO: 385003 - DNA, 438 bp, Homo sapiens
acaatatgctcctgaatgaccattattgggtcaaaaaagaaatggaggaaataaaaaataaaatgaatgaaatcaaaatacaaaataccaaaacctatgagatacagcaaaagcagtgctatgaggaaagcttggagccataaatacctacatcaaaaaatagtaagatttaaaataaacaatctaatgatgcacctcargcaactagaaaaacaagaccaaaccaaaccaaaattagaagaaacaaaaataaagatcagagaagaaagaaataagatacagaaaaaaacaaaggataaatggaacaaaaagttgtttttttcaaacaaataaaaaattaactacttgctatactaaccaaggaaaaaagtgaaaagacaaacaaagaaaacagaaatgagaaagatattacacctggtaccacagaaataaaatagg

SEQ ID NO: 385004 - DNA, 615 bp, Homo sapiens
  misc_feature (1)...(615): n = A,T,C or G
ttagttgggctttgttatactactgtataaaacctggctaatttatayaataaatcttaatcatatatttatttgtataagtgctttagaatataatagatcagcatggtttttcagtgcaattgtgtgaacattcttaatactcagcaattttataatggtgtagccagtttgaataatctaatttacatacatacttatatcatttgtataatttaatttttatcatttgatgaattttttatcttttctttcaattacagtgacttacagggaataaaaacaaatgctaaaaaggatggaagtgactggattctcaatggaagcaaggtgtgtaaaaaaggacttctatagcccttcttttcagagtcatgccatgggtaacaatgtctcanagacaactcattaattctattaaatctagggactcaggcaggaattgaatttatctaagttgttttggagacagtaaatttacaacatatattacttaagatctgtggtagcttcttctatatttcattttgcatgccccctcactaatatggcaaaggttgttttagcttccaaacagcccttattaaaccagaaaaagacaaggtgaggctcacattg

SEQ ID NO: 385005 - DNA, 509 bp, Homo sapiens
tgtttcaaaaactctattagaaatagcaaaaaactgaaagcaagtaaaagtaaaggaatgggtaagcaaatacrgtgcatctgaacgaatgtgcagccattaacactagcaacacaaagtttttaacagtacaggaaataattatacattaagtgaaaaaacaggatatagaatgcaagtataggaacatttttactatattaaaatttaaaaatatgagaaaggaaattatcaatgatagttgtattatgtacttatggagaattatattttcctttttcttttgaactttacattctctatacaatatctgcaatgattttctgttattttataagcatttaatatcctcctaccacccaaaaatgttggccctcattagggataatttcagccctattcaaactttggagtgtcataattaggaaacaaactgagaaagtccacttgcaaggaaaattctcatataactctattagaaagggggatccaccatggtgtttaaactc

SEQ ID NO: 385006 - DNA, 509 bp, Homo sapiens
tgtttcaaaaactctattagaaatagcaaaaaactgaaagcaagtaaaagtaaaggaatgggtaagcaaatacggtgcatctgaacgaatgtgcagccattaacactagcaacacaaagtttttaacagtacaggaaataattatacattaagtgaaaaaacaggatatagaatgcaagtataggaacatttttactatattaaaatttaaaaatatgagaaaggaaattatcaatgatagttgtattatgtacttatggagaattatattttcctttttctttwgaactttacattctctatacaatatctgcaatgattttctgttattttataagcatttaatatcctcctaccacccaaaaatgttggccctcattagggataatttcagccctattcaaactttggagtgtcataattaggaaacaaactgagaaagtccacttgcaaggaaaattctcatataactctattagaaagggggatccaccatggtgtttaaactc

SEQ ID NO: 385007 - DNA, 441 bp, Homo sapiens
ctgtggtagctgcacacgcttcctccagcttgcatcccaagtgtccatcaaygcagattttgaggacaaggcacagagctggctgaacttttcaaagaagagatttcccaacaggaagaatgtgcaaagtgagctctgaagatgtgctaggagaaattaaggaagtgtttccttgcaacctggtttttaatcttgtgtacattaattttttatttattttaatttttttcatactttctctcttttttttgagacaaggtctcactctgtcacccagactggagtgcagaggcacgatcttggctcactgcaacctctgcctcccgggttcaagtgattccccttgaatcctgagtagctgggactataggcatgcgccaccatgcccagctaatttttgtatttttagtggagtcagggtttcaccatgttggccaggct

SEQ ID NO: 385008 - DNA, 441 bp, Homo sapiens
ctgtggtagctgcacacgcttcctccagcttgcatcccaagtgtccatcaatgcagattttgaggacaaggcacagagctggctgaacttttcaaagaagagatttcccaacaggaagaatgtgcaaagtgagctctgaagatgtgctaggagaaattaaggaagtgtttccttgcaacctggtttttaatcttgtgtacattaattttttatttattttaatttttttcatactttctctcttttttttgagacaaggtctcactctgtcacccagactggagtgcagaggcacgatcttggctcactgcaacctctgcctcccgggttcaagtgattccccttgaatcctgagtagctgggactayaggcatgcgccaccatgcccagctaatttttgtatttttagtggagtcagggtttcaccatgttggccaggct

SEQ ID NO: 385009 - DNA, 435 bp, Homo sapiens
atgataagccagtttggttataatacrcacaaaactgaacactaattcaatttccatgtggtcagagtgaacatggtgtgagaatactggtgtgacacgttttcccctgggtgtagtctgtgacaactgtcactgcaaaccagctgacgttcctccataggagaatgaagtttctgagaactggcctgtttagaagtttctgcaactatattctttgtttccaacaaagctgctttaaaaaattctaacaatagaattggaaaaacattgaaaggaattatttacggattcagggtcctcttatatttaatcggccacgatggcatgtggtgaagagttactggggaaatactgacagctgctgcctatgttcttaatagagttctccaaactggagccctgaaggtcagcagtcttgagacatattttgagacc

SEQ ID NO: 385010 - DNA, 435 bp, Homo sapiens
atgataagccagtttggttataatacacacaaaactgaacactaattcaatttccatgtggtcagagtgaacatggtgtgagaatactggtgtgacacgttttcccctgggtgtagtctgtgacaactgtcactgcaaaccagctgacgttcctccataggagaatgaagtttctgagaactggcctgtttagaagtttctgcaactatattctttgtttccaacaaagctgctttaaaaaattctaacaatagaattggaaaaacattgaaaggaattatttacggattcagggtcctcttatatttaatcggccacgatggcatgtggtgaagagttactggggaaataytgacagctgctgcctatgttcttaatagagttctccaaactggagccctgaaggtcagcagtcttgagacatattttgagacc

SEQ ID NO: 385011 - DNA, 510 bp, Homo sapiens
agggagattggtctcttcttccctgctttcatttttcctggccttttactaaaagacactgaaatcaggctgatggattccctacatcaaatatcacacagatgtagcccatacttttgcagactagctttccttgaagcccaccaaaatgagcagaaactgaagtggatcaaagccccagtgcttgttatccttatttcggcccctttccttgctgggctaatgggatcttccttaaaatcataccgtgtccttcagtatttattatttatgagccaaagtgtgcatggccaacaatacttaaaaccaacccaggttacaggacatccctgcagagtgacagggtgccccacacctgcctgccccatgcctgggcggtgatttcatcgctagagttacacrcctgtattctgcagggtaaagagaagaaacataattccatgtcttctcccaaaggaagaattctctgttaaacttcacacttttggagtgtgtgctgcatgagggcct

SEQ ID NO: 385012 - DNA, 525 bp, Homo sapiens
aagctggggtgcaatggcgtgatctcggctcactgcaacctccacctccttgggttcaagcaattctcctgcctcagcctcctgagtagctgggattacaggcatgcaccaccatgcccagctaatttttgtatttttagtagagatggggttttaccacgttggccaggctggtctcaaactcctgacctcaggcaatccgccygcctcagcctcccaaagtgctgggattacaggtgtgagcaccatgcccggccaggagccactaagccgttcaccctttttagtctccaggtcagctgaagccacacaataaatggcctcaggaaggggaggcacttccagaggaggaattcagcgctgctcaccagcaggaagaaaatgagggcctcactgagaatgggactagtacctgggggcacctcccaagaggatgcaacctgcctgccatgatttgggcaggatctcttaagcctgtgtaaggaaatgaaatgtgctgcccaaagagaggaggctggtgcagaa

SEQ ID NO: 385013 - DNA, 525 bp, Homo sapiens
aagctggggtgcaatggcgtgatctcggctcactgcaacctccacctccttgggttcaagcaattctcctgcctcagcctcctgagtagctgggattacaggcatgcaccaccatgcccagctaatttttgtatttttagtagagatggggttttaccacgttggccaggctggtctcaaactcctgacctcaggcaatccgcccgcctcmgcctcccaaagtgctgggattacaggtgtgagcaccatgcccggccaggagccactaagccgttcaccctttttagtctccaggtcagctgaagccacacaataaatggcctcaggaaggggaggcacttccagaggaggaattcagcgctgctcaccagcaggaagaaaatgagggcctcactgagaatgggactagtacctgggggcacctcccaagaggatgcaacctgcctgccatgatttgggcaggatctcttaagcctgtgtaaggaaatgaaatgtgctgcccaaagagaggaggctggtgcagaa

SEQ ID NO: 385014 - DNA, 525 bp, Homo sapiens
aagctggggtgcaatggcgtgatctcggctcactgcaacctccacctccttgggttcaagcaattctcctgcctcagcctcctgagtagctgggattacaggcatgcaccaccatgcccagctaatttttgtatttttagtagagatggggttttaccacgttggccaggctggtctcaaactcctgacctcaggcaatccgcccgcctcagcctcccaaagtgctgggattacaggtgtgagcaccatgcccggccaggagccactaagccgttcaccctttttagtctccaggtcagctgaagccacacaataaatggcctcaggaaggggaggcacttccagaggaggaattcagcgctgctcaccagcaggaagaaaatgagggcytcactgagaatgggactagtacctgggggcacctcccaagaggatgcaacctgcctgccatgatttgggcaggatctcttaagcctgtgtaaggaaatgaaatgtgctgcccaaagagaggaggctggtgcagaa

SEQ ID NO: 385015 - DNA, 466 bp, Homo sapiens
agaaagagaaatccagtgtagtgcatctcgcgtgcatgatttttttttttttgaggggcacacgggcattgacggcacttctgtgctttgaggaatttgacagcacagacatctagagtaacgtctgttccacttcctctcttgtcgttcaattsttgtcctgctgttctggtccatgtcctaaccctgccggggatccttggtctggcagctgggtacttgcttccccgtcctgtccctttgccgatgtcccctaagtccccacaattctgccggacaatggttgacaatggatcaagacatacaactcacccactttaacgtcttttccccattgccttgggggaatctgtgtgggtttagcttttgcaaaaaatgttcctcctagatcaaaagaggaaattctcttaagattttaggacttcactcactgtgatacttgacccagcaaataaaagatgtatgt

SEQ ID NO: 385016 - DNA, 391 bp, Homo sapiens
atgtatatatacgtatatatctatatacataaatacgtatttatgtatatagatatatatacataaatacgtatatacgtatatgtatatacgtatttatgtatatagatatatacatatatatctatatacataaataattttwaaaaaatgtaggccgggtatagtgatgcacgcctgtaatcccagtggttttgggaggcggaggcaggaggattgcctgaggctagtagttcaagaccagcctgagcaacatactgagaccctgtctctacaaataaaaataaaaataaaaataaaaaaataaaaaaattaattagacaggcatggtagtgcacacttgtagtcctgcctactcaagaggtcaaggtgagaggaccacttgaaccca

SEQ ID NO: 385017 - DNA, 538 bp, Homo sapiens
gacatttgacataaaggaatgcagaaccgtaatccctgaatgcaaaatacaaactgagctctctgagtgccccagctgctacgcctgtagtacaagaaaaggaaatccaggcagactttgatgctcttcttgagttgaagagatgaagctgggagtccagacaggcccaggtttagcaaagcagataccaaagagaagagagatgcacagagagagagagatgcaaaggatctctccagtcttcagctccataatgctwaacactggtgtatgaagaaactacttgaatggggtggagatggggcattgaagaaatcacttgcacagagcaaaggaagcaaaggaattatcataatcctcaggactcaagcagtgccaggaatactaatgttcccatcagccgagtggaaaaccctgcaaatcacaggacattggctagactactcagaaatttattgcctcaggaataaggaaaatgaggcctagtctaaaggcttctctgtttctaactaaccaagcctaatagcaatgtttgaaa

SEQ ID NO: 385018 - DNA, 580 bp, Homo sapiens
taagttttcagtgacacaagcaagctctgctttcctcttgcagtacgtgaccagtttactttgctgtgtcaaatgatgtcctgttgtggaatcaggtcttcatttgcagtacgttttaaggatatatttttgttctcccccctcaataatgccttattttttcctgttttgttagatgactttcaagttcactatatttcaataacacttatatttaaatattagaaaataagactagtcatttcactcaggaaaccttgtgtgttagtgcacaatctgagttggtcatcccccgctaaaccctagcaagacaatttcatggtctcgtttgttgtgatgcaataccaaaagcctctaactagatggattgacgtgtaatttacctgtctggcttcccgactcaagtgtcaagtagcaacttcaggtctagctaaggttcagttcctgcattacactgacattactacacaggattatcttaaaactgacaytgatctctatagttattcaccattaaacctagaatgatattttaggcacacatatacctaggactaccttcatgtctcgtggactgttt

SEQ ID NO: 385019 - DNA, 623 bp, Homo sapiens
ccaccagaagctaaaataggcaaggacggatccttctctagagcctttggaagaacatgaccctgtagacaccttgattttagacttctagcctctagaactgtaagataatatatttctactgttttaagccatgctaatatacatsgcttggagtttgttagatctaggtaaaatcttgtttttgttatttacaagacggatgatcttggacaaaccaacaaacttcgttgatccttggcttcattactgtaaaacagggataatagcagcacctcggttgctgtgaggataaaacaaggtaactcatggacagcacccagctcctaaccactctactgaactctgggaaaggaaatggaccaggctgggctcggggaaggtagcaggctctgagtccctcttcccctgaacctcatgatgccatgtggagcaaggctggccaattcatctttttggctggaattaacctacagtaatggcttgcatgctgtagaatagctatgctgttggctgaagcctatccctccctgacagtaacaacttaatggtctagagagtgatgctgaggcaggagaatggggtctggagggagggaacataaagccaattcacactgactt

SEQ ID NO: 385020 - DNA, 574 bp, Homo sapiens
aacttgaaaaataacaataaaaatcatattttagaaagattaatctagatgatgatgatgtgcagargtaaggaaggcaggcaggaatggagctaaggtttgcagttttaactttaacaggaagggctacacaggactgactttctacctgggttaaggacagaatttttaaagtcagaggttttatcctgggtgactgatagtgtgatggtttcccattgccagatatagtgtggttgagaaggttgatttggggtgaaagaggctgagtctgagctgatggtgggacactcagaaataaagtgtacaattaaaggtgatatgagaaatatggaagagaaatgaaaaagaaagggtgagaagtttgaagaaaatcttgctgggcttttggttagaattgtgttataccagtaaggtaattggaataagttgatactttattgaaactttataatactaagactttcccaccaagaacatggtacatttttttccatttatccaaatgttcatttatgtctttcagtaaaattttatggtgtagctgccttcctgtatgttttttacataacat

SEQ ID NO: 385021 - DNA, 574 bp, Homo sapiens
aacttgaaaaataacaataaaaatcatattttagaaagattaatctagatgatgatgatgtgcagaagtaaggaaggcaggcaggaatggagctaaggtttgcagttttaactttaacaggaagggctacacaggactgactttctacctgggttaaggacagaatttttaaagtcagaggttttatcctgggtgactgatagtgtgatggtttcccattgccagatatagtgtggttgagaaggttgatttggggtgaaagaggctgagtctgagctgatggtgggacactcagaaataaagtgtacaattaaaggtgatatgagaaatatggaagagaaatgaaaaagaaagggtgagaagtttgaagaaaatcttgctgggcttttggttagaattgtgttataccagtaaggtaattggaataagttgatactttattgaaactttataatactaagactttcccaccaagaacatggtacatttttttccatttatccaaatgttcatttatgtctttcagtaaaattttayggtgtagctgccttcctgtatgttttttacataacat

SEQ ID NO: 385022 - DNA, 532 bp, Homo sapiens
taatacctgtatttcaaacagtgcctataacttaagcaatatcaactgaacagtatgaccaaggccatgcacacatgcataggcattgacaactatgaaaaggctgctgcttggggcgtggtggctcatgcctgtaatcccagcactatgggaggccraggcaggcatatcacctgaggtcgagagttcgagaccagcctggccaacatggtgaaaccccgtctctactaaacatacaaaaattagccaggcatggtgtcgggcacctgtaatcccagctacttgggaggctgaggcctgggcgacagagtgaggctccatctccaaaaaaaaaagaaagaaagaaagaaaaaaagaaaggctgctgcttgagtaaggagtaagaataattttatgattttatactctgatttcagaaacacaccctcatctcagagatgctaaaagatgtagggaaaagaaagagagatcagactgttactgtgtctatgtagaaaggaaagacataagagactccattttgaaaaagacc

SEQ ID NO: 385023 - DNA, 469 bp, Homo sapiens
tacagtccatagtgtcaattacctgggtgtgatgttgcacacgtgtggtcccagctagtagagaggctgaggtgggaggatcactagagcccagaaagtcgaggctgcagtcagccatgatcacacaactgcactccagcctgggaaacagagtgagaccctgtctcaagaaaatamatatatgtagtccacaaagcctaaaatatttaccgactagctctttgcagaaaaagctggccaactcctggtttagtagatcaaagattatttgatgtattttaataaaagttttacccaatatactgaaatgtttatattaaatacagatccccatgtacaatcccttggcaatattcagattgagggtcccatatttcagcactgacaacaaaaatttagtaactagcaatcttgttgctaacaaggtacagtgtcaatgtagcatgtagcttccatttgcaacacagca

SEQ ID NO: 385024 - DNA, 469 bp, Homo sapiens
tacagtccatagtgtcaattacctgggtgtgatgttgcacacgtgtggtcccagctagtagagaggctgaggtgggaggatcactagagcccagaaagtcgaggctgcagtcagccatgatcacacaactgcactccagcctgggaaacagagtgagaccctgtctcaagaaaatacatatatgtagtccacaaagcctaaaatatttaccgactagctctttgcagaaaaagctggccaactcctggtttagtagatcaaagattatttgatgtattttaataaaagttttaccmaatatactgaaatgtttatattaaatacagatccccatgtacaatcccttggcaatattcagattgagggtcccatatttcagcactgacaacaaaaatttagtaactagcaatcttgttgctaacaaggtacagtgtcaatgtagcatgtagcttccatttgcaacacagca

SEQ ID NO: 385025 - DNA, 469 bp, Homo sapiens
tacagtccatagtgtcaattacctgggtgtgatgttgcacacgtgtggtcccagctagtagagaggctgaggtgggaggatcactagagcccagaaagtcgaggctgcagtcagccatgatcacacaactgcactccagcctgggaaacagagtgagaccctgtctcaagaaaatacatatatgtagtccacaaagcctaaaatatttaccgactagctctttgcagaaaaagctggccaactcctggtttagtagatcaaagattatttgatgtattttaataaaagttttacccaatatactgaaatgtttatattaaatayagatccccatgtacaatcccttggcaatattcagattgagggtcccatatttcagcactgacaacaaaaatttagtaactagcaatcttgttgctaacaaggtacagtgtcaatgtagcatgtagcttccatttgcaacacagca

SEQ ID NO: 385026 - DNA, 469 bp, Homo sapiens
tacagtccatagtgtcaattacctgggtgtgatgttgcacacgtgtggtcccagctagtagagaggctgaggtgggaggatcactagagcccagaaagtcgaggctgcagtcagccatgatcacacaactgcactccagcctgggaaacagagtgagaccctgtctcaagaaaatacatatatgtagtccacaaagcctaaaatatttaccgactagctctttgcagaaaaagctggccaactcctggtttagtagatcaaagattatttgatgtattttaataaaagttttacccaatatactgaaatgtttatattaaatacagatccccatgtacaatcccttggcaatattcagattgagggtccmatatttcagcactgacaacaaaaatttagtaactagcaatcttgttgctaacaaggtacagtgtcaatgtagcatgtagcttccatttgcaacacagca

SEQ ID NO: 385027 - DNA, 600 bp, Homo sapiens
tatactgaaatgtttatattaaatacagatccccatgtacaatcccttggcaatattcagattgagggtcccatatttcagcactgacaacaaaaatttagtaactagcaatcttgttgctaacaaggtacagtgtcaatgtagcatgtagcttccatttgcaacacagcagatactacaagaattctaacaagaactcttaagatgtgtcatcaaactaaacgctttaaatacattttaattgtgaaatgatcagtatactctagatctaacctcattttttaaaaatggttgcataatacattattttgggggtatggaaattgagctatttcctattgataaggaattagaatagctccaaattttttatataataatgctataataaatgtccttatatgtaagtatacatgtaacatatctatacaaatatcctttatatgtattatatatgcttactctgttatatatgtgtgttgtgtgaatatgctactmaattaatgttcaaaatgtatttaccaaccgtgtatgaaatgtctttttcaatgaaaccatttcctttgcagcaacacggatggagctggaggccattatcct

SEQ ID NO: 385028 - DNA, 600 bp, Homo sapiens
tatactgaaatgtttatattaaatacagatccccatgtacaatcccttggcaatattcagattgagggtcccatatttcagcactgacaacaaaaatttagtaactagcaatcttgttgctaacaaggtacagtgtcaatgtagcatgtagcttccatttgcaacacagcagatactacaagaattctaacaagaactcttaagatgtgtcatcaaactaaacgctttaaatacattttaattgtgaaatgatcagtatactctagatctaacctcattttttaaaaatggttgcataatacattattttgggggtatggaaattgagctatttcctattgataaggaattagaatagctccaaattttttatataataatgctataataaatgtccttatatgtaagtatacatgtaacatatctatacaaatatcctttatatgtattatatatgcttactctgttatatatgtgtgttgtgtgaatatgctactcaattaatgttcaaaatgtatttaccaaccgtgtatgaaatgtctttttcaatgaaascatttcctttgcagcaacacggatggagctggaggccattatcct

SEQ ID NO: 385029 - DNA, 193 bp, Homo sapiens
gatttattagacttactgtatcaaaatattcagaaaaagcctagacttgttgattatttaaacattttcctcaggttactgggatgcacaattctagctgaaagctagtgcaacagacaattayttcagtctcatttctcacccacatgaccaattccctttctcatttgaagatttggccaaaaagagtaag

SEQ ID NO: 385030 - DNA, 593 bp, Homo sapiens
ttagaacagttaaaaactattgccttttaaaaacagatttaagacatttcatttcataaattgggcgtttaatctttcatgaaattgtcatttaagaaaaaattctcaaaaacttcaaaaaaccacttggggagataccagatgtcaccagattgaagacatacaaacatgtcaaaaattcccttacaaattcatccacccaacatcaatgaacaaacccaccagaaacacagcttcaaaatacagcagaaacatataaagtgacacagtatactgttctccacttcctaatagtaccttataaatgatttccaaaatcactgctgacacctttattagtgtacaacatcttcctaatatctaaaatgtttccctccactattctgacacatttattttcatttttttttttatgagtcagggtcttgctctgtcaccagactggaatgcagtggtgcgatcagctcactgcaacctccractccctggttcaagcgattctcctgcctcagtctcctgagtagctgtgattacaggcaaccaccaccacacccagctgatttttgtatttttagtagatatggggtttcacc

SEQ ID NO: 385031 - DNA, 471 bp, Homo sapiens
tatgcagaagccacgctaactttccccgtattgttccaattttaggatatgtgccgccgaagcaagcacaaagccctacttttacacatgattagtgatgcgtcatggacaaggcttggctctgttragtccaactaacctacttgagattctgagatttctcttcaatggcttcctgtgagctagagtttgaaaatattttaaaatcttgagctagagatggaagtagcttcaacgattttcattatcatgtaaatcagatcactcaaggggccaaccacagctgggagccactgctcagggcaaggttcatatgggactttctactgcccaaggttctatacaggatataaaggtgcctcacagtacagatctggtagcaaaaaggaaacaaacactgatctctttctgccacattatttgaacccctctcaccctttagaacaagcccaactaatatctgccagagaa

SEQ ID NO: 385032 - DNA, 471 bp, Homo sapiens
tatgcagaagccacgctaactttccccgtattgttccaattttaggatatgtgccgccgaagcaagcacaaagccctacttttacacatgattagtgatgcgtcatggacaaggcttggctctgttgagtccaactaacctacttgagattctgagawttctcttcaatggcttcctgtgagctagagtttgaaaatattttaaaatcttgagctagagatggaagtagcttcaacgattttcattatcatgtaaatcagatcactcaaggggccaaccacagctgggagccactgctcagggcaaggttcatatgggactttctactgcccaaggttctatacaggatataaaggtgcctcacagtacagatctggtagcaaaaaggaaacaaacactgatctctttctgccacattatttgaacccctctcaccctttagaacaagcccaactaatatctgccagagaa

SEQ ID NO: 385033 - DNA, 471 bp, Homo sapiens
tatgcagaagccacgctaactttccccgtattgttccaattttaggatatgtgccgccgaagcaagcacaaagccctacttttacacatgattagtgatgcgtcatggacaaggcttggctctgttgagtccaactaacctacttgagattctgagatttctcttcaatggcttcctgtgagctagagtttgaaaatattttaaaatcttgagctagagatggaagtagcttcaacgattttcattatcatgtaaatcagatcactcaaggggccaaccacagctgggagccactgctcagggsaaggttcatatgggactttctactgcccaaggttctatacaggatataaaggtgcctcacagtacagatctggtagcaaaaaggaaacaaacactgatctctttctgccacattatttgaacccctctcaccctttagaacaagcccaactaatatctgccagagaa

SEQ ID NO: 385034 - DNA, 231 bp, Homo sapiens
aaactgatctttatgttgcccagtccaagtaattgtttttctacctaactgatttgtgttgatactgatcactatatcccagtaagtatacattaatcttattaatttaatatttatgacttgagtgactgctatccatctagaacacacagattaaaagaaagaactataccttccatatctatccagygcatttaaattcgcttttttcttgattaaaaatttcaccac

SEQ ID NO: 385035 - DNA, 414 bp, Homo sapiens
aagtatacattaatcttattaatttaatatttatgacttgagtgactgctatccatctagaacacacagattaaaagaaagaactataccttccatatctatccagtgcatttaaattcgcttttttcttgattaaaaatttcaccacttgctgtttttgctcatgtataccaagtagcagtggtgtgaggccatgctgtaaaacaatataaagcaaaaacctatgtaattcaaaaaagtacatattcctcaactgaagtggaaactttatataagatcttatggacttacacgcatagraagtaaataaaatgtagtcgcttccttctcactcttctgtgctttcccacacgctgctccttcccttggaaacaccccttctctgcctcaccacagtaactctaatcatctcaa

SEQ ID NO: 385036 - DNA, 650 bp, Homo sapiens
aacgtcataatttagaatataaagtaaaattaaataatagatatttcattatttgggtattttccaataaacatattgtaggaaaacattcttgccaaaaaaagtgtgtcttcttttctaaaaaaaaaaaaaaaaagttgaacaagttttgtgtaattcaaagcttatttaaagttatgtataaaacaaggtaaaaggaaccaggaaataaaaaaaagmtgtaaagaaagttgtaaagaggttgtttttgaggtaaaaagagcttaaagagaaatactattacctaagaaagaatcccgtctagtaagtttagtcctaaaataaaatacttggttgtttaaaaagagggggtgttcagaataaatcagaaagtctgaccatgtcgtaaacagtcagtgtaaagtcacaacaaggatttatatgtttaaaaaacccaaaaacttctatatgataaagttgtcatattaagttttggtttgcttaggaaaaaaaacctgagattttttaaaaattgaggtcattacatccatgtgtcttcctgtatatgcttttaaaatccttgcaacattgagttacagggcttttaactcctaggtctaaaaaggacactaagtcctgctaatcttaaacacccacagcaattaaaggct

SEQ ID NO: 385037 - DNA, 564 bp, Homo sapiens
gtcacttgcccgcgcccagagcaccgggtggcgggagctgggcactgtgcagcctccgkgaatccgctgaagggcgcgttgcagctctcctgcagctgtgggccgactgcctgactttggccactaggtggcctctggcgctagggtttccgggccgctggtgtcggcgggcggagtccgggtttgccaccgctgcccacaggctcaccatggcctgagtaaatgctcgcactgctcatacatccatttttaaaaattgggttgaacatgagaacataatcattcatattttatccatttgcatgtattcgataacatcctttccctgttcttgtctctgctttgcagcctttttcttcaaagaatgaatgtttccatgttttatacccacagaatttctggtttttcccgttggagcccaaggagcaagggcagaatgaggaacatgatgttccttacaaacagttactcatgaggctgcagcacagaaactgcaataaatgtcagttacaaagtgtccatgtgcattttaaattgatggttattaaaatccttctttatcta

SEQ ID NO: 385038 - DNA, 449 bp, Homo sapiens
aataatatagcttgataatgaaataggctgagaataatctcatacaaaaccaataacaaattctgaaatacatttacttgcaataaaatgttatctataatgtagattctttaaatgttaactcgtactcaraaattcaagaacaaagtaaaagccaccatgagtcacaaacatatattctttactctcatcatctttgccacagaacttttgcacttgatcttacttttatatttttctgataatttgtgttttttccttcttaaatgggtctaagttaattcttattagaaagtttcaaacccccttctctcatcatcatgccccaaaatttgtcaaaaaaagtttcagagatattatattgagttatttaggccaaagtcaataaatggctcttagaataagactttgaaactaatgtaatactctacgctaggcatggtgcatca

SEQ ID NO: 385039 - DNA, 449 bp, Homo sapiens
aataatatagcttgataatgaaataggctgagaataatctcatacaaaaccaataacaaattctgaaatacatttacttgcaataaaatgttatctataatgtagattctttaaatgttaactcgtactcaaaaattcaagaacaaagtaaaagccaccatgagtcacaaacatatattctttactctcatcatctttgccacagaacttttgcacttgatcttacttttatatttttctgataatttgtgttttttccttcttaaatgggtctaagttaattcttattagaaagtttcaaacccccttctctcatcatcatgccccaaaatttgtcaaaaaaagtttcagagatattatattgagttatttaggccaaagkcaataaatggctcttagaataagactttgaaactaatgtaatactctacgctaggcatggtgcatca

SEQ ID NO: 385040 - DNA, 449 bp, Homo sapiens
aataatatagcttgataatgaaataggctgagaataatctcatacaaaaccaataacaaattctgaaatacatttacttgcaataaaatgttatctataatgtagattctttaaatgttaactcgtactcaaaaattcaagaacaaagtaaaagccaccatgagtcacaaacatatattctttactctcatcatctttgccacagaacttttgcacttgatcttacttttatatttttctgataatttgtgttttttccttcttaaatgggtctaagttaattcttattagaaagtttcaaacccccttctctcatcatcatgccccaaaatttgtcaaaaaaagtttcagagatattatattgagttatttaggccaaagtcaataaatggctcttasaataagactttgaaactaatgtaatactctacgctaggcatggtgcatca

SEQ ID NO: 385041 - DNA, 449 bp, Homo sapiens
aataatatagcttgataatgaaataggctgagaataatctcatacaaaaccaataacaaattctgaaatacatttacttgcaataaaatgttatctataatgtagattctttaaatgttaactcgtactcaaaaattcaagaacaaagtaaaagccaccatgagtcacaaacatatattctttactctcatcatctttgccacagaacttttgcacttgatcttacttttatatttttctgataatttgtgttttttccttcttaaatgggtctaagttaattcttattagaaagtttcaaacccccttctctcatcatcatgccccaaaatttgtcaaaaaaagtttcagagatattatattgagttatttaggccaaagtcaataaatggctcttagaataagactttgaaamtaatgtaatactctacgctaggcatggtgcatca

SEQ ID NO: 385042 - DNA, 569 bp, Homo sapiens
ttgtgggtacatagtatgtgttgtgggtacatcgtatgtgttgtgggtacatagtatgtggggtccatgagatgttttgatacaggcatgcaatgtgaaataagcacatcatggggaatggggtatccctcccctcaagcatttatccttcaagttataaaaaattcaattacagtcttagttatgtcaaamtgtacaattaaattattattgaatatagtcaccctattgtgctatcaaatagtaggtcttattaactctctatttttatatccattagccatccccaccttcccacaaaccgcccctaccgactacctttcccagcctctgataaccatccttatactctctatgtccgtgagtttgttttgattttagattccacaaattagtgagaacatgtgacatttgtctttctgtgcctggcttatttcacttaacataatgatccataatgttccatcaatgttactgacagtgactggatcttattctttgttatggctgaatagtcagtcctccgttgtgtatatgtaccacattttctttatccattcatctgttga

SEQ ID NO: 385043 - DNA, 569 bp, Homo sapiens
ttgtgggtacatagtatgtgttgtgggtacatcgtatgtgttgtgggtacatagtatgtggggtccatgagatgttttgatacaggcatgcaatgtgaaataagcacatcatggggaatggggtatccctcccctcaagcatttatccttcaagttataaaaaattcaattacagtcttagttatgtcaaactgtacaattaaattattattgaatatagtcaccctattgtgctatcaaatagtaggtcttattaactctctatttttatatccattagccatccccaccttcccacaaaccgcccctrccgactacctttcccagcctctgataaccatccttatactctctatgtccgtgagtttgttttgattttagattccacaaattagtgagaacatgtgacatttgtctttctgtgcctggcttatttcacttaacataatgatccataatgttccatcaatgttactgacagtgactggatcttattctttgttatggctgaatagtcagtcctccgttgtgtatatgtaccacattttctttatccattcatctgttga

SEQ ID NO: 385044 - DNA, 569 bp, Homo sapiens
ttgtgggtacatagtatgtgttgtgggtacatcgtatgtgttgtgggtacatagtatgtggggtccatgagatgttttgatacaggcatgcaatgtgaaataagcacatcatggggaatggggtatccctcccctcaagcatttatccttcaagttataaaaaattcaattacagtcttagttatgtcaaactgtacaattaaattattattgaatatagtcaccctattgtgctatcaaatagtaggtcttattaactctctatttttatatccattagccatccccaccttcccacaaaccgcccctaccractacctttcccagcctctgataaccatccttatactctctatgtccgtgagtttgttttgattttagattccacaaattagtgagaacatgtgacatttgtctttctgtgcctggcttatttcacttaacataatgatccataatgttccatcaatgttactgacagtgactggatcttattctttgttatggctgaatagtcagtcctccgttgtgtatatgtaccacattttctttatccattcatctgttga

SEQ ID NO: 385045 - DNA, 562 bp, Homo sapiens
ctataagggcatgcaagaataaaaataggagagtttttcaagagctttctagtcatgtaagtcaatttgtatcggttaatttttaaaaggtttacttacatgcaataaactgcacacacttcaattgtacattttgataattcttggcatttgtagctctataaaaccagcaacatattaaaatagcaaacatatccattacctttaccaccaaagttttcttgtgttttttctactcactttttcctgcctatccccatcccatccacaggcaaccattgatccacttccagtcactatcygtgagtttttatttccaaatacatgaaatcatagggtatgtatactttctgatcactcagcatcactatttttgagatttattcatgttgctacatctatcagttgttctgttcttactagggagtattatttcattatatacatataccatagtaagtttataagtcacaaattcacctgccatagacatttggaatgttttcaggttttggctgttgcaagtaaagctgctatgaagattcatgtaaaatcctttgaa

SEQ ID NO: 385046 - DNA, 540 bp, Homo sapiens
aacaaacaagcaaaactcacaatagattggtatgctagtgaatgtcctttatttcatcagtaaccaatgtagtggaaaaccacaacactgcacacccctgaatctgcatcagactcatcagactatatggcttgggggaaagaaagaatgaaaacaatgaatgaaaagaaacaaacatccaacggatgataagaaaggtataggggaaaacacagctaaggagattttttttagaaaaggtgtaagtaactaacactactaactagcagaaaagagaaggtaattagcaaaccaaaattgggcaaagaaaccaaagagtcttttctgcaaakaacacctaaaactgaaaacaaatgtacttaacacctagtagttaatatcactaatcataagaaaaatgaaaatcagaacaagactcagatatcgtgtccctctcaaaggaaagagtattacaaagaacttcatatatcttaaaagaagggaaaccacaaatgttgctgtgaatttccagagaggagagctctcttgtccacaactgtt

SEQ ID NO: 385047 - DNA, 556 bp, Homo sapiens
aataccaacctaggtgacatggcaaagccccatctctacaaaacaaaacaaaatcaaaaaaaatatttaggcatggtggcatgtgcttgcattcccagttgctcaggagactgaggtgggagaatcactgagcccagggaggttgaggctgcagtgagccatgatcatgctgctgcattccaatttgggtgacagagcaagagcctgtytcaaaaaaaaaaaaaaaaaaaaaaaaaaaaaaaaaaggtactatctataactattcttaattagaataactaggtttttttcaacagtggaaactcaaaacagacaaaattgttgtacctcaaggtgagttgtcatagtcagttaattcctttgcttgcaactgcccaataaatggatgaggactcacttcacccataaataagaaaggtgaacagcacatggggcctgtagatgccttttgcagggccctctttttctcttcctaaagttgcaatttgggtatttctctagatgggcacaacatagaaactgtcatcctagatcagagcctggagagagagataca

SEQ ID NO: 385048 - DNA, 556 bp, Homo sapiens
aataccaacctaggtgacatggcaaagccccatctctacaaaacaaaacaaaatcaaaaaaaatatttaggcatggtggcatgtgcttgcattcccagttgctcaggagactgaggtgggagaatcactgagcccagggaggttgaggctgcagtgagccatgatcatgctgctgcattccaatttgggtgacagagcaagagcctgtttcaaaaaaaaaaaaaaaaaaaaaaaaaaaaaaaaaaggtactatctataactattcttaattaraataactaggtttttttcaacagtggaaactcaaaacagacaaaattgttgtacctcaaggtgagttgtcatagtcagttaattcctttgcttgcaactgcccaataaatggatgaggactcacttcacccataaataagaaaggtgaacagcacatggggcctgtagatgccttttgcagggccctctttttctcttcctaaagttgcaatttgggtatttctctagatgggcacaacatagaaactgtcatcctagatcagagcctggagagagagataca

SEQ ID NO: 385049 - DNA, 633 bp, Homo sapiens
ctagaggtagcattgtgaccgtatctgcagtagtcaatccttgtgtgccacggtccctgactttgttaataagggcaccagcctacatccctctggtactcagtgataagcatctaaaatcttcttaaagaaaaaatttaaaaagctttcaaaatatatgacttaacatatgaggctgcataaacatctctagyagttgtccaactggtgcttctggttctgcctccccagaaagtggatgacctgggccaccctccaccactgccctgtaaggccatgggacacacagcccatcagttctcttcatgtggtcatcccctgttagatgggagaaaatacacctgcctcatttttgtaccttctgtgtgaacattccacgacagaacttcactaaatgtgtgatgaagaactgaatgaatgaatgaatatgagagaaaatgaataaatggctcagatcctgggctggaagtctgtgtatgaggatggtgggtaaaggagggtctgtttttcttgcctttaagtcattacttctcattttggggcaggagcacaggctttgaatgcagaccgactggactttaattctggctttactagttgtgattgtgtgatcttgtacatgttacttaaacc

SEQ ID NO: 385050 - DNA, 633 bp, Homo sapiens
ctagaggtagcattgtgaccgtatctgcagtagtcaatccttgtgtgccacggtccctgactttgttaataagggcaccagcctacatccctctggtactcagtgataagcatctaaaatcttcttaaagaaaaaatttaaaaagctttcaaaatatatgacttaacatatgaggctgcataaacatctctagtagttgtccaactggtgcttctggttctgcctccccagaaagtggatgacctgggccaccctccaccactgccctgtaaggccatgggacacacagcccatcagttctcttcatgtggtcatcccctgttagatgggagaaaatacacctgcctcatttttgtaccttctgtgtgaacattccacgacagaacttcactaaatgtgtgatgaagaactgaatgaatgaatgaatatgagagaaaatgaataaatggctcagatcctgggctggaagtctgtgtatgaggatggtgggtaraggagggtctgtttttcttgcctttaagtcattacttctcattttggggcaggagcacaggctttgaatgcagaccgactggactttaattctggctttactagttgtgattgtgtgatcttgtacatgttacttaaacc

SEQ ID NO: 385051 - DNA, 456 bp, Homo sapiens
ctctggcttgggtcacactttggctaggggaaggtgggagattcttaaatgacagtcccaccaggactctaaccagtggggaggagtattaccaaaggaatgttgggatgctgtcactaatagaagcatgctgtgcattcagaaatgacagatgaccactaaagtttcctctttcaaatgtgtrtatttcagaggtactctgacctcattttcaaccactttcttcacaaccatgttccattacacccctttttctcctctgtctttagcctctcactctgtactgcctcctttccctcaacccatgaacatactctcatctatcctaaacaaaattcttttcttgacatctccctcttagttgttcagtctttttcctccccttctcatgtaaacctactgaaagagagttgtcctctctgcccactttgttttctcacgttcatttcacaactc

SEQ ID NO: 385052 - DNA, 590 bp, Homo sapiens
gttgaatgagacggtgaacgtactgaagccactggatgtacactttaaaatggttaaagtgggccgggtgcggtggctctgcctgaaatcccagcactctgggaggccgaggcaggtgggtcgtctgaggtcaggagttcaagaccagcctggccaaaacggcgaaaccccacttctaccaacaatacaaaaattacctgggcatggtgatgcatgcctgtaatccaagctactcgggaggttgaggcaggagaatcgcttgaactcgggaggccaaggttacagtgagccgagattgcgccactgcactccagcctgacagagcaagactctgtctcaaaaaaaaaaagaaagaaagaaagaaagaaaaataaatggttaaagtggcaaattttatgctayataaattgtgccttaatttttgaaaagtttacactttgagtgaggcaagtgtttggcacagaaaccacttctctcctggcaacacttcataatcctccagtggcaaagcccctctccgcaaacccatctctcaagccacgcacgtcccaagagacacaagaacactagaggccagacaggaggggaca

SEQ ID NO: 385053 - DNA, 593 bp, Homo sapiens
ctccctttcccctaagaagaagggtatataagcatatgtaccccgctgggttatcgaataatcactctgctacagttccccatgcttgacacgttaaaataaattcatagtgttttatctaattaacctgccttttgtgagttgatttttgtgcaaactttctgagagcgaaggggaagttttcaygggtattgcatggtcttctgaaataactagcattaatatagattagacaaaaaccaaccctgaacaggttccatgtgacagcagaatgttctgaaatgggaaggaatgaatgtgagcatgagaggtctgtgtgaacggataatgaggttcggggtaagatgcaaaggaggatatatattataccatctttcatatggaaagaagagaaaatgaatacgtgtatgtgttatttttgtgaaaagaaatacagtattaaacagacactaatggaaggcattcaccgtggaggtgggaaggaatggggtagaagggataggaacggcagtgaggcttctcttgtatatctcatatcattgtcactttttatttttttattttttcagagacggggtctcgctctctcacca

SEQ ID NO: 385054 - DNA, 554 bp, Homo sapiens
ctccccgtgtaaactactttgggcagtgccttgggtttttcaagagtttgtcaggcacttgaggttgaggctcgaagaaagaatattatttgattcttagccatggtgggaaccgacatttatctaagtgtttttcatagacaggaagtggtaattctcaccctccctgatctgggctctgactcactggggtgccccagcctctgggcctgggctcactagtggtagccagctgacctgagcatcagagtaagatgcgtgcctgaaaaattcccctggtggggccggtcatgaaaagtgccgttctcctcattcatgtggttttgtcaggatgccyggattccgcaggcccgggccagttattttgagcacacaagtcactttaaaagacccctaaaggtcactggtcccaaggattatttcaccccctcaccacagttaatgtcgtctccccacctctgtttttctgtattcccataacacattctgagtgtggctatgtgatgtaaagagctgttttcatgcaaatgttcagggtaacatcatgcatagtg

SEQ ID NO: 385055 - DNA, 581 bp, Homo sapiens
tgaaggagattacttgagttgtatactcaacaaagacataaggctacttggcaatttttttaatgtgtgcaccaggaaataacactcatatttgtagaatacattttttatataacaactttgcatccattatcttacgtcctaatcatagaaaccaaatgtggtagttatttctagtatttttctcttttccagttaaggtgacagtttcagagtagttaagtaacttgctcaaggtcactcagagacttatatagtggcgatggcattcaaattcagtctgcattacttcaaaatgtatgcttatttgagagaaaaacattatacacatgtaagaaaaaactttccccaacctaagttttttttactttcaactagacatataacataaaacaacaaccaaattatttaatatcaatgaataaaaaagtcagaatgaaytttctttacactgtatctatattggatatctataaagaaccacaaagtttgttggcctttgtgcatttactgcaagccaaaaagaaaaaaaaaaaaatctctccaaaagacatctaacttggaagggcatgagagcaaca

SEQ ID NO: 385056 - DNA, 554 bp, Homo sapiens
aggaatgccccaggtatcagctagaggaattcatccctattctgttcactcttatgctctagactatctcaactaatctcatgggctataaatgccatagctaagctaaagacacacaaattagtataaataggatctcttcactgaattcggacttatatagggaagtgcctacttaacactgggatgtgctatagacatacaaaacattcatatccaaaatcaaatccatgaatgttctgccttccccaaacctgcctgcttttccctcaacagtcctgtttttgggggtataatgaaaacttcttttaactacccagaccaaaaaaagaaatcttatggtttcctgtgacttatctgtctcactcccaacattcaattcggtaaaaaatagtattaaagccacttaaaaaatacatccagaacatgatgacagatatcccctgctaccaccatggaccargacaacatcatctattcttgcctgtcatattgctctagcctcctaactggcctctgtgctccttcacttgtcccactgagagtctattctc

SEQ ID NO: 385057 - DNA, 371 bp, Homo sapiens
aatttttaattgccagaaaagaaaacacacacacacacaaccaactagttactctctgcattcagtggaggatttctctcccaccaatcaagactcctcttccacagccccttgctgaatgccagggatatgccacatgcttctgtttatgggcactgtttaggggtaccactcatctttaaracattttattttccagaggtctgcttgtatccccagccagatcagcttcttattatagaacatagccagggaatcctaactatgcttgcagaatgcactacacttggacacttcaaaacattaaatccgttccatgcttacgtggtcctccaattagcattctgtttggcaactcttattttcccagc

SEQ ID NO: 385058 - DNA, 551 bp, Homo sapiens
tctacatgtagtcccaacagctccttagtttctgagttacttcccaaatatctagccatcaaaaattttattgctaacttttattgtctcaggatcctgaccttgaattagaatcctgagtcttatgtctattaaatcatgggctcaagtctcatctctacccctttttaattttgtgaccttagatatgtcaacttctgtaatccttaatgcctcattttgtaaagcaagcacttcataaggcactgaaaagcattaaataaagtaaccttagacaaatttgtagtactgttcttacacatagaaaacaagcagtracctttagctactgttataaattatttttaaaaattaaattatgagtctgaggaactgagacagctacctggaatcacacaagtagaagataccaagctataattagaacacaggtcagcctgattctacacatttgttcctaagccccacaattaacacttggaagacatctggagccaggcagtagaaaaccatagttcactggtattttttaaaaaacagcctccacacat

SEQ ID NO: 385059 - DNA, 451 bp, Homo sapiens
tttaaagaaagctatgtgaggcggataattattttcatttaaattgactgataaaagcagcctggagcacaatgagatcctcatttactaaatgtatttatacacatgtgtaaaggtgtgatttttgccaaaacatcaacatcttcccattctcctgacttcagctacaatttgcatgttgagtaaatggtaaagagatgaaagtatactagagtttatagttctgcaatactagagctgtagtttytaagctctcatatacataggaagttccatattaaaatgaaaattcaatgtctagggtaggaactgaaatatgtatttttaaggaccatcacaggtaattatcattcaattagaatgaggagcatacttggagaaactaaattgagaacatgtattacctggcaaacttttgtatttataataaaggctttatttggctgatttt

SEQ ID NO: 385060 - DNA, 361 bp, Homo sapiens
acagagaaattttcattttataaatgaaaaattgcataaataacccaaggatgctcaataatcagtggtataaaattaggcgtattccgtttccaaaacattggcatagaggtccttgtccctgtttctcccagtaaatacaactaaaagccctggccattatatataaaacaaacacaaaactctgaaaggtgaagggaggaaagcagaccgactgatgaatctagaactcaaggaagtaaatgctgygtaattgtttaagctttctttttgtctcatgtatctcagacttggaattgaagaagatacaacttagaaacttgtaatatatagacaagtagaagctccaacagaagcatgt

SEQ ID NO: 385061 - DNA, 532 bp, Homo sapiens
ccgtttccaaaacattggcatagaggtccttgtccctgtttctcccagtaaatacaactaaaagccctggccattatatataaaacaaacacaaaactctgaaaggtgaagggaggaaagcagaccgactgatgaatctagaactcaaggaagtaaatgctgcgtaattgtttaagctttctttttgtctcatgyatctcagacttggaattgaagaagatacaacttagaaacttgtaatatatagacaagtagaagctccaacagaagcatgttgtctcttatcaaaggattagaaacaagaggaaagcctagcaatgccaaaaacataggcaaccacctctctactctagtcaagcacagcaaataaaaaatggtggctccactccaactcatgccaacaaaggcccagtaggcagtctgacctccactctcatgaggcaccctagactggaaatatggtaatataagagaaggctaagtagggagttgggactttcacccctatgggagctgataacctctcctcaag

SEQ ID NO: 385062 - DNA, 532 bp, Homo sapiens
ccgtttccaaaacattggcatagaggtccttgtccctgtttctcccagtaaatacaactaaaagccctggccattatatataaaacaaacacaaaactctgaaaggtgaagggaggaaagcagaccgactgatgaatctagaactcaaggaagtaaatgctgcgtaattgtttaagctttctttttgtctcatgtatctcagacttggaattgaagaagatacaacttagaaacttgtaatatatagacaagtagaagctccaacagaagsatgttgtctcttatcaaaggattagaaacaagaggaaagcctagcaatgccaaaaacataggcaaccacctctctactctagtcaagcacagcaaataaaaaatggtggctccactccaactcatgccaacaaaggcccagtaggcagtctgacctccactctcatgaggcaccctagactggaaatatggtaatataagagaaggctaagtagggagttgggactttcacccctatgggagctgataacctctcctcaag

SEQ ID NO: 385063 - DNA, 560 bp, Homo sapiens
gtcttataattttatgctaataagcaagaaaaattatgtacattktcactctggattcttaagatttatgtgtatgtggagcataaaataatcattggatgaaataaaaaactacaaccaagagcagatatatgggacggaagcccaataaatagtgaagtgatgatgtcaggccatcatgcttactctgcttagaataagcatatagtaagatttattgtcaaattccaactattttaaataaactgaattatttcagtttttagaacactgtaaaaatttattttatccttattaatttatttaagatataatctacagactcaatttgttagtttagactttaccaaccttcttactatttcaatcatattatataagccgtgatagtaatacaggtctcaagcaattcagtttatatactttttttttgaacacagaagacattttactccaaagactcattagagtttgtttttgccatgtctaattatggagttcattattctttgtgtaaatatagtactactcaaagtagaatggaaagggagaattctatt

SEQ ID NO: 385064 - DNA, 560 bp, Homo sapiens
gtcttataattttatgctaataagcaagaaaaattatgtacattttcactctggattcttaagatttatgtgtatgtggagcataaaataatcattggatgaaataaaaaacyacaaccaagagcagatatatgggacggaagcccaataaatagtgaagtgatgatgtcaggccatcatgcttactctgcttagaataagcatatagtaagatttattgtcaaattccaactattttaaataaactgaattatttcagtttttagaacactgtaaaaatttattttatccttattaatttatttaagatataatctacagactcaatttgttagtttagactttaccaaccttcttactatttcaatcatattatataagccgtgatagtaatacaggtctcaagcaattcagtttatatactttttttttgaacacagaagacattttactccaaagactcattagagtttgtttttgccatgtctaattatggagttcattattctttgtgtaaatatagtactactcaaagtagaatggaaagggagaattctatt

SEQ ID NO: 385065 - DNA, 560 bp, Homo sapiens
gtcttataattttatgctaataagcaagaaaaattatgtacattttcactctggattcttaagatttatgtgtatgtggagcataaaataatcattggatgaaataaaaaactacaaccaagagcagatatatggracggaagcccaataaatagtgaagtgatgatgtcaggccatcatgcttactctgcttagaataagcatatagtaagatttattgtcaaattccaactattttaaataaactgaattatttcagtttttagaacactgtaaaaatttattttatccttattaatttatttaagatataatctacagactcaatttgttagtttagactttaccaaccttcttactatttcaatcatattatataagccgtgatagtaatacaggtctcaagcaattcagtttatatactttttttttgaacacagaagacattttactccaaagactcattagagtttgtttttgccatgtctaattatggagttcattattctttgtgtaaatatagtactactcaaagtagaatggaaagggagaattctatt

SEQ ID NO: 385066 - DNA, 560 bp, Homo sapiens
gtcttataattttatgctaataagcaagaaaaattatgtacattttcactctggattcttaagatttatgtgtatgtggagcataaaataatcattggatgaaataaaaaactacaaccaagagcagatatatgggacggaagcccaataaatagtgaagtgatgatgtcaggccatcatrcttactctgcttagaataagcatatagtaagatttattgtcaaattccaactattttaaataaactgaattatttcagtttttagaacactgtaaaaatttattttatccttattaatttatttaagatataatctacagactcaatttgttagtttagactttaccaaccttcttactatttcaatcatattatataagccgtgatagtaatacaggtctcaagcaattcagtttatatactttttttttgaacacagaagacattttactccaaagactcattagagtttgtttttgccatgtctaattatggagttcattattctttgtgtaaatatagtactactcaaagtagaatggaaagggagaattctatt

SEQ ID NO: 385067 - DNA, 665 bp, Homo sapiens
caggccatcatgcttactctgcttagaataagcatatagtaagatttattgtcaaattccaactattttaaataaactgaattatttcagtttttagaacactgtaaaaatttattttatccttattaatttatttaagatataatctacagactcaatttgttagtttagactttaccaaccttcttactatttcaatcatattatataagccgtgatagtaatacaggtctcaagcaattcagtttatatactttttttttgaacacagaagacattttactccaaagactcaytagagtttgtttttgccatgtctaattatggagttcattattctttgtgtaaatatagtactactcaaagtagaatggaaagggagaattctatttctaatgtgacaatgcacaaaccatggacagccaattttcttttcacagtttatcaccacatatgtaaaactactctgtgcaaggatagtggcatacaaaagctggaaacaaaactgaggggtgaagcctggagactgtgagacagcttgatgtctctctgcatcagggattttggattataatatcctcagtgcctaatcattcgtaatttagactgggtagttcttaaaaaggtctaattgctcatccgcacaataattttactttatctaa

SEQ ID NO: 385068 - DNA, 665 bp, Homo sapiens
caggccatcatgcttactctgcttagaataagcatatagtaagatttattgtcaaattccaactattttaaataaactgaattatttcagtttttagaacactgtaaaaatttattttatccttattaatttatttaagatataatctacagactcaatttgttagtttagactttaccaaccttcttactatttcaatcatattatataagccgtgatagtaatacaggtctcaagcaattcagtttatatactttttttttgaacacagaagacattttactccaaagactcattagagtttgtttttgccatgtctaattatggagttcattattctttgtgtaaatatagtactactcaaagtagaatggaaagggagaattctatttctaatgtgacaatgcacaaaccatggacagccaattttcttttcacagtttatcaccacmtatgtaaaactactctgtgcaaggatagtggcatacaaaagctggaaacaaaactgaggggtgaagcctggagactgtgagacagcttgatgtctctctgcatcagggattttggattataatatcctcagtgcctaatcattcgtaatttagactgggtagttcttaaaaaggtctaattgctcatccgcacaataattttactttatctaa

SEQ ID NO: 385069 - DNA, 573 bp, Homo sapiens
gaatatacacaactagggtagatactccaagtggatttacatttggaacaagagtctagaagagagaataggacaaattctatgcagcaaacgatatgcagtcatttcttagactagatgttaacaaggtgctttcatggatttttttgtagtcaactcttcattatcattcagcccttttcttggtctttcacagagttttagtaatgaattatgtatagtttttgtaatgatttacatataatcattctaacacgtatgtatgtacacataatatcacatatcattatatgtaatatacatgaatattatgttcrtatatatattcatatatacattcattctcctgggtctattttaacttattttagtgttcaaacaagccagcatacaatgtgatttcttaaccagtttgccagcaaccgacttacactctgtccctttattctctgctaggccaatgggctctgttctttttacacagggatctggattctgaaaagaaggtcaactttaagagacagtgtagcattttggttaagagcagggacactgggaggtcgctgggttgtg

SEQ ID NO: 385070 - DNA, 600 bp, Homo sapiens
gtctgtctctaatgaccttggataaaacatttaagccatcagggaaataattcagcctattacccatctctaaattccaagcttaggctcatttagaaacaaacaaataaaggaataattttttcccaaaaagattatattttaaaataataatagtaatactaatatgaataatagcttctttgtgttgagcatttatgggagtctaggccctccttaataacaattttacttttcttattgaagtttcaccattctgtgaggggactactcttatagatgaaaaactgaggcctagagagattaaataactttcctaaaatctcaataatttttttttaaaaaaagaagatcctcacttcatattccatgttattcttgcttcaaaatgcatgtaatgactgtttcrtagccaccttgggtctcagctaaggttcaagtagcaaacaactctgtttctcttcttgccggtggggtgtatttccaggctaacctggacgtcaattatcagtttggtaatttatccatctcattctgctcttccacttcatgtgaatgaatttatacccccagcaatctcagagctcacaatgtcctggc

SEQ ID NO: 385071 - DNA, 600 bp, Homo sapiens
gtctgtctctaatgaccttggataaaacatttaagccatcagggaaataattcagcctattacccatctctaaattccaagcttaggctcatttagaaacaaacaaataaaggaataattttttcccaaaaagattatattttaaaataataatagtaatactaatatgaataatagcttctttgtgttgagcatttatgggagtctaggccctccttaataacaattttacttttcttattgaagtttcaccattctgtgaggggactactcttatagatgaaaaactgaggcctagagagattaaataactttcctaaaatctcaataatttttttttaaaaaaagaagatcctcacttcatattccatgttattcttgcttcaaaatgcatgtaatgactgtttcatagccaccttgggtctcagctaaggttcaagtagcaaacaactctgtttctcttcttgcyggtggggtgtatttccaggctaacctggacgtcaattatcagtttggtaatttatccatctcattctgctcttccacttcatgtgaatgaatttatacccccagcaatctcagagctcacaatgtcctggc

SEQ ID NO: 385072 - DNA, 600 bp, Homo sapiens
gtctgtctctaatgaccttggataaaacatttaagccatcagggaaataattcagcctattacccatctctaaattccaagcttaggctcatttagaaacaaacaaataaaggaataattttttcccaaaaagattatattttaaaataataatagtaatactaatatgaataatagcttctttgtgttgagcatttatgggagtctaggccctccttaataacaattttacttttcttattgaagtttcaccattctgtgaggggactactcttatagatgaaaaactgaggcctagagagattaaataactttcctaaaatctcaataatttttttttaaaaaaagaagatcctcacttcatattccatgttattcttgcttcaaaatgcatgtaatgactgtttcatagccaccttgggtctcagctaaggttcaagtagcaaacaactctgtttctcttcttgccggtggggtgtatttccaggctaacctggacgtcaattatcagtttggtaatttatccatctcattctgctcttccacttcatgtgaatraatttatacccccagcaatctcagagctcacaatgtcctggc

SEQ ID NO: 385073 - DNA, 566 bp, Homo sapiens
ggtgttaaaaaattaagtgtgttgccttaatactaaatgtagctatcattaaggcagcacttcaaaaaggtagcaaatccagaataggaagtacattaatcatttccatgccttctaaaatcaatctcaggatatatgtgttttttttcccccatgaatatcttgtccttaccttcccttattttcatcatggattgcacatgtggagttttgtagtaacatccctcctttgatttatgtacagatctgacatgtaagaaatattaaacgtaactattttctgaacactgatgctatttgcgctagcaaatagatttacaaratcctggccgagcaaggtggctcacacctgtactcccagtgctttggaggctgaggaggcagatcacttgaacccaggaggttgaggttacagtgagctataattgtgctactgcactacagtgtgggtgacagagcaagccccaatcccttaaaaaatagtaataataaaatgtttttaaaacacaaaaacaatatccttagttcttcataattgtccgtgttgcaatattttcatttggaaa

SEQ ID NO: 385074 - DNA, 459 bp, Homo sapiens
taaaatattagttattgtgcagccttctggcattgtgtctaataatgacttgaattatcagtttactatcagactgttttgcctattgcaaatttgagaaagaaaggaaatatgtttttaaagagagagaccacaggcaatacagtcaggtctttaacaatccccacctccctttccattgaagacaaagagaaaaagagaaagagggagasaaagagagttttatgttgaacatattgtagtctaactaactcatttgtttgaaggcccttttctatcaaattagagctttgcataattatatggtattgaattatatggtattgaacatgcagtcttatagtcactcatgttcctttaaaatatagattggcatcagtttcttgaatataaaagacactagaattatgccatagcaatggggaaacctctaactcaagaagagcacttgacagctgt

SEQ ID NO: 385075 - DNA, 523 bp, Homo sapiens
atgcgtggttctaatgaaataatgttttctggtgtgtgttataagaaactatgtgtgcggctgtttctcagtgacttctagaagatttgctaaaatcccttttacaaatggtgctaaatcatttaagtaacctgattaaacaggtactgtttaaaattatggttccttttctgagaaatccaaaaagactctctgaacttgtcttcatccctgtagacatgtctttgaygtttcattatcatgcagtaagaatgtgcctgctatcagtcagttattacatgcaccatcagggcaataaaacaatagattagttatgtatatccataatctagtcatacatacaaataatgatatataaaacaaaattgggtaaataacaacaaaattttacacaaatttctaagtgtgaatgaagcaaagagttaataatgccaattaagtggtgtctggggcaacttctactttccaaggatattgaaaagaaaaatattttgtgatcaacctcaatatcctgccacactta

SEQ ID NO: 385076 - DNA, 523 bp, Homo sapiens
atgcgtggttctaatgaaataatgttttctggtgtgtgttataagaaactatgtgtgcggctgtttctcagtgacttctagaagatttgctaaaatcccttttacaaatggtgctaaatcatttaagtaacctgattaaacaggtactgtttaaaattatggttccttttctgagaaatccaaaaagactctctgaacttgtcttcatccctgtagacatgtctttgatgtttcattatcatgcrgtaagaatgtgcctgctatcagtcagttattacatgcaccatcagggcaataaaacaatagattagttatgtatatccataatctagtcatacatacaaataatgatatataaaacaaaattgggtaaataacaacaaaattttacacaaatttctaagtgtgaatgaagcaaagagttaataatgccaattaagtggtgtctggggcaacttctactttccaaggatattgaaaagaaaaatattttgtgatcaacctcaatatcctgccacactta

SEQ ID NO: 385077 - DNA, 523 bp, Homo sapiens
atgcgtggttctaatgaaataatgttttctggtgtgtgttataagaaactatgtgtgcggctgtttctcagtgacttctagaagatttgctaaaatcccttttacaaatggtgctaaatcatttaagtaacctgattaaacaggtactgtttaaaattatggttccttttctgagaaatccaaaaagactctctgaacttgtcttcatccctgtagacatgtctttgatgtttcattatcatgcagtaagaatgtgcctgctatcagtcagttattacatgcaccatcagggcaataaaacaatagattagttatgtatatccataatctagtcatayatacaaataatgatatataaaacaaaattgggtaaataacaacaaaattttacacaaatttctaagtgtgaatgaagcaaagagttaataatgccaattaagtggtgtctggggcaacttctactttccaaggatattgaaaagaaaaatattttgtgatcaacctcaatatcctgccacactta

SEQ ID NO: 385078 - DNA, 449 bp, Homo sapiens
gaaaaacatagtagtgaaaaacccaaagcactgaaattgtatgctattttatcttcgcattgctaggaagttcccaatttctcatttcccacttgtctcagtctttcttgtttcttttccatgagacccttttagccatgcactttaccattatttatggtattttttyccaaaaagctagaccaagaaatttaacagttctcagtcatattggctaaatatgacatcgcatcaaatcagatagacaataggcctcattatatactactgaaatcaaatatgaaatttcatattaaaacctcactggtagggtacagtgacatgtgtcccagctactctggaggtaaagatggggaggattacttgaggcaaggagtttgaggctgcagtgagctatgattgttattttgactagccactgcactccagcctgggcaacataaggacac

SEQ ID NO: 385079 - DNA, 449 bp, Homo sapiens
gaaaaacatagtagtgaaaaacccaaagcactgaaattgtatgctattttatcttcgcattgctaggaagttcccaatttctcatttcccacttgtctcagtctttcttgtttcttttccatgagacccttttagccatgcactttaccattatttatggtattttttcccaaaaagctagaccaagaaatttaacagttctcagtcatattggctaaatatgacatckcatcaaatcagatagacaataggcctcattatatactactgaaatcaaatatgaaatttcatattaaaacctcactggtagggtacagtgacatgtgtcccagctactctggaggtaaagatggggaggattacttgaggcaaggagtttgaggctgcagtgagctatgattgttattttgactagccactgcactccagcctgggcaacataaggacac

SEQ ID NO: 385080 - DNA, 561 bp, Homo sapiens
acattgaaagttcttaatgcaggataaggggtggctaaataatttgagtttacgttatttgctcatacaggctaagataacttcagttttatataggatagaaacagtaggaaaagagaaatggctatttactgttcataagccctcttccagaattatatctcaggcatgaaaggtgatctcgtagttttagacaacatgaagtatgcacgaagtcactgatttaatggagtatcacttttttgttttaaattgattgaagatcttcattttacatgttttagatagaaaatgctawgtcttaaggtggcacaactagaactaatctctttgagttagacaggtaaaaaaataaactgcattcaatgtgtcaggcagtatatacaattctctatatttaatgttgcagttaatttcctgtattctgtccaataaccaatttgaagatgaggatacatctttaaagttgcagagaaattaaggtatttgtcaaattttactcatcttgggaataggaacttgagtgtagggaggcaacatactttggtgattgagtgcaag

SEQ ID NO: 385081 - DNA, 512 bp, Homo sapiens
gccataagtattagaagatagtatgtagaagtggattttcctcatctgcagaagtggaatagtaaagatacataactcagagcttttgtatgaaaaaatgatgacataaaacacttaaagggttatcatggagtaaatcctcaataaatatgcttgttgtttctgtgcttttataacaaacttacaactgcatgaaggaaaaatctctagcaaatttctgcaacacctatcagccatctttattatacaaatacgctgtgttcacattgcagatgaagtaataagcagaagttttacagaactggactcaacctctctctggtacctccactaactgtcatggactagtttagttcttagcacctaattacacagaaggatcaaactcagagacattgcatgaaataaatgtactgagtccaaakatattcattcaaataactggcttcaatcattgttctaagaaataaatgttatccaaggctggccatggtggcttatgcctgtaatcc

SEQ ID NO: 385082 - DNA, 570 bp, Homo sapiens
gcttacttgataactctaatttcataatagttttgttatcatgtttttttgcaggcatgactttaactctgagctaacttccagggagaggaatcagtytgtgaaaatattggctttcatgtctgggagcaaagttaagttaaattgctgtaacgtaaagaatatgtatgttgtcataggtaggatcagattaaagttcctttaatgtgatgcagagaaattggaatttaggttgatgttagtgaaaccagggaaagataataacaatagatttttaatatactgcttttttatgattttcacacaattagaataagattttcatctgcaaattctctaatatgttctctctctatatatatatatacacagatatacacacacacagtcctcctaagcataagatatgtatttaagaagggcctttaggaaatcctatttatgttatctttttctgtgacatacattagttgaatatatataaagtaaaaacttggatttaaacaggaaggaagtggttggaatacaagcatgtaagggaggtgctttgaaactatgaaagacagtctt

SEQ ID NO: 385083 - DNA, 576 bp, Homo sapiens
tgacagttactataatatattaaatgctcacgattaacctgagttttatttctatttaagaacctgtcaaaattaagtatacttttcattttttctgtgctagacctttctttgatcttttttttggtcctattgatacagaagtttcatttccacaatggagttggactagtctagagtttactctgtcccattgttctcagcamaaagcagcaatattcagaaaatacttaaagagttcatactctctgtttgaaggtggcactctaaggggtcttaaacatgaactatcctagcttacttgaagaagagagaggtaatcccagagatttttgcccattgttaaactctgtgaggaatccaattttgatgctttttattatctttatttcaatccaaacaatgagtcagtggcgaccctccattttaactcataaacatttgggattctcttagccaggtttctttgacattgggaagaactagcataattgccattcagataggcttttagcaatatattttgaagatatttattttttgttcctctctcaatatggtttatcttctaaaaag

SEQ ID NO: 385084 - DNA, 576 bp, Homo sapiens
tgacagttactataatatattaaatgctcacgattaacctgagttttatttctatttaagaacctgtcaaaattaagtatacttttcattttttctgtgctagacctttctttgatcttttttttggtcctattgatacagaagtttcatttccacaatggagttggactagtctagagtttactctgtcccattgttctcagcacaaagcagcaatattcagaaaatacttaaagagttcatactctctgtttgaaggtggcactctaaggggtcttaaacatgaactatcctagcttacttgaagaagagagaggtaatcccagagatttttgcccattgttaaackctgtgaggaatccaattttgatgctttttattatctttatttcaatccaaacaatgagtcagtggcgaccctccattttaactcataaacatttgggattctcttagccaggtttctttgacattgggaagaactagcataattgccattcagataggcttttagcaatatattttgaagatatttattttttgttcctctctcaatatggtttatcttctaaaaag

SEQ ID NO: 385085 - DNA, 621 bp, Homo sapiens
ttcatttaactatgttccatgggacgttgttaaaacatctgatgcttaaagagcattcagccagattattgtaatatgtgctagtgcttgacagttactataatatattaaatgctcacgattaacctgagttttatttctatttaagaacctgtcaaaattaagtatacttttcattttttctgtgctagacctttctttgatcttttttttggtcctattgatacagaagtttcatttccacaatggagttggactagtctagagtttactctgtcccattgttctcagcacaaagcagcaatattcagaaaatacttaaagagttcatactctctgtttgaaggtggcactctaaggggtcttaaacatgaactatcctagcttacttgaagaagagagaggtaatcccagagatttttgcccattgttaaactctgtgaggaatccaattttgatgctttttattatctttatttcaatccaaacaatgagtcagtggcraccctccattttaactcataaacatttgggattctcttagccaggtttctttgacattgggaagaactagcataattgccattcagataggcttttagcaatatattttgaagatat

SEQ ID NO: 385086 - DNA, 621 bp, Homo sapiens
ggcaacattcaaacagctgggagtcaagagaacaaaaaagcagaggaagggtgaattcttgctctctcttctggaacaggaccatccttctcctgctcttggatgtcaaaattccaggttcaccagcttttagactctggggctcacaccagtggcccccaggattctagggatttcagctttagactgagcctaacactgtcaacttgcttggttctgaggcctttgaacctgagctgagccacactactggctttcctggttctccagcctgcaggcagtctacaggtgggattttttyggacttcataataaagtgagccaattctcctaataaatcttttttgtttttttttcatatatctctatatatagcctatcagttctgtctctctggagaactctgactcaaacagtttttaaacatttgtgaaaaaaaaaattatgttcatcacatttgtagatagtaccaaatttgacatgcttattgatatcctgaaacgcaggcaaaaatgtcaagacaatcttgcaaattagaaaattagtcactggtaggatttgaaaattttgtttcttccaaaattcttgttgaaactttatctctagttcaatagtactagg

SEQ ID NO: 385087 - DNA, 621 bp, Homo sapiens
ggcaacattcaaacagctgggagtcaagagaacaaaaaagcagaggaagggtgaattcttgctctctcttctggaacaggaccatccttctcctgctcttggatgtcaaaattccaggttcaccagcttttagactctggggctcacaccagtggcccccaggattctagggatttcagctttagactgagcctaacactgtcaacttgcttggttctgaggcctttgaacctgagctgagccacactactggctttcctggttctccagcctgcaggcagtctacaggtgggattttttcggacttcataataaagtgagccaattctcctaataaatcttttttgtttttttttcatatatctctatatrtagcctatcagttctgtctctctggagaactctgactcaaacagtttttaaacatttgtgaaaaaaaaaattatgttcatcacatttgtagatagtaccaaatttgacatgcttattgatatcctgaaacgcaggcaaaaatgtcaagacaatcttgcaaattagaaaattagtcactggtaggatttgaaaattttgtttcttccaaaattcttgttgaaactttatctctagttcaatagtactagg

SEQ ID NO: 385088 - DNA, 539 bp, Homo sapiens
tctctcttctggaacaggaccatccttctcctgctcttggatgtcaaaattccaggttcaccagcttttagactctggggctcacaccagtggcccccaggattctagggatttcagctttagactgagcctaacactgtcaacttgcttggttctgaggcctttgaacctgagctgagccacactactggctttcctggttctccagcctgcaggcagtctacaggtgggattttttcggacttcataataaagtgagccaattctcctaataaatcttttttgtttttttttcatatatctctatatatagcctatcrgttctgtctctctggagaactctgactcaaacagtttttaaacatttgtgaaaaaaaaaattatgttcatcacatttgtagatagtaccaaatttgacatgcttattgatatcctgaaacgcaggcaaaaatgtcaagacaatcttgcaaattagaaaattagtcactggtaggatttgaaaattttgtttcttccaaaattcttgttgaaactttatc

SEQ ID NO: 385089 - DNA, 539 bp, Homo sapiens
tctctcttctggaacaggaccatccttctcctgctcttggatgtcaaaattccaggttcaccagcttttagactctggggctcacaccagtggcccccaggattctagggatttcagctttagactgagcctaacactgtcaacttgcttggttctgaggcctttgaacctgagctgagccacactactggctttcctggttctccagcctgcaggcagtctacaggtgggattttttcggacttcataataaagtgagccaattctcctaataaatcttttttgtttttttttcatatatctctatatatagcctatcagttctgtctctctggagaactctgactcaaacagtttttaaacatttgtgaaaaaaaaaattatgttcatcacatttgtagatagtaccaaatttgacatgcttattgatatcctgaaacrcaggcaaaaatgtcaagacaatcttgcaaattagaaaattagtcactggtaggatttgaaaattttgtttcttccaaaattcttgttgaaactttatc

SEQ ID NO: 385090 - DNA, 399 bp, Homo sapiens
  misc_feature (1)...(399): n = A,T,C or G
agattcaactctaggtgcactaaagaacacataggtagcttgaaaaatacagagttctttgccccatccncaaagactcttttaaatcgtttggtataggggttctcttttaaataatttgatgtaggattctggaacaggtataataaaagctctcctatgcgcttctcaagcatagccacagctcaaaatactaatttaagggagtattacaacagtcctggttgaaaaactgatgatgccctgaactaagataactgtagttaagctggagagatcaagaccaattaagacatagtttgcrgattaattggttattgaggatagcataggaatggagtccaggatgccagcttgggcacatctaaaactggtaagagtattccctgaatcacagaa

SEQ ID NO: 385091 - DNA, 541 bp, Homo sapiens
ctatcggagggtggcgggataggagagggatagcattaggagaaatacctaatgcagatcatgggttgatgggtgcagcaaaccaccatggcacatgtatacctatgtaacaaaccagcacgttctgcacatgcaccccagaacttaaagtataataataataatrataataataaagaattatgctaaggaaagcactagatgtagaaaaaagcacttaaagaagtcttaattttgttttggaagatgcataaaatttgccaaatgaagacagataggaaaggcagcctagaaagatgcaagaaagtagatgttttttatatgaaacaatttgaattatgtgtggctggaaagcaatgtaagtgggacaacgctcaaaaatgatgagtggagatgtgagggaacgttaggcgatgaggattttatgtgaggtatctacgttagtttttgacactgaataatggaaaaaggtttaaaaacacagagtaacagagtaggtaccagaaaaaattaaaaatataaaaaataaatattttcttgt

SEQ ID NO: 385092 - DNA, 541 bp, Homo sapiens
ctatcggagggtggcgggataggagagggatagcattaggagaaatacctaatgcagatcatgggttgatgggtgcagcaaaccaccatggcacatgtatacctatgtaacaaaccagcacgttctgcacatgcaccccagaacttaaagtataataataataatgataataataaagaattatgctaaggaaagcactagatgyagaaaaaagcacttaaagaagtcttaattttgttttggaagatgcataaaatttgccaaatgaagacagataggaaaggcagcctagaaagatgcaagaaagtagatgttttttatatgaaacaatttgaattatgtgtggctggaaagcaatgtaagtgggacaacgctcaaaaatgatgagtggagatgtgagggaacgttaggcgatgaggattttatgtgaggtatctacgttagtttttgacactgaataatggaaaaaggtttaaaaacacagagtaacagagtaggtaccagaaaaaattaaaaatataaaaaataaatattttcttgt

SEQ ID NO: 385093 - DNA, 541 bp, Homo sapiens
ctatcggagggtggcgggataggagagggatagcattaggagaaatacctaatgcagatcatgggttgatgggtgcagcaaaccaccatggcacatgtatacctatgtaacaaaccagcacgttctgcacatgcaccccagaacttaaagtataataataataatgataataataaagaattatgctaaggaaagcactagatgtagaaaaaagcacttaaagaagtcttaattttgttttggaagatgcataaaatttgccaaatgaagacagataggaaaggcagcctagaaagatgcaagaaagtagatgttttttatatgaaacaatttgaattatgtgtggctggaaagcaatgtaagtgggacaacgctcaaaaatgatgagtggagatgtgagggaacgttaggcgatgaggattttatgtgaggtatctacgttagtttttgacactgaataatggaaaaaggtttaaaaacacagagtaacagagtaggtaccagaaaaaattaaaaatataraaaataaatattttcttgt

SEQ ID NO: 385094 - DNA, 514 bp, Homo sapiens
cgaggagtatcttcaggagtgatgtcaccggcgaggcgagccctgccggggattgttcggcgccgccgctccggagcccggagggcgcgccgtcactcgcgctggaggcggcgcggggagagggagggggcgcctcgcgatcgccccgtgcgcttcggtcaccgggctgcgctctggycagtcgggtgagcactggccaggggcggatcatttattcccgctgctccccaggatggcgcggggcggggcacggagagtagaaacctaatctgccgataattgaacttgcgtactcggcaggagatgagacccaattcactgggagagacttccagacgcgtagggtcctaggcaggtgtctctcgccgcttaaaccgtgtttggaagaacgtcgctctggagagagtgtttagaagattgttctaattagaactgcataatgatttgcctgaaacagatggaaggaagcgggagtaagcagcgtccagaaatgcaacctcagcccgtcatggca

SEQ ID NO: 385095 - DNA, 600 bp, Homo sapiens
ctagcttagtggttgggctgagaagaagcttcaaagcacttcccaaagctaaacttgcaccaaaaataaaggtcatggtcactgtttggtggtctgctgctggtctaatccactacagctatctgaatcctagcaaaaccattacacctgagaattrtgctcagcaaatcaatgagatgcactgaaaactgcaatgccttcacctagcattggtcagcagaagggctcaattcttctccacaacaacgcctgactgcacattgcacaactgcttcaaaagttgaacgaattgggctatgaagtttttcctcatctgccatattcacctgacctcttgccaatcgactaccacttcttcaagcaccttgacaactttttctgggaaaatgcctccacaacccgcaggatgcagaaaatgctttccaagagttcatcaaatcccaaagcacagatttttacactaccggaataaacaaccttatttcccattggctgaaatgtgttgattgtaatggttcctgttttgattaataaagatgtgtttgagcctagttttaatgatttaaaatgcatggtccaaaactgcaattacttttgcac

SEQ ID NO: 385096 - DNA, 600 bp, Homo sapiens
ctagcttagtggttgggctgagaagaagcttcaaagcacttcccaaagctaaacttgcaccaaaaataaaggtcatggtcactgtttggtggtctgctgctggtctaatccactacagctatctgaatcctagcaaaaccattacacctgagaattatgctcagcaaatcaatgagatgcactgaaaactgcaatgccttcacctagcattggtcagcagaagggctcaattcttctccacaacaacgcctgactgcacattgcacaactgcttcaaaagttgaacgaattgggctatgaagtttttcctcatctgccatattcacctgacctcttgccaatcgactaccacttcttcaagcaccttgacaactttttctgggaaaatgcctccacaacccgcaggatgcagaaaatgctttccaagagttcatcaaatcccaaagcacagatttttacactaccggaataaacaaccttatttcccattggctraaatgtgttgattgtaatggttcctgttttgattaataaagatgtgtttgagcctagttttaatgatttaaaatgcatggtccaaaactgcaattacttttgcac

SEQ ID NO: 385097 - DNA, 649 bp, Homo sapiens
agtacagcattccaaaatatacatctagagactaaaagtaaatgctctatagtgaagaagtaataattaaaaaatgctactaatatagaaaatttataatcagaaaaataaatattcaggsagctcaccagaagaataaagtgctctgccagttattaaaggattactgctggtgaattaaatatggcattccccaagggaaacagagagattcttctggattatgttcaatatttatttcacaggattaactgttttaggaacagatataaagcttcgccacggaagagatggacaaagcacaaagacaacatgataccttaggaagcaacactaccctttcaggcataaaatttggagaaatgcaacattatgcttcatgaataatatgtagaaagaaggtctgatgaaaatgacatccttaatgtaagataactttataagaaatctgggtcaaataaaattctttgaagaaaacatccaaatgtcattgacttatcaaatactatcttggcatataacctatgaaggcaaaactaaacaaacaaacaaaaagctcacaccaaacaaaaccatcaacttattttgtattctataacatacaagactgtaaagatgtgacagtgtacattatatgacaatgcacatt

SEQ ID NO: 385098 - DNA, 649 bp, Homo sapiens
agtacagcattccaaaatatacatctagagactaaaagtaaatgctctatagtgaagaagtaataattaaaaaatgctactaatatagaaaatttataatcagaaaaataaatattcagggagctcaccagaagaataaagtgctctgccagttattaaaggattactgctggtgaattaaatatggcattccccaagggaaayagagagattcttctggattatgttcaatatttatttcacaggattaactgttttaggaacagatataaagcttcgccacggaagagatggacaaagcacaaagacaacatgataccttaggaagcaacactaccctttcaggcataaaatttggagaaatgcaacattatgcttcatgaataatatgtagaaagaaggtctgatgaaaatgacatccttaatgtaagataactttataagaaatctgggtcaaataaaattctttgaagaaaacatccaaatgtcattgacttatcaaatactatcttggcatataacctatgaaggcaaaactaaacaaacaaacaaaaagctcacaccaaacaaaaccatcaacttattttgtattctataacatacaagactgtaaagatgtgacagtgtacattatatgacaatgcacatt

SEQ ID NO: 385099 - DNA, 510 bp, Homo sapiens
aaatatagaggactcaagtaccctgcttttccatatgttctaagatcaaaygcacacattatcttagattcaagatcttcacgtatttttgtatagtgtctgttcaatgtctacttaaaaaattatcagctgggtgcagcggctcatgcctgtaatcccagcactttgggaggccgaggcgggcagatggcctgaggtcaggagttcgagaccagcctggccaaaagtggtgaaactttgtctctacttaaaatacaaaaatgaactgggtgtggtggtgcacacctgtaatcccagttacttgggaggctgaggcaggagaatcgcttgaaacttgggaggcaaagattgcaatgagccgagatcacaccactgcactccagtctgggcaacagagtgagactccatctcaaaaaacaaaaaccaaaaaacattctcagtgctatagaagcagtttagtgcactggttaagactgagatgctgcagccagacaattcatgtttaaatcc

SEQ ID NO: 385100 - DNA, 616 bp, Homo sapiens
ctgttttctggcccaatctctgctacaatataagggccttttcacaaaacacagaaccatcttaaatctcattttgcatatcaaaaaagggtttcaattagatttttttaaggtcacttctgccattgactacaaggatttctgtatgaattaatagcttttttcctttaaatcattcctatagttattaagtaaaactcagaaccataataacagaaaaatgattagggttaatttgcatttcttttataatgtaataaaattatatatcaaaggtaatggccagtatttgtaagcagtaaaarctcctgtttatctttcttttcctttttttaaataaaaataacatgaagcaggttctcacctattcaaaactactttcattttggggtccttcaaattttgttttctttttctgaggcttatggagatttcatggagataactgaaatattaacacacttctcttaaaatatgagagaaattaaatagatactctgctggtagaattgtaaattagaatgatgactggaaagcaactggtgatacatataaaagctttcatataaatattaaaggacctattcataaagatgttcactgtactgttatgata

SEQ ID NO: 385101 - DNA, 601 bp, Homo sapiens
atccagtacttgttatcagttaagcattaaagcttcatttactaaggaagttaataggaatggggattagttcatgtcaagatcatgtaacagtaattaacatagcacatttgcctggtgctcaaatgcttaagcagcttgaatcgattgtggtcagttcagaggcctagtcaaagcataattctagttcttggcctcagtgtcactattacttaaccaaagcaagaagactttagatcaagtgacattctcttggacacctrttttaaaaacgagctgtagtttcaggcttgataccttcaatgcagactattataccctagcaagcttggagaagtttaaatttataatttatattgtgagttttctgtcatataatttatattgtttgtaccaatttatattgttttgttttatatttacttttcaatatttcgaatttgccaaaaaccattttttatgtaaaggcaaactaaagcacattttatgttttattttattttatttattttttttttttcagcagagttgattgttttagaaaacctcaggaatctgaatgttagaactgaactggttatctctttatagagcacattca

SEQ ID NO: 385102 - DNA, 601 bp, Homo sapiens
atccagtacttgttatcagttaagcattaaagcttcatttactaaggaagttaataggaatggggattagttcatgtcaagatcatgtaacagtaattaacatagcacatttgcctggtgctcaaatgcttaagcagcttgaatcgattgtggtcagttcagaggcctagtcaaagcataattctagttcttggcctcagtgtcactattacttaaccaaagcaagaagactttagatcaagtgacattctcttggacacctgttttaaaaacgagctgtagtttcaggcttgataccttcaatgcagactattataccctagcaagcttggagaagtttaaatttataatttatattgtgagttttctgtcatataatttatattgtttgtaccaatttatattgttttgttttatatttacttttcaatatttcgaatttgccaaaaaccattttttatgtaaaggcaaactaaagcacattttatgttttattttattttatttatttwttttttttcagcagagttgattgttttagaaaacctcaggaatctgaatgttagaactgaactggttatctctttatagagcacattca

SEQ ID NO: 385103 - DNA, 592 bp, Homo sapiens
atgaagtgacctctaaaggacagcctggggctgagagaggacccaaagaagacaagcttagaaggagatgccctcctcatggctgggggtaggacctttttggagaaagtggtttcagcccactaaataatagttctctgtgttgttgaggttccgcggacaaggcaacaattctctggaatgcagacaagattgatgggtgagtgcacaraaagagttgggtgccgctgtgggcacaggcctggaatacacagtacccatgtcatgaagcaaggtgatgtgaagttcctaaggtgatgtgaaggccccagcccgggatgtgaagttcctgagggtctgtgcactctggaagcacagctggggcagaactccaccagttgtctccacacacatgcgctctgatggaccacacagaaaaaaacaaatgcaacacctagatccaggaagagaggccccttctggaatagtccttctgctaccttgggacaaagcatcatgatcactgtaaagtagaaatgattaatatcacaaagttggtactgaagagtaaatggtgcaatttggatgtgcaagtcagtaaattgataattgg

SEQ ID NO: 385104 - DNA, 592 bp, Homo sapiens
atgaagtgacctctaaaggacagcctggggctgagagaggacccaaagaagacaagcttagaaggagatgccctcctcatggctgggggtaggacctttttggagaaagtggtttcagcccactaaataatagttctctgtgttgttgaggttccgcggacaaggcaacaattctctggaatgcagacaagattgatgggtgagtgcacagaaagagttgggtgccgctgtgggcacaggcctggaatacacagtacccatgtcatgaagcaaggtgatgtgaagttccyaaggtgatgtgaaggccccagcccgggatgtgaagttcctgagggtctgtgcactctggaagcacagctggggcagaactccaccagttgtctccacacacatgcgctctgatggaccacacagaaaaaaacaaatgcaacacctagatccaggaagagaggccccttctggaatagtccttctgctaccttgggacaaagcatcatgatcactgtaaagtagaaatgattaatatcacaaagttggtactgaagagtaaatggtgcaatttggatgtgcaagtcagtaaattgataattgg

SEQ ID NO: 385105 - DNA, 592 bp, Homo sapiens
atgaagtgacctctaaaggacagcctggggctgagagaggacccaaagaagacaagcttagaaggagatgccctcctcatggctgggggtaggacctttttggagaaagtggtttcagcccactaaataatagttctctgtgttgttgaggttccgcggacaaggcaacaattctctggaatgcagacaagattgatgggtgagtgcacagaaagagttgggtgccgctgtgggcacaggcctggaatacacagtacccatgtcatgaagcaaggtgatgtgaagttcctaaggtgatgtgaaggccccagcccgggatgtgaagttcctgagggtctgtgcactctggaagcacagctggggcagaactccaccagttgtctccacacacatgygctctgatggaccacacagaaaaaaacaaatgcaacacctagatccaggaagagaggccccttctggaatagtccttctgctaccttgggacaaagcatcatgatcactgtaaagtagaaatgattaatatcacaaagttggtactgaagagtaaatggtgcaatttggatgtgcaagtcagtaaattgataattgg

SEQ ID NO: 385106 - DNA, 574 bp, Homo sapiens
ggttatcaatgagggagaggaatttatacgagactttctccttctaccttatattttcagttgacaacattttttgagcaccaactattttatgccaggcagtcttccgggtcctgagcatacgaaataaacctatttcttgctctttggagacttaaggtttggaaaggaacacagataagtaaggaaattacaatgtagcatgatacactttagataaagggtgaaatacacaatttggaagcacctaaaactggacctaacctaaatttgtgtggtacagagaggggcccctgggctgagctctgaagaataaacaggagttaggcaggcagaggagggtgtgtgtgtcaatggaggataaagataaaggaaatgtcatgtacacaaaccctgacatgagagagaattcagcagggttgaagcctagagcagacatgacccagatgaggytgataattaaagcacatggttaatttgtcccaaggttttccaagcagaaattacaaggtttgtagtttaatgaacttttcactatttgtttttactatcctttcattcaaactgaccccca

SEQ ID NO: 385107 - DNA, 575 bp, Homo sapiens
tactgaccagcatgccatttgagtaaatattatttttattccacatactgttccatgtagaagatgtcaagtttacttrggaacattaatgttaaatattattttttaagtggaacgaatatttcttcattattggcccacattttctaaggtagaacatatttaatacttaattttttatcttattttctgtattaaattcaatcactgtgccatcttttcaaaactgcgcttgtagtgaggatggttaaaaaaaaaaggagaagggtaacctgagttcccagagggtagtagttttatattattcgtcgttgtatttccagtaccgaggatacaagaggtgatcctgaatggccatgctttgaataaccaccagaagctacaggagcccagtgcaaccacccaagcttactctgagaagcacaaggcaagggggtatgagctaagtaagccctgcttacaggactctggttcaaagggcagaataatccaggccagtgggcatcctgagtgctttctcatcaaggtcccagtgggatttgtaaccatccacttagaaagataacgcctccaaa

SEQ ID NO: 385108 - DNA, 561 bp, Homo sapiens
atttgaagaaatagtggctaaaaacttccaaaatttgatgaaatacaaaaatacgaaattaaagaagctcaataatttccaagtaagaagaattcatagagacccatatgaagacacattataagcaaactctctaaaatcaaagacaatgagagatctttaaaggagcaagagaggagcaactaacatcacatacaagtgatrtacaataggattatcagcagatttctcatcagaaacttcggagcatagaaggcagtggccaatatattcagagcgaaaaaaaaaaaaggctgtcacccaagaatcctatgtccagccaaactgtacctcaaagatgagaaagaagttaagactttctcagagaaacaaaagctgagggaggttgctatcattagccctgccttgccagacctgatggcttcactggtgaatcccaccaaacatttaaagaactaacaccaatctttctcaaacttttccaaaaaattaaaaaggagggaatacttccaaactcattttacaaggccagcattaccctgataccaagccagaaaaaga

SEQ ID NO: 385109 - DNA, 552 bp, Homo sapiens
gggagcccactaccctgaagggtgagtcccaggtctggcagcattcaccatagctgactgaagagccctgagccttaggtaaacatcagtagtagtttggcagtactccccatgggccatggggtggtggccatgggaagaagctattctgcctgggaaaggaaagagtgggatcttccctttccttccctggtatctcgtgatttgagtgccagcatagctgcaaagaatagagcaccaggcaaatttacaaggttttttactgcagtccctggtccttagacagcatctctggacctgttcaggccctgggaaaacttatcgccctgaagggaaggacacaagactggctggcttcattgcatgctgatcatagacccctaaggccttgagcaaacacaggtggtagctaggcagtaaataagggaagagaacaagagtctctgcctaataatacaaataattcttctggttattatttaagactgacaaggtggtgctyctataagtatgcaaaacaccagtgttactaggcttggggtgcctactagt

SEQ ID NO: 385110 - DNA, 560 bp, Homo sapiens
cttgatgatatgctaaaaaaaaaaaaaaaaaggcgggggtggattattcatccctcccctttttagaccatatagggtaacttcctgacattgccatggcatttgtaaactgtcctggtgctggtgagagtgtagcagtgagaacaaccaaggtcactctcgtcgccattttgattttggtgggttttggccggctcctttactgcaacctgttttatcatcaaagtctttatgacctgtatcttgtgccacctcctatctcatcctgtgacttagaatgccttaactgtccgggaatgcagcccagtaggtttcagcctcattttacccagctcctagtcaagatggagttgttctgattcacatgcctctgacagcatgacatattaaggtgctgaaagaaaaaaaaaaacttttaacctagaatagtatatctggtgaaaatatccgctaagcattaagtcccccaggcaaacaaaagctggggratttcatcatcaccagacatatcctacaagaaaggctaaagggagtttttaatctgaaagaaaacaatgtta

SEQ ID NO: 385111 - DNA, 598 bp, Homo sapiens
tggataaaaacagttgaggtagcataaacataaatccaacaaatattgtaaatagaagtatttataaaaagtgtcatgggggcatgaaggaaaacaactaactctgcctgggctattagagggttccacagagttaatattgaacttagatctttaataatgagatactaattaagcagagagcagagggaaaggttttcttcatattaaaaacagtacgtacaaaactatggtaccgtraaagaacacgaaaaattcaaagaacagttgcaaatttagtgtgccttaatcacagactattcagagaagagaggcacaacattagttgaagggtaaatgtgggtgacggttataagtattgctaaatattatgctaaggagtttagcttttgtctactgacaccctagaaacaaaggaggtttttaaacaagaaaatggtaagatcagattgtccttcaaaaatacatcaggtaacagaataagatggagcagagagagatggattgcagtggacaatttataagaagctgtttcaatagtccatttgaaaataagaaagtaatgtcatgaactaagagaaatattaggaaagataaa

SEQ ID NO: 385112 - DNA, 607 bp, Homo sapiens
ctgccaccaccaatgctcttaaactcacctactgtatcacaatatcagctgaaggattgagaaaatggtagggaagagctgaaaaaawactcactttgcttattctgaggaaagaagaatgaaaagaaaagagaaagctggtggcatgaggagatgtcactgttcctgccctgtacaggacccttatatctgcacactgagaagctacacgcttccttcttctggaggcaggtgtcggagtcacccctgggatcattgagcctggggtcaatgagcaaaaggagatacaaaaacacttcccctagtgccaacagggaacactaactctagggataattagtagctccagacagaaagtgcataaagtattagaagacacagcatagagcaatgacagaaatctcaacaataaaataacataataacagctaacatttgttgatcgattactatatccctgtcactatgttaagtttttaacataaattatcttatttaattatcagaacaacccaatgagaaaaggcaccattattatgtatccattttgcagatgagaaaatggaggcttagaaagactaagtagttgataagcagaaaagacaaa

SEQ ID NO: 385113 - DNA, 548 bp, Homo sapiens
aaataacaattgtgcttgcctcatagagttgttacaggattaaaaaagttaatatatgtgcaatgcttagagcaatgccttgcacatgctatgttctatacaaaagagataaattaatgtgaatcaatcttcctagcaattgggagagatggaattttaaccaaggtgtgttggactccaaagactgtgctctttcttcagcattgcatataatattctgctatttaaagttagctcacttcctggacacatactcgcccaaaccaagcagcttctggaagccygctctcagctcctaggtcctaagggcatatactatggggttaagggctgaggggatgacaatatgcagcacattgaggagaacagggatgcggggagcccttcttcctgccaggtggtgacagatactacaataatagctgtgtagaaaaagagaatgaggataaggtgggagctgcaggtattcagggccttagatgttgctttagcagagttcagcttcagcactgagtgaataatcaaagaataggaagcaaagaccagac

SEQ ID NO: 385114 - DNA, 612 bp, Homo sapiens
ctgggaattcagtgtaagtctttacataaaaaggctagtgaacactaaattgaagtttaaaataattgtaacaattgcatcttatatatcaggtgagatttcatagtttggttcaagtagttttcaagtgacaaattttcaagtttttaagttttcgagagttgtgcaacttcatcagccagaaatcaagcaaaaggctagataagtagcagcaggtgcaggattcttgatattgaaacttttaggacttttctccttagggattccaatgttgtacattttatttccagtataacccctatgcataggataaagtagtttcayatgtttgatttttctaattagttatttgggtctcaaaatgtccagtttatcaaaaaatcttgtgctgtgtactgcggaccatctactatagcctgatcattgaatttttcaagaacctaaggggttccctaagtccaaggaagacaatcagtgtctacaagtcagaaggagaaggggaaagggtattctaatttttactttgttttcattgattctgttgctgctttcttgccattgaaagtactcttgcagtctggtaatgattaacctttgccaccaggatgccct

SEQ ID NO: 385115 - DNA, 612 bp, Homo sapiens
ctgggaattcagtgtaagtctttacataaaaaggctagtgaacactaaattgaagtttaaaataattgtaacaattgcatcttatatatcaggtgagatttcatagtttggttcaagtagttttcaagtgacaaattttcaagtttttaagttttcgagagttgtgcaacttcatcagccagaaatcaagcaaaaggctagataagtagcagcaggtgcaggattcttgatattgaaacttttaggacttttctccttagggattccaatgttgtacattttatttccagtataacccctatgcataggataaagtagtttcacatgtttgatttttctaawtagttatttgggtctcaaaatgtccagtttatcaaaaaatcttgtgctgtgtactgcggaccatctactatagcctgatcattgaatttttcaagaacctaaggggttccctaagtccaaggaagacaatcagtgtctacaagtcagaaggagaaggggaaagggtattctaatttttactttgttttcattgattctgttgctgctttcttgccattgaaagtactcttgcagtctggtaatgattaacctttgccaccaggatgccct

SEQ ID NO: 385116 - DNA, 612 bp, Homo sapiens
ctgggaattcagtgtaagtctttacataaaaaggctagtgaacactaaattgaagtttaaaataattgtaacaattgcatcttatatatcaggtgagatttcatagtttggttcaagtagttttcaagtgacaaattttcaagtttttaagttttcgagagttgtgcaacttcatcagccagaaatcaagcaaaaggctagataagtagcagcaggtgcaggattcttgatattgaaacttttaggacttttctccttagggattccaatgttgtacattttatttccagtataacccctatgcataggataaagtagtttcacatgtttgatttttctaattagttatttgggtctcaaaatgtccagtttatcaaaaaatcttgtgctgtgtactgcggaccatctactatagcctgatcattgaatttttcaagaacctaaggggttccctaagtccaaggaagacaatcagtgtctacaagtcagaakgagaaggggaaagggtattctaatttttactttgttttcattgattctgttgctgctttcttgccattgaaagtactcttgcagtctggtaatgattaacctttgccaccaggatgccct

SEQ ID NO: 385117 - DNA, 612 bp, Homo sapiens
ctgggaattcagtgtaagtctttacataaaaaggctagtgaacactaaattgaagtttaaaataattgtaacaattgcatcttatatatcaggtgagatttcatagtttggttcaagtagttttcaagtgacaaattttcaagtttttaagttttcgagagttgtgcaacttcatcagccagaaatcaagcaaaaggctagataagtagcagcaggtgcaggattcttgatattgaaacttttaggacttttctccttagggattccaatgttgtacattttatttccagtataacccctatgcataggataaagtagtttcacatgtttgatttttctaattagttatttgggtctcaaaatgtccagtttatcaaaaaatcttgtgctgtgtactgcggaccatctactatagcctgatcattgaatttttcaagaacctaaggggttccctaagtccaaggaagacaatcagtgtctacaagtcagaaggagaaggggaaagggtattctaatttttrctttgttttcattgattctgttgctgctttcttgccattgaaagtactcttgcagtctggtaatgattaacctttgccaccaggatgccct

SEQ ID NO: 385118 - DNA, 573 bp, Homo sapiens
acacatgaccacaaaaagacgtggaaatgtgtctcctcccctcctcatgaaaggcagctcatccccgttctttcaggcctggtgaggagccaccccatgtatgttcccttcctcagtgtccacaccatgaggtctggatctgggattcccttctcatcaccctcaatattatggtcccttgtgaatcaggtccagctgtggctgctcctcatgggctcttctcagttggcttcctctgtgtttgcagaagtcctgagtgaagttcactggtggagtcagagggaaaatggtttgcccagggtttctctgagactctcctgcaaagcctctggattcacctttactgactaaagcatgagcttggtccagcagatttcatgacagggattggtgtgsgtggcaacagtgagtgaacaagtgggagttctcagggttactctccatgagtataagtaaattaacagtcccaaacaacaccctttcaagtgcagtctaccttaaaatgaccaatctgaaagccaaggacaaggctgtatattacagtgagggacacaggagagggaacatccgtgt

SEQ ID NO: 385119 - DNA, 618 bp, Homo sapiens
atgaaacttacaatataaggtaaatattgacttactaatagttatgcgagaatatttatttgatcccaattttatatagttgagtgtgtgaagttgcaggtcaagataacttggagtttcaacaccaagttttattcatgtgttcattsatgaacaggatgcctccaatgtggagaaatttacaatgaataagcatgaataggacctggccagtgagctttcagtctagcaaggaatgtagaacaggaacatagcaactctaatccaatgtagagagagagacaattttaaatccaattgaaaaataaatagctgtgttagactgaggccatcaaataaagcttcatgcaataagtagcaataggtcttcaaagatgacagtttagcaaaaggcacaaagatgaaaagtgcagagcattaagtagtgtatggtttagtgtgctggaaataacaggttggacaagagttgtgactaggataaacagcaaaaaggatttatgagagcctgatggccactagtgactgggtaagatgtgtacactttctgtgcaggaaaagggacaaagcttttgagcagcagagaaacatgatcagagggatgcatgaggaaggtcctga

SEQ ID NO: 385120 - DNA, 618 bp, Homo sapiens
atgaaacttacaatataaggtaaatattgacttactaatagttatgcgagaatatttatttgatcccaattttatatagttgagtgtgtgaagttgcaggtcaagataacttggagtttcaacaccaagttttattcatgtgttcattcatgaacaggatgcctccaatgtggagaaatttacaatgaataagcatgaataggacctggccagtgagctttcagtctagcaaggaatgtagaacaggaacatagcaactctaatccaatgtagagagagagacaattttaaatccaattgaaaaataaatagctgtgttagactgaggccatcaaataaagcttcatgcaataagyagcaataggtcttcaaagatgacagtttagcaaaaggcacaaagatgaaaagtgcagagcattaagtagtgtatggtttagtgtgctggaaataacaggttggacaagagttgtgactaggataaacagcaaaaaggatttatgagagcctgatggccactagtgactgggtaagatgtgtacactttctgtgcaggaaaagggacaaagcttttgagcagcagagaaacatgatcagagggatgcatgaggaaggtcctga

SEQ ID NO: 385121 - DNA, 618 bp, Homo sapiens
atgaaacttacaatataaggtaaatattgacttactaatagttatgcgagaatatttatttgatcccaattttatatagttgagtgtgtgaagttgcaggtcaagataacttggagtttcaacaccaagttttattcatgtgttcattcatgaacaggatgcctccaatgtggagaaatttacaatgaataagcatgaataggacctggccagtgagctttcagtctagcaaggaatgtagaacaggaacatagcaactctaatccaatgtagagagagagacaattttaaatccaattgaaaaataaatagctgtgttagactgaggccatcaaataaagcttcatgcaataagtagcaataggtcttcaaagatgacagtttagcaaaaggcacaaaratgaaaagtgcagagcattaagtagtgtatggtttagtgtgctggaaataacaggttggacaagagttgtgactaggataaacagcaaaaaggatttatgagagcctgatggccactagtgactgggtaagatgtgtacactttctgtgcaggaaaagggacaaagcttttgagcagcagagaaacatgatcagagggatgcatgaggaaggtcctga

SEQ ID NO: 385122 - DNA, 523 bp, Homo sapiens
ttcatgcaataagtagcaataggtcttcaaagatgacagtttagcaaaaggcacaaagatgaaaagtgcagagcattaagtagtgtrtggtttagtgtgctggaaataacaggttggacaagagttgtgactaggataaacagcaaaaaggatttatgagagcctgatggccactagtgactgggtaagatgtgtacactttctgtgcaggaaaagggacaaagcttttgagcagcagagaaacatgatcagagggatgcatgaggaaggtcctgaaaaccctaatgagtaatcttggttaaaccattgcactataactcaagttttgcatgtatatactataatagaaacaacatttgtgctcttcccatatgtagagaggtcaaaagaaaatctgttcatataatcttccaagccagtcacaaagactaagacaaaacacttacataaataaaattcataagatgaattttaaaagatgaaagatagtcaatacattttattttataacttggaaatttaa

SEQ ID NO: 385123 - DNA, 523 bp, Homo sapiens
ttcatgcaataagtagcaataggtcttcaaagatgacagtttagcaaaaggcacaaagatgaaaagtgcagagcattaagtagtgtatggtttagtgtgctggaaataacaggttggacaagagttgtgactaggataaacagcaaaaaggatttatgagagcctgatggccactagtgactgggtaagatgtgtacactttctgtgcaggaaaagggacaaagcttttgagcagcagagaaacatgatcagagggatgcatgaggaaggtcctgaaaaccctaatgagtaatcttggttaaaccattkcactataactcaagttttgcatgtatatactataatagaaacaacatttgtgctcttcccatatgtagagaggtcaaaagaaaatctgttcatataatcttccaagccagtcacaaagactaagacaaaacacttacataaataaaattcataagatgaattttaaaagatgaaagatagtcaatacattttattttataacttggaaatttaa

SEQ ID NO: 385124 - DNA, 546 bp, Homo sapiens
cccaacactttaccaaagttgtttatctattctataattattttggcagggtctttagaattttgtaggtatagaattatatcatcagtttggagagatacattgacttcttcttttcctatttggattctgtattagtccattcacacactataaagaaacacctgagactgtgtaatttataaagatttttaattgtttcatggttcttcaggctgtacaggaagcatggctggggaggcctcaggatcctgacaatcagtacagaaagggaagcatcatgtcctacatggctggagcaggaggaagagagacaagggaggtgccacatactttgaaaccagatctcctgaggrctctatcatgggatcagcacaagagagagagagactcatccccatgatctaatcgcctttcaccaggccccaccctcaacactgggaattacaatttgacatttaatttgagtggggacacaaattcaaaccatatcagctgccttttattttgatattgctcggttgctctgactaggatttctagtac

SEQ ID NO: 385125 - DNA, 576 bp, Homo sapiens
gtttttcttcagaaaacacacacatggaaaacagagcctaaaagggttctcaacattactaattatcagaggaattcaaatcaaaatcatgatgagatatcacctcccaccayttaaaatggctgttatcagcaagacatataacacatattggcaagaatgtgctgaaaagggaatccttttagggtgtggtaggattggttactcaataaattgaaaaataaagctatcatatcatctggtgatcccacttcttgttatttattcaaagaagtaaaattactatgttaaacacatgctgattgtaagattatttataatagtgtagatttgtaaaagaatttaatgaccatagattgatgaatgtataaagaaaatgtgtatacataaaactgaattttattcagctttgaaaagaaggaaattctgacatttgcaacaacatggatgggcctggaggacatgatgctaagtgggataagccagatgcagaaagacaaatgctgcatgatctcatttacatgtgggatctaaaatacccaagctcttgaaagcagagagtaaaataatgggtcc

SEQ ID NO: 385126 - DNA, 576 bp, Homo sapiens
gtttttcttcagaaaacacacacatggaaaacagagcctaaaagggttctcaacattactaattatcagaggaattcaaatcaaaatcatgatgagatatcacctcccaccacttaaaatggctgttatcagcaagacatataacacatattggcaagaatgtgctgaaaagggaatccttttagggtgtggtaggattggttactcaataaattgaaaaataaagctatcatatcatctggtgatcccacttcttgttatttattcaaagaagtaaaattactatgttaaacacatgctgattgtaagattatttataatagtgtagatttgtaaaagaatttaatgaccatagattgatgaatgtataaagaaaatgtgtatacataaaactgaattttattcagctttgaaaagaaggaaattctgacatttgcaacaacatggatgggcctggaggacatgatgctaagtggrataagccagatgcagaaagacaaatgctgcatgatctcatttacatgtgggatctaaaatacccaagctcttgaaagcagagagtaaaataatgggtcc

SEQ ID NO: 385127 - DNA, 576 bp, Homo sapiens
gtttttcttcagaaaacacacacatggaaaacagagcctaaaagggttctcaacattactaattatcagaggaattcaaatcaaaatcatgatgagatatcacctcccaccacttaaaatggctgttatcagcaagacatataacacatattggcaagaatgtgctgaaaagggaatccttttagggtgtggtaggattggttactcaataaattgaaaaataaagctatcatatcatctggtgatcccacttcttgttatttattcaaagaagtaaaattactatgttaaacacatgctgattgtaagattatttataatagtgtagatttgtaaaagaatttaatgaccatagattgatgaatgtataaagaaaatgtgtatacataaaactgaattttattcagctttgaaaagaaggaaattctgacatttgcaacaacatggatgggcctggaggacatgatgctaagtgggataagccagatgyagaaagacaaatgctgcatgatctcatttacatgtgggatctaaaatacccaagctcttgaaagcagagagtaaaataatgggtcc

SEQ ID NO: 385128 - DNA, 630 bp, Homo sapiens
ttaacagaatccaaatgctttaatgattaaaaataaaaataaaaactcaatgaaccaggaatagagaactttctacacctgatacatggcacctgtgaaaagccaacagcaaacattcaacttagtggtgaaagaaaggatactttcccgctatggtcagagataagaataagatatatactttgacctcttctagtcaacactgtactaaagattttatgcaggrcaaatcagcaagtaaagaagtaagagtcacccatattggacaggaggaaataaaactttatttgcaaataacattcttgtatatagaaaattttaaggaatccactgaatgatagaactagtaaattaattcagcaatattacagcatacaagataaatgtacaaaaatcaattgcacacatctacaatgaaaaccccaaaatgaaattaagaaaacacttcaatttacaatagcatcacaaaaaaaataataattaatttggaaaatgtgatacaagagtttactctgaaaattaaaaattattgtttaagggagatctaaataattagcaaatatcttacagccatgaattggaagatttaatattgtagtactttacaatttgaactacagatttgatgaa

SEQ ID NO: 385129 - DNA, 630 bp, Homo sapiens
ttaacagaatccaaatgctttaatgattaaaaataaaaataaaaactcaatgaaccaggaatagagaactttctacacctgatacatggcacctgtgaaaagccaacagcaaacattcaacttagtggtgaaagaaaggatactttcccgctatggtcagagataagaataagatatatactttgacctcttctagtcaacactgtactaaagattttatgcagggcaaatcagcaagtaaagaagtaagagtcacccatattggacaggaggaaataaaactttatttgcaaataacattcttgtatatagaaaattttaaggaatccactgaatgatagaactagtaaattawttcagcaatattacagcatacaagataaatgtacaaaaatcaattgcacacatctacaatgaaaaccccaaaatgaaattaagaaaacacttcaatttacaatagcatcacaaaaaaaataataattaatttggaaaatgtgatacaagagtttactctgaaaattaaaaattattgtttaagggagatctaaataattagcaaatatcttacagccatgaattggaagatttaatattgtagtactttacaatttgaactacagatttgatgaa

SEQ ID NO: 385130 - DNA, 630 bp, Homo sapiens
ttaacagaatccaaatgctttaatgattaaaaataaaaataaaaactcaatgaaccaggaatagagaactttctacacctgatacatggcacctgtgaaaagccaacagcaaacattcaacttagtggtgaaagaaaggatactttcccgctatggtcagagataagaataagatatatactttgacctcttctagtcaacactgtactaaagattttatgcagggcaaatcagcaagtaaagaagtaagagtcacccatattggacaggaggaaataaaactttatttgcaaataacattcttgtatatagaaaattttaaggaatccactgaatgatagaactagtaaattaattcagcaatattacagcatacaagataaatgtacaaaaatcaattgcacacatctacaatgaaaaccccaaaatgaaattaagaaaacacttcaatttacaatagcatcacaaaaaaaataataattaatttggaaaatgtgatacaagagtttactctgaaaattaaaaattattgtttaarggagatctaaataattagcaaatatcttacagccatgaattggaagatttaatattgtagtactttacaatttgaactacagatttgatgaa

SEQ ID NO: 385131 - DNA, 630 bp, Homo sapiens
ttaacagaatccaaatgctttaatgattaaaaataaaaataaaaactcaatgaaccaggaatagagaactttctacacctgatacatggcacctgtgaaaagccaacagcaaacattcaacttagtggtgaaagaaaggatactttcccgctatggtcagagataagaataagatatatactttgacctcttctagtcaacactgtactaaagattttatgcagggcaaatcagcaagtaaagaagtaagagtcacccatattggacaggaggaaataaaactttatttgcaaataacattcttgtatatagaaaattttaaggaatccactgaatgatagaactagtaaattaattcagcaatattacagcatacaagataaatgtacaaaaatcaattgcacacatctacaatgaaaaccccaaaatgaaattaagaaaacacttcaatttacaatagcatcacaaaaaaaataataattaatttggaaaatgtgatacaagagtttactctgaaaattaaaaattattgtttaaggragatctaaataattagcaaatatcttacagccatgaattggaagatttaatattgtagtactttacaatttgaactacagatttgatgaa

SEQ ID NO: 385132 - DNA, 633 bp, Homo sapiens
atgaattgtgccctcattatagggcaggagttagtcatgtgaagaaatgtgtatagagtaataacattccagcacctatgaaggggtacagatagagtatagaataaagaggtaccttctagatagtagaaaacctgcattcaagcacgttaagagaacagggagcttgcactaagaattacaagaagtagttgcttccttttggagcaacagtatcaggcaaggaattgtgagaaacgggaactggagagttagacagggtctgggtgatatatcatttttatctttcttattcctgggatgattatgctgaagcaaaattaartacaataactctcaacaaaaatgtttgagaatgatgtgatcattaaagtcatctcatacttaaacaaacatgttcaatcaaaatgacttgaatctcagttatagagtcactgaaattgcggaaattagttttggcatggagttacgttaccacagaaacaccatgatctgatggaaaaaattctcaatggggcacatgaagattcatgccctattcctgttttttgtggttaagcagttttacgactttagataacttaggtaacctttgtgtctcaacttcttcataagtaagattgatgtttttac

SEQ ID NO: 385133 - DNA, 633 bp, Homo sapiens
atgaattgtgccctcattatagggcaggagttagtcatgtgaagaaatgtgtatagagtaataacattccagcacctatgaaggggtacagatagagtatagaataaagaggtaccttctagatagtagaaaacctgcattcaagcacgttaagagaacagggagcttgcactaagaattacaagaagtagttgcttccttttggagcaacagtatcaggcaaggaattgtgagaaacgggaactggagagttagacagggtctgggtgatatatcatttttatctttcttattcctgggatgattatgctgaagcaaaattaagtacaataactctcaacaaaaatgtttgagaatgatgtgatcattaaagtcatctcatacttaaacaaacatgttcaatcaaaatgacttgaatctcagttatagagtcactgaaattgcggaaattagttttggcatggagttaygttaccacagaaacaccatgatctgatggaaaaaattctcaatggggcacatgaagattcatgccctattcctgttttttgtggttaagcagttttacgactttagataacttaggtaacctttgtgtctcaacttcttcataagtaagattgatgtttttac

SEQ ID NO: 385134 - DNA, 586 bp, Homo sapiens
gtcttcactgtctaacattcagctgctaatatatttttctcccctaactgagctccgctcaacagcattaggtttaggctttaacttttacctggactcagtgtatgttctaaatcaatcattttatcacctgaggcttcagttatttygttaataacaaaggtttaacctagccttctccagatgctaggagactttagactagaaattacttataaggtgggggcatagtaattaattttgtgttaagagctcttgagacatggctctttacttcacactctcacctcttcataatggaaattttcttccactatagaatggaggccatgtaacaccaggtattctcagcaaattactatctgattcaatttaacaagaatgcaattggttataagagaaatgcataatattaatcctcattattacataaagctttctttcttatgacttactttcacatatgttatcttatttttattctcacaataccttataagctactaattaggtaatgctctatgatttgcacccttacggagtttttaggctttcaattacaggactggcccaggttctacttgat

SEQ ID NO: 385135 - DNA, 586 bp, Homo sapiens
gtcttcactgtctaacattcagctgctaatatatttttctcccctaactgagctccgctcaacagcattaggtttaggctttaacttttacctggactcagtgtatgttctaaatcaatcattttatcacctgaggcttcagttatttcgttaataacaaaggtttaacctagccttctccagatgctaggagactttagactagaaattacttataaggtgggggcatagtaattaattttgtgttaagagctcttgagacatggctctttacttcacactctcacctcttcataatggaaattttcttccactatagaatggaggccatgtaacaccaggtattctcagcaaattactatctgattcaatttaacaagaatgcaattggttataagagaaatgcataatattaatcctcattattacataaagctttctttcttatgacttactttcacatatgttatcttatytttattctcacaataccttataagctactaattaggtaatgctctatgatttgcacccttacggagtttttaggctttcaattacaggactggcccaggttctacttgat

SEQ ID NO: 385136 - DNA, 586 bp, Homo sapiens
gtcttcactgtctaacattcagctgctaatatatttttctcccctaactgagctccgctcaacagcattaggtttaggctttaacttttacctggactcagtgtatgttctaaatcaatcattttatcacctgaggcttcagttatttcgttaataacaaaggtttaacctagccttctccagatgctaggagactttagactagaaattacttataaggtgggggcatagtaattaattttgtgttaagagctcttgagacatggctctttacttcacactctcacctcttcataatggaaattttcttccactatagaatggaggccatgtaacaccaggtattctcagcaaattactatctgattcaatttaacaagaatgcaattggttataagagaaatgcataatattaatcctcattattacataaagctttctttcttatgacttactttcacatatgttatcttatttttatkctcacaataccttataagctactaattaggtaatgctctatgatttgcacccttacggagtttttaggctttcaattacaggactggcccaggttctacttgat

SEQ ID NO: 385137 - DNA, 513 bp, Homo sapiens
tcttttggttggaagactattattaatattaattggggacagggcattgccttttaactctgtgtgaaacacaatgttaaggatttcatacactttatctcatttaattctttagataactctccaatgtgcttgtcaatatttccattgtatggggaaacagaagctcagaaaatttagattacttgtcaaaaaccacacagataatgagtgatggatctagggttcaaacttatgtgtgactgattctaaagtcaatattctttatgattacctaccactgcctacttagaaattgaaaggcacacacaaatgcacatgtatacacacacayatatacacatatatgtactccagaaaatgtgtctgcatagaagtaaataaatgcttaattgagaaatgggttgcatatatgaatgcaggtgacagtgtttctgtgggtgacctggtctgtactggttttaaagggtctaaacaaagttgtatgaacctaaccctcccgtccaggtgcca

SEQ ID NO: 385138 - DNA, 502 bp, Homo sapiens
tggggacacagtcaaaccatatcagagtcaaattagctgccaatatcaagttttcttccttatttttttccctgctacctgcaatggaacacaaatacagaggtgtgaaagatgtctaatacattttgcaaatatccaccattcttgagaaccagcctcctcttgtagtggtgggcagaatgtgaagcatgtctccttgaacaagtcgcttgcaggtggcaactgactttgtttgcaatctggtgacttcactaaagtagatgttctttttcaaatgaagactatctatttgttagaaaaatctgattttccttagaataatactttgggacaaatagaattatcatgagttgattatttgaataactagagcagagcaataaagttgcctttaaaagtttgtgtatagcacacaaattcccccgcastatgtattctatactgagtggttatgagccactgactgaccagaaacatatcttccttagtgtcttatgacaca

SEQ ID NO: 385139 - DNA, 523 bp, Homo sapiens
gatgatgggagtgatccccttcttgatgggtcctcagtaaatccaacaccctgcagacacagtatgctatttttacaggaaaggygtcccaatccagaccccaaaagagcgttcgtggatcttgtgcaagaaagaatttgaggctaatccagagaataaagtgaaagcaagtttattaagaaagtaaagaaataattcataggcagagcagaagcatgggcctctgattgcccctttttatgattatttcttgattatatgctaaacaaggggtgggtggattttccatgaatttcctggaaaaaacacgggtaattccagagctgagggttcctccactttttagaccacatggggtaatctctggacgttgccatgacatttgtaaactgtcctggcgctgatgggagtgtaccagtgaggatgaccagaggtcactcccatcaccattttggttttgatgggttttagctggtttctttactccaatctgttttatcagcaaggtcttcatgacctgtat

SEQ ID NO: 385140 - DNA, 511 bp, Homo sapiens
attttcattttataagtgctggcatgtattgtgaatttctttacagcaagaagaatgacttaatgttttagagttagttttgtttttttgttttgtcccattttttaccaaacataaaatggcctaaaatgagtgcacaataaaagtgtgacaccttaaactaaagtaacatcaatcttttccataaagtattttgttctgtgatggcagataccaccatatgattgaaacatttctaagtgtgccgtatattaaagactgagccccttctcctaaatacacatatttttgaatgatgtatataaaatatattaaggcaaaagcaaatggcaaacataggtcactttttttttttttttttttttttgcagttacagtagtttccagacagccacttytgttcctgttccaaaaactatgactaacatttgtctgtctggatggtatcattaaatgaaaggactaatagtctctatgatgccacctgaatttcttatcgttgtttatttgt

SEQ ID NO: 385141 - DNA, 502 bp, Homo sapiens
atttcatttacagttgacaaagcccaagggacagagttgacactatacaagtcttgaatacctttatggaggtaacatgcctgaatatgctmtgagaggtcaaccaaaggttacctaggtacatagtgaactaggtgaggttgttctgcttccatactctttcatctaattttcccccgctgccatccagtcacattctgctcactcctacatattgaagcctattcctagggaggatctgatggttccttaattaagtctttttattttaggactcttcagtgtttgaattttaagatttgcctccagtatgaaacgagaggactttgccttcactactcagcttgaagaaagaggaagagatttatttggggtggagaatgtgaagccatcccagtgactgcctcttccacaaattgtctttctgttccaaggcaatgacctcagtgttgtcaactaggaggcacctgagctagtaaggagaagccaagcaagagagaga

SEQ ID NO: 385142 - DNA, 507 bp, Homo sapiens
attatcataggtgccatgatttcaaatatagtagaaatttaaagattcagaagagaattctatgaaaaaatgtatgccaataaatctgcaaactgaggtaactgtaaaattttacacaaaatcataattaactataatttattatagaatagataaacatgaaatggttagacaaataataccattagaagaattgaattaatagtaaatkgttactttccatatagtaatactttttctacacacacaatgcacaaaacaccagtttcaaactgtgttattggcatctcagtgaacttttaaggaatgcatgaattctgtcttatttgaactatttgagagaagagaaaaagagagagacccatgcttttcagagtatgtatctgtatatctttgatgcttaaatctgttaacagacagttcaaaaataaaattattgcccaatcttattatgaatgtagatggaaaaatataaatattagaaaaccaagttcaacaatgtgttgt

SEQ ID NO: 385143 - DNA, 565 bp, Homo sapiens
tactgagttagccagggaagtgatggtgacaaaccagagctacaggatcgttggggcacatattcgggttgacttcacgcaagttcttcaaaactttgttcatttgcgaggaaacatagaataataaaaacacagattacaggctcataaacggtcgtcttacaaaaatccactgcatgtttgagttccttcaacactaattctggtggttgtgcattttgtgtatggtcccttccagagatgggaagctcctgctccctgggcagttcactcccacacagatggttctgacaatggaaagacactcattaartgggaggaaattctatcacaaagtccacttgtgctggttggaataaattaaattcctctttctaaagacattctttcgaaatgtgaaaacagttccactgactcattgttgaatgatagccaagtaattcaacaatttctctttagacttggaaaaagaagagcctcacattcctggccagttttctctgaatgccgactagtgtatccttatcatttgtttaatataattttaacttttactttagaataa

SEQ ID NO: 385144 - DNA, 606 bp, Homo sapiens
attcaagctagatttggacatttagaatcaaagatgtaatctagtgatccctcatttggaccacaaatgagatagatctttacattaatgtatgacggatttaggttagacacaatgaagaactttgcagcaaaagttcagtggaacaggtacctgagggagtgtatcagtcaactttactaaaataatgctgcataacaactaatctaaaatctcagaaatttataacatttattttttgctcacaggtttgtggattggctgcagtgattctgttcaggttgtgaatcttgttcaggtctgctccatgtaacttctcattctgggactcaggccgaagtgacaagggcatgctcttctcgtggcaaagggtagaggtgcaagagaccaagcttaaccaagcaagtagagttaaagcctctgtttacattccattggcyaaaacaagtcacatggctagacccatcatcaatggagtggggaagtttgctcccccaacggagggaaatagagaagaatgaatgtttgctgagcaataatacactccaccacagggaggttatggagtttccttcacaagtggtctttacaaatagaagaggttgt

SEQ ID NO: 385145 - DNA, 472 bp, Homo sapiens
tgtttatatctgtggagcaaagattatgcaaactgccagcacttcattgtttttgttttcggtgtggttatcacaraacaaaaacaaaaagataacttctacatctgaagccccattatttgaaaacagacctgaatatttcctcctctttcaataaagcagaaagcaccctccattttacttatctatgaggtatttatttgttgataggggactagttactatttctatatgagagcttgacagagtctatctaaagaagctatttcctgagttactctagaaacctcacactgttttgatatttgccaaaaatccaagatagcgtgttttttttttttaatttctccaccttccatacccctcagggctaaaaagagaaaaacatgatcacaagcatagtaaatggtccgttagcactctgacctctctgagtttctatttgtcttttgttcctttttcttttaaatac

SEQ ID NO: 385146 - DNA, 547 bp, Homo sapiens
accgcgcctgaccacttaccatctttaaaatttagttttctctttgttaaaacagagactagattaggttattgccaactctcttccagctcttaaattccatgattttatgtagaatttaacccaaatgtatgggttaaattcgcaaggagtttgttttagtgaaagaagcattatggaagatgtccagctatcaacacatgtgagagcactttactgggtactggatgaaaagttagagtttaaacacacaccaacagcccaaaatgctgggttgaaaatgaaaaacgggtcattcatagacagataattgttactgttttttaattcttcatgaaaacatgtataatccttggtaaccatttgtttaagtaatataaattactgtcaacttggaagcccagtttgtcatcttcatctgtgatttataccagactatataaaygacatgatttcttagatctaataagacatttatcttcatgaaggaagccactgtgatcctgagtgacagtttacttacccttatcacagtaaactcaacacc

SEQ ID NO: 385147 - DNA, 559 bp, Homo sapiens
ataaaaggacactgacagctgcttatttcatttcacaaacatgaaaataggattttcaactgaatttaatattatctcaaatactaatttccaaaggaaatcaccaatgctaatctcagtaaatactgtagagttttggccttggatttcaactagggagctgtgaaaccaaacaacctacatagaatctgtattgcctcactttaaaggtttatttcctacaattaaactagaaagccagggaggttataaaatgataaaaagagaatggctgtagctttctctttccataaattagatgatcatatctagactcttcttcaaatgctgtatggtaggtagatgtcyataactgagttgaacacctacaaatataggactttagaaataaactataaagtttattatgaaaaagagaaataaaaattgtagaaaactcacacaatagtcattggccaaagccagaagaaatactctcttttattagtttacttatcagtatacaaagtttatagctatgcttaaagcatcactgtgtaatttccatagtaaccagaaa

SEQ ID NO: 385148 - DNA, 583 bp, Homo sapiens
actgcctgatgcactgacctttaagatatattgaaaatcaaatgggccgggcatggtagcatgcacctttagtctcagctacttgggaagctgcagcaagaggtcgcttgaacccagaggttcaagactgcagtgcactatgatgacacctgtgaatagccactgcactccgggctggacaacatagcaagacctcaccactaaaaaaaaattaaaaatcatgtgggagagcagatttgaactttttcttaattgaaaaaaataatatcgtaacatattttaaatcattctccttcatcagtgtcctctgagatatactggtaagcagctatctgctaagccaagtctgaatttcatctccttttatatcttctcttctgggcagagggagctgacaagcagtaatataagcataatggaggcygggggaaatagaagacctatgcactccagaaggatctgaacaatctcatgtccattgtgaagaaaaaccaagggaaatatcacaatagaacaaggttctgggttccctcttctcatcttaataacacttggtcatctggatgttgttagggttgggttt

SEQ ID NO: 385149 - DNA, 534 bp, Homo sapiens
ggccttaaagcattaagcaaacctaatatctgacctgcataatttagactaaatgtctttatcttatcaatatttttttttagataaagtttcactcctgttgcccaggctggagtgcagtgtcacaatctcagctcactgcaacctccacctcccaggttcaagcaattctcctgcctcggcctcccaagtagctgggactacaggtacctgccaccacgcctggctaatttttgtatttttactagagacagggtttcaccatattgaccaggctggtcttgaactcctgaccttatggtctgccttcctccatcccccaaagtgctggcattacaggtgtgagccaccgtgcctggctaattaagctggmttttaaccatagcactctttaataaagtccttttaaaatttcttattacctgactttagccaggccaaatggccaatatttctggcttttaaactatatcaaaggtagcctcacaggtgctctgagaaaagaaaattcaagacagttcacggaggggaaga

SEQ ID NO: 385150 - DNA, 497 bp, Homo sapiens
agggagcttgtgtgcccttccaccgagtgcgaagaggtagaaggcaccatctatgaagcagagagctagcactcagcagacatttaatctgttggtgccttgatcttggacttcccaatggcaagactgagaaataaatatttgttgtttataaattacccagtcctaagtattttgttatggcaatctgaatgaactgagacacctcccccaamagaaaatgcaaaaaattctaatgcaccaaaaagactaatttctcctagaaaacccctctctttcttccaaattcttttaatcatcttctcctgcaggtgggtgaggatcaatgcattatatttgtcttgtttcatcaattgtccctgtcttaacgcagagaataactaaatacacctgagccatttatattccactttcagttaaaactgacttgggattgtcagaagaaaaggaatggtggcatggatctactgccacagataaatattttatttgtcaat

SEQ ID NO: 385151 - DNA, 497 bp, Homo sapiens
agggagcttgtgtgcccttccaccgagtgcgaagaggtagaaggcaccatctatgaagcagagagctagcactcagcagacatttaatctgttggtgccttgatcttggacttcccaatggcaagactgagaaataaatatttgttgtttataaattacccagtcctaagtattttgttatggcaatctgaatgaactgagacacctcccccaacagaaaatgcaaaaaattctaatgcaccaaaaagactaatttctcctagaaaacccctctctttcttccaaattcttttaatcatcttctcctgcaggtgggtgaggatcaatgcattatatttgtcttgtttcatcaattgtccctgtcttaacgcagagaatawctaaatacacctgagccatttatattccactttcagttaaaactgacttgggattgtcagaagaaaaggaatggtggcatggatctactgccacagataaatattttatttgtcaat

SEQ ID NO: 385152 - DNA, 586 bp, Homo sapiens
gtacacattttcctacaaattaccaagctgagacataactgtaatccatgcagcccaggatttagctttgaatatttggataacccaaaccaggacaagagttattttttcaaaggacaagatcaaaaaaaattaaagcctgctcaatataaacgttctatgtcttttttaattacaaaaaaccttttgggkttttttttttaaatccttctggcacataaggaaaatcaaacagaaaagcattgtgatgtaagggtgcatgtgaaaatttttttaaattgtgtaatagtaactgtccaaaagtctatgttatttagccacctttccctcaaaaataatagataattgtgctcaataaatattaatgtaatatggctaaccatattcatcctgatacctatatggacagcagtttttcacttcaatgctgaccacttttctaagcttcatatttgatacacaacttcaaactgattacctctacttggtgtctactagtcatctcaatcttaacatgactcaatcagaattcttaatttctttataccctctactcctctccaagattctccatcttcgaaaatga

SEQ ID NO: 385153 - DNA, 626 bp, Homo sapiens
ccctcaaaaataatagataattgtgctcaataaatattaatgtaatatggctaaccatattcatcctgatacctatatggacagcagtttttcacttcaatgctgaccacttttctaagcttcatatttgatacacaacttcaaactgattayctctacttggtgtctactagtcatctcaatcttaacatgactcaatcagaattcttaatttctttataccctctactcctctccaagattctccatcttcgaaaatgacattcattaatccagttactcaagctgaaaacacagaaatcatctttggtccctctcattaatatacagaccacatttcattcatcagcaagtattatcggctcaacttccaaaatattccagatctgtcacttccagaaccttccacatgcaccatctattccaaatcatcatctctactttgaataatcaacaacctctataacattatccctgattcttctttgactacgtgcttctgttttttcacaaaggagacattgttgttttatgttaagtgaaaaagacttgcataaaaattgatatatgcattacgttacttacatcacaataaatgaactcaggtaaaattgcccaaaatgtgc

SEQ ID NO: 385154 - DNA, 599 bp, Homo sapiens
tgatatcttacttatttttaatgtaggtgtttattacaataaamactcccttttagtagagcttttgctgtatgccatagagtttggtatattgtatttttgctttctcttgtcttgagtatgtttaatatataatatataatacattatatattatatatataatatattaatttattatatattgagatatatataatatctttttatttatattattatatgtataaattctctttttatttatactcttggacctactggtggttcaagagtatgttgtttaatttgcatatatttgtgaatgttcaagtgtcccttctattattgatttttagtttcattttttggggtcaataaaaatacttggtgtgatttctatctccctaaactgtgaagatttgctttgtgaattaatatgttctctgttctagagaaagttctgtatgtgcttgagaaaaatgtatattcgctgtttggtggaatgttctgtatatgtgtgtcaggtccatttggtctataatattgcttaagtcttccgttttcttatgttcttcaatctggatgttctgtgcgttattggaagtaattattggggt

SEQ ID NO: 385155 - DNA, 584 bp, Homo sapiens
ttttctacaattcactgttttcactccataacattttaaacacgtttccacactgatctatatagttaattgttatgagtttgtagatttcattaatatttatgtgtgtgtgtgtgtgtgtgtatatatatatatatcactttttattgattcctttctttcttttttttcttttttttttttagatggagtcttargagtgcagtggcacgatcttggatcactgcaacctccgcctcccaggttcaagtgattctcctgccttagcctcccaagtagctgggattacaggcacccacggccacgcctggctaattttgtatttttagtagagacggggttttgccatgttggacaggctggtcttgaactggtaacctcagaccatccacctgccttggcatcccgaagtgctgagattacaggcgtaagccaccatggctggcctgatttatttctttattggtggatattagatcctttacaatattttactattgctcatcagtctgaaacaaagatcttggaatctactctattttttgtagggtagattcccagaagtggaatcacgggtcatagga

SEQ ID NO: 385156 - DNA, 599 bp, Homo sapiens
tgatatcttacttatttttaatgtaggtgtttattacaataaaaactcccttttagtagagcttttgctgtatgccatagagtttggtatattgtatttttgctttctcttgtcttgagtatgtttaatatataatatataatacattatatattatatatataatatattaatttattatatattgagatatatataatatctttttatttatattattatatgtataaattctctttttatttatactcttggacctactggtggttcaagagtatgttgtttaatttgcatatatttgtgaatgttcmagtgtcccttctattattgatttttagtttcattttttggggtcaataaaaatacttggtgtgatttctatctccctaaactgtgaagatttgctttgtgaattaatatgttctctgttctagagaaagttctgtatgtgcttgagaaaaatgtatattcgctgtttggtggaatgttctgtatatgtgtgtcaggtccatttggtctataatattgcttaagtcttccgttttcttatgttcttcaatctggatgttctgtgcgttattggaagtaattattggggt

SEQ ID NO: 385157 - DNA, 599 bp, Homo sapiens
tgatatcttacttatttttaatgtaggtgtttattacaataaaaactcccttttagtagagcttttgctgtatgccatagagtttggtatattgtatttttgctttctcttgtcttgagtatgtttaatatataatatataatacattatatattatatatataatatattaatttattatatattgagatatatataatatctttttatttatattattatatgtataaattctctttttatttatactcttggacctactggtggttcaagagtatgttgtttaatttgcatatatttgtgaatgttcaagtgtcccttctattattgatttttagtttcattttttggggtcaataaaaatacttggtgtgatttctatctccctaaactgtgaagatttgctttgtgaattaatatgttctctgttctagagaaagttctgtatgtgcttgagaaaaatgtatattcgctgtttggtggaatgttctgtatatgtrtgtcaggtccatttggtctataatattgcttaagtcttccgttttcttatgttcttcaatctggatgttctgtgcgttattggaagtaattattggggt

SEQ ID NO: 385158 - DNA, 560 bp, Homo sapiens
actaaatcctcaattcttttctggctacaagtctccaaactaatgttttaaatttttcctcccatttttctcacttaaaatcactaccaaattaatactcagcttttcttgaaccatgcaaattaaagctagataatttgacaaaaactttgagaaaaatcaccacagcaacacatacaaacatccttcaagcttgctgatttatggactacacacaaagttcatttgaagacctttctggatttgaataacactccagaaaaaaatctatttgattgtcactaaaatctaaagatgtttcagagactctttaaaagaacttgtatatagaatattccagacattaacttttgtttttcttctgtttccataaaaatgcctcttatataggatatgtttgcctgcatcctatatagaggcctaacccatctgcagtgccacmtcctgaaacaggactaagctattctcagggctaagagaattcaagaaaatatgggaattcaagaaaatatgggacaacatatttaaatgttatcttttctgcttatttcaatttgttt

SEQ ID NO: 385159 - DNA, 565 bp, Homo sapiens
gatatgtttgcctgcatcctatatagaggcctaacccatctgcagtgccacctcctgaaacaggactaagctattctcagggctaagagaattcaagaaaatatgggaattcaagaaaatatgggacaacatatttaaatgttatcttttctgcttatttcaatttgtttttccattcctttggttacctcgatcaaacaacctctaacccaaatctctccaaagctatcaacttggctgttagtatgtgaaactttttaaaggttcaaagtgggaacggaaggatatcaaaatattttactctcaaacatgtttcctcgacatattttgagatggctgttcagaaatccaacaaacagaagtagccctgttaagctatctttggtgggtgagatttgcatctgtagaaaatctgcattggtrcagccaggccttctcttatagggatttatggaagattaattgagattccgacacctttaaaagtctgagacaaatatttaccatctattctctttgagagctgctacctgtgaggtttcatttacataacaaaactaccttt

SEQ ID NO: 385160 - DNA, 609 bp, Homo sapiens
ggtgcagccaggccttctcttatagggatttatggaagattaattgagattccgacacctttaaaagtctgagacaaatatttaccatctattctctttgagagctgctacctgtgaggtttcatttacataacaaaactacctttgctagccagcccgcctctgctctccctcccataatttttgtgctgctataacctgatttaccaccataacctgtttttggccctgttctgagtcctcattttttctgtaaacttaagttgttatataagcttatgcaccccattgtgagtgtttcaggtaatcattccgtgattctctcttacatgcacattaataggtttgtgtaccttttcttcaattaatcttatgtgagttggcttttcagcaaaccttcacagggcaaacagaaaggtttcccttggcccctacagcacctctgttgaaaaggagctggctataagtgtgtgtrtttatttctagctattctgttctgctggtctatgtgtctgttttatgccagtttttgttactataggtttgtgttatattttgaagtcaggtggtttgatgcctccagatttgtcctttttgctcaggattgct

SEQ ID NO: 385161 - DNA, 608 bp, Homo sapiens
agaaacagagattatatctgatttttttattattttcacttctcagcacaatgcctggtagaaactcaatgaatatttgttgagtgaatgaataactgaatgagtgagtgagtgtacaaatagctcatactcctattttatgttagagactaattttgttttgtttttctgcctcataatctatagcatccttttttatttgctattcaattatacagatgcataaactaagaatacaaataattttaagtcctacctcagttctaaatagagtaatatattcaaagtataaaccaaatgatattcagatataaaaaaagataaaggccagcattaatattaaaggtaaaaattgtagaaggccttttgatctttttatctgagaattccaacgggctttwtgagtatttttaattgtttctgtttctgtaagtgaaaacacttatttggaaatgactacaagagagttgaggctgaaatttatgtgttccaactgcacacagcatagcatgcctctaatgtatgtgaaatatcctctaaatgttagttctacttagatatgaaaggcaagcatactggttttcagaagataggcattttcatgttaa

SEQ ID NO: 385162 - DNA, 529 bp, Homo sapiens
caaattattcacacttagttttgctattgaatcctgggtcccaatattaacaggggagaatctgcttccctaatcatgcagtttaaaaatktccacaatctaagtagattctgtcctagagtctcatgtccagccctgtcagatttctgtgtgttattccagaaagtataagcaataggattcacattcttgttattgatcttgcctgcataagtttcccccaatgaattctgctgtagatcaactgagtggattttagatggccaatgtaaacgaccaaatgaccttttatctcagccaattgttttctttatatcttgactatgtgcatgacaaaattcccaggtatggttctggaaggtagtgggcaaatgctatttattttcttaaggcacaacttattagtttaagtctgggctataggtggtggcaaaacaagttctttattcttaaacaaactactgttttctccttttcctatgctagaagcaagtttaaatcctttaagttattttgtatgtctggaaaa

SEQ ID NO: 385163 - DNA, 512 bp, Homo sapiens
atctgcttccctaatcatgcagtttaaaaatttccacaatctaagtagattctgtcctagagtctcatgtccagccctgtcagatttctgtgtgttattccagaaagtataagcaataggattcacattcttgttattgatcttgcctgcataagtttcccccaatgaattctgctgtagatcaactgagtggattttagatggccaatgtaaaygaccaaatgaccttttatctcagccaattgttttctttatatcttgactatgtgcatgacaaaattcccaggtatggttctggaaggtagtgggcaaatgctatttattttcttaaggcacaacttattagtttaagtctgggctataggtggtggcaaaacaagttctttattcttaaacaaactactgttttctccttttcctatgctagaagcaagtttaaatcctttaagttattttgtatgtctggaaaagtggttaatcatacttgcttactggagatttggaactattaa

SEQ ID NO: 385164 - DNA, 594 bp, Homo sapiens
aacgacccataatccaaaaacaacaggatttctagatagacgatccatttggaatgctataaatgaaatgctgcctcacactaaatgaaaacatgtgaaataaacaaatggatttaagaagtcaataaaaaatagaactatgaaagaattataaggagaggctaataatttttatcttacacagactcctatattactggattactttctaatgataagcatatatcagattttattaaaaattcaaataatttaaaactaaaattgtgtgaaaaaaaatcattgctggtgtcatcatgaacagcagcatcttactttccaagtggaaatattcaaatatctgtgacaagtagatattgtttgtattatgcatttgttagtcttatttataaaygtagactttaaaccttaccaagaaacataatttcaaataatttatatttaaatctccattttatgaacctacttcaaacaaacttagtctataataaaaatgtcaaggatatagccattcagaacaggacattcccaggataccagttagaagcattttcacacaatgcaagagcaaaactcttgttaatagggtgctgt

SEQ ID NO: 385165 - DNA, 450 bp, Homo sapiens
acattcccaggataccagttagaagcattttcacacaatgcaagagcaaaactcttgttaatagggtgctgtaattacaagatgacttgcaacacaaaagaacactagattaattcttttagaagggcaagcctgtggctcagcctatgaatgacacttctatttyccttagataaccttttaaatataaatatcaagcaacattaatatcaatgctgctgttctttaaacaccattttttaatagtcatggttataaatgtggaatgttgagatgtacataagattaaactttgcaacattggacatatcagaatctaataattatagaaatgtaatccttcggagttcagaaaaggaagtaaatgcatttcctccagttttttgttaatgggaaagatctaacaagtataaaaattataaaggagcttagagaaaagttggatgagat

SEQ ID NO: 385166 - DNA, 590 bp, Homo sapiens
atacattcttcagtttcatgtgtagcaaagaaaatagtttaggcaaatctgggagactgtatcccataattcagagtttagaaaacaattaggttattttagattaggagcgtaccaccctaagagtagtaattacaagagtaactttgagcttctagaaytgttgctgcacctctgtgcctcatagattctttctacataatcttctctctgccgaaatgcagcctcagaaaaaaatatgtcacacgaatattgtaactatagagttccatgtcaaatcatgtggagtcattgagttctatctaacctccagtctacaacttttggctcttaattcagagagccttggttggcatgggtgacagagccagctactcttccaggcagaagattgattgacccagtaagttcagtctagttaccctactagacttcctttgttcttgttctcatattatatcagttggcacagatggaatataacatataaggtagctggaatcaatgttgacactccccggttttaagccctccagtgattcataacttagagaacttaaaatcaccagggaaacatttttttctaatgt

SEQ ID NO: 385167 - DNA, 590 bp, Homo sapiens
atacattcttcagtttcatgtgtagcaaagaaaatagtttaggcaaatctgggagactgtatcccataattcagagtttagaaaacaattaggttattttagattaggagcgtaccaccctaagagtagtaattacaagagtaactttgagcttctagaactgttgctgcacctctgtgcctcatagattctttctacataatcttctctctgccgaaatgcagcctcagaaaaaaatatgtcacacgaatattgtaactatagagttccatgtcaaatcatgtggagtcattgagttctatctaacctcyagtctacaacttttggctcttaattcagagagccttggttggcatgggtgacagagccagctactcttccaggcagaagattgattgacccagtaagttcagtctagttaccctactagacttcctttgttcttgttctcatattatatcagttggcacagatggaatataacatataaggtagctggaatcaatgttgacactccccggttttaagccctccagtgattcataacttagagaacttaaaatcaccagggaaacatttttttctaatgt

SEQ ID NO: 385168 - DNA, 590 bp, Homo sapiens
atacattcttcagtttcatgtgtagcaaagaaaatagtttaggcaaatctgggagactgtatcccataattcagagtttagaaaacaattaggttattttagattaggagcgtaccaccctaagagtagtaattacaagagtaactttgagcttctagaactgttgctgcacctctgtgcctcatagattctttctacataatcttctctctgccgaaatgcagcctcagaaaaaaatatgtcacacgaatattgtaactatagagttccatgtcaaatcatgtggagtcattgagttctatctaacctccagtctacaacttttggctcttaattcagagagccttggttggcatgggtgacagagccagctactcttccaggcagaagattgattgacccagtaagttcagtctagttaccctactagacttcctttgttcttgttctcatattatatcagttggcacagatggaatataacatataaggtagctggaatcaatgttgacactccycggttttaagccctccagtgattcataacttagagaacttaaaatcaccagggaaacatttttttctaatgt

SEQ ID NO: 385169 - DNA, 590 bp, Homo sapiens
atacattcttcagtttcatgtgtagcaaagaaaatagtttaggcaaatctgggagactgtatcccataattcagagtttagaaaacaattaggttattttagattaggagcgtaccaccctaagagtagtaattacaagagtaactttgagcttctagaactgttgctgcacctctgtgcctcatagattctttctacataatcttctctctgccgaaatgcagcctcagaaaaaaatatgtcacacgaatattgtaactatagagttccatgtcaaatcatgtggagtcattgagttctatctaacctccagtctacaacttttggctcttaattcagagagccttggttggcatgggtgacagagccagctactcttccaggcagaagattgattgacccagtaagttcagtctagttaccctactagacttcctttgttcttgttctcatattatatcagttggcacagatggaatataacatataaggtagctggaatcaatgttgacactcccsggttttaagccctccagtgattcataacttagagaacttaaaatcaccagggaaacatttttttctaatgt

SEQ ID NO: 385170 - DNA, 575 bp, Homo sapiens
tgaaattaatatttatttaaaaatggaagcctaattttttggctcttttgatggccgttccaagtctggttatttctttaataataaaatacaataaatatttttcaatttttgccattagctcatatgctttaatgctttaagaattcagaggacatatgtagaaacatagtggaattgtaaataatatattgctatttatgacctacaatgggtacaatgagtatgctagaaaggcttttaatttctttttaatttaaaggaataaccattttatagtaagaaaaaagtttgagtttgaggagtaaagttttaagggaaaattgcagaatcctatttgaatggcataaaaaattctgcctactcagttcttttcaaactagactttaayacaatctgaaacatgaaggaaaatactttgcagaaagtcagactatgagctcaggaagtcataggactgaagttatttagtgttgactatggtgcagtcaaatagtatcagtagattagagttatgaactaaatattcaggaattattaataatataatgtacagcttcgttagataattggtt

SEQ ID NO: 385171 - DNA, 585 bp, Homo sapiens
atgtactaatcccccaaaagacttcttgttttggtcacttctcaaagaattgctaggttgctgtgagaaaactgtataacattgttcatcttcatttacttcctgattttttttgtacagtagagacatgttctctaagtagagacggaaattattatgytattaggattagataaagagcatgactctgactctgaggatgatttctgtgtagttgaggtatgcaaatataattttaggtctaagttgctcttaaaccccaaagatgggaaaggtattaaggatgatttacaagtttcttttattcattgggaaaaaacaatgttcttctgtctataagggtagactacatgtagtctaataattaatctagttccaataatgataaaagcaaatttcttcagataacaatattgttatcttacacttctattactagattttttttattttggaaatttttatagatagtgcaatgagtatactgattaatttcaaaagtccctcttaatcttctatcagatacagcccgaagtctaggcccaagtttaaaaacttaaatgatttagggaccaaacaggtaac

SEQ ID NO: 385172 - DNA, 597 bp, Homo sapiens
tattgaacgtctttaacaacatatagaagccccttcgtcacccagtctgtgctttgtcttcagtcttatatctacccatgttcctctaaagcaccctacatcagccaacactaaactacttcatgtccctgaatataccatgctttttcatggctctgtttctttccattttctgatctccctgtttggaacattttccctccaccttactgatcaccttgtgctttttcttcaggattgctcttgcttcacttcctcctggaggccttcctagaaatacatttacccccacctcactccacccgtccaactcatcaggctattagttaagccaagatttgtgtatgtctctattatggttcttatcatactgcattgtcatctttggttttcttgtctgtttctttgcaacagactgagagctcctaagtgcaaacacatgccttgttaatcatggtgttctcakcatctggcacatggcagatattcaatgaatgggatctgaatgaaaaaatgaataaatgcatgaagcattttcttttcctttgctgctgagcctaggataaaactcatttggttgatgagattttaggaagg

SEQ ID NO: 385173 - DNA, 628 bp, Homo sapiens
aacggagaattcaaaatagctgaaactcaaggaaatttatgataacaaagagaaggaattcagaatcttaccagataaattttacaaagaaattgaaataattaaaaacaagcagaaattctcaaactgaaaaatataatggacatattgaagaatgaatcagagtctcttaagagcagaattgattaagcagaagaaagaattagtgagcttgaaaacagtctatttaaaaatacacagagaagacaaaagaaaaagagttaaaaagaatgaagcacacttactagatctagaaaatagcctcaaaagggyaaatctaagagttattggcattaaaaaaaagataaaggagtagaaagtttactcaaagggataatagcagagaatttcccaaacctagagaaagatatcaataggcaagtacaagaaggttataaaacacaaaggagatttaacccaaagaatactatctcaaggcatttaataatcaaactcccaaaaggcaaggataaagaaaggatcctaaaagtaaaaaaagaaaagaaacaacatacaatggaactccactacatcttgcagcagacttttcagtggaaatgatacaggctatgagagagtggcatgacat

SEQ ID NO: 385174 - DNA, 594 bp, Homo sapiens
aactccccacaagaaactcacctaagcaatactctggaccctaataaagacccaggttcacagagtacccgcaccacctctctcttgccctacatccactggttaagtgtgtatgtgctgaaaagcttccccttcccatgggctctgtgaagggtgctgccctcttctctatggaatctgtaagtaataaactgcttctgttatttcatgtgttttgttgagttgtctcctctgtgtctcacctgactgacacctcacttctacccagtcaagggctgtcctagagaggggctgttagggtaggaataaactggacacagatcagataataatcrcaagggtgggccgggcgcagtggctcacacctgtaatcccagcactttgggaggccgagtcgggcggatcatgaggtcaggagatcgagaccatcctggctaacatggtgaaaccccgtctctactaaaaatacaaaaaattagccaggcgcctgtagtcccagctactcgggaggctgaggcaggagaatggcgtgaacccaggaggtagagcttgcagtgacatcacgccactgcactccagcctgggtgacagagc

SEQ ID NO: 385175 - DNA, 594 bp, Homo sapiens
aactccccacaagaaactcacctaagcaatactctggaccctaataaagacccaggttcacagagtacccgcaccacctctctcttgccctacatccactggttaagtgtgtatgtgctgaaaagcttccccttcccatgggctctgtgaagggtgctgccctcttctctatggaatctgtaagtaataaactgcttctgttatttcatgtgttttgttgagttgtctcctctgtgtctcacctgactgacacctcacttctacccagtcaagggctgtcctagagaggggctgttagggtaggaataaactggacacagatcagataataatcacaagggtgggccgggcgcrgtggctcacacctgtaatcccagcactttgggaggccgagtcgggcggatcatgaggtcaggagatcgagaccatcctggctaacatggtgaaaccccgtctctactaaaaatacaaaaaattagccaggcgcctgtagtcccagctactcgggaggctgaggcaggagaatggcgtgaacccaggaggtagagcttgcagtgacatcacgccactgcactccagcctgggtgacagagc

SEQ ID NO: 385176 - DNA, 609 bp, Homo sapiens
ctcatctttatatgtttatttcaagggtaatctcttaaaggacaattatctttcatttgcttctccttcactttaaattttaaggatgttctggaaccccccagcttctaaaaagagcagttccagaaaatgtaatatgagtgagtatcataagtaaagaaaatatctctaaatttggataggaaacctcaacaaaaaagagaagtgggggaaaggggagacagagaagaccagcagagagttctaaccatggaagctgtcagagttgttttcaattttccgtagtattgatttacagaaaatgtactccctagctcataataacaaacttccaattaatttggattcagtccttctgctataaagttacacagacatgaacattaaatattaaaattttttgacctcagtcaaatgtgtcatacttcatggtcagtttatagaccaaaatcctgttatggcaattcagtagggtaaatttgagaaggacaaggcatagtactgtcccttccttctgactcttttcatagaaaatggaatgtgtgtaggagatcacacacaccacaggaaatacctcaattacakaatttaataaaaaggatgtgccta

SEQ ID NO: 385177 - DNA, 593 bp, Homo sapiens
aggtcatactgctagtaagtggcaaaaccaggggcgaacccaggaaagctcttaactacctcagaacactgcaaagttccagccctgcaataccagagtctatgaatgatttcgatttcactgttagaagttttaatttcaatagagcagagacattttagctaaaagttaaaactttaagaaaaatgaattaagacaaataattgcccacacacatctttataataaaacgagaggaaaagcctcccatgtcctatttatgaaagtgatattaaggtgggggggccacaatttcatcaagaagtggcttatgacaatayagctttggtttaaatttttaaataggactctttttctctgcccctagaaggacgtggaaatgaaagatggatgtgataactgtcaattcagagctctgcaaaacgccagactcaattcttgttttagaaaataagagccagggctcgttccacccttgactcttcacacagagtaacaaaaaaaaaaaaaaaaaaaaaaaagcagcaccatcctctgccctctcttcacacaaagcaaggtttaccccactacccaaaggggagtgctgattc

SEQ ID NO: 385178 - DNA, 606 bp, Homo sapiens
  misc_feature (1)...(606): n = A,T,C or G
nnnnnnnnnnnnnnnnnnnntctaggatacatgtgcacaacgtgcaggtttgttacatatgtatacatgtgccatgttggtgtgctgcacccattaacttgtcatttacattaggtatatctatctcgacactgccaaatttcaatcaagatcgcgccgccgcccaacccgaaaggaggcatcagccctgctcgccgctgggacgtgaccccaacgctgaacttgccgcagggcggcctcaggcctggaacttcaagaaaaaggggcgggtgttccttaggagaggtcagtgcgggagttggagaagtggagaatctactgccggcaggaaggcgaggctgcgccactgcgcgcacctgtccctccttcccggaccgaagaggggacccagagacggcgcacccgcgctcactgcggcacggaggggagaaaatccttccccgttcctcgaggggcgtgtggaagccgcctcttgccgcgctcatccccstccccacccgtcctcgcccggagtatcgcactcccggggccgccccagcccgcccgcggcgcccttacctggctgaagcgcggctgctgggcggacctggggagactgcgaggtgc

SEQ ID NO: 385179 - DNA, 606 bp, Homo sapiens
  misc_feature (1)...(606): n = A,T,C or G
nnnnnnnnnnnnnnnnnnnntctaggatacatgtgcacaacgtgcaggtttgttacatatgtatacatgtgccatgttggtgtgctgcacccattaacttgtcatttacattaggtatatctatctcgacactgccaaatttcaatcaagatcgcgccgccgcccaacccgaaaggaggcatcagccctgctcgccgctgggacgtgaccccaacgctgaacttgccgcagggcggcctcaggcctggaacttcaagaaaaaggggcgggtgttccttaggagaggtcagtgcgggagttggagaagtggagaatctactgccggcaggaaggcgaggctgcgccactgcgcgcacctgtccctccttcccggaccgaagaggggacccagagacggcgcacccgcgctcactgcggcacggaggggagaaaatccttccccgttcctcgaggggcgtgtggaagccgcctcttgccgcgctcatccccctcyccacccgtcctcgcccggagtatcgcactcccggggccgccccagcccgcccgcggcgcccttacctggctgaagcgcggctgctgggcggacctggggagactgcgaggtgc

SEQ ID NO: 385180 - DNA, 606 bp, Homo sapiens
  misc_feature (1)...(606): n = A,T,C or G
nnnnnnnnnnnnnnnnnnnntctaggatacatgtgcacaacgtgcaggtttgttacatatgtatacatgtgccatgttggtgtgctgcacccattaacttgtcatttacattaggtatatctatctcgacactgccaaatttcaatcaagatcgcgccgccgcccaacccgaaaggaggcatcagccctgctcgccgctgggacgtgaccccaacgctgaacttgccgcagggcggcctcaggcctggaacttcaagaaaaaggggcgggtgttccttaggagaggtcagtgcgggagttggagaagtggagaatctactgccggcaggaaggcgaggctgcgccactgcgcgcacctgtccctccttcccggaccgaagaggggacccagagacggcgcacccgcgctcactgcggcacggaggggagaaaatccttccccgttcctcgaggggcgtgtggaagccgcctcttgccgcgctcatccccctccccacccgtcctcgcccggagtatcgcactcccggggccgccccagcccgcccgcggcgyccttacctggctgaagcgcggctgctgggcggacctggggagactgcgaggtgc

SEQ ID NO: 385181 - DNA, 580 bp, Homo sapiens
aaagtggaacagtttcctgcacctgaccccagtgtctgggtcacatggggaccatcatgttggggttacaccttcctttgctctcatgggcagggctgactgaatggtctgcgcagtatgcatttgtgagaagcacattgcagggggctctgtgtagaggaacagttctgagaatgagcaaactggtgctaccatgagctgtctaaaccccaagtttttgtttttgtttttttgagacagagtcttgctctgtcacccaggctggagtgcagtggtgcaatctcggctcactgcaacctccacctcccaggctaaagcgattctcatgcctcagcctccycagtagctgggattacaggtgcacaccactgtacccagctaattttttctatttttagtaaagacagggtttcactgtgttggccaggctggtctcaaactcctggcctcaagtgatccccctgcctcagcctcccaaagtgttgagattacaggtgtgagccactgtgcctggccataaaatccaagttctttttattcttagttactgtgacagaccgagttaaagaaaacaaaagga

SEQ ID NO: 385182 - DNA, 467 bp, Homo sapiens
cctgccctgccaggccatttgtatttaagcctctggccgatagaatattagaaacctttctgtccattggcttcaaagatgctttaagaatgaaaacatttctaccttaaaaacagagacaatggaaaacattactttctttatcatctccttggtacctttgaatatacattttgcacagtgaaaatcaagactggcttctgggattagaaacagaagggctctgtggccttttttagtttagttttttcttttttcttaaatttaaatatacttctattgtgtgaaggagagaaaaaaatatattttttccccttgcctatcttagtttttccagytggggccttttaaattagaccaccaaaagagagattaacaggagaaaagcatagaatttttatttagtaatttttacatgtacgtgggagccttcaccaggaaaataaagacccagggaagttgtaagg

SEQ ID NO: 385183 - DNA, 499 bp, Homo sapiens
attagtgacctaataacacaatgacacaattacactcattgcaaatgcattgatatctgggaaaaaacagaggcaagagcaaagactgaaacatgtaaagacacaatgggcaacaatgcaacctaccttatgtatataataataacagctgcttacatgcacttacctaccaggacctatcctagccactttayctatactgatccatttacccctcaaaaacacctatgagggaagtattattattctccccagtttaaaggtgagacacagagagattaagtaatttgtcctaggtcatgcaattaataagtaacagatttagaatttgaacccagataatctggcacaagagtccatcctcttagtctctcactccctaacttcacagaaattctgtaaactcagagatggacctagaccacagctaaagtttcctacaactaagaaggaacagaatacagctgataagctgattctagaacttcaagaaatatat

SEQ ID NO: 385184 - DNA, 595 bp, Homo sapiens
aacggtggcacacaaggtaagaacgccaggtctcaagagacccccttcatagcacagcagaggtagcataacaaagtatgtcattatgaacccacagaggtagaactatagcttaatcagattgtaagcttaatgaggccagaaccattcatcttttaattactccatccctagcactgggtacacactcactaaatctttgttgtacaagtgatgaagaaagtaaaacaaatgagctgagtcccatattacaaataaaagacacttctaccaggaaattataaacatattcctctcaaaggcacaaaatttatattttacaatcttatgagtaaggaattacacctatccatgtgactttcgtagtcgcaaataaaattaacagcaatgcctatgtgattgcttggaataaagayagaataagaaacatgtcatctaactaggtaatggggaaaaattcctttccaataatctattaaaaatcattttgcaatttcacctcagtctcttgcttactcgtttaattttatttaacaaacaatattgcacatattttgtagtattttcttttcaggggcttaccaatgtagaatca

SEQ ID NO: 385185 - DNA, 567 bp, Homo sapiens
accatgatcttgtacgtaaaaaatcctaaagaatccaccaaaaaaaagaggcattagaactaactatgagttcagtaaggttacaggatacaagatcatacaaaaatcagttgtgtttctacacactagcaatgaacattccaaaaattaagaaaacaattcaattttcaatagtatcaaaaagaataaaatgctttggaacaaagttaacaaaatgagtgtaagacttgtatactgaaaactmcaaaacgttgaaagaagtcaaataaatgaaaaaacagtctatattcatggatcacaagatgctaagacggcaatactcttttttttctttttttttttcctttatgagacagagtcttgctccgttgcccaggttagcatgcagtggtgcaatcttggctcactgcagccaccacctcccaggttcaagtgattctcctgcctcagcctctgaagtagctgggactacaggcacgtgccaccatgcccagctaatttttgtatttttagtagacatgggttttcaccatgttggctaggctagtctcaaactcctgacctcaa

SEQ ID NO: 385186 - DNA, 567 bp, Homo sapiens
accatgatcttgtacgtaaaaaatcctaaagaatccaccaaaaaaaagaggcattagaactaactatgagttcagtaaggttacaggatacaagatcatacaaaaatcagttgtgtttctacacactagcaatgaacattccaaaaattaagaaaacaattcaattttcaatagtatcaaaaagaataaaatgctttggaacaaagttaacaaaatgagtgtaagacttgtatactgaaaactacaaaacgttgaaagaagtcaaataaatgaaaaaacagtctatattcatggatcacaagatgctaagacggcaatactcttttttttctttttttttttcctttatgagacagagtcttgctccgttgcccaggttagcrtgcagtggtgcaatcttggctcactgcagccaccacctcccaggttcaagtgattctcctgcctcagcctctgaagtagctgggactacaggcacgtgccaccatgcccagctaatttttgtatttttagtagacatgggttttcaccatgttggctaggctagtctcaaactcctgacctcaa

SEQ ID NO: 385187 - DNA, 567 bp, Homo sapiens
accatgatcttgtacgtaaaaaatcctaaagaatccaccaaaaaaaagaggcattagaactaactatgagttcagtaaggttacaggatacaagatcatacaaaaatcagttgtgtttctacacactagcaatgaacattccaaaaattaagaaaacaattcaattttcaatagtatcaaaaagaataaaatgctttggaacaaagttaacaaaatgagtgtaagacttgtatactgaaaactacaaaacgttgaaagaagtcaaataaatgaaaaaacagtctatattcatggatcacaagatgctaagacggcaatactcttttttttctttttttttttcctttatgagacagagtcttgctccgttgcccaggttagcatgcagtggtgcaatcttggctcactgcagccaccacctcccaggttcaagtgattctcctgcctcagcctctgaagtagctgggactacaggcacgtgccaccatgmccagctaatttttgtatttttagtagacatgggttttcaccatgttggctaggctagtctcaaactcctgacctcaa

SEQ ID NO: 385188 - DNA, 587 bp, Homo sapiens
tgcaagttatggggcaaagctcaagggagagaagaaaaggcacttacaaccatagagccttggaacaagtcatttctcagctgtcgctcagcccaggttcttcagtctcccaaaagatcacgttcagcaaacatgcagagtaccaaaaaagggacccagtagagtctctcagttggacttcagcatttgcagcctgtaccttggaggttccctgctggggrgcaaaacccatctcattagcctaggctttctgctttccacatagcatgtcaagctgtgagtctctgcacctgtccatcctctggagaattcagtcctcaggtgcactcaagaatccctttggagatctgtgctgcgcaaagaggggacacgggtcaatggcattagccttacgttggagtttgttagaaatgcagaaactcatgcctcaccccagatctattcaaaggaatgtacatagtaacaagatccccagatcatttgtgtgcaccttaaagcataacaaatgcatgcccttggccactgcccgcagccacgggcacctgctggcatgtcacccttatctcaattgttgggtagtgcttgca

SEQ ID NO: 385189 - DNA, 349 bp, Homo sapiens
cttctcttggttagagacctagtcagggccacttggatcaattagctgtaaaggaagagctcacgtggtcagtgccttgaggctgagatatgataccagtgaaacctctctcaggatgcagctgaagagattatacatatggacaaatgctatacgggaaatggctgttatcttttagcctactaatatactattacaacgctaggayagggagcagatcttcaatcacagagtccccagcagctagcagagtaggtcctcagtaagcactagctgtgggaatgaataaaccactgacttcactacattctttacatatagtagccaagcaaagggcaacagagttaag

SEQ ID NO: 385190 - DNA, 591 bp, Homo sapiens
catgcctctccttagctgaagtttaatgagagggggaacacagcagctacattacaatagagaggaggctgcattgctggcactggaaaaatgctactgactcgaataatagtaattcttaaaaatgcagtggtttccctcttaataacttgtgcttgctgcctttgtaatctatttttaattgataaatagaaaaagatggaaaaaayccatgtagttatgaatttcagatgtgtgtttgggggactactggaaattagtatgtacaaccatggcaaaaacaatgtgatttaaagtaattacaatagctctctctggaaatcattagtggttgtagcacttgagtaaaattgacccagaggagaggaactataatttgtttgaggaaaggaggttacaaattggatgaaactttccagcctaagcaattcatcccacaacatattgccttaaattgaagtagagtgggcagatctattgaaataaagcttactctctgctgtgcatgtacaatgtattaaggtattacttccaaagagaatagaaaagattgaacattttaaaattttattttaaggaggaaatttgatt

SEQ ID NO: 385191 - DNA, 591 bp, Homo sapiens
catgcctctccttagctgaagtttaatgagagggggaacacagcagctacattacaatagagaggaggctgcattgctggcactggaaaaatgctactgactcgaataatagtaattcttaaaaatgcagtggtttccctcttaataacttgtgcttgctgcctttgtaatctatttttaattgataaatagaaaaagatggaaaaaatccatgtagttatgaatttcagatgtgtgtttgggggactactggaaattagtatgtacaaccatggcaaaaacaatgtgatttaaagtaattacaatagctctctctggaaatcaytagtggttgtagcacttgagtaaaattgacccagaggagaggaactataatttgtttgaggaaaggaggttacaaattggatgaaactttccagcctaagcaattcatcccacaacatattgccttaaattgaagtagagtgggcagatctattgaaataaagcttactctctgctgtgcatgtacaatgtattaaggtattacttccaaagagaatagaaaagattgaacattttaaaattttattttaaggaggaaatttgatt

SEQ ID NO: 385192 - DNA, 418 bp, Homo sapiens
gagcagcagccttgacctccacccactagatgccagtagcaccacccactagccccagttgtgacagtcaaaatgcctgcagacattgccagatgtcccctgcagggcagcatcacmcccagtggagactcactgaactgggagaagaggctggagaatggagaaaggtgggaaggggagaggtatacaaggagaaaagagaagcattgcaaaggtcatggggtcagctgagctactggaggctggagagggccagggtaggggctggcagtgcactctgagaggcagacagggccagaccctgcaggctgagaaagaaggaaatgagttgtctgctccttggtaaagaaaacagaaacattcagagagagggtgagagcctacaggactatgacaggatctcataactgtaatcatt

SEQ ID NO: 385193 - DNA, 544 bp, Homo sapiens
ttctgagtatctcgctggacctcatattgatccactacattgatgacatggcgctaaatggctgaatgatcaagaaccagctagcatctgctccagaggtgggaggtaagccctaggaagattcagaagctcaacatcagcgaaaattttaaagatccaatgatgatgggcatgctagcatatcccacccaaagtgaaagacagatattacatcttgcgctccccattaggaaraaggaagcacaattccttgtagacctctttaggttctgaagtcagcacatttcacacttgggaatgcggctccggtccatgtgctgggtgtcttgaaaattaccatcattgagggaacccagagcagaaaagggttctacagtaactcctgaacatttgagccagtgacccagaagaccgtatgatgtttgagtaccggtggtgggaaaatatgtcatgttagtttatggtgagtcccagtgggacaatcgttatgcagatcccagatttctggaacaaagccatgccatctgcaaggaagaattatttg

SEQ ID NO: 385194 - DNA, 611 bp, Homo sapiens
ttctttcacaattatcaccagaattgaattaaaattcagatgtgatcatgtcttgaaatgtagaaagagttatgaaaatgtaagacttactaagttcacttatcgaacattttttgaccacctactatgtgctatgccttggactaggctagagatacaacagtaaacatcttgactaacggagattatgctgctatcttgaaattttgcctgttcccaaaagcccccagcatattaattttgttaaatatatattcccttattatatatataaaacatatatatcctcattttatatatatatatatacatataaatatgtgtcaactactgtgttgagagctcattatgtatatgtttctttatttaaccctcaaaataattctgtgaggctccagaattcctttttccaagtgagaaaatgaggctcagagcattgagtgaacttgcaggtaaatgattgagatggaatttggaaccaaagcytaagctttaaactgctttattcagtggcctttggttatctcatattcactagaaattggaaagatctgtcaggaggcctgccatgatgcagaagtcctggatgccctgcaaatgtctatgtgaat

SEQ ID NO: 385195 - DNA, 554 bp, Homo sapiens
aattgaatcatggaagcagacttattctttgttgtgccttatgattgatttgtcatgcgattggttgtttgagaagtgtgtggcatttccccacctacccccacctcctgtccaccacgtaagatccgtttgcttctcctttaccttctgctatgattgtaagtttcctaaggcctccccagccatgctttctgtagaggctgtaaaaccgtgagttgattaaacctcttttcttcataaattacccagtctcaggtatgtctttatggcagtgtgagaacagactaatacagatatctgttcatatttttgtagctctttttctgtaaagctttcttctcttcagaactctagcacaaaacttccaaccacctcagctttattgaactccagtatcaaaaactcatcaagaccactgcatacttatcatgatctccttccctgtgttgtagtctagaatgtttttcaagaaagacaggacactcataggaatcatcttttttgtttctcttctctcaggtattacrtttatgcactgtctgctgccaaagatc

SEQ ID NO: 385196 - DNA, 538 bp, Homo sapiens
ggttgaaagcagccctgtgtacaagatgaaacatgagctctggagtgatgcagacctgatgccaatcccagctctgctccttcacatgaggtgatgggcaaattgttgagctcagtttcctctttkgaaaaacagagataacatctagcctgaagagtcacagggattgggaaacaacatatataaaaaagcctggattcccaggcaagatggccaaataggaatagctctggtctgcagctcccagtgagaccaatgcagaaggtgggtgatttctgcatttctaattggggtacccagttcatctcattgggactggttagacagtgggtgcagcccacagagggtgagcagaagcagggtgggttgttgcctcacctgggaagcagaaggggttggagaactccctcccctagccaggggaagtcatgagggactgtgctgcgaggaactgtgcattctggcccagatactatgcttttcccacagtctttgcaatctgcagaccaggagattcccttggatacctacaccacca

SEQ ID NO: 385197 - DNA, 538 bp, Homo sapiens
ggttgaaagcagccctgtgtacaagatgaaacatgagctctggagtgatgcagacctgatgccaatcccagctctgctccttcacatgaggtgatgggcaaattgttgagctcagtttcctcttttgaaaaacagagataacatctagcctgaagagtcacagggattgggaaacaacatatataaaaaagcctggattcccaggcaagatggccaaataggaatagctctggtctgcagctcccagtgagaccaatgcagaaggtgggtgatttctgcatttctaattggggtacccagttcatctcattgggactggttagacagtgggtgcagcccacagagggtgagcagaagcagggtgggttgttgcytcacctgggaagcagaaggggttggagaactccctcccctagccaggggaagtcatgagggactgtgctgcgaggaactgtgcattctggcccagatactatgcttttcccacagtctttgcaatctgcagaccaggagattcccttggatacctacaccacca

SEQ ID NO: 385198 - DNA, 511 bp, Homo sapiens
gttttcaaaaaattctgctgggtctattagaagaccagatacatggataaaaatgaatcttgaactcctctcctcaaaccgtagacaaacattagttccagataaattttcagatgtaggacttgagctacattttagatcaaatggacctaacagacatgcacattcttctcaagcacccacagaacattctccagaatagatcatatgtttggccacaaaacaagtcttaacaaatctaagaagatggaaattatgtccaatatcttttycaaccataatagtatgaaattaaaaattagcaatgaaaggaattttagaaaattcagaaatatgtgaaaatttaatagcatgatccccaaaaaccaatgggtcaaagaagaaattaaaaggaaaatataaaaatatctcaagacaaatgaaagtggaaacacaatatagtaaaatttatgagatgcagctaaagcagttctaaaagggaaatttacagcaataaatgcctatataaaca

SEQ ID NO: 385199 - DNA, 537 bp, Homo sapiens
agccatcttatactacaattaaaccctcaagagcatcaaaaaagataaaagccaaaaattcatccaaaggacagcaacttcarggaatatcagctcacaaagatgagaaataaccagtacgagaactctggcaactcaaaaagctagagtgtcttcttcttttttctttctttctttttttttttttttttttcctgagatggagtgttgctctgtcacccaggctggagtgcagtggcacgatcttggctcactgcaacctccacctcccaggttcaagcaattctcctgcctcagcctcccaagtagctgggactacaggtgcctgccaccatacctggctaattttttgtatttttagtagagatggcatttcaccgtgttagccaggatggtctcgatctcctgacctcatgatccgcctgcctcggcctcccaaagtgctaggattacaggcgtaagacaccttgcccagccgccagtgtctcttcttatctctaaacaaccacactagtttcccagcaatgattcttaacc

SEQ ID NO: 385200 - DNA, 597 bp, Homo sapiens
gtgtcctggctgagctgagcagttgtgcattccaggactgagctgatgtagtacccccacataacaggagaacagagcagtggctgagatgagacaactgccctacaggtcaaacaactttagtatacagatgccctggagctggaccagccttctagagtctgagctgctgagacgtccctcttcctgggaagtggagtcacctctgtgctgttccctgctccccagggcctgaacaatagctgtactccaccattctagggtacttgctagtactgcatatggtcycacagagtctgggatgtggccaaaccccaatatcccagggtctagagtcactactatatggtgctacatcctttaggacccaagttgccactgagctctattggctcaggttctcaaagtagtcatacactgatacccaactccaaaacctccagaggacgccttccttcccagagtcaggccagtgttgtgctctgccctctaaaggtcgaaggacatttataaaccagccccctagactcaagctgctggggggaggggggtgggcaggaaaaggggtggtactctgaatcacagatcttagctcag

SEQ ID NO: 385201 - DNA, 597 bp, Homo sapiens
gtgtcctggctgagctgagcagttgtgcattccaggactgagctgatgtagtacccccacataacaggagaacagagcagtggctgagatgagacaactgccctacaggtcaaacaactttagtatacagatgccctggagctggaccagccttctagagtctgagctgctgagacgtccctcttcctgggaagtggagtcacctctgtgctgttccctgctccccagggcctgaacaatagctgtactccaccattctagggtacttgctagtactgcatatggtcccacagagtctgggatgtggccaaaccccaatatcccagggtctagagtcactactatatggtgctacatcctttaggacccaagttgccactgagctctattggctcaggttctcaaagtagtcatacactgatacccaastccaaaacctccagaggacgccttccttcccagagtcaggccagtgttgtgctctgccctctaaaggtcgaaggacatttataaaccagccccctagactcaagctgctggggggaggggggtgggcaggaaaaggggtggtactctgaatcacagatcttagctcag

SEQ ID NO: 385202 - DNA, 545 bp, Homo sapiens
tcaaagaaaagcccagtgcttcatgactttactcttgaattctacaaacatttaaagaactaatgtcaattcttctcaaactctttcagaaaattgaagaggaggaaattctctgaaactyttttatgagggcagcattagcctaatatcaaaagcagacaagatcacaacaaaaaaagaaaactagagaccaaaatatctgatgaacttaaatgcaaaaatcctcaacaagatattagcaaaccaaattcacctgcatattaaaaagatcatttaccatgatcaaatgagatttatatcacagatgcaagcatggtccaacatacacaaatcaacaaacatgatacgtcacatcaacagaatgaaggacaaaaaacatgataatctcaacagatgcagaaaaagcatttgacaatattcaacatccctttatgataaaaactctcaacaagttaagtatagaacaaacataactcagcacaagaaaggccatatatgacaagcccacagacaacatcatacttaatagagaaaagttgaaagct

SEQ ID NO: 385203 - DNA, 545 bp, Homo sapiens
tcaaagaaaagcccagtgcttcatgactttactcttgaattctacaaacatttaaagaactaatgtcaattcttctcaaactctttcagaaaattgaagaggaggaaattctctgaaacttttttatgagggcagcattagcctaatatcaaaagcagacaagatcacaacaaaaaaagaaaactagagaccaaaatatctgatgaacttaaatgcaaaaatcctcaacaagatattagcaaaccaaattmacctgcatattaaaaagatcatttaccatgatcaaatgagatttatatcacagatgcaagcatggtccaacatacacaaatcaacaaacatgatacgtcacatcaacagaatgaaggacaaaaaacatgataatctcaacagatgcagaaaaagcatttgacaatattcaacatccctttatgataaaaactctcaacaagttaagtatagaacaaacataactcagcacaagaaaggccatatatgacaagcccacagacaacatcatacttaatagagaaaagttgaaagct

SEQ ID NO: 385204 - DNA, 626 bp, Homo sapiens
ttattaaatagcttctacctcaagatgccctatatgtaactgaagattttaagtagctctttctggactttattaatcctataactacagatttaaagcagtagataaacctatttaaataagttttattaataaaattgactctatattatactacataatagtagcattatccatgaacttttatttccatctgcaaaaccagtactaactgttgacattatcttatcacacattattttcacttcacaaaagttatggcttatagagaattawaaacttattgcttataaagagttataaagagtatagtaagaccacgcaggcaaatagatgctgagtggctggcttggatcactctttgtaacccaatagtgatggcacctagagttagcttgggagatgttagcttctcactgcaaaactctcatgagcaccacccataaaatattctaaataaaaacataatactaaataataattatattatttagtacagaaaactaatgtttcttcaatctcatgtttagcacaaacaaaaatttctttagaatgttttgttacttttattaatttttaacatatagtctaggtaaaaaaatctttgcttgctatgcaaatagtca

SEQ ID NO: 385205 - DNA, 598 bp, Homo sapiens
gatttggaatcacaaataagcaaaacaattccctcttaaaagtgcttttgaagtactaaacaactaagaataatgtccagattcatacatggctgttaaaatcatttcatgttcaagtcacatgagagaaatggattgaaagtattcctttgtagagtgatttcctccctttggaaatatttctatccacagcataattgcaatgaacttcacacttgccaagaactggaaaagtccttttgccacaagctctttttaatttgaaattattagtaagttcccagtttgaggaaaatagtacttcacataggaaagcctgactccagttaaattaaaataaatgagtcaaaacactgaaaagtcatagacactcagagttagctgtattaacaygaaaatgaaagttctaaacccccattataccaataaatatattagcaagtttgaaaaaggaaattattcaacatacctagtaaatatgtaactaaaaatattctaagtttaccttatttttacattatcacatttttgaaagaacagagattttatatccttaatgacatattaattgtatataaatcaaataatccttttcttc

SEQ ID NO: 385206 - DNA, 498 bp, Homo sapiens
catggggttgctagtcattcagccttatattctacaccattttctttatgatccctcatcatgtctaccatatgcagatgcactcacatgcatatacatgtatatataaaaatatatgcacacatatatacacaggttgataaaaatactgatgctttatgtgtgtgtttgtatakgcatatgcacagaaaaatataaatacgttcatagttatgacctagtgtcattgaaagaaggctaaaattattacagtatttgagaggtaaagaagtgcatattcatttagaaaaaattattatctcctcctccaaaagaaggtaaaagtgtcatttaagtatttagtgggttaagcttattattttttaaaactcactaatacagaacatctcattcccagtcattgccaaataacagatgttcttgtatattagaaacagtaccattctgtaagaacaagtcagatcaacaagtatttattaaacacatttagtataccca

SEQ ID NO: 385207 - DNA, 573 bp, Homo sapiens
cagtgtttgtctgcacaatgacaattagaaatgcgaatgcagaatccaaactgtgaacaatagcaatgtgttcagtgacatgattaagtatagaaaaaccttttctttcttgctctgtcacctaggagagagtgcagtggtgcaatcatagctcactgcggcctcaagcaatcctgggctcccaagtagctgggactacaggcatgcaccacctcaggctcccaagtagctggtactacaagcatgcaccaccacactgggtaattcttttttatttttgcagagatagagtcttactatgttgcacagattggactcaaactgctggtctctggcaatgctcctgtcttggcctcctaaagctccgggattattagcataagacaccatgcctggcctaraaagattcctttttaaaatggactctgggattaaatttgttagaataaaaatttcatgaaaggaaaataactttaagaaaatgaattcagtctgagagaaaattgaaattatttacatttctacccaaaagcaaacttgttaaacagaagtaagatgaaaagagaaaaaata

SEQ ID NO: 385208 - DNA, 573 bp, Homo sapiens
cagtgtttgtctgcacaatgacaattagaaatgcgaatgcagaatccaaactgtgaacaatagcaatgtgttcagtgacatgattaagtatagaaaaaccttttctttcttgctctgtcacctaggagagagtgcagtggtgcaatcatagctcactgcggcctcaagcaatcctgggctcccaagtagctgggactacaggcatgcaccacctcaggctcccaagtagctggtactacaagcatgcaccaccacactgggtaattcttttttatttttgcagagatagagtcttactatgttgcacagattggactcaaactgctggtctctggcaatgctcctgtcttggcctcctaaagctccgggattattagcataagacaccatgcctggcctagaaagattcctttttaaaatggactctgggattaaatttgttagaataaaaatttcatgaaaggaaaataactttaagaaaatgaattcagtctgagagaaaattgaaattatttayatttctacccaaaagcaaacttgttaaacagaagtaagatgaaaagagaaaaaata

SEQ ID NO: 385209 - DNA, 525 bp, Homo sapiens
tctattgtttaagctacccagtctgtagtattttgttatgccagcctgagtagacgaagacagcatcaatgtcttacacataataccagcattaatttggtaaatatttttcttcataatttgagggagaagcaggagctgtcaattccagtgtaagtttggtgtatgtgctctctcttattctaggcagaatagtagtcctgagagcataggcctcaggctttaagaaagacacccttgctaattgctaacatacctcacttgggcaaattacttaatatctctcaagtctctaattcttcacttataaagtggagcctctaattcttcacttaagaacatgktggttgggaaggctgaaataatttaactgaaacatttagcaaaattcttgacccacagcaaaggaaataaatattttcaaagcaaaacaacaagaactaaaaacaacactgaaaccaaagacatctctcaggctgtactctcataaaatattacttcttttatatataacctctttgaatt

SEQ ID NO: 385210 - DNA, 562 bp, Homo sapiens
gtggtgtctacttacacaatggcatactagataccctgaagaacatatcaccraagagacaaaaatctcccagtaccacccaatctctccctcaaaaaggaaccaaccagagctggcatggtaagccgaaagctgtgcatagtaagcaagcaggatatcatcctgaggacaaacatctctagtaacactgtgatcaggatacaaagctcagggatagcagcaaggtggaagaggacaagcagggactttcacattcagtttgaacctttcaagggaaaataagctagcatggtttttactagatttattctatgtattttatatttttgaagttttttttaaaaaaaaatccttctatttagtaatgatacagaaatccaattgcattttgtttattggccttgtgtccagcaacactcttaaactgtactgccaattgtaataatttgcctttacattcttggagttttctatataattagtcatattatcatcaaatagaattttattttttcaactgttatatctcctatttctttttgtcttactacactgaattgga

SEQ ID NO: 385211 - DNA, 562 bp, Homo sapiens
gtggtgtctacttacacaatggcatactagataccctgaagaacatatcaccgaagagacaaaaatctcccagtaccacccaatctctccctcaaaaaggaaccaaccagagctggcatggtaagccgaaagctgtgcatagtaagcaagcaggatatcatcctgaggacaaacatctctagtaacactgtgatcaggatacaaagctcagggatagcagcaaggtggaagaggacaagcagggactttcacattcagtttgaacctttcaagggaaaataagctagcatggtttttactagatttattctatgtattttatatttttgaagttttttttwaaaaaaaatccttctatttagtaatgatacagaaatccaattgcattttgtttattggccttgtgtccagcaacactcttaaactgtactgccaattgtaataatttgcctttacattcttggagttttctatataattagtcatattatcatcaaatagaattttattttttcaactgttatatctcctatttctttttgtcttactacactgaattgga

SEQ ID NO: 385212 - DNA, 468 bp, Homo sapiens
tccttttgtggctctagctcaaagtctacattaaaacagtgcattagcctctcttaaaactttccccactgcctaggagtaggtagaatacctgtatgacctggtttttctatagccactgctgaattatcaatagcatccccattcattctcaaaagtatctggtttggacaataaattacaaagtcactgcaaatgtacaggcaagaaatgggaaactgaaaagaacatagaggaaagtaaaaattttctccctcagtactagaataggattgtttaaaatacaacttgtgggccttccattcaaaatgcaatttgactttctaagaggagcaagtgcctcccaccagtagcaagatgaccaagcttttccctctgccacatcagtgtgggtgaaggaagacttccacgaaagtggcttctaaaagrgaagatacttgggtatcagcagtccttaacacttcacta

SEQ ID NO: 385213 - DNA, 539 bp, Homo sapiens
atgactgactgaatgagtgaatgcatgcacaaagaggtatatataatgatatccatttcagcattctttgtaataaaaaagtatctaacattagagaattgttcagtaaactagataaatctatacaatgaaatactctaaaagaatcwggtgggtctatcatctctaactgttggcacagggaaaaacagtgaagtagttctagatgcactaataccaaaaaatagtcaagacacagtaatcaattaataaaggaatttgcataaacaatataaatagtatgatataatttatagaacacttaagagttacctctgtttacatagattaggtagggaaggtagtaagagaggattttactttatcagaattgtttgaaatatttgtagcaaggatacatatgtgtatcacttgtatagtgtgaataaagataaataggtcaaatgttacacgtaggataggaaaagattcctgctttatctctgcaaaaaataaaacacaaaatttgggattgttgagatttgtatagtataccaaaa

SEQ ID NO: 385214 - DNA, 563 bp, Homo sapiens
tcatatacatatacactgtgaaatgattaccatgttttttcttcttgaaattttattggtctatgaaatctagaagtttggaaaagtgtttaatgtagggcaattctaaataaaaattcattattattcagttttattcaacaagctttcattgaacatcttcattttgaagttcttaaattgccttcacatttgtaagccttattttccaacaaagtatctggtccttaagggcataaggacctctccaaygtcttcagaatttctcaaggagctaacccagccatgtgggtgcacggtagacattcctaaatgactgaatcagatgatggtctacacttgtttttgtgtagaaatgagaatgagtcactgtctggaacttgtcccccgacttgggaatgttaagcctttggaccacttttccctggctccctggtgggcctttcatccttgcaagggcctcagggacatgatggagtttccttttctctttaatgtccctttcggttactcaaacctctaggattcttttacccactctaccagtttatgctgcatactgg

SEQ ID NO: 385215 - DNA, 586 bp, Homo sapiens
atgatggtctacacttgtttttgtgtagaaatgagaatgagtcactgtctggaacttgtcccccgacttgggaatgttaagcctttggaccacttttccctggctccctggtgggcctttcatccttgcaagggcctcagggacatgatggagtttccttttctctttaatgtccctttcggttactcaaacctctaggattcttttacccactctaccagtttatgctgcatactgggatggagctttcctaggttcctcttttctcttcctgaaaaaacacacaggctctttttacattgaattttaatactaatccctcctggtaattagacatgaaataacaaaaatggtaaactatatcaaattacaatggttaagaaatcttactgaattctatcaggcatgtttcctggtctataatttttgacttcttgagggaaatgctaactakgagtcccaaacatttattctttaaggtaaatttctccacaagtcttattctaaggctagcatatccaatcagagaaagaaaattaatatgatctacgttaattaggtgctatcctaggctaaataatagcca

SEQ ID NO: 385216 - DNA, 385 bp, Homo sapiens
tcttaaatatcattaactttttcctttatagcactttttaagttagamatcattaatgtctgtcttccctgctagacacaaaatacattaagagaatttggtctgcagtggggaaagacaagctaagtcactgtctatgaggagatcatgttctaatgagcccgataagttgttaaatgagtaaataaattaacatataattagaaacagtataaataataacattaatcggtgcaaaagttattgcagtttttgccattaaaagtaagcgtaactttaatgagagtgtgaggaccaggaaaggcctttctaaggacctgatatgtaagctgagactcagaggagtctcagatactactcagaggagtagttagtatgggagagg

SEQ ID NO: 385217 - DNA, 578 bp, Homo sapiens
gttaattcacaccttattttgcctacaagcaaagcttgagcaagggggaaggtgtgatgggcccgtgcacatctcaatttctccttccttacccaacctcctcaaaataatttttattaccctakctttgccaaaatgagttcatcttcacatctctagtaatttcctaacactgctattatttatgtgagctctaagtcagtcgagccctttgtttattgtgattattgttttcctgaattttgtcccatgaagtgattcccaacactttttctgttgggttaagaatattatgatttaaatctgtggattgtgaaaaatttctactagttgaaagtctttcagtggcctataatttaccttatggggtagggaagtatgcaagatatgtattaatagcagatttggaactatggaagaggtgaaagatgtggaatacctaaaatatcagggaggtgctcaagtaaataaatactcatatcattagatgcatatttatgtgtgtgtgtgtgtgtgtgtgtgtgtatgtgtgttagggggaggatgtgtgtgtgtatgtgtgtgtgtgtgtgtgtgtg

SEQ ID NO: 385218 - DNA, 512 bp, Homo sapiens
acacctggctaattttgtatgttttttagtagagacggggcttctccstgttggtcaggctggtctcgaactcctgacctcaggcaattaaactactaaaattaagtatttgagagcatgaaagataatttaaaaagcatgtactgtaaaccaaccaaaaacagataatcttggaaataaatttttccttagtattctttaaaataataaaatatactgcaaaattttcaagcatttccaaatcttactttgtcatgcaatacttgcttatgcagcagtgaccttgttgatgctatgtacaatctgtcattttatggattatccctactaggtagatgttaaccacttcttgacaagaaaggcaggacacagaaagttgaatggtttgtcttggtttctcacaaaataagaaataatcagaatgagatttttatggtgtgggctctcctgcctgatttattattttgaactttttatgtggttctgtctatggagaaattgaaaagtaaaca

SEQ ID NO: 385219 - DNA, 480 bp, Homo sapiens
tatgaaagtaataataatatctgtattaccaagtattgaccactaatgatgtgccaagggttttatacacattattttataaactaatattgacaatatcaaagatgcccttccaggtaagtatcactagcactgttttgcagatgatgaaactgagccttagcaaggttgagagatacattcacagacacagaagtaacaagtgagggatctggaattgagttctaaaatccttgccctttgtctgaatagttactactattttatttcacatataattcaattttcctttctcagycgtcttctacctccagttccttttcttctgtctgtacctacattcacttctctcctcttccttttcttcccatctttgcctcaagctggccacagggctatcacatctgttaccataatcacatcttaagaagcaggccaggccatagaagggacttacttaaagcccttccagctctacac

SEQ ID NO: 385220 - DNA, 668 bp, Homo sapiens
cattgtatgaatatgaattatgtaaaatctgtgagaytccatatatccaaatatgatttatttatttatttgtttgtttgtttgtttgtttatttatttattggcttcttgcagcaaccaaaagccattcacagtgatatctagtgcaaggtggttgatgtaattggcctaaaatatgttgtcataataaagtaataacattaatataaattagtgtggttataatctgacttacaaggagtttccaaaaatgaaaaaaaaaatactttaaacacgtaacacatgttctgtttaaatcttttcatgaaaaatctgaataaagcctataacacgactggctcctacagtgatatagaaacaaataagagagttatcaactcttttgtggcccagtccttaactaaacctatatttaagattacttgcactgtgagaagtcaatatattatgtgactgaggcaaatccacaataatatatggccctgtcttctcatttttaatcctaaaagataaccatatcttctcactgtagaaaacttttccagtagacaacatgggaatttatacccaagattcatagaaacatcatgtgatacatgctacaagtcctttattgaatatttactcacaattattgctaattcattaactgctgaagggatcaatgg

SEQ ID NO: 385221 - DNA, 668 bp, Homo sapiens
cattgtatgaatatgaattatgtaaaatctgtgagattccatatatccaaatatgatttatttatttatttgtttgtttgtttgtttgtttatttatttattggcttcttgcagcaaccaaaagccattcacagtgatatctagtgcaargtggttgatgtaattggcctaaaatatgttgtcataataaagtaataacattaatataaattagtgtggttataatctgacttacaaggagtttccaaaaatgaaaaaaaaaatactttaaacacgtaacacatgttctgtttaaatcttttcatgaaaaatctgaataaagcctataacacgactggctcctacagtgatatagaaacaaataagagagttatcaactcttttgtggcccagtccttaactaaacctatatttaagattacttgcactgtgagaagtcaatatattatgtgactgaggcaaatccacaataatatatggccctgtcttctcatttttaatcctaaaagataaccatatcttctcactgtagaaaacttttccagtagacaacatgggaatttatacccaagattcatagaaacatcatgtgatacatgctacaagtcctttattgaatatttactcacaattattgctaattcattaactgctgaagggatcaatgg

SEQ ID NO: 385222 - DNA, 529 bp, Homo sapiens
catgtgttgatcattagtagaattggtatgccacaatatgaattaaaaggaaataagggctgaagttatggcacaggtgaaagaaaayggcagtggaagggccctgtgattagcgattgggttacataaagcaagtccaagacttcagagctcactgtgctgactagttaatgtaggtcttgtagggatgctataaggagagaaataaatgaagataaaagtaccatatcttatgttaacaactcattaggcaaaaaggaacggtagcctgaaaaatcagtgaaaacactaaatataaaggtaggtatttgtcattgattcataataaattatgaacaaactgaaagcacataatctatgtccaaggtttggaattaatgtaccatggaatgtccaagctactactttacaatcagtgtttcttataggatttttactgctaacagtagtataaaatattaaaattgaaatatttttaaataacattgtttaaatatttgtattattaaaattattttatttataagtg

SEQ ID NO: 385223 - DNA, 553 bp, Homo sapiens
  misc_feature (1)...(553): n = A,T,C or G
tcatttcagcttcacaacactgctatgaggcaggtaatttagtcaaagaaagtaagtttcaagagggtaagatcacaaagccagtaaatggcaaagctggttttctgagtccaatcttgaccttttcttcaaaagggagcttctaacactaaagtttacctggtttagggggaagctccaggaggatcagctattagctcaccctaagcacattttccagcatgataatattttcaccaactttatggttagagtctttttttttttttttttgagayggagtctcactctgttgcccaggatggagtgcagtggctcaatctcagcttactgcaagctctgcctcccaggttcacgccttctcctgcctcagcctcntgagtagctgggactacaggcgcccaccaccacgcccagctaatttttttatttttagtagagatgggctttcaccgtgttagccaggatggtctcgatctcctgacctcatgatccacccgccttggcctcccaaagtgctgggattacaggcatgagccaccacgcctggcca

SEQ ID NO: 385224 - DNA, 598 bp, Homo sapiens
gattagggcattttacaatcctcttgtaagacagaaaagttctccaagtccccacttgacctaggaagtccagctggcttcwcctctcagtgatacttaggaatattgtaaaagagcttgatttcagaacatctaaattttccaagttaacagtaagagggcggtttttgtgcctagaagtaagatcacttctttccagatccacatgctagctatgtaatatgggaattgcctagttctcaaaacctcaatgttctcaattaggattatgataatatctgcctttctgtggtataaacattaaaagtgatcaggtataccctgagtgctcaacacatgtttattgtttttagtaataatagtatcaaaattaatctcagagattggagatcagaattcttaaaaattatttgggattgtggttcctcactctttaacatcctcctagagaatgcccaaggaaaacttcagccaaacgttcagttttctattaccagaatgagaaattctattccaattccctgactcctactgtacttgggagagctgaccacgaccatctgggaagacaactaacagtctcctttggctctcctac

SEQ ID NO: 385225 - DNA, 590 bp, Homo sapiens
acacatatctgcatgtattcatgtgctatatgctgggcactacactaagacatttaactacagtattgaggaattatagacaggttagcattgcctaattatagagagatctggaaactagctggtgagccctgttttgatgacagtggaasgctatggctagggaagtgatatggtgtgatgagagtaccctttggggaagcttgattctggctgtggcctgcagtgagctgtgggcaaggaggaaagaaggaatctattggttctgacaatgagaaactgatcccatggtttaagaaagtcatcaaatgtgttctcctctgccaaggccccaggccaacaggcatataaaaagtataataattcagactatacgaaatgcaataattcattaaataggaagaaatagatctctaatataagtaacggactataatgaataggttcttgtgttattttataattcaactggtaaaaaaagaatgcatcactgaactcactggaaaaatatttaaattttgtgctgatttgacacaaaataatggcattgatgaaaataacataaaactcctaacacatcatacaactag

SEQ ID NO: 385226 - DNA, 590 bp, Homo sapiens
acacatatctgcatgtattcatgtgctatatgctgggcactacactaagacatttaactacagtattgaggaattatagacaggttagcattgcctaattatagagagatctggaaactagctggtgagccctgttttgatgacagtggaacsctatggctagggaagtgatatggtgtgatgagagtaccctttggggaagcttgattctggctgtggcctgcagtgagctgtgggcaaggaggaaagaaggaatctattggttctgacaatgagaaactgatcccatggtttaagaaagtcatcaaatgtgttctcctctgccaaggccccaggccaacaggcatataaaaagtataataattcagactatacgaaatgcaataattcattaaataggaagaaatagatctctaatataagtaacggactataatgaataggttcttgtgttattttataattcaactggtaaaaaaagaatgcatcactgaactcactggaaaaatatttaaattttgtgctgatttgacacaaaataatggcattgatgaaaataacataaaactcctaacacatcatacaactag

SEQ ID NO: 385227 - DNA, 566 bp, Homo sapiens
ttgggaggccaaggtaggtggatcatcttgaggtcaggagtttgagaccagcttggccaacatgatgaaaccatgtctctattaaaaataataataataataaaaaatttagccaggcgtggtagtgagcacctgtaatcccagctacttgggaggctgaggcaggagaattgcttgaacctgggaggcagaggttgcagtgaagcaagattgtgccactgcattccagcctgggcagcaagaatgaaactccgtctcaaaaaaaaaaaaaagactctgaaagagtggagcaaaagaaggccagtgtaccagagatttcagtgtaccmgggatttcagggcccaaggaatgatttggaaggaagttccctgggttctttttgcctcttgtatcctaggcttggagcagaacaagctggcaacccagaaatgccaatggatgcagacaaaaaaagtcctagcaaaagcctgctctctgtagccatgggaccaaaaaaggggcagccaagcaagagagaggaaaactcttacacaataatgactctattctagccaagcaccacagca

SEQ ID NO: 385228 - DNA, 550 bp, Homo sapiens
  misc_feature (1)...(550): n = A,T,C or G
tttcctttggttctgctttatatcatctatttctttactgataatttctattttaatatgtttcaggagtgattgcttctctgagctttttattattaactactttaaagtctataatggcttctgttgtcttttcccattagaattattttcatggttctttatatgctgaataattcgggattgtattctagatatttgaatgttacatgaggagacgcggcttttaagtaagtcctatagaaaatgttgatactattgttttattatagcaggaaattgatctggtgaggctcaggcgnataactccaaccttctgtgagttttggtcccaatgtcacttcagttttcaaagcttttgcagtgctatttggattcatcccatatgggccccatcttgtggtctgaggcctgacagggctcacctgcaagctcggttctcygctgtctttgatatggacttaggatcagctctacccataagcactgtgaacatgtgagtaggtggggaagggctcaagtgttcataaaaaactttgtggagtcactt

SEQ ID NO: 385229 - DNA, 542 bp, Homo sapiens
actaatacaaaaggtaaaaatattttctgtcttgctctttacagacaaaggtcaccaatccttgctctagacagcggcaggctgctagggcctatctgttgccctgatgtaggccccagtagtttccctaacattcacatcaccaaagctgtctgctgctttttgaggagaggtatggagaggttaggaatgtgggagagggggacttattggaggaacaagtgagacagagatgaaggcaatttaaagtcttcagaaaaagagaagggtaagatgacaacaagaatgaaaagaaaagaaagagagaaagcatctcaaaaaatgcataaatttataagcatatataattagatataaaaaaytacgattctaacataaagttttagctaatgcttaaatcagaacacatctgttacaggccaacaggcatataaaaattagaataacaatagtaagtcaccttggatttctataggtcttttcttccagtaagttcaaagcctttccttctaatctctcatctacttatataaaatttatga

SEQ ID NO: 385230 - DNA, 545 bp, Homo sapiens
agttaaagatgtatatgtagaccctagagtaaccagtaaaaaatagaaatagaacaaagaggcatagctaataagctaagagctgagataaagtataattagaaaaaatactcaattattccaaaagaaggcacgagaaaagaaagaagatgggacaaacatggggttggggtacaaatgcaggatagtagatggaacccagttgtatcaagaattacatcaaataaatggtctaaacattccaattaaaaagcaacaattaggttggcacagaggcaygtacctgtagtcccaaatactcaggaggctaaggcaggaggagccactgagcccaggagtttgaggctgcagtgagctattaccacaccactgcacttcagcctgtgtgacagagtgagactctgtcaaaaaaaaaaaattaaaaattaaagtaaaaagcagaattgtcaggttagcgtcaaaaaacaaaaaagcaagactcagtctatgctgtctataagaaacccactttaaatataaagacataaatagtttaaaagtgaaag

SEQ ID NO: 385231 - DNA, 578 bp, Homo sapiens
acactaatgcaacagtaaaatttggcttatttggtataaaagtcctaaaggaagcattgtaaaatacaaagttggcyttctttgggctgtatttgtataaatatgttattggtatgtgttccaaaattatgggaaactcttacaattctcataggacttaatgtttgttattaatactgataattgttacataaaatcattgtatgccacagaggtaaccaaaatttccttgtcaattgtggctttaatagtggctgtcctaactaagactttttgtcagccattccctggacaattgttgtcttgttttggtcctctttagaaagtgggttatactcagctataggactttctgctgttaaatgcaggttcccagtgactttggaaattgtaacattaaaatagagggaaaaactttcaggactctcagggagagccgaaatgttcatgaatatcaagcagaacaggagttaactgcatggactgaactaataaaagactaaagtaatctttttgactttttgcttaaaatgttgctgatcctttgttctgtttttcaaagtcgaggaaacttttct

SEQ ID NO: 385232 - DNA, 559 bp, Homo sapiens
atcatggggtcagtgtttcccatgctattcttacaatagtcagtaagtctcatgagatctgatgggtttatcaggggtttccacttttgcttcttccttattttctcttgccaccaccatgtaagaagtgcctttcacttcccaccatgattctgacgcctccccagacgtgtggaactctaagtccaattaaacctcttttrctccacagtctcgggtatgtctttattagcagcatgaaaacagactaatacaaatactaaacctcctgagaactcctttggaacaaatggccacagatccatctgtgactagtgtttttctgggtgcatcctcaagcaggctcaataaaccttgattgattgggccacctgctgcaatcactcattttggttgtcaagggctataaaaaatgaatttacaggaaatgataggaatgaattgaaaaatataaagaatagaagggaagttctagaactagaaaatataatatctcaaataaaacatccattagacagacttaacagcacattagagatggtagaagaaagactaagtg

SEQ ID NO: 385233 - DNA, 620 bp, Homo sapiens
tctctccctacagctgccataagttcttcaagtttatgcttttattaaatatttaagcacatattttcagggatgaaacatattctccgctcagagctgtgctagcagatgtatctcttctgccagtggggagctgggtttctggcaggcttatgaagtgacctcacgtaattagtgggaaatagagagatgtgaggcgttatgttatttgaagcttcagactggcccttattcctagaaggcacttggaagtcagcagcagtgtagggatatgcaattccagggtcggcaccacagaattaaagtgaaatgaataatacatgcygatttaaagtgaaatgtgtacctcctgaaagaaaatggtgacatttacattcttgccaccaaggcaaaaatcttttattcagtgaacaggctcctgcaagtaaagtttgcaaatgagaacttctttaacattcgtatggaatggtctaacccccattaattgtttatggagcacctgccatgtgctcaagctggttgtagagaggagctggtttcagaaatagcatcaagaatggcctctgtgactttgccagaatattgagggctgaatccaagcctgttagataatgtttctt

SEQ ID NO: 385234 - DNA, 671 bp, Homo sapiens
atatttatttgtttgtaaatgaatatacccatattaaaataattggctgacttatgagctctaccttgtatgtcaatattaaaaataaataaaacaaacattttcagtgttacctcagcaagccagcaacagttttctactatgtgatctacaaatctcaattcagtgggaatggaaatagtatcaaatagaaaacgtcattcctgaaatctttcctggagcatatcagtaataccaagaaaagagccagtaggcagggacaggttgccagagtccccactgagggtctacagttggaatgaactgtcattaatgaagggaaccaatgacctgagccaggccattacaaagaattgcagagcttctcagaattttgtcagagtgcaatgaggaaatgtagaagaaatcaaggagaagtttgaaaaacagtaaggggatgagtagcaaagagggtttaggtttagccttctcttaaaaagttcctttcaataaattcatgtgaagaaaatataataacagaaatccaaaaactggaggacatgttatctggtgaaaaggatacattagactaaatatsaatactgaagtattagggtctatgtatctttaaaataagaaatgctgaatttataaatttatgtttgtcattatgcctaggtgggtttggggct

SEQ ID NO: 385235 - DNA, 557 bp, Homo sapiens
ggaaaggaaggctgtcattcagcacattttctaatgggcctgtcccaaaagtacttagttctctagaggaattgatatggtttgtggtatggtttttggctgtgtccccacccaaatctcatcttgaattgtagctcccatcattcccatgtgccatgggagggacctggtgggaggtaactgaatcatgggggcaggtcattctcatgttgttmtcctgatagtgaataagtctcatgacatctgacggttttataaaggagagttcccctgcacatgctctcttggcctgcctttgtgtgagacatgactttgcgcctctttcaccttcagccaggattgtgaggcctccccagccatgtggagctgtgagttcattaaacccctttcctttataaatcaccccctttataaattataaaggaatttagaaattcctttataaattacccctagtcttgggtatgtttttattagcagcatgagaacaaaaccaatacagtttgattctgtgttcccacccaattctcatgttgaattatgatcctcaatgttgg

SEQ ID NO: 385236 - DNA, 390 bp, Homo sapiens
gaagtgaatgtgcttatctgttggtgagggaaatgggattcaatctttcaaacccaaggcaagaacaaattcatactcacaagggaagtaaggaaggacaaaatgaaggtgaacaaaacattaatgtgggtggggagatggagggaaaacaaaaactaatgtgtatcgagtatgtattacttgctagacttttttttaggttttttwctttttatacattccatctcattgaatcctcccagtaaccttgttaaatacccatttagaagttaataaaattgaggctcagagggattaagtatgttgcccaaggccacacaggctcagctaacaagtggcagaacagggttctgaacctaggctatctggctccaaaatgcatactcattt

SEQ ID NO: 385237 - DNA, 498 bp, Homo sapiens
ggccacatgttgaaaaatgtccttgggagcttgaccttgtaatcacatggtggtactttctcttggtctctgccatgcagggaataggaatttgggggttcaagagctagccctaaaaattatcttgagcagttaaaagcctttgaaagttcaaaactggcttctctagactccttctgggaagtacagtggaaattgcccaatgctgtagctcagcagataaggcttcaccrttttactatagtggcctgggttcaatatccagattttggaatgagtcttttctgatttgatatctatgtgacctttgccattttaaaattcttttcccctccatgaaccatcttgaattttcctttctctgagcacaggggatgtttcttttagtaaagttgaaaagccagaaatattggacatttggcctggctaaatttgggtaataagaaatttaatttaaaaaaaaaaaagagtgctgtagttaaaagtcagtttgattaa

SEQ ID NO: 385238 - DNA, 644 bp, Homo sapiens
ttacattggtatagtacacttgccacaattaataaaaaattgatatattaactaaagtccatagtttatggcagaaatgctaatttttatattatctaaacctttcaagagaccatttaccacattatcttttcattggtgaacactttgtgaacttgcattagacttttcttctttactgaggaaacatgatttttcagtggagaaattattttgtgtccaagttatcattatggggttcctcatagaggaacagagccagatgaagagaacagacagctttatggggaacacattcctaatatccagattaacttctctgcccagcctaccagaaagtattaaaatccaggcaggtgacaagagtgacagatagggctaaggaagaatttaattttcagggacatgtttattgcaaatatataataaatccttttttagagagttcactcagtaatgtgggatgggaatactcagaaaaaggaaaaacttgcttataaaaataatttttggttatgtctctttctcctaatttaaaataaatgtccaaaggaagtcaggaagtctagtgtctttaacagttcaaattacccccaggagaagsgggtggaaggaacagaaaggctcatgcaggccaactagaa

SEQ ID NO: 385239 - DNA, 583 bp, Homo sapiens
taagtgaacgtaggaacagaaggaagacaacagctgattaaataatgccacctaaggcaaagccaagcacaacctccaagagaatggtaaaacaaccgagagctcctagacatctttgtacccctcactccaagcacacagtaggcattctcacacctgctttaaaaactgaactagtacaaatcaaatgccataccttgattcccgaaatcctgtgggacatctgggttttcaattatctagtaagggagatacacacacacaattaggagattcaggcaagaaaaatcttgactctttgacaatgggaaaattctaggaaacaaaatggcttccggggtgccctgggctcrgctaccttgcctgagcccacccctacccaccagctcttgagagcgtttcattattcacggtgtttatgagacagattatgatctctggaattgagcttatcagttcccaaaataattcagtcacgtttgtgtggacactctggcgtggatacttcctggaagtttaaaccctgtggtgcacttaaactcgcaggattccaagatgctgggctgtgacctggggcaatgcc

SEQ ID NO: 385240 - DNA, 281 bp, Homo sapiens
gtttttcaatctcagcactattcgcatgttagacaaaataattycttttgtcggcaggactgtcctgctcattgtaggatatgtagcagcatccttggcttctacccaatagatggcagtggcaatacccccattcccccagctcctccttcccactgccagttgtgacaagtgaagatgcctccaggaattgctaaacgtcccctgaggacaaaattgctcccacctgagaactactgtttcattcatttctgtcccacatgccttgtagacataactca

SEQ ID NO: 385241 - DNA, 630 bp, Homo sapiens
tctgtgatctaagccatttatcaaataactgtctgaatttcttcacatcataatcataggtctggttgaaatggcttagatgtggcttacaaagtaacatgctacacatgtccctatttactatttaattataacttttgaaggtagacatttaattttcaaccaaactgaaactaagagagattaggttacttgtacaaggtcatacgtttgcaaatgacagagtgtgatgcagacttagaccatctcttttcttttaaaaaaatattaaatagacacagggtttcactatgttgcccaggctggtctcaaactcctggcctcaaatgatcttcccacctcagccttccaaagtgctgggattacaggcatgtgctgccatgcctaggctaggccaatttgttttgaaaatctatgtcctcaagcctacgccataacgtctacacggagagtcagctcccaccaactatgcgtagggcacactgctttaaagtggtaattcaaaggtccactatgttaagaatggggacaggcatcaaacaaataatgtgaactytcttatttcgagtgataattcatgaagcaatgcattatgttgacagttggtgtgtagttatgagaaggtgtagg

SEQ ID NO: 385242 - DNA, 556 bp, Homo sapiens
gtgtttggttttctcttcctttgttaattctaatttctaatccttcttaggatcatggcctccagctccctctatgctgctgcaaaggacatgacctcattcttttttatgactgcatagtattccgtggtgcatatataccacatatatctttatccagcccatcattgatgagcacttatgttgattccctggtctttgctattgtgaatgggattcatgttgacatctaatcatcaatttacttgtctgtcccctacatgattacaagcttctttggtcagggactgttttgtaggtgcacatcataatgcctagaacttaatatacttgtaccaataaatatgtttgcctaataaacaatagaaaaatactgtcargtagtagaggctctataccacttgcttggtggttaattcagaatttgaggctctaacttagattattccacaatctaagaaacttccaaactccagtattttataattcagtgaatgagggataaaaggtcctcaaattttaatttaccactgactgctcatgacttaacaataat

SEQ ID NO: 385243 - DNA, 582 bp, Homo sapiens
atctatctgaaaatgatccacagttactagtttgaactctgattcacaggagatcacatgggacctaattggaaacaaattctttaaaatcattgttttgatgagccttcagcttcaacagtcacaaatagagtctctctttagtaatggcttaatttcccmagtctctaaccaaatagtcctgtaagaagtaattatataatgatttgttttctaaaagatactaaaagacaattatcagccaatttaagtacttaggcaccaatggaacttcattccaatttgctaaagtcaagagaattgagagttagaaactacttaagtggaatctgcaaatttgcagtagttttagacagaggaatccattttaaaaggatgggtatagaggcatccattgtaaagtgatgtttttggaaagtccatggaaactttaagcagacttattgtgatagaattataaaaaataactacaaaaatagatgctcattcttatgatctatgctacggtttgaatatttcccccgaagttcacatgttcatggcaagtgcagtaaaagatgattctggagtcttacaatttaa

SEQ ID NO: 385244 - DNA, 508 bp, Homo sapiens
actttgtaagacgcagaaagtggttgatcaccgggaatcttttctttcagtgctccttcccctatcaatgtatttatataattttgctaaaatatcattggcataatgtgtaggctaagtgtgttgaaatgacctgatatcaaattctgtgtcttaatcatctattttacccccagaccttagtacagggtggacctctgattggcaaatgttagtgtgcataagaatagcacacaggggccctgttaagatgatgattcccagccaggtgcaggggctcacacttgtaatcccagcactttgggaggycaaggcaagcggatcacgaggttagaggattagaccctcctggccaacatggtgaaacccggtcgcttgaacccaggaggcggaggttgcagtgagccaagatcatcacactgcactccagcctggcgacacagccagactccgtctaaaaaaaaaaaaaaaaaaaaaaaagatgatgattcccttgccccttccctga

SEQ ID NO: 385245 - DNA, 508 bp, Homo sapiens
actttgtaagacgcagaaagtggttgatcaccgggaatcttttctttcagtgctccttcccctatcaatgtatttatataattttgctaaaatatcattggcataatgtgtaggctaagtgtgttgaaatgacctgatatcaaattctgtgtcttaatcatctattttacccccagaccttagtacagggtggacctctgattggcaaatgttagtgtgcataagaatagcacacaggggccctgttaagatgatgattcccagccaggtgcaggggctcacacttgtaatcccagcactttgggaggccaaggcaagcggatcacgaggttagaggattagaccctcctggccaacatggtgaaacccsgtcgcttgaacccaggaggcggaggttgcagtgagccaagatcatcacactgcactccagcctggcgacacagccagactccgtctaaaaaaaaaaaaaaaaaaaaaaaagatgatgattcccttgccccttccctga

SEQ ID NO: 385246 - DNA, 508 bp, Homo sapiens
actttgtaagacgcagaaagtggttgatcaccgggaatcttttctttcagtgctccttcccctatcaatgtatttatataattttgctaaaatatcattggcataatgtgtaggctaagtgtgttgaaatgacctgatatcaaattctgtgtcttaatcatctattttacccccagaccttagtacagggtggacctctgattggcaaatgttagtgtgcataagaatagcacacaggggccctgttaagatgatgattcccagccaggtgcaggggctcacacttgtaatcccagcactttgggaggccaaggcaagcggatcacgaggttagaggattagaccctcctggccaacatggtgaaacccggtcgcttgaacccaggaggcggaggttgcagtgagccaagatcatcacactgcactccagcctggcgacacagccagactccgtytaaaaaaaaaaaaaaaaaaaaaaaagatgatgattcccttgccccttccctga

SEQ ID NO: 385247 - DNA, 472 bp, Homo sapiens
ctgttagcctatccttgtaatttttttggaagttggacgtgacatactgagttacaggaatagggtaaaataggctttcaatgtgagtttttawgtttgttggggtaggagcttggctatgcatagtatttccaatagctgtaggttctaggatctgcaaattcctctagtgtccttgtttttgtctctcctgttgtctttgagtttcccccaagaacttcttggagtctgtgtcttacagttctttcatctgtatccactggtatcagactggagctagttggtgtagtggtaaggaaaggatgaggtgaaggagctttaagtgttaagtaattttaggattaaatctgtcttttagtaggcttcgggcctggtgtatgacctttacaagtatatttaacacttttctccctgattttctcacactaggtgactctagagtggcctggagttgggtaatagcccttcctct

SEQ ID NO: 385248 - DNA, 577 bp, Homo sapiens
gatggggacacacagccaagcatatcaagaggcaatcarcattacaccaagatataaggttggaagaaaaggggaccctattaatctttaatttttacatgatgcctgattagattatctaatctcattctggaatcacaaaacagaataacacaacattgggtgtgtgaagcaagagagagtagatatccagaaatattcatatttctggatatttgtaaatatttgtaaatatgaatatttctggatatctacaaaacactaataatgctttttcagaaattatgggctcgtgttctgaccaggtagatgaatgtcttctatgaaaaattcaagtgaacttagtaaggaagaatcctctggaattacttgaggtagtcagaattttccaagtgctccagagaatctggcattctactttgagctgttttttgcagaatttactctgtttacattctgcagattgtaatctgtaccttcaagcttctaatctaaggttttttctcaaatacaaagcaaacaaaatagaaaaatcatttgacaattctaaacagagagcattgcttcaataaatagt

SEQ ID NO: 385249 - DNA, 577 bp, Homo sapiens
gatggggacacacagccaagcatatcaagaggcaatcagcattacaccaagatataaggttggaagaaaaggggaccctattaatctttaatttttacatgatgcctgattagattatctaatctcattctggaatcacaaaacagaataacacaacattgggtgtgtgaagcaagagagagtagatatccagaaatattcatatttctggatatttgtaaatatttgtaaatatgaatatttctggatatctacaaaacactaataatgctttttcagaaattatgggctcgtgttctgaccaggtagatgaatgtcttctatgaaaaattcaagtgaacttagtraggaagaatcctctggaattacttgaggtagtcagaattttccaagtgctccagagaatctggcattctactttgagctgttttttgcagaatttactctgtttacattctgcagattgtaatctgtaccttcaagcttctaatctaaggttttttctcaaatacaaagcaaacaaaatagaaaaatcatttgacaattctaaacagagagcattgcttcaataaatagt

SEQ ID NO: 385250 - DNA, 585 bp, Homo sapiens
aggtagatgaatgtcttctatgaaaaattcaagtgaacttagtaaggaagaatcctctggaattacttgaggtagtcagaattttccaagtgctccagagaatctggcattctactttgagctgttttttgcagaatttactctgtttacattctgcagattgtaatctgtaccttcaagcttctaatctaaggttttttctcamatacaaagcaaacaaaatagaaaaatcatttgacaattctaaacagagagcattgcttcaataaatagttaactatttatcagtataaaatttaagcttgtattttaaaagttgagattattgcttcagcaaaatttaaattgaggttgtgttttcatttttgtatatttttaactgcctcttttttgatgtagtagtcaaaaatttattttgaattggaataaattattatttcttcagctgaagacattctaatttggttagctgagaaacatttaattttttgttattttttgttttgctttgttttgttttttgagatagggtctctctctgtcaccctcgctggagtgcagtggtgtgaactcagctcactgcaa

SEQ ID NO: 385251 - DNA, 230 bp, Homo sapiens
tgaatgaaaattttaaaaatgtaaaaacaatgttattggaataaacttaaccaatttgtattcaaagcatttgatgaaattgataaaaccagcaatcttttaactataaagtttttctaccaatgaagttaataccttaacagttattacttcactttttaataattcacaatagaacatggaygcaagcagaatttatttaagaaatagtcgtttgatctaaatgaaaa

SEQ ID NO: 385252 - DNA, 560 bp, Homo sapiens
attaaacccaggcttttatttggaatgctgtagcatgagaagatccctaaagcagwgtctaccttgggaagaaaagggggagtttttacagaaccttagccagagagataagctgaagttcagctaatttcaggaacagttgctcaaaatggttcttgaaacagggagaaattactcttatagtttagcaactgttggtttgagctgtttgggtttagtacaaagggcgaggaggagctgctgcaggggctaagatcctttacacaaaagggtggtaaggaaaccatcgcagggggtcaacataatgctaggactacagtagaaatgtttagcgtttcaatatctcctacgtgctttccgcttagtcaacagagaaattgttgctttgttctgtcctctaagatagctatatcactttcatctgctaaagtctcagactcattgggcatggctaccactggagcaaagggaattttccatctccgtatgaaggtttgagtctgctgaaataaactgacaatagattaataaaagaaaaaggcaagtttattacctgtatg

SEQ ID NO: 385253 - DNA, 560 bp, Homo sapiens
attaaacccaggcttttatttggaatgctgtagcatgagaagatccctaaagcagtgtctaccttgggaagaaaagggggagtttttacagaaccttagccagagagataagctgaagttcagctaatttcaggaacagttgctcaaaatggttcttgaaacagggagaaattactcttatagtttagcaactgttggtttgagctgtttgggtttagtacraagggcgaggaggagctgctgcaggggctaagatcctttacacaaaagggtggtaaggaaaccatcgcagggggtcaacataatgctaggactacagtagaaatgtttagcgtttcaatatctcctacgtgctttccgcttagtcaacagagaaattgttgctttgttctgtcctctaagatagctatatcactttcatctgctaaagtctcagactcattgggcatggctaccactggagcaaagggaattttccatctccgtatgaaggtttgagtctgctgaaataaactgacaatagattaataaaagaaaaaggcaagtttattacctgtatg

SEQ ID NO: 385254 - DNA, 560 bp, Homo sapiens
attaaacccaggcttttatttggaatgctgtagcatgagaagatccctaaagcagtgtctaccttgggaagaaaagggggagtttttacagaaccttagccagagagataagctgaagttcagctaatttcaggaacagttgctcaaaatggttcttgaaacagggagaaattactcttatagtttagcaactgttggtttgagctgtttgggtttagtacaaagggcgaggaggagctgctgcaggggctaagatcctttacamaaaagggtggtaaggaaaccatcgcagggggtcaacataatgctaggactacagtagaaatgtttagcgtttcaatatctcctacgtgctttccgcttagtcaacagagaaattgttgctttgttctgtcctctaagatagctatatcactttcatctgctaaagtctcagactcattgggcatggctaccactggagcaaagggaattttccatctccgtatgaaggtttgagtctgctgaaataaactgacaatagattaataaaagaaaaaggcaagtttattacctgtatg

SEQ ID NO: 385255 - DNA, 597 bp, Homo sapiens
aaggttcctatggcaacggtatgtggtttggcttgggcagagacagcctggaagcaaataggccaatttagaagttacaggaatagtccagataaggtaataggatttaaacgaatgaagtggcagtgagaataaaacagaagggatatcagagatatctaaaatatcagagatattttagaagtagtaagtctacaactcatcatgactaatgagattttgaagggaaaaaagagagaggaatttaaacacacttttgaggttgaaaagtcagatatctaggaggataatggtctcattarcagaagtaaaagcaacaggagtaaagttgcatttcctgtgagtggcagatatgccaggagtttgaatctggacatggcgaggctatcatcttgtcactagttctcactggtaacttatattgttaaatagaatgcaacaaatcattccttttaattatcttacatttgggtagtgactattagacctgcagtgtgtggaacagtatcttctgacaatttttatgtttaaaataaattttctaatagctttgatgagaatcatcaaggcaaccttctctgtgtagtaggtttacaa

SEQ ID NO: 385256 - DNA, 622 bp, Homo sapiens
cagttcatgctggactttttcccctattgtgatcattataactgattaaaatttatctttaccactttaaccagtgtctggcctttgtatttatttatttatttttttggtctttgacaacartttggcaaatacttgatcctcattagacctagctattgggaaactaaatctggattcgttagttaatgtgaggtgaaacatcaactttaacgtgaagtaacaaattgctgaaagtaagagtgatttgcatcatactgataatgaagataacataaagaatattggcaacactcttcactttgaattgtaggagtggatgcagtctcagtatatctttatgtacaatcatttacaaatatataataagaaaattttttccttcttcactaaatataaaattggtcaacttttgatataatattcttttgttaataatgcatataatatttattctttggaaaaatgcagaacatatctaaaatataaaaatattacatacatacactgctcttagccactcaatattttgtagcatttctattaaactttttctgtgtattcttatatttaatgttttatcacaaaagtgtctcctatgttattaacaatcttaaaaacc

SEQ ID NO: 385257 - DNA, 622 bp, Homo sapiens
cagttcatgctggactttttcccctattgtgatcattataactgattaaaatttatctttaccactttaaccagtgtctggcctttgtatttatttatttatttttttggtctttgacaacagtttggcaaatacttgatcctcattagacctagctattgggaaactaaatctggattcgttagttaatgtgaggtgaaacatcaactttaacgtgaagtaacaaattgctgaaagtaagagtgatttgcatcatactgataatgaagataacataaagaatattggcaacactcttcactttgaattgtaggagtggatgcagtctcagtatatctttatgtacaatcatttacaaatatataataagaaaattttttccttcttcactaaatataaaattggtcaacttttgatataatattcttttgttaataatgcatataatatttattctttggaaaaatrcagaacatatctaaaatataaaaatattacatacatacactgctcttagccactcaatattttgtagcatttctattaaactttttctgtgtattcttatatttaatgttttatcacaaaagtgtctcctatgttattaacaatcttaaaaacc

SEQ ID NO: 385258 - DNA, 597 bp, Homo sapiens
ttataattaaattatcaaatgcctctcattttctgatgccattttaattgcaattgaactaaccctacatacagctcaattagaaagaatcagcaaatttgtaatatagattccattaacattgtcaattaatctgattatttaaatcttaatttctcgaaattacattttatggtttttccaatacatgcctgtgggaagcagaatttaatgacttttttccttgtatgatttccatcgcttgaatgtgggaagaatctgtatgtatgacaaaatatcacttccgtggtcatgtcatattgcatgacaaaaggaattttgtagacacaattaagattccaaatcagctggtattaacataaggagatcatcaactgagactgacctaatgacatcagatctttaaatctggatctagcagtcagagaaggagagggtcaaagattcaaagcatgagaaagattaaacatatcattgctggcttcaagtttgagcagtgctrtgtggcaagataaatacatggcctaggagctgaaaatagcctttggccattttccagcaatgaaatgggaatctcaatcctgcaaccacaatgaa

SEQ ID NO: 385259 - DNA, 627 bp, Homo sapiens
tatttacatattctttgatctctgaaattcttaaaacttagagaagttatccaaagttgcagagtgtgtgtggttttcagtgccccttccctttcagatgtactaacattcatttcagttacaattaggacaaaaggtggaatttttttttcctgactatggaatgtgtggaaatggtaaattaaaacaaacaaaaacaaaacgaaaaactaggctggggatggtggctcacacctgtaatcccaacctttggaaggctgaggtgggaggattgcttaaggccacgagtccaagatgagcctggacaacatggcaagactctgtctctacaaaaaacaaaaaagttagctgggtacggtggtgcatgtctgtagttccagctacttgggagtctgaggtgggagaattgcttgagcctggaaggtggaggctacagtgagttaagatcacaccactgcactccagacaccagcctgggtgacaaagtgagaccctctctcyaaatattaaaaaaaaataataattttcaaaaaagtcctctgtctcatagtgcctactcccttttttctgttaatgacttggctttgcctttgccttatgcttaactttattgtactcatagtactt

SEQ ID NO: 385260 - DNA, 563 bp, Homo sapiens
ctcttgatgccaagagttcaagaccagcctggagaacatagtgagatcccatctctccaaaacagaaaaaaagaaaaaaaaggtttgtgtggtggtgtgtgcctatagtcccagctacttgggaggctgaggtggaagattgcttgagtctaagagtttgaggttacagtgagctatgattgtgccactgcactccagcctgggcaatagagcaagactctgtctcaaaaaaaaaaaaaagtcttaggagtgaactgtgtatgttttgtaaatgccaatagcatctctccattacctttatctgcagcaccactttctttatctagggatggaaagtacaggacccaagttcacctcctagtcctccattctatacttcacccacttccctacttccaaarccatggaaaacatcactaatcagccccagccatctttctactggatatagccccatactccttagcagtagagtgctccaagacgtccctaagcatgaaacagaattggaaaatgaaatgaaacttgtttaatatcctagttctaatcccttttgcttatat

SEQ ID NO: 385261 - DNA, 546 bp, Homo sapiens
gaaataaaattatacccattttatagtctacaaccaaatacattccagactgtaaaaatgtgaaagagaaaaaataaaatgagaaaagcactaggaagttctgtgtgatggtctgagagctaaaagaaaaaagaagaagaaaaaatactagaagaaaatataagtgaatgtgaacataagcttatctaggtatgacawccaaacctaaaatcttaaaggaaaagatttacatatttgacaataaaaatttttgaaacttgcatttggcaaagtggctcaaaccaaacaatgatctaaaaaatgttttatatattgaatatatatatgcacatatatggttgacaaagggttaatatattcaaacataatacactttttccctgtgtttttatgtctttttcttctccatgaaatgttcttgtgttcttcacttggtcgactttcacttactcttcaatctcaacttgtattacttcctcaggcagtcttccctgatggcccaattctctgacttctcttgcagtacattttctgtgccagagaatt

SEQ ID NO: 385262 - DNA, 545 bp, Homo sapiens
atactgctcctcacatgctataacaatggagctccctcaggctaggggagtcttttaggctccagtgttcctaactctcaaaagactgtgggattcttaaaggggcagtaaaaagtctcttaagcatttttgcttgaagggaaagaatttgaaataaaggrtatttacctttaccagcttgaatttttttcatgttctccaatctattacatttttcaataggaaaaattgggggaatgatatccattagttcaattgactggctcctgtacactgctcaaaatgcatttcttcatcttctgaatgatctagaatatttatcctagggaaaacacctctagtcatctatcctaaccctaatttcattcccagcctgttctttttcttctctctcagcccctgtaactttccatactcttctgctaccagttgtttcagatgtatctgttaaacaagttactgaaatgccaagaagtttcccgacaactttaatgttgccttaaatatcttctatggcagactgggtgattgatttcagcctttta

SEQ ID NO: 385263 - DNA, 639 bp, Homo sapiens
cccctgcctttggatgtgatgatccttacatttaagcttttcttctaatttacctaggaaccttatatctactgcttgaggctgaactcaagtacaatcttccctcagtagccataggagattggctccaggacccccacagatacccacatctttagatgctcaagtcctagatataaaatgggctagtatttgcatataacctacgcacaccttcctgtatactttaaatcttctatagattaattataacacctaatacaacataaatgctaagtaaatagttgttatactgtattttttgtgttttttttattgttttctttttttttgaatatttttaatcccaagttggttgcagaatcacagagccccatggatgtggagggctaattgtattaccttcattgtgatctttctggggtttcttcaggtagaggaatatttaaactaacttgtgattctgtcatgttttattttccactttaacacttagtgcattactctgatttcacatatttatatgaattgttcagttctatcagttctaccttataatgtgcttctaattcatggctygcacagaaacctattagtaagagaaaaagagtctttactgagaaattattatatatcagg

SEQ ID NO: 385264 - DNA, 487 bp, Homo sapiens
gaggtgtgacaacaaaccttatttatcactcatcactgaaacatacatgactaaggtagtcaggactagacactcctaagttgcctataattattaaaaattcaaatggaaaggctatgccaataaattaatgtgcttcattttaccagcggcctgtgaggtttgcctggtgggctagtttgattcataaataagttaactttcctgattacttaaacacaagcaggcctaaaatacctaaaatacctatcccagataacatgttttgggcccacctgatatatagttgtttttaaaggtaatggaagagctgctttcttccataaggagtgctgggccctctccaatctttttgacagtttgagagattcaaaggaaagaagaaaaaacccacatagaaaaattaaactaagagatgccctccctccaaagacctgcaaaggcagcttgagagaaatccactacragaagcattcatttcaattct

SEQ ID NO: 385265 - DNA, 286 bp, Homo sapiens
ctcattaggaagttaatgaaaagaaaacaggaacaaaagaaaaggaaaataaaacagctattacgtggtgtgctaaagtccccacttctaagagcaagggactcaccaggattcttacatatctgctsatgttgccatgcttctgctgtgacaaacaccctgactctctcagttacagaaaaaaaacatgcatagcatccccatggcacagcaaaggagatgatccaatcccaattataatccaggatcattaaactctataaagcaatcattttcatggaggagt

SEQ ID NO: 385266 - DNA, 442 bp, Homo sapiens
aacatttcaaaacaagctatcttggaagttggtggaaaaacgtaaattggctgttgtgaggtcagttgtatgtcctyagttcattcagtttgatttgattggtcacatggttcagaatatgccacccactctctctctctctcctttttttttttttttttttttttgagacagagtctcgctctgttgcccaggctcctaggctggagtgcagtggcaaaatctctgctcactgcaacctccccatcctgggttcaagagattcttctgcctcagcctcccaaatagctgggactacagacatgtgccaccacgcctggctagtgccacccattctcatgggatatactattctgctttcatcagctggggctgtggacgggacaataggaggtcttcaaataactcatttgcatgctcttcctatgtctgtttgggtttt

SEQ ID NO: 385267 - DNA, 552 bp, Homo sapiens
acaaaattcttatttcaaataatattgttttttctgctgtatatttgcaagcttttagtcaaatgttatctgagctcaatagaaatcaacaaaatgaatctttatttttccacaagcattttattcaggcatatgcttatttttcttaaaatatgttagcttttaatgaatgatttatactttttttcagtgtgttgtttatcgctaagaagtggttgtcctmccaggaaactgctattctcagctctacctacattgactaatagtgagaggaagtgatgtgtggataagaagcaaatgtgtcttcactgcatctcttttttaattcgttcactgaagaaaggaggatgctaaaagaaaatgaaagaagatataagccctgaaagatcatgaagaagtcctcttaaccagaaaaaaaaaacccacaggggatggtgatgtgagcagaaaatatattattttgctaaggctctgaaatttcagtaaaaaacctgcattgctttaacaaatatattgtttcttcagttttgattcttgaggatacgattcaat

SEQ ID NO: 385268 - DNA, 526 bp, Homo sapiens
gcatctggcttcaagttgcaaaactacctcatatcatraagatgggaaaagtttattttatcactaaatataaccaattagcatacatgaatggcctctccagttaccaggtgagttcaggatgaactatgtatgacatggtgctatatattcttctacttgtggactaattatggtgaccactaattatggtgacagactaattctgtctttgcaatctgttaagcagattgactgtgatgcatgacacattctcgattaattgtgtaataaaacatcattcttactgttctgtcattgtggtgtttctctggggatggagaaaatttttcttttaattatattttccaaacactgtcaagaattatcagacacaataaaaacatataaggtgccaaccagaatttactatagagaggactttccctctcaggcttccagtcaactaacaaatttgctgcaaagtgcctgctttctcttaaatatgcaggcagaattatgtctctgcctgttagatacctgtagt

SEQ ID NO: 385269 - DNA, 549 bp, Homo sapiens
ttaggtaggcatattatttagaatgtactagagcagcctctatgaggggatttctcttttgactgtactccacttgctgtcacacccgagaatgcaaagccaggctgatctgacatagaatctgcacgtaagatctgacctctgcctgggattcacaaagcaaggtcaggctttggatttagaatgtacagaaaacaaacaggaaacattttytgcatggtgagatgtcaacatagatgtcttgaagttcccatttgagaatgtggctctttgagtttttcaggtcttgtctagtgacctgctgcagttatgtgaggggctccaggtgtaaatagaatctgatggcagaatctataagtgtaaacaagcatcttcagagtaagagattaaggccacaaagtatccagagcctccaccaaactacacctatgtgttaaatgtgatactggagtagagtattcttgtcctttgtttgtttgtttgtttttaacccaaaagctagctaatcaggatgggtgattaaagttctggagcttcaccagggcagtt

SEQ ID NO: 385270 - DNA, 639 bp, Homo sapiens
gtttctagttaggattacatggttaatttgccaaaatctctttacttatgccttttttattttacaggttctatttattattctgagtagaagcatccatgttgtttaaattaagtgcctcatgtgacccttaggtgaggccagaatcaagtatgagaggttcgagatacatttatgaaagttaagttccacctttgaactaaagggtggtcacagggcctgttctgtttggatttggtagtgacaggaaagtgtagctcatattttcattactgtagcagaaattgatggagtctgttaaaagggaggtcacctgaggacaggaaagaagaagcttttacttttatttccatggagcagctcatcattcctgagtctttattttaatataaaaaacagaaatgggtggactttttttgcagctctgggtccttctgcytgtgggcgtggtggtagtaggtgaacatgtggtgctgacacctttaaaggcatattctccagatccaggtgtaatttgtccggagaatctcatctgaagtgaatttccagagaaggagtagaaagaggaaaaaatgactttttttcagctaaacatgcctcagataaagagctgtgtccactctgcctcctggaatgccg

SEQ ID NO: 385271 - DNA, 517 bp, Homo sapiens
tagttctccttgcccacggctactcaaggattttcaaatacagtggatgataccactatgagtccctagcttctgccagactttggtccgctgcttcctcttgttgtcatccctctttccatctccatttggggccagtgctatcagcccaagccattcagattctggccactctttgggcttatgtcatgctgtttctgtgctttccacccctcagctctcctgcggtagttgtaggcccttgagggctaaaagggcagggttaggggtcagcagaatggctgaagaggtaagattccaagctccatacccaggggatatggcatttccttagacctcaaaccgcctagttgggagagggcctggggatctagtggaaccagatgagcagctcagaatgtccagagtactgcagtcatagatgaacccagcatcactagcaccccatgggcgtctggctgttcttacaacctatggtgagtcagggcttgccartgtagcctcttgctatgctgtg

SEQ ID NO: 385272 - DNA, 540 bp, Homo sapiens
taagtggttgatattattattttctattttgtgaaatttgcaattaactgaattatttgaggtttctgaccatgctatctagaaacaaataaaactttgatgtatttcatattaattattatgctcacttgaaaaggccatcctaagcaatgaggtagcaacaatgaaggccaagttaaaatgatctcacagcccatagagctttttcgctatcatcgtatgttgggtctgctttttttagtaataaaagagtgtggaagtggagcaaacttatcttaaagattcaagtttactaaatcctgattgttaaaagaagattgggtaagattagaaatttaaaaaaaagattcggagacattttatgaaagatagtttagaasaaaaaatggtatcacaactaaactagtataagacatactgcatcctctataatctatgaatgcacattaacattttaaaggatttgaaattcatccagcatatataaacatgtgtgattttataaattcaccttctcccaaatgtatatgtgttttcggt

SEQ ID NO: 385273 - DNA, 575 bp, Homo sapiens
atacaaataaaagctaattttatattggaaggtgtattgtgcaatggaaaggtgacctcaactgtactcagtaagagtgatataaaatcataaatcctagccacagctgcggtatattagaggccacacattacatttgtaaacaattgcaaatccattctggggacagtgctgagtgacctggttttaggtgctgtaagggacagcattggaaacatgtatttaaggatrcactgctaactccttagctacaagaagaaaagccatatgtcaattggccagccatacacatcccacgttttatagaaattctaaaaaggaggcacatttgtaatttatattttaatgttgattaatcacagatatgttaaatttttacccattttgttttaataaatacaaatgcatataataacatatttgagagcttttataaatcggttgttcccccacattgattacatgaccagttggcttttcatgccttataaaatcactactcattctctctcattttataatatgcattatcttttgagactcacattggatcaagatatttcatctaaaatttg

SEQ ID NO: 385274 - DNA, 559 bp, Homo sapiens
atctatctatagaaacatttattatctatatatctatagaaacatttattatctatataactgtctatatatttaatatattaatgtacatatcyttttggcaatcatgccaaaagaaataatatatgcttaattacttgatctaagtgcataaaagcacctagtttaaagagttgtcctggtgttaaaaaataaaataacaagccccaaatacttcacatagtacctgacacataataaagattcaacatatactactcaatattataggctatcgttattatcagaagtgatacatgtaaatttttaatttttgattcaaaatcataaatgtgcaagtaaaaaagaattggagaataaaagaattaaagatgttagttggctatgagctcaaaataagataaaaatgtaatataatataaaaattaataagcctaatgcattcttgggttaaattattggaaaaatgtgccctaatcgttggtatctcaacactacattttaatccaatcacaactagaatttgatgttgagttctaggcacaatgttttgagaatg

SEQ ID NO: 385275 - DNA, 425 bp, Homo sapiens
tgttttaattttggccacctgatgttactgtctaacagcaattagagagtcaaagctctgagatgaaagactactgcgtgcatctctaagttctgtcccttagacactagataccatagtgtaactttwatgcatcagcatccttctccgtagaatgggaacaattgcagtagttcagtgcactatttcaacaaagtaagagagtattcaaccattccacataaagcctgtattgtcaagtgcttaacaaatattgtttattattttcagtctttgaagtatgtctaagatgccacattcagggttgaataaggaaaataaatgtaaaaatatagtaacaaaataacacatgtaatgtctcagaatcccaaatccgtgaccaacttacaaatacttagagtgccattatgtattaaatacctccc

SEQ ID NO: 385276 - DNA, 581 bp, Homo sapiens
aaagacctctcaacaaaaatttactttacwgtttgctggagtttagtgattctttctttggaatcccaactggtcccatctatttactgagagctttgaacttggcctttcgaattccttccagttctaacttgcagtgagtatctgtaaggttactaacaccatatttctaaaataaagacagtaggtacatcgctctccaatactgaaacttttctcccttcagccgtgaaggaaaatctgccctggggggcggaaccaggtgcaacggaggttttctgctttagaaagatgctcctctgctttcatgggttattctgccacatctgtagaaataactatttgtagctgaccccaggacttcatcacctctcactagaattgtggcaaaggtcccccacctggtctaacctagctctcctattcatactttacaatctggctagaattatctttcctaaatgtagtttggagtttggtcactttattccacttgtcaaaaattggcagttttcagttttctctttgtttatggaatccatattaaattatttagtttgacattgagaagtctctacaat

SEQ ID NO: 385277 - DNA, 572 bp, Homo sapiens
attaaattgagcactgataaacctcacttttaaaggtactttatcaaattgaaatgtgttcttccatctcagtttcacacaaagtgcaatatgtgctatttgaaaattagataatctgcttaagagctattattgggcaactccaccctcttgctaaccaaatttactgtaatgtgggtgagactgctttttctttcacaatttctatttgttgttttgaagagtgatacatttttaaatgtttttcatttgcttaaagtaaatgtatttcactgtttttgaaaaacaagaatgtaaaaacataatttttcataaaagcayatgctttctctaaaagaaaaatatatttaaacaactcacaaaagcacattatgcagtagtgaaagaaaacagcttttaaatataactattgtaaatgatattttgttttttcatgcccacacaaaaatttgtcatttgagacatgtgtagttgtatattgaggtagtttgaaattatgtgaaagactgactatatccttgaagaggtttcaatttttattttgaatgtgctagaaagtaaataaatagaaa

SEQ ID NO: 385278 - DNA, 577 bp, Homo sapiens
gcctttgttctgatttactgtgctggctctataccccaggataatatgttttcagatgtaaaaattggatcagacttagttgatagttatatttcttcataaaaagagaacaaacagaggtgttaaaatcattgctatctgaacaaatgtacaaagtagccacaaatacagggaatctagatttgagaattatcaaataatttgctctcatttttcatttctcagtgttctcaaacattatctcatttaattgtcgctagaaccatattagatcattaatatcatacacaatacacagactaagaaattaaagctcagggaggctgggaagttttctgaagttttcagagagagtaagtaatagagctgagactggaacccaaattaaaattgttattattataatcacacagcagcacaaaccttcagaagctatgggatagattttgcaacttcattggaatagacaagacatgattttagttatcatgggctyagtatccattacactgacattttgggacaattcaatattatctctccctttcactatcagtttatgagtcatttcaatgag

SEQ ID NO: 385279 - DNA, 582 bp, Homo sapiens
atggtcctttttgtttctaaatccaagaaagatggcatttttaatacttattgttaaactagaaaatatgaggcatgataagctacaaaataataccttcctttaatttgatatacagaaatattctagcagctggattttgctaatgatcaactamtttgcacacattactaacaaatcatcattaagcggcttttccagatgacttcattagtgacaatagataaacacacaaaagtacaaagcattagagataatttcaatattatattctgctttatctaattattttctcagttatccatacaatttttaagatttccctgggtaaaacacaactgcatctttgaacttctaacattttatcttagaaaaatttcttatagttcactgaggaatttgagaaacttaaattatagccacaatattcaaagttgtttcagggatttagaaaaatatggacgtttaaaaccaaaactaatcctgtaatctttttttacctttaaaaaattatttttcaaaattccctacattgatttttctaggcacatgtcactctgaaaaacagaatgaaaaatatta

SEQ ID NO: 385280 - DNA, 484 bp, Homo sapiens
tattgatctaggattgtatcctaatctatctatattttagtttcctcataggtaaaatgaagataaaatcaactaactgtgtgtgtgtgtgtgtgtgtgtgygcgtgtgtgtgtgtgcttgtgtgataatgcctgtagatattttagcatatctggcatttgctgaacacacaatgattgttagatatatgttacaattatttatttcattttattagtttgaataaataaaattctgaagagcaaatcaggctctacaaaatgtagccaaggaaaatatcttccttgtgtttgcaatttagcatccctcaacttttgtttcaacactgcccacatacttttttgttcccacctctatggctccaacatttatacccctgccaaaatttgtgttgactctataactatgtaaacattgaaatttcattttttcttatggtgcatcactgcaataggaaaacactgggaaattaagttttattct

SEQ ID NO: 385281 - DNA, 539 bp, Homo sapiens
tgaatccagccatctatttctcgctgcaaagcagaaaacatatacaaggtttcctacgtgagacagatatttgccacatttttattgcctggttttctagcatctagcagggactagttccttgatcttctgcattgctttattgcttgtcttaacctcagccctcatgtcctttgtactccttgttctgccttgctaaccttttcttcttaaattcttacttcgatctctgtttcagttctggtcaataagtactcaagactcactagcccccagtacttcaggtctgcttactgaccccttatattgtttatacccatgatttcatggtgaccttcaacttcgstgtaaatgctgggtactggcttcttatataatctttgacctgtgcttctgaccattgctatctggattcattccagctgtctacttgtttttatattcactgattcattttggtttccagttttattacatatctttaatccctactcttccagtgatagattcccatattttttactactaatttcattaat

SEQ ID NO: 385282 - DNA, 558 bp, Homo sapiens
ctgtgccaggcaccctgtaccccttttctgtagtcaaaaaagaatattatcttcttcgacggacacaattactcttctctttcaaatatggttatgttttaattctctttttattcagataagaaatgctacacaaatttaattttcaaattcacatattagttaaaaatataccacagcaaccacatgttttacttaattaattatttaggctcctctctttttgtttttgtttttgagacaaggttttgctctgttacccaggctggagtacagtgttgtgatcacagctcattgcagtgtcaacctcctgggctcaagcaaacctcctgtctcargcttccgagtagctgggaccacaggcaggtgccaccatgctcagctatttttctattttttgtagtgacagattttcaccatgtttcccaggctgatcacaaactgttattatttacattgtaatctgatcttcatatagcaccatcatatgcctcaagggctgcttcacctgcctttacaaatcaatactgcctactaacagaataaagtagagtacaa

SEQ ID NO: 385283 - DNA, 470 bp, Homo sapiens
tttaattaagaaccagggaaatcgaactaggtataaaaagatgtttcaaagcatacatagtaatttgccttgcctagattgctacgctgtctctggaaattatcaaataaaatcttctgcctaatactttgttgtgacttggattagaaagaaagaaagaaagaaagaaagaaagaaagaaagaaagaaagaaagaaaaggatgctttgyagaggtccagaaacttatcatttccagtacatgtatttattgcctgagaagacaactctaacccaaggtagttggcgcagagttgcacgatgttagtcagtggatccatggttgctttctgttattagccaccagccccataaaagtcaaaatttttgacaaaaacaaaacaccatgcagctttgttgtggtcagatggctttacttttcatgctttgaagcaagaactccattaggctttttttttattttttttcttg

SEQ ID NO: 385284 - DNA, 470 bp, Homo sapiens
tttaattaagaaccagggaaatcgaactaggtataaaaagatgtttcaaagcatacatagtaatttgccttgcctagattgctacgctgtctctggaaattatcaaataaaatcttctgcctaatactttgttgtgacttggattagaaagaaagaaagaaagaaagaaagaaagaaagaaagaaagaaagaaagaaaaggatgctttgcagaggtccagaaacttatcatttccagtacatgtatttattgcctgagaagacaactctaacccaaggtagytggcgcagagttgcacgatgttagtcagtggatccatggttgctttctgttattagccaccagccccataaaagtcaaaatttttgacaaaaacaaaacaccatgcagctttgttgtggtcagatggctttacttttcatgctttgaagcaagaactccattaggctttttttttattttttttcttg

SEQ ID NO: 385285 - DNA, 564 bp, Homo sapiens
caatatttgaaataaaagccatcctgtgcattcgtagactgccttcagacttctttcaggttcagtttattcccaccatattaaacagtttgtttatcattataatctttgcccttcagcaaaattagttctttgtcctcttttggctgccagatcctattcagccttttggatctggcagcttggttttattgtgtcaacccatggtttcttcacaaaatggctttcatcattctgcctatccctgtggcattgtgcagcttccatctatctgacagggaagggagataagacatttcccccaatcttctgaatagacacaggctggagatggtaacccagactacaagaatcccagaatataagaaggcaacaaggtcaatgagtctcattactaagcagagtgcaaacaagaagttgttccctttgtgatactcsattacagttccaggagtgtgagcacctgcaggaatcaggctgtgaacattagccccttgctggtttgtagtgctatactatgccaggctccctattggagctggattttctcctctacataccttt

SEQ ID NO: 385286 - DNA, 630 bp, Homo sapiens
tgagccatcactacatatctagcagagtagctaaaataaaataaaataaaaaactgatcatgtcaattgtcagtgagtatatagtgtgtccagagttggttccttccagtgggttcgtgatcttgccgacttcaagaatggagccatggaccttcgcagtgagcgttatagctcttcaagatggcacgaacccaaagagagagcagcaacaagatttattgtgaaggtcgaaagaacacagcttccacagcatggaaggggacatgagcgggttgccactgctggctggggtggccagcttttattaccttatttgtcccctcccatgttccatttttgtcctatcagagtgccctttttccaatcctccctgcaattgactrcttttaggatcgtgcttattgttgcattttacagagcactgattggtgcattttacaatcctcttgctagctacatagcgctgattggggcgtttttacagagcactgattggtgcactttggaagatagttgtgtagttttctgcaaagctacatgaagtcttatcatacgatccaattatcactttctagttatttactaaactgatttgaaaatatatagccacataaaatgtttatagcagtt

SEQ ID NO: 385287 - DNA, 628 bp, Homo sapiens
tattgggggcacgtaatgagggctaaaaatgggtgtatttcatagtgaaaatgcaaagtctaatagtaaaaatcctaaatatatcatttgtgtaacagcgctgtagacttatttgcaattttagatgtgatcctccataaaaaatagtatacgactgatcccccatcagtactatgctgtctgggagtctgtttccttacagtgccgtaaaatttatcaacagtagaacaacccaactatcctctccttttcagccactgtgattgcyactgaaggaaaatttcccataatatggagctcagtcccttaagtcctagttcaaactattgcctgtctcagtggtatgaagtggaaagcgaatctatttcacattagataggtctgtgcttgacttgaaatctctgtccctttctagctgttataaacttggacaaatacttttaatgctgtgatcctcattttaggcaagcaaagtgttccttcctgattgtgaggattaaggttaagttcaagtgtgcaggtcctatgtctaattatataggcaatgctgaaaggatcaactgcagccctaggaagagctccctaatccattcattattatatcttgtttaagataaatgaaacaaaa

SEQ ID NO: 385288 - DNA, 618 bp, Homo sapiens
aatcccattactgggtatatacccaaaggaatagaaatcattctattataaagacagttcctgtctttataaagaaagaacagttcctattctattataaggaaagttcctgtatgttcatcgcagcactatttgcaagagcaaaaacatggaatcaacctaactgtccatcagtgatagactagataaagaaaatgtggtacatatacaccacagaatactgtgcagccataaaaaagaacaagatcatgttctttgcatggacatgcatggagctggaggccattatcctcagcaaactaacacaggaacagaaaaccaaatactacatgttctcccttataagtgagagctaaacgatgagaacacatggacgcatataggggaataatacacaacggggcctgctgkaggatggagagtgggaggagggagaggatcaggaaaaataactaatgggtactcaacttaatacctggtgataaaataatctgtacaacaaacacccatgacacaagtttacctatataataaacctgcacatgcacccctgaacttaaaataaaagttaaaaaagaaaacaatggaaatacttgggagattggcccatggcaatag

SEQ ID NO: 385289 - DNA, 568 bp, Homo sapiens
aatagaacaataaattcctgtcactcattaagcaaatgcttaatcaatgtcagtagtagtagtatttgttgtagttgttattactattaaccccattcccttgtcagatcacaagattgaaacccagagacagcctctgcctatgccgcctctcaactttacctcagtgtttgttctaaaatgtcacacaggcactgaagcctctattgagactcacagatatgaagataagtccaaagctttacacttgataagacccgcatctcagagcccattcttcaccaccactgtcctgtccgatcctttgctgagtgaggttttacaacaaatgtctgtgctctgatgcagaatgcaaccagacaaagctcaacatckttcttgctaggctccctgccatggagaatccacactgcaatgctgacacagcctggcagaagcacctggcaaagcccatccaagctaagcttcaccccctctggttccacagcccccacagggagcctggcttgtcctttttgaaacctcagtcctttcctccgtgcaggaagccagcactccagccacatcc

SEQ ID NO: 385290 - DNA, 553 bp, Homo sapiens
agctttaatttacctaaactgttgaactgccaaatgctaaaatgcatgagcacgttttgggggcatgtcaatataaggagagtccaacaaacygcccccaagcattttcagacatgtgttagcctatcactaggcacacttcactcacctcaccagaggccccatcacagagaaacagagtaaaagagcaaaaatgtaaacaaagaagtcctcagagcaactatcccttctatcgtattacaagctccctgctcacaactggcaaagctacccaagaacaactcaaattccaccttctcatgtccgcctctgagctctggggctattggaaatccgggccatcaccagtcatggcctctagtcacaaccagctcctcaaatagcacagccagccttgattacttccctagtgagagaaagctctactccaggaccactcttccaagccttccctacccttctaaaaccctcaagacattacctcttatttcaccaagaaaataaaagccactgatgagcactctctcaacttcatgccaacataccaacattc

SEQ ID NO: 385291 - DNA, 553 bp, Homo sapiens
agctttaatttacctaaactgttgaactgccaaatgctaaaatgcatgagcacgttttgggggcatgtcaatataaggagagtccaacaaaccgcccccaagcattttcagacatgtgttagcctatcactaggcacacttcactcacctcaccagaggccccakcacagagaaacagagtaaaagagcaaaaatgtaaacaaagaagtcctcagagcaactatcccttctatcgtattacaagctccctgctcacaactggcaaagctacccaagaacaactcaaattccaccttctcatgtccgcctctgagctctggggctattggaaatccgggccatcaccagtcatggcctctagtcacaaccagctcctcaaatagcacagccagccttgattacttccctagtgagagaaagctctactccaggaccactcttccaagccttccctacccttctaaaaccctcaagacattacctcttatttcaccaagaaaataaaagccactgatgagcactctctcaacttcatgccaacataccaacattc

SEQ ID NO: 385292 - DNA, 553 bp, Homo sapiens
agctttaatttacctaaactgttgaactgccaaatgctaaaatgcatgagcacgttttgggggcatgtcaatataaggagagtccaacaaaccgcccccaagcattttcagacatgtgttagcctatcactaggcacacttcactcacctcaccagaggccccatyacagagaaacagagtaaaagagcaaaaatgtaaacaaagaagtcctcagagcaactatcccttctatcgtattacaagctccctgctcacaactggcaaagctacccaagaacaactcaaattccaccttctcatgtccgcctctgagctctggggctattggaaatccgggccatcaccagtcatggcctctagtcacaaccagctcctcaaatagcacagccagccttgattacttccctagtgagagaaagctctactccaggaccactcttccaagccttccctacccttctaaaaccctcaagacattacctcttatttcaccaagaaaataaaagccactgatgagcactctctcaacttcatgccaacataccaacattc

SEQ ID NO: 385293 - DNA, 553 bp, Homo sapiens
agctttaatttacctaaactgttgaactgccaaatgctaaaatgcatgagcacgttttgggggcatgtcaatataaggagagtccaacaaaccgcccccaagcattttcagacatgtgttagcctatcactaggcacacttcactcacctcaccagaggccccatcacagagaaacagagtaaaagagcaaaaatgtaaacaaagaagtcctcagagcaactatcccttctatcgtattacaagctccctgctcacaactggcaaagctacccaagaacaactcaaattccaccttctcatgtccgcctctgagctctggggctattggaaatccgggccatcaccagtcatggcctctagtcacaaccagctcctcaaatagcacagccagccttgattacttccctagtgagagaaagctctactccaggaccactcttccaagccttccctacmcttctaaaaccctcaagacattacctcttatttcaccaagaaaataaaagccactgatgagcactctctcaacttcatgccaacataccaacattc

SEQ ID NO: 385294 - DNA, 384 bp, Homo sapiens
agactgaagagacctataataagtaataggattgaagttgtaataaaaagtctcctggcaaagaaatgcctgggactcaatggcttcacagttgaaacataccaaatatttaaataagaactaatagcaatcctactcaaactattctgacaaatagaggagaatacttccaaacttattctatggagccagtattaacgtgataccaaaaccagacaaagacaaatgaaaaaaagaaaactacaggcaaatatctctgatgactattgatgcaaatatcctcaamtaaatgctagcaaactgaattcaacaacaccttaaaaagattatttacatgaccaagtgtaatttatccctgggatgcaaggatggttcaacatacgc

SEQ ID NO: 385295 - DNA, 551 bp, Homo sapiens
agacatattactgcaagcattgtacaggagaaattgttgggacttgattttctttttcatgtctctcaactttttttaactttctcataggcttttgactcgttattttctgacttgggatagacatattctaatccaccacgtggctcagttaggactttttgctttcgattttcttgatgacctyattctttggccacgatgtcttcttgctgagtatctggatctgctctttgggctttctgatgccagattgcttgtttggtttcacagtcctaactccatctgcagttttggcttctgggcccctctggcctctggccctataacctgaaccatgttttattttcagttttgttatgttttcctgtcttttatctgacaactcttactgaccattgttcatgtagaggagaagttattttgtaaatttatagcagaaaaaattatcaaaatactaattgatgaggttaaaacaaatctttttggttaaactcctcagtttattgatgagaaaacaggctccaagaggtttagtgaattgtatcaac

SEQ ID NO: 385296 - DNA, 551 bp, Homo sapiens
agacatattactgcaagcattgtacaggagaaattgttgggacttgattttctttttcatgtctctcaactttttttaactttctcataggcttttgactcgttattttctgacttgggatagacatattctaatccaccacgtggctcagttaggactttttgctttcgattttcttgatgacctcattctttggccacgatgtcttctygctgagtatctggatctgctctttgggctttctgatgccagattgcttgtttggtttcacagtcctaactccatctgcagttttggcttctgggcccctctggcctctggccctataacctgaaccatgttttattttcagttttgttatgttttcctgtcttttatctgacaactcttactgaccattgttcatgtagaggagaagttattttgtaaatttatagcagaaaaaattatcaaaatactaattgatgaggttaaaacaaatctttttggttaaactcctcagtttattgatgagaaaacaggctccaagaggtttagtgaattgtatcaac

SEQ ID NO: 385297 - DNA, 649 bp, Homo sapiens
tgttacctattttcctttttttaattagatttttttcatttttaatttttgtgcatatatagtaggtgtmtatggggtgcttgagatattttgatacaggcatacaatgtgtaataatcacatcagggtaaatggggtatccatcatcttaagcatttttcctttctttgtgttacaaacaatccaattatgcacttttagttattttaaaatgtacaataaattgtcaactttagtccctctattgtgccatcaaatattagatcttattcattccatctaactatatttttgtacccattaaccgtccccaatccccaacccccaacccccaacccccactacccttcccagtctctggtcaccatccttctacactctagctcaatgagtgagttcagttgttttaatttttagctcctataaatgagtgagaacatgcaaatttgtcttttttgcctgacaaaatgtcttttagtcccattagtgttgttgtaaataacagaatctatttttttgactgaatagttctccattgtgtatatgtaccacattttctttattcattcatctgttgatggatacttaggtagcttccaaatcttggctgttgtaaacagtgctgcagtaaatgtgggaaggtagatat

SEQ ID NO: 385298 - DNA, 513 bp, Homo sapiens
gggaagaaaggggaaaggtctgtatccaagttcattttcatgagaaagaagcagggccctaactcagaattaggtggggtccaggatagctaaaggagaagccctgtcctcaagtggaaggatgcgaaaacagaaaggggtgtttggggactaattgggcaactatccttctcactaaagctcaccaagtagagggagcagggacagtgatcytaatttggatagcttgagggtttcctccaaaagtccctctgttcccaaagtgctcctctccccaacaccgtgaataattttttttttcaggttgtcattgatctccagatgtgtccttataaaagcctatgctcctagtagttatgccacatccagaataagagcatttggacaggacaaaggagtaaaggtgagcgtggttcatgagtgctacccagaatagatgaccccaggtttggggccccctggaagccagaaaacagcatgagactgtgggagagcatggaagagctagagcta

SEQ ID NO: 385299 - DNA, 513 bp, Homo sapiens
gtgcctgtgtctttcattacctaccaacacaagcaccacaaaagtttcttttgaaaaagtcatcctttctcagctgtcctggagggaagaaaggggaaaggtctgtatccaagttcattttcatgagaaagaagcagggccctaactcagaattaggtggggtccaggatagctaaaggagaagccctgtcctcaagtggaaggatgcgaaaacagaaaggggtgtttggggactaattgggcaactatccttctcactaaagctcaccaagtagagggagcagggacagtgatcctaatttggatagcttgagggtttcctccaaaagtccctctgttcccaaagtgctcctctccccaacaccgtgaataattttttttttcaggttgtcattgatctccagatgtgtccttataaaagcctatgctcctagtagttatgccacatccagaataagagcattkggacaggacaaaggagtaaaggtgagcgtggttcatgagtgctaccca

SEQ ID NO: 385300 - DNA, 455 bp, Homo sapiens
agttatgccacatccagaataagagcatttggacaggacaaaggagtaaaggtgagcgtggttcatgagtgctacccagaatagatgaccccaggtttggggycccctggaagccagaaaacagcatgagactgtgggagagcatggaagagctagagctaaaactccaaaaagagcagaggcaggtgtggtatcctagacactggtgaggctcagaggctgctaaaatggcagcatctcagactccattcacatctgagggtcataaccctggagttgtgcagtgcacaacctgggcagccacatgcaactgcccctgtcctttgaaggccaaaataaatcactaaaaggaggagaaatagagtactcctgggtctcaatctctctcattctgtacaaaatgaagcctccctgagaaaatattaaatcgcaagaattgccaagttggacaaaaa

SEQ ID NO: 385301 - DNA, 455 bp, Homo sapiens
agttatgccacatccagaataagagcatttggacaggacaaaggagtaaaggtgagcgtggttcatgagtgctacccagaatagatgaccccaggtttggggccccctggaagccagaaaacagcatgagactgtgggagagcatggaagagctagagctaaaactccamaaagagcagaggcaggtgtggtatcctagacactggtgaggctcagaggctgctaaaatggcagcatctcagactccattcacatctgagggtcataaccctggagttgtgcagtgcacaacctgggcagccacatgcaactgcccctgtcctttgaaggccaaaataaatcactaaaaggaggagaaatagagtactcctgggtctcaatctctctcattctgtacaaaatgaagcctccctgagaaaatattaaatcgcaagaattgccaagttggacaaaaa

SEQ ID NO: 385302 - DNA, 404 bp, Homo sapiens
ctgtggcttgtcttagtattgcagggaaggctgagagagggatttaatcatcaaaagagagtctttgaatctcagtgaaggcttgccttgaaacaggtagagttccaggaacaattttttttgctcctcttgctgtgcttctacaaaggtacctaaattccatgtggaccttactagtgtgtatatgaggtttccagctgtgaattgttaatgccaggcctaactcatctgctattgaactggctgcctcaaattccattaactgcactcaaggacaaaagggaatgggggcagagcaatttcyagtgttctttgtcttttataatttattttaaaggccacagcacctgatattcccaggcagtctcccatccaagtactagacaggcccaaccctgcttaac

SEQ ID NO: 385303 - DNA, 398 bp, Homo sapiens
ctatttagtacttgaatttggataaaagtaatttacattattttataataatgagagatatttacaacttacgtggagaaattgaggcagattgtacattgctattaatagtgccagtgagtaggggaggaatatgccaccccscccgcccgccccccgtcctcttgtttccaggtgggatgactttgtagattaacaatcctggctattttctcatcttgcttaatgtctccaatggtagtagaacaaaattatgactgaggagcttgggaaaagtaactagtcatacatttttgcctcttctttctctctttgaatccttcttctgaaagaagtgtttattcttttctggctatgaggttaatttagtattaagagcattttgcttttgggtgagg

SEQ ID NO: 385304 - DNA, 398 bp, Homo sapiens
ctatttagtacttgaatttggataaaagtaatttacattattttataataatgagagatatttacaacttacgtggagaaattgaggcagattgtacattgctattaatagtgccagtgagtaggggaggaatatgccaccccccccscccgccccccgtcctcttgtttccaggtgggatgactttgtagattaacaatcctggctattttctcatcttgcttaatgtctccaatggtagtagaacaaaattatgactgaggagcttgggaaaagtaactagtcatacatttttgcctcttctttctctctttgaatccttcttctgaaagaagtgtttattcttttctggctatgaggttaatttagtattaagagcattttgcttttgggtgagg

SEQ ID NO: 385305 - DNA, 627 bp, Homo sapiens
attccctgacctgtctcttacacactgatcacactggacacctacattctggctcctcccttaatcaggggctgagtgtgatgcaagaagagagagtgctagccaaaatgtcagagagcccaggcttaaagttagtggtgctttgattaatccgtagagtagctagttttgatggtggtgactgggatcagaagtggtgggttagagcttgtatgcatgtctattttaactaaagatcccaagggcttaccaagtagataaacatggggtgagtatttacgtaaatgtgacaatttttgacttcacaaatagtggcaataatatattatgtattaggattatatattaatatacatttatatatatgcatctaggattcccagtgcaggagtgaggtaaagtaaaatatttccgtcactgaggttcagtgtacttaaaaagctttaataaagtaattaaacactatttatgtgtatgtcccattgatatcattatatcaattgtattataaatttactatggaaattttacattaatatgtaactggcttattgataacaataaagttccccttttatgtctmatttcttcagacaaaatcagaaattaatatatgtaaggatgatt

SEQ ID NO: 385306 - DNA, 559 bp, Homo sapiens
agaattagcagaaggcaggagaaactgaacttttaatgggccacacaaaccagcatggcaaaagcaaatargttgtcaagtgagctgcccacgggaaagaggcagtcaggcggacaccaggagttgtctaggaagttctgccccatcactgcgtactcaaagtctttgtaaagaatttgggaattgaaaacgactctgtgattcccaacatcaacccctattccactggggatgtgcagacgactttcattatttttttattttttatttttttttgagacagtgtcttgctctgtcacccaggcttgagtgcagtgatgtaatcacagatcactacagcctcaaatccctgggctcaagggagccttctgccccaggttgccaagtagctgggactatcagtgcataccaccatgcacagctaatttttaaaaaaatatttgttagagttctgctatgttgcttaggctggtcttgaactcctggcctcaaataatcctcttgcttcagcctcttgagtatgcagacctttggcagcaaagtgggaaaggcacacttg

SEQ ID NO: 385307 - DNA, 531 bp, Homo sapiens
accaagcccttgccagggatgaggagacagtgcaattggctgacttcacatttcagagcgttgtccagggagactgcaaaggccaccaaacttggaggtggcatcatccacccctaacgtgtgagtgtttctgaaacaagggccagggacttcctgaagcagaaaatccgccatttcattattgttggcagaggatgaccacttcctggaagactgcaagttcagagagcctataatcagtgataaagaaacaaattctgcttggagcagaggaactatacaccccactcctcctttctattcgaccttatcccaattctccaaaagaaaggttcaggtaagggagaatattccctagttgtatcttatatttgagggctaaagaacctcttgaaaaagaggcatcagaggtaactccattctctaagtcactcaaatcaggagccttggaagcctcctggactctctcatctcacattcatccatcagctactttkattgagtctttcctcaatagaaatttagaatccc

SEQ ID NO: 385308 - DNA, 523 bp, Homo sapiens
cttgggtgataagtgagttcttgttcagttagtttgcatgagattgggttgtttaaaagagtctgggacctcccccctccgctctctcttgctcccactctcgccatgtgacgtgcctgctcctgcttcaccttctgtcatgagcaaaagctccctgaggccctcaccagaagctgagcagatgtaagcatcatacatcctgtacagcctacagaacagtgagccaactaaacatcttttctttataaatgacccagtctcaggtacttctttatagcaatgcaaaaatggactgccacacccccattgaccactcatcagcaactttcctcacctacatctgccatctgctttcaggctttggtccatgtagtctctggttctaaagactaacccagcatcttcttttgcatcttgtctttaagcctggtcaggaatgctggaaaatacctctctagagtggtagaaaactgaatgaggctatttcakacctctttgtctagacaccccacacagttatctc

SEQ ID NO: 385309 - DNA, 540 bp, Homo sapiens
agcaattctcgcacctcagcctcctgagtagctgggatttcaggcatgcaccaccacgcctggctaattttttttgtatttttagtacagatggggttttgccatgttggccaggctagttactaactcctggcctcaagtgatctgcctgccatggcctccaaaagtgctggaattacaggtgtgagccaccgcgcccagcctctaacaacatcttgattagagaaaatcttgtgctaactaacatggtcattgttttaatcaaccttcccgcaaaaagggagggcaggagggaattattcagagcaaaatttccactgattttctcctcaaaatgtggaataagaagaaaacccagagaagaatgcccaaagcagatgtagtggaagcttccccaccaaacatccttggcaaccagyacctcagagagcaatccagcaataatggcaattacccagcatcacagcagacacgtcaggagaacagaagcacaggcctgcctcccactgctcacaactggctcaggggaaaaaggaaaaa

SEQ ID NO: 385310 - DNA, 524 bp, Homo sapiens
tttagaatatgaatagcagagattgttactatgacgcatgctccaaaccaaggcttttgccattgaatgaagtaattatcattcattaatctttacaaggattatgaaaacgtgtttatgatcaggcttccaagtatttgtagccatgattataaggatagatttgtctttccaaataagcagataatcttcctgtttaatgagtctttcttcttagagatcaaaatgcattgtgggaatctcaagcaaatgatgctccaaacaccatttgttacttctaggtttattcaatgtgattaaactttaaaagaawcataataaggcacctcttctacttcatccttttcctctctccctttgaagttctcactcatgaatttatttcaagcaacttcaataatgccaaatacagattgcagagttatttttcctcctcatcttttttgatatgatgaacaagaccattcagcctgccatggcacaccgaggaagcagatggtaccactcagcagtagaaagaaaca

SEQ ID NO: 385311 - DNA, 524 bp, Homo sapiens
tttagaatatgaatagcagagattgttactatgacgcatgctccaaaccaaggcttttgccattgaatgaagtaattatcattcattaatctttacaaggattatgaaaacgtgtttatgatcaggcttccaagtatttgtagccatgattataaggatagatttgtctttccaaataagcagataatcttcctgtttaatgagtctttcttcttagagatcaaaatgcattgtgggaatctcaagcaaatgatgctccaaacaccatttgttacttctaggtttattcaatgtgattaaactttaaaagaaacataataargcacctcttctacttcatccttttcctctctccctttgaagttctcactcatgaatttatttcaagcaacttcaataatgccaaatacagattgcagagttatttttcctcctcatcttttttgatatgatgaacaagaccattcagcctgccatggcacaccgaggaagcagatggtaccactcagcagtagaaagaaaca

SEQ ID NO: 385312 - DNA, 610 bp, Homo sapiens
ggtttgaatctctattctatccattattcctggcaagttatttaatgtctatcagccacagctttctcacctgcaaatggtgtagtgtggtttaaatgatacaatggatgcaaagtgtggatgcttagtaataggagcaccaccagcccaaatcgtcttaccgctgtgtctcctgaaaggtaactaggagcagcaaacatagaatggacctgtccctagacccacctgtacccycttgacagctaccacactagaagtctggcatagcaaatgcatggccagtggcccagcaaaacatgcaggaaatctttctttggtacctaattcatagaattcttatagcactcaaaatctgtaccactcaaagtctgtacactctgttttatattatgggttcatcatttgtacacaagtctaattttttccaatggtactcatgtttctaacaagcatggattgcatcttacactgtttaattccttaagaaaactaacatcctatcagcaaattcaacccataaatatacattttttatataaggtgttcctttgttttttatgagaaatttgttgctgattatttaaggtattggtctttctgctttattacg

SEQ ID NO: 385313 - DNA, 595 bp, Homo sapiens
acttcaacctaggggcagggcccactgcagcttgccaagtggaatatggaccgagccagagcagaaagacattgtgctttcaggttctgagaagacatgataaacaatgagaagcccttttgagcrtcttgggccctaccttttaagtttccattcagcctgggatgaattagagctgctccagggagatgtctgctctttccatcttccttcctgggctcttgttttcctgggagttgctaaggatgctcatgaaattcccaccccatccctgcttttttttgtgacagcatcactctaatccattgaataagctctgccataaagaataatagatagcaaaaaatagataactcgtattgatcaattcctgtgtatctcaggtgtatgcctggtaccttctcaagttatcctcacaataaccctatgaggtcagtactgccttaactccactttacagacgataacaccagaagccagagaaattgatttgccccctttcacacagctaataagcagaattgggatttgtcttagtctatttttgctgctataacaaaatacctgaagctgggtgatgcataaagaacagaaa

SEQ ID NO: 385314 - DNA, 525 bp, Homo sapiens
tgatcaattcctgtgtatctcaggtgtatgcctggtaccttctcaagttatcctcacaataaccctatgaggtcagtactgccttaactccactttacagacgataacaccagaagccagagaaattgatttgccccctttcacacagctaataagcagaattgggatttgtcttagtctatttttgctgctataacaaaatacctgaagctgggtgatgcataaagaacagaaatttgtttcttacagttttggaggctggaaagttcaaaatcaaggcaccagcaagtttggtgtttggtgagggctgctgtctgcttgaatcacagygctttgttgctgcgtcctctggagggaaggaactctgcatcctcacagaaggcaaagggtaagtgaactgaacaacccatgaatgctctttataggggccttaatctcattcacctggaaggagccctcgtgtctcttaattacctcttaaaggccccacctgttaaaatcatcaaattagccattaagtttcaa

SEQ ID NO: 385315 - DNA, 469 bp, Homo sapiens
tggtaaatacttcttacttccatgtggcaaatcctaaatagctcttaatctttaacaatccttcacatgtaacaattaggtgttaaattacagtaatttacgtggcagatagggtaagagacattcaagttcacggtgagcttgctctttagatagctggcttatcttgctctgttggcacacacactaattttaatgatygttcactcagttttcctgttggcagttaaacactagttgctggctcttgagaggatcctcaatcctattatggggtacagaggttgggtgaagaaacagtgttcaagtactctaacaaatggctctcaaacactgaccactaagagatatgattggatcagaggcacttggaaacttagaaacttggcgtggagggcattgtcagattttctaaagtatggggtccagggtttatgggtgagggtctcaataatcatgaacagttact

SEQ ID NO: 385316 - DNA, 472 bp, Homo sapiens
gtgagcactcacagtacttggttttaacttcttatcactgaaagaggcactgaagaggtagaaaaaaaagtcttgaatcaccaacaccacccctccccacasgcccacagcagcagtgtggtgcagagtattcctgtgccctggggaaaggagagaacagaaattgtgaggcattgaactcagtgcagccttgttatagcagaaaacaaaaccataccaaactcagctgatgcccacccacagaggaagcatttaaaccagacctagccggaggagaattgccagtcccagcaatttgaacttaacttcctgcaagcctcataacttaaggctaaagtgctctgggcctctaaataaacttgaaaggtagtctaggccacaaggactgcaaactctaagcaagtcctactgctaaactgggctcagagccagtggactgtgggggcatgcaagttagccaccagccagcgtg

SEQ ID NO: 385317 - DNA, 576 bp, Homo sapiens
tattacacttatgattcataactattcatttcctgtaagaattatatatcagcatttattaaaaagtgtgaaaagaccctaagagaaatgaggaaacactttacactgacaactctgacaccttttcaaaattctaaagaaagctgtgaataaactatccacttggaaatcatgcttattcaattctgcctgcaggtaaatgttggaaacatttgtgaacagaagcatgaaacctcattaaagtaaggtataaaaataacttgaataaatacataaacaacttgagcctgtaatacagggcaatagaaaaacaccaaaaaatgtccaaattgtccatttatgatgaaaatacacaagcacaaacyagagatgtctttaaacatttttccctaaattttagataagcagccatctaactgatatgtacatacaaaatttaaatgttttcaatcctgcagattagaatgcacctgctctctatcccaaacgccagtccaagtgaatgaccactgtccacccacactaaggacctggactcaccctcagccccacctttcttccacctcattattcttc

SEQ ID NO: 385318 - DNA, 566 bp, Homo sapiens
tgtaaaaatatttaacttagaaccaattgactcctaacaaaggaaaagaactctaccattacaaagggagcattgtgcatgggagaagggcagaaatggcttattcaacaaatgaacaaatgggtcgctatctaaagatatttaaaattatattcccmtgtcattccttataccaaaataaattccaatgaatcaatgatttaaatataaaaattacaccttagtttcagaaaacatgagaaaaattttcacaataatctcagagaacatatgtatgtctgtcctcttcacagctgtaacctcagcaatccagcctcttaacaaatgtttgttaaattcaaattaacaaaattgaatatcacacctaaaaggagtaagaaccacggtctataaggagttcatgaaaagtacagataagaatcttctgccaaagggtctttgggaaaacatggcattgcatctaggagtaactgcttaaataaatttggaacaaagacacactcagccctccatatgagagaagtcaaggttttcctgacagtgcaatgagccctcagtcaaaatcc

SEQ ID NO: 385319 - DNA, 480 bp, Homo sapiens
gacaaatgagattttaaaaacaagaaaaataaattaaaataaagaggataaaatgagagagcctaacattggttttactgatggtccagaaattagctagtaggaagaatggagatctaatatttgaagagaaaatggctaaggaattttgagaatttgtgaaataaacccattttcagattcagaactccagtttattattccagacagaataataaaaatagaaatatcaaaataaaattgctgaatatgaaagactaaaagaagatcttaaaaacaaccaataaaaccaaagcagagataattttaaaaggaatgaaagtcagactgacatcaaacctcccaaagatatcaacttgttgagtgaaaataactataaccctacaattatatactaagcaaggttacctttcaacaagaagggtaaaataaacacatttttagataaacatmaactgtgaaagcttaccactagcaggc

SEQ ID NO: 385320 - DNA, 460 bp, Homo sapiens
attgggactaccagggtggtggtatggaggagcttactggaccctttctccaaccaaagcagcatgtaactgataaaaattacatatatgaaaaagccatttgaagtctctggaaattgttcttagagcatacaatgaataaagaaatgttcaagaaaatctaccaaatctcaayaggaacagtgagtctgtgatgtttgaactagaacttatgcccatcctccccttccccagccccacgtgacagaaactccactatgggtgctttcctttgggcagatgcagccaagaagatgtgcgctttcttcctgcagctcccagtttagggctattggtgcattcttggggacaggctgccagtgtctcttacatgctctccaccctcccagtccatgtcatataagcactactttagacaggtgctgctgagaggattggtgctaccatctctcacccagct

SEQ ID NO: 385321 - DNA, 568 bp, Homo sapiens
agaggctcagtggattgctaagatggtgaattgcttttttactaggtgaaattatatttttatggaaaggacagaaggagcagagtttgttttggtcttttgcttcgttttttgtaaatgtgcatgtgttagcaaaaacacaaagcagcaagaaaccaaggatgtggtaaattattcactttatgacttcaaagagcttctcttttatgactagcagcctcacagatcaatagataacgggtgtaaataagartcatagaatttaggagttggacaaggctttgaaggttattcaggacaacccctcataaggagttatgttggtccaatattgcttggaaaagatgggctaggccagaccttccagtctagtctgagtttgagtttgtgtgagaagtttgactggaactaggtacaagcctactttttctttgatttacttacagagtaggaaataagaagggcaaagattgccaaagaactaagaatgctttgagggttaaaatttctgctgcgttcgcactggggcactcttgtacctgcgattgctctgcggggcttaggagat

SEQ ID NO: 385322 - DNA, 644 bp, Homo sapiens
aaagtgatatactggctgagtgtcctttatgcaaaacccttaggaccagaagtgtttaggatttaaaattttttagatcttagaatatttgtatgtacctaatgagatatcttaggaataggaccgtcatctaaagatgaaattcacatatgtttcctatacacttaatacacatagtttgagggtaactttatgcaatattttaaataattttgtgcatgaaacaaaattttggaaagcaaaggttccactgtctccacaaaccatgtggacagtctgtagttgattggcatcaccatgatttctcactctgaatttatacactattgataagcaatcatcttcttacacttatttrcacataagtacttaacagcaaaaaaatgtgacatggtattttcagcttattttctaataaatacttattagtcatataactgctatcctaatgtttatgttgttagatcaaaaaaatgaataagtatgttaaaggacctcggacttccaaaataaattggtgggcattattgatgttttatttctctgaagcctaccaactccatttcctgattcttcataggactttttgacatattgcttcaaactcttagatcaatgacatattaatccctagatttaaaaga

SEQ ID NO: 385323 - DNA, 597 bp, Homo sapiens
ttgtaaaagcaatctattgacatttccaaacctattgacttgatttattccagtactataacagtatataaaattatatattctatttataatagtacatgtaaatattacatacatagtattastttactacataatgcatacagtattagtttattatgtaagcatatgtaactatacatatgtagttattagtttattcaccaattcaagtattcatcaaacttaacaaacatgtatttgcttacaacttactcaacatctgaaactgcacttcgtatcgaaggtataaaacttagcaaggtcagttttgcctgccagagctctcattcatatatgggagctaaatgagtggatctcatgaagattggtgatcaccagaggctggaaagggtagcatgaagggaaggtggttaatggtccaaacatacagtttgataaaagaaataagacgtggtgtttgatatattagcagggtgactatagtttacagtgatctataatacatttcaaaatagctagaagaaaataatttaaatgttattagcatatagaaaagacaaatatctagggggaggagccaagatggccgaatag

SEQ ID NO: 385324 - DNA, 597 bp, Homo sapiens
ttgtaaaagcaatctattgacatttccaaacctattgacttgatttattccagtactataacagtatataaaattatatattctatttataatagtacatgtaaatattacatacatagtattagtttactacataatgcatacagtattagtttattatgtaagcrtatgtaactatacatatgtagttattagtttattcaccaattcaagtattcatcaaacttaacaaacatgtatttgcttacaacttactcaacatctgaaactgcacttcgtatcgaaggtataaaacttagcaaggtcagttttgcctgccagagctctcattcatatatgggagctaaatgagtggatctcatgaagattggtgatcaccagaggctggaaagggtagcatgaagggaaggtggttaatggtccaaacatacagtttgataaaagaaataagacgtggtgtttgatatattagcagggtgactatagtttacagtgatctataatacatttcaaaatagctagaagaaaataatttaaatgttattagcatatagaaaagacaaatatctagggggaggagccaagatggccgaatag

SEQ ID NO: 385325 - DNA, 419 bp, Homo sapiens
atgactttgagtaatgttgtgatttaagaaagcatattacagaaataggtggtgccctttgtaacacaacaaaaatgccatgagcccacaggtcctctgtcaatargccattctgttggttgttggttttccagctgtagagatgtcattaagatgcttctacttccttttctcaaattaaactgtttttctatcttatcttttttttttttttttttttttgcaataagtaacctgtgttttattggaaagaacataggaaatcaataaaatttaggtttgaattcaagctttggcacctacctgctaagtgattctcggattcccaatctgtaaaatggataaaacaaagccagtttcaaaagattgctatacattttaaattatgcaatacaagtaaaatgctaacattttatctg

SEQ ID NO: 385326 - DNA, 419 bp, Homo sapiens
atgactttgagtaatgttgtgatttaagaaagcatattacagaaataggtggtgccctttgtaacacaacaaaaatgccatgagcccacaggtcctctgtcaataggccattctgttggttgttggttttccagctgtagagatgtcattaagatgcttctacttccttttctcaaattaaactgtttttctatcttatcttttttttttttttttttttttgcaataagtaacctgtgttttattggaaagaacataggaaatcaataaaatttargtttgaattcaagctttggcacctacctgctaagtgattctcggattcccaatctgtaaaatggataaaacaaagccagtttcaaaagattgctatacattttaaattatgcaatacaagtaaaatgctaacattttatctg

SEQ ID NO: 385327 - DNA, 531 bp, Homo sapiens
ggtagaattttagagatcagatgattttgcattaagatgtcagagggaggcagtattgcaaaatctccctcccaaatttgcaraccaaaaaagcacaaaaccagttaaaaaatttgataagattcaccatcagcaaataaatataaacatcaaaaagtggcaatcaaaaaaaaaaaagaaaaaagaaaattctggaattgggtacaacagtatcgaggaaagaagaggagttagctgataaccttaataatatttctccagtttggagagaaatatattaagaatactagaagtaaaccagggaaaatttttagaatgaaaatagctcttgagattggaggattttacacagcaatgtaggactttggcagaggtagaaaaactcagagtgattgctttcttgaggtgggggacaggtgtgggaggttgctgacttgcagaacccctacctgtctaggagagctggctctagtacaaaacattcagtttcgaagaagagaatggagctatgtgctccaacaaggaatggtc

SEQ ID NO: 385328 - DNA, 574 bp, Homo sapiens
aaacatttaaaatgtttgcaaaataatgtgattgcaaatccttcagccaggcacggtggctcacgcctgtaatcccagcactttgggaggccaaggtgagtggatcatgaggtcaagagattgagaccaccttggccaacatgatgaaaccccatctctactaaaaatacaaaaattagctgggcgtggtggcatgcgcctgtcgccccagctacttgggwggctgaggcaggagaatcgcttgaacccaggaggctgagatggaggctgcagtgagctgagatcgcgccattgcactctagctggggcaacaagagcgaacctccatctcaaaaaaaaaaaaaagcaaatccttctagatatttttctatctcacctgtcagttttatatttttttctttaacatgaattctacaagagtttttaaccacttaattgtgtcaagcctctcaaaacattccatttaatttttatggatacgacagattttttatatattattatatatgtatatttcttactatcattttacagttatgcatcacttaatgaggagaacacattctgagaaata

SEQ ID NO: 385329 - DNA, 574 bp, Homo sapiens
aaacatttaaaatgtttgcaaaataatgtgattgcaaatccttcagccaggcacggtggctcacgcctgtaatcccagcactttgggaggccaaggtgagtggatcatgaggtcaagagattgagaccaccttggccaacatgatgaaaccccatctctactaaaaatacaaaaattagctgggcgtggtggcatgcgcctgtcgccccagctacttgggtggctgaggcaggagaatcgcttgaacccaggaggctgagatggaggctgcagtgagctgagatcgcgccattgcactctagctggggcaacaagagcgaacctccatctcaaaaaaaaaaaaaagcaaatccttctagatatttttctatctcacctgtcagttttatatttttttctttaacatgaattctacaagagtttttaaccacttaattgtgtcaagcctctcaaaacattccatttaatttttatrgatacgacagattttttatatattattatatatgtatatttcttactatcattttacagttatgcatcacttaatgaggagaacacattctgagaaata

SEQ ID NO: 385330 - DNA, 618 bp, Homo sapiens
ctgcagttcagttccgtttctctcctctgagtgtccatgtttagcccacctgcctctgcattgggctttatagcctatttgttgttgagtagtgaggattacatcttgttagaaatgtaagctgaaaatagtcacagtggagctctagaatcaaytttcttggcaaaagtgctaaatagtcatcttgactctggtaagccagggatactattactactaataaccattgcggcctactgagtgcacacaccgtgccaggtagtctgctaagggcttcagtgcattttaatcttttcaccagcccaggactctgttgttttttgtttttttcttaagtaaagaatttttaaaataaagaaactgaacctcagaaagcttagataatttgtgctagttcatcacactaataagtggtagactctctctgtttgactccaatgactatattcttgaacactatccaaatgaataccaaataactcactttgcaaacaattcatgtccattatcacctcattaatttgttcattttattgctcatttccagaatgctcttgccactccttttatcataaaacatcccatccattcttaaagagccagcttatatctaatctt

SEQ ID NO: 385331 - DNA, 609 bp, Homo sapiens
ggacgggaaggagccaggagataaaaacagcttcctgatagctggaaatagacaaagcaagctgmggttagttctactggagacgttttcccttactgatcttttttgtttaagcctcttgtagctgagtttcttttatttgcaacagaaagagacatgtctaatatttattttcccaaaatatgcatcaaatttcacttctttccaaattgattatttccagtttaaaacatgaggatgatgcgtgcacatctttagtactctcaatgtttccaacccttatcttcaatgtaatttactaacaattatttaaagctccctctctcactattgtaagctacacgaaggcagaaagcatcacttattttaatgacccttatagtttagtgcagtgccaggcacttagttaacacaccatataaatgtctagatagatagatatatagaggtaggtgataaagaaatttatatatatatatacactatatatatagtatatataaagaaatacatatataatatatgcatgtgatagaacgaaagaaaggataggtagatttatcgataggtataaagcccgtgggctgtgacttatgcctgtaattctag

SEQ ID NO: 385332 - DNA, 649 bp, Homo sapiens
gtgtgcttctgctccattagagtgtgatcccagggagaagtagtgagatcaagtacagcaaagcagggaagaagggagagccaatagaaaatgtgccatggggctgagcattacaaggtaaagcagatgtttgaccttcaggatctcttcccccagaagctatatgactgtggctcagaaccgtgtgcccaaaggagacagagaggataatttatctacacacatctgttgcccatcactcaaaagtctggctgatagggggttaattctgccccaccacccacccctacacacacatatttcggttggacataggtgggcactgacgtagattctttgcttcctgtacttatatgtgaatagcaaagtgttgagaactggaagcatgagtgagtgacatgcaaggaactgacattgaagtaagattckgtgagggtgaggttgcatttgtagaaagtggttatagtccacttagcaatggtcatcacagaggtggctgagggaccagtagatggttctgaaaaggtaagtggatgctacctaggtttgtttagtcttctttctagcagggtttctgattgggtttcatttattttattctcttgtactgaattgtcttttcctatttttcttttttgttttaagcatt

SEQ ID NO: 385333 - DNA, 385 bp, Homo sapiens
agaactattatgatctggggtctgtccactttgccacctcatgccaaatagctcccttcatcactctcaatgtcttgttataccaaattatatcaaatacctttccattttacataacagtgcactttctacatgtatctcctcttcttcatatatgtattctcctacactttaccagcatgtattgatcttagatctttttacaaaaggyttagatgatttctcctccactcttgaaagaaatattttatgttctccaaatttgcttgcataatttctttaaatttgcatgtataattcattatgtttctccctattttaacagttgtcatttactgatgttataagtattcttctgtttgcccagtcatctgtaagtaaatta

SEQ ID NO: 385334 - DNA, 486 bp, Homo sapiens
catgagaaatgaaatttatagagcactggtacaataatgtgtaattttcctttaaaatgtctttaaaattcatttaataactcattaattttattatgatacaaataataataatgatgaagttgggcagcaaaggtaataaggagttacattattgagcacttaatgtatgctagatagtgtgctatgcccatttatattactattatacacgccactcttaattgcttattttcttaccaagcttgagaaaagagagtcaatcagactgtagtgagccagctccagtttctgtttyactaccaaaacgatctactttatagcctttcatttcttgtctttatctatgcaatggagacaatatttgctgactttataacaatatagttatgggaactgaggcaagatgttgaaaattattttaaactcagactacagaaatttgatataagccattccttttctaaattgtaatttatgttcctt

SEQ ID NO: 385335 - DNA, 486 bp, Homo sapiens
catgagaaatgaaatttatagagcactggtacaataatgtgtaattttcctttaaaatgtctttaaaattcatttaataactcattaattttattatgatacaaataataataatgatgaagttgggcagcaaaggtaataaggagttacattattgagcacttaatgtatgctagatagtgtgctatgcccatttatattactattatacacgccactcttaattgcttattttcttaccaagcttgagaaaagagagtcaatcagactgtagtgagccagctccagtttctgttttactaccaaaacgatctactttatagcctttcatttcttgtctttatctatgcaatggagacaatatttgctgactttataacaatatagttatgggaastgaggcaagatgttgaaaattattttaaactcagactacagaaatttgatataagccattccttttctaaattgtaatttatgttcctt

SEQ ID NO: 385336 - DNA, 519 bp, Homo sapiens
tcaaatcttttttggaataggctagggagaaaatgagacagaaattgtgaaaataaaatgccagtcataagataactgaaaataaatgaagattggctcacctatcaggttataataatttttttaaccacaacattacgattccrtaagtccgtaggaagaattatttcaaaagaaatttccaaaagggcaaaaagggcagagtaggaaacttgaaaattcatctcctcataaaaacaacacaaaagctaggcaaacaacaacaaaaatcttgtctaatttgacttttctagaattctgaaaactaactaagatgctggagaaattgggagaccatttgttgaagaaatacctactgaatcttggtaagaacaatgagctttgaggtatttacacttaccctggttccatcccatactcctcatcttagtgatggtagtcatgaaaatgtactgtatttctagtacaggtaatcagtgctggagggagcaaaacagacctcgctcacaaataattgtt

SEQ ID NO: 385337 - DNA, 519 bp, Homo sapiens
tcaaatcttttttggaataggctagggagaaaatgagacagaaattgtgaaaataaaatgccagtcataagataactgaaaataaatgaagattggctcacctatcaggttataataatttttttaaccacaacattacgattccgtaagtccgtaggaagaattatttcaaaagaaatttccaaaagggcaaaaagggcagagtaggaaacttgaaaattcatctcctcataaawacaacacaaaagctaggcaaacaacaacaaaaatcttgtctaatttgacttttctagaattctgaaaactaactaagatgctggagaaattgggagaccatttgttgaagaaatacctactgaatcttggtaagaacaatgagctttgaggtatttacacttaccctggttccatcccatactcctcatcttagtgatggtagtcatgaaaatgtactgtatttctagtacaggtaatcagtgctggagggagcaaaacagacctcgctcacaaataattgtt

SEQ ID NO: 385338 - DNA, 519 bp, Homo sapiens
tcaaatcttttttggaataggctagggagaaaatgagacagaaattgtgaaaataaaatgccagtcataagataactgaaaataaatgaagattggctcacctatcaggttataataatttttttaaccacaacattacgattccgtaagtccgtaggaagaattatttcaaaagaaatttccaaaagggcaaaaagggcagagtaggaaacttgaaaattcatctcctcataaaaacaacacaaaagctaggcaaacaacaacaaaaatcttgtctaatttgacttttctagaattctgaaaactaactaagatgctggagaaattgggagaccatttgttgaagaaatacctactgaatcttggtaagaacaatgagctttgaggtatttacacttacccyggttccatcccatactcctcatcttagtgatggtagtcatgaaaatgtactgtatttctagtacaggtaatcagtgctggagggagcaaaacagacctcgctcacaaataattgtt

SEQ ID NO: 385339 - DNA, 519 bp, Homo sapiens
tcaaatcttttttggaataggctagggagaaaatgagacagaaattgtgaaaataaaatgccagtcataagataactgaaaataaatgaagattggctcacctatcaggttataataatttttttaaccacaacattacgattccgtaagtccgtaggaagaattatttcaaaagaaatttccaaaagggcaaaaagggcagagtaggaaacttgaaaattcatctcctcataaaaacaacacaaaagctaggcaaacaacaacaaaaatcttgtctaatttgacttttctagaattctgaaaactaactaagatgctggagaaattgggagaccatttgttgaagaaatacctactgaatcttggtaagaacaatgagctttgaggtatttacacttaccctggttccatcccatactcctcatcttagtgatggtagtcatgaaaatgtactgtatttctagtacargtaatcagtgctggagggagcaaaacagacctcgctcacaaataattgtt

SEQ ID NO: 385340 - DNA, 579 bp, Homo sapiens
aaaggaaagttcatagcattaaatgcctacatcaaaaagtctgaaagagcacaaatagacaatctaaggtcacacatcacagaactagagaaacaagaacaatacaaacccaaacccaacagtagaaaagaaataacaaagatyggagcagagctacgaaattgaaacaaacaacaacaacaaaaaagataaatgaaacaaaatctcgttctttgaaaggataaataaaattgatagattattagtgagattaaccaagaaaagaatagagaagattcaaataaactgaattaaaaatgaaatgggagatattacaactgatacacagaaatacaaaagattattcagggctactgtgagtgcctttaaacacataaactggaaaacctagagaagatgaataaattcctggaaatatacaaccctcctagattaaaccaggaagatatacaatctctgaatataccaataaaaagcagtgagattgaaatgataatttaaaaattgacaaaaactgtatgtgaccagatggattcacagctgaattgtatcagacttcacagaaggattggtaccaat

SEQ ID NO: 385341 - DNA, 646 bp, Homo sapiens
aatttggatataattggaatgagaaatgtagataccgttgtcctttctcagaccacacttagtggagcaaagcagttagatcagtgtgcaaattttttaaaagcaaaagaattaactaggttgcttgttaaacataaagactttggaagctcatgcacggaaattataatttggagtcaatccaggtgcctgcattattaacaaattcccatggtacgtctcatgtagttgctctaaggaacatgctttgaaaatcactgcataagaaatacaagcttctcgaggacaattttattggcctttagtttcttttgcctgccggagkccctggaacttaatggctgcaaaatgtatgtttgttttgtaaatagaagaaaaaaatatgaatgaatgaattaaaaattcacctgaaagttttgaaacaatgtggacagaaaggaaaaaaagtatttttgccacatgcatatgtgtgtaatatctgtaagtctacgaagattttccataacaactttagtatattcgttgtttctctcctcctttcacgatcttttagttttttattacgtattatgggtaaatagcagtatttaggaagtagtaactaaatggtagaatgtaactattaatattaagacaatttgtaacc

SEQ ID NO: 385342 - DNA, 646 bp, Homo sapiens
aatttggatataattggaatgagaaatgtagataccgttgtcctttctcagaccacacttagtggagcaaagcagttagatcagtgtgcaaattttttaaaagcaaaagaattaactaggttgcttgttaaacataaagactttggaagctcatgcacggaaattataatttggagtcaatccaggtgcctgcattattaacaaattcccatggtacgtctcatgtagttgctctaaggaacatgctttgaaaatcactgcataagaaatacaagcttctcgaggacaattttattggcctttagtttcttttgcctgccggaggccctggaacttaatggctgcaaaatgtatgtttgttttgtaaatagaagaaaaaaatatgaatgaatgaattaaaaattcacctgaaagttttgaaacaatgtggacagaaaggaaaaaaagtatttttgccacatgcatatgtgtgtaatatctgtaagtctacgaagattttccataacaactttagtatattcgttgtttctctcctcctttcacgatcttttagttttttattacgtattatgggtaaatagcagtatttaggaagtagtaactaaatggtaraatgtaactattaatattaagacaatttgtaacc

SEQ ID NO: 385343 - DNA, 623 bp, Homo sapiens
ggtgtcaaattctttgtgcaaaaggaacttccagtttagggactacatgtcaaaaggttttcaataaaaatgaaattcccagaattgtgtggctacatcctaaaatagtaatcagattaaccattagaaaataattccttacattctatgggtatatacccagtaatgggtcaaatagtatttctgcctctaggtcttcactttgaggaactgccacactgttttccccaatttttgaactaatttacactcccaccaacagtgtcaaagcattcctttttctccacaacctcaccagcatgcaaactgatgcaggaacagaaaaccaaatactgcatgttctcacttataagtgggaactgaatgatgagaacacatggacacatggtggggaacaacacacattggggcctgtttgaaggtgaggagtgggaggagagaaagaatcaggaaaaatagctaatgaatcctgggcttaatacctaggtgatcggatgatctatgcagcaaaccaccatggcacacatttaactaacaaacgtacacattctgtacacataccccgaacttaaaataaaagttggraaaaaagaaaatcactccttacatgacaaatcgagtct

SEQ ID NO: 385344 - DNA, 623 bp, Homo sapiens
ggtgtcaaattctttgtgcaaaaggaacttccagtttagggactacatgtcaaaaggttttcaataaaaatgaaattcccagaattgtgtggctacatcctaaaatagtaatcagattaaccattagaaaataattccttacattctatgggtatatacccagtaatgggtcaaatagtatttctgcctctaggtcttcactttgaggaactgccacactgttttccccaatttttgaactaatttacactcccaccaacagtgtcaaagcattcctttttctccacaacctcaccagcatgcaaactgatgcaggaacagaaaaccaaatactgcatgttctcacttataagtgggaactgaatgatgagaacacatggacacatggtggggaacaacacacattggggcctgtttgaaggtgaggagtgggaggagagaaagaatcaggaaaaatagctaatgaatcctgggcttaatacctaggtgatcggatgatctatgcagcaaaccaccatggcacacatttaactaacaaacgtacacattctgtacacataccccgaacttaaaataaaagttgggwaaaaagaaaatcactccttacatgacaaatcgagtct

SEQ ID NO: 385345 - DNA, 611 bp, Homo sapiens
atatattattatttgaaattactaatagatgctattacctaatttctttaggattttgtattgatattcacaaattacatttattaataattttctttttctgtactacatttatcacattttggaataattgctttctggcatcatagataatatttggaaaccttccttctttatgcattgaagcagttgaaatagcattgagattatttgttccttggaggtttgaatgataccatctgtgaagatgtctgggcttgatacttcttagtaggtcactaagaagccagcatcatcctgataccaaaacctgacagagacacacacaaaaaaagaaaaattcaggccaatatccctgatgagcactgagaagaaaatcgttgtgaaattcctcatttataacttcaaataatgccacatttccagttaatttaagggagattttacaatgacattactagtgaattatctttgctgacatttggactccccaaagtcccacttgattcatagtstttatttccaacatgatccatacaacaagttttaaaacttctgttttaaaggcatagacacgtaacagagaaatatgagaaaggggtatttccaga

SEQ ID NO: 385346 - DNA, 551 bp, Homo sapiens
ctctaatattccctagtattaaaggagcccaaaacagcaactgttaagtggagaatgcagtgaagcaaaaaaaaaaaaaaaaatcagatcataagaacccctgtctaccccaccttctcagtcgatggagcctgaggccaacctaaactagggaagaagagaactcttaaactaaatgagatttgggacttttgataagcatttgtgctgtatattcattatttaatgagacagaggagtcttcggacctgactgagattttattccaggggctagaaacaactgatccaaagaacaagtgaaaaagaataaattaaaggtgcattctgcttcactctactaagtacagttcatccaataaaccaattaaataagtttagcttttcataagtagaaagaaacacaaacctttaagttagacttcctgggagaacaaggtaacataatgtggaatcttttgatataaaaagtgaagctacaaagcctcctgaatcaatttctaaataacctayggcaataggatattagagataaacagaaaaataataaca

SEQ ID NO: 385347 - DNA, 583 bp, Homo sapiens
aacagaaaaataataacatatctccactatgggcatcttttccaggttttataaaatatctctgattatttctgttatcgaattttatgattgggaacttatgagtgggacccatagagctctgaggggagtaattgtttttatttttttcaaaagcttaatttgagtatgatgcctgtaacaggttcaacagtggtagaataaagtttctaccacttgcrcaacagaatacaaagatcatccaaaatagaagataaatgagtcagatattaaatacagtggattttttcagatcagcatgccctcgtagcatagttccagggttaatatatatcctgaacttattatagaaataatctttccaggtgcatgttggacaatgatgaagcctaaagctgaaaaatgatatgcgtaagacctacctctaaaaatgaaaataacgtaatagcccaaaaatattatagtctggtcaccttaactttgatacctgaaaagaccaaactcattaatcatttcatttataaaatgctaaatgatcacaagtgccagagagtagtcagtgggattttaggaagaataaatc

SEQ ID NO: 385348 - DNA, 678 bp, Homo sapiens
tgtgcattatagatcaaatatacctaatagatatttacagaacatttcatgctatgattgcagaatacacattcttctcctcagtacatggataattctcaaggataggccacaagttaggccacaaatcaagtctttaaagtttcaaaaataattgaaaacatatcatattagtttgttctcacactgctataatgaactacttgaaactgggtaattcatgaagaaaataagtttaattgactcacagttctacaggctatacagaagcatggttgggagacctcaggcaactgacartcatggcagaaggtgaaggggaagcacgcaagcacatcttaccatggtggagcagtaaagaaagataatgaagggagaagtgccacacactttcaaacagccagatctcatgaaaactagctcgctatcatgagaaaacaacataacacatatcttcttggaccacaatggaattaaactaaaaataaataaaaagaggagctttggaaactatatgaacacatggaaattaaacaatatgctcctaaatgaccagtgggtcaatgaagaaattaaaaagaaaatttaagcagtgagctgagattacgccactgcactccagcctggaggacacagcaagactctgttctagaaaataatcccctttacaatagctac

SEQ ID NO: 385349 - DNA, 453 bp, Homo sapiens
agtccctcctgtacttattttgttgagggattttatcataaagggatgctggattttatcaaatgcttttttctgtatctatttaaatggtcatatggtttttgtttttaattctgcttatgtggtatatcacatttattgacttacatatgttaaacaacccctgaatctctgggatgaaaccctgctgatcatgatgtattattttttttgatgtgctgttggattcatccagctagcattttgttgaggatttctgcatctatgtccatcagggatattggtctgtagttttccttttttgttatgttctttcctggttttggtactagggtgatatttcctttatagaattattttgaaagaacttcctctttctatatcttttggaatagtttcagtatgattggtaccaattctttgaatgtctgrtagaattcggttgtgaatcca

SEQ ID NO: 385350 - DNA, 540 bp, Homo sapiens
attgtagctaaggcacttttagagcagataaaaaggaaaaccatagctgaatacgttcaaattcataatttattttaaacaacaatttgagctaaaaatcaaactgccaccaaagtactagcaggtcagaatctaatacaaaagtagtcaccacaccctaactctgagcatattagtctttaaaatgcagaattgacctttttgatatataatcccaagagtgccctacttcatgcctactcatacctgaaaattattctttagcttattattcattcccaaaacattcagattaaaggtttcctamaatatcttagggtagttaacatgcagaatttttctgatattcacagttggttctgactagttattatttccgatcatttatcatttatacttaaggattccctattcatgtctctcttctctagttcttaccactcctctctcaaaagttctcctccatgtattccttcccaagttcttaatttttaattgcctccctagttcagattctcttcacccattcactcccaactc

SEQ ID NO: 385351 - DNA, 628 bp, Homo sapiens
aaaatgacaatctataacacagtggatataatataatcccacttctcttaaaaaatcatatatgtgtacatttaaaataaaccayaaaagacaatccccacaatgttaacagtatttgtttctgggtcatataattatgggaaatgttttctttgtagatgtctttaattcaggtttctataatagtaagtattactggtaacactcaggaaaaaaatgatttctaagaaattacaaaggtgatctgtaaaaatcattcccacagagaaagtacctcttttattacgtatccaaattactataaatttacttgagctttgtaaactgagttgatttttatatccacttaccttccccctccaccttaacaaaatacaaaataaaacaaacaaaaaaataaaaacctacattccccaggtttcgcccttctggttatcaactactttcacatctcacatttgttactttcaagataagtaaaaaggaggaaggtgtgaagaatcaaagtaacagtggtctttggcaaatcacagggacctaaagactgaagtaaatgccaggcacataacggatatgcaaatatctactgaaaaatgacctgcacaatgttccaaaaacagtatcatca

SEQ ID NO: 385352 - DNA, 561 bp, Homo sapiens
gtaacagtggtctttggcaaatcacagggacctaaagactgaagtaaatgccaggcacataacggatatgcaaatatctactgaaaaatgacctgcacaatgttccaaaaacagtatcatcacctcttgcaactctgacaaggctaggattaccataatcacaaaatatgcttcatgtatgactgaaaatttcctacatggaaatttcactgaaggaaataacatactaaatctttattttcatttttattacaaggaagaagcataacgtaggcaagcaaatacaatagactaagaatcacaacatgaagaaatttacagtctgcttagggaaaaaggaaatgagttaacattaccaggaaatatacatacaaaatttaactctttttttaaatcagcagcctgggcaacatggcaaaacyctgtctctacaaaaaaaaaaaaataataataataaatgcaaaaattagctgggcctggttctgcatggcttatggttgtagctaatcaggaggctgaggttgcagtgggcagagattgcatcactacactccagcctga

SEQ ID NO: 385353 - DNA, 622 bp, Homo sapiens
gaatagaaaagggacaaagaacaaatagaaataaattctattccttctatatagcagtactttgttgggtatagatggaaaacatcagtcaggagcattaacttgagttgatcgtcaaaaatgtagttacttttagcatgtgttttgctttagtatatatacagaggctgtaacgaagttgaactatcccatctttcttctcatttgtaatacagtcatacaaacaaaaagatgaatgctactagaaggaggtccttatcaaaaatatgacccaatgcatttaggtgacatgaagaaaatcttttttctcctaggcctgagatccttcatccaaaaacttagaagatggaatgagatgatctttaagttttggcaatctatgtacacacatcaattatacatcatgacatagctagacaacaaggctrtattttctggacccatgatggtaggtttgaccatgtgacttacttaaaacaacaatgatgcatgtatcttctaagagccaactgaaatggtgtcatctccttgtccctctgtaaataaaaaagacaatgtcccaaaaaggggttgttccttgagcttcaaccctgaagtgaagatgacatggaagaatcaacag

SEQ ID NO: 385354 - DNA, 635 bp, Homo sapiens
ggcttattcttatcatctgggcacttgtttaacaaaaattcctggaaccttttctagagcaacaggatcagaattttaaaaatctgacccagtgtctgttttaacaaatgccccaggtaattctgttgcatagccaggcaaatgaaagttttattaatctttttttccatgtatttttgtttgttttggaattgctccactgggcttttttattctccctttcaagtatataagaaaaaattagaatgatgtttgttcataaactgtctcttattgttattttatttttagcttttgatattattttatatatttttatcagattaacctggaattcctggttcttgtgaattttaacagtaaatgatacatacttgtgtttttatgttttgctactcagaaaatgtcaaggcttattatactttcatttatctgttctatccttgtctcaattaccaatttgagttactccctacccgcaagctgtccacttgattatattaaatttttttgttttcagatgtttgattttgcctgaaatsttccatagaaatatattctcacatctgtgaataagtaggtaataactagaaatagtaaatttgacttgtgaaaggtataggtttatctctatt

SEQ ID NO: 385355 - DNA, 540 bp, Homo sapiens
tattgttaaccaagctgaaatggctgaaatgacacagaatttagaatatgaatagcagtgaagatcatcgatattcatgagagagctgaaacccaatccaaggaatctaaggaatataataaaacaaaaagggagctgaacaacaaaatggtcattgtaagaaagatccaaactcatctaatagagctgaaaaggcacactacaagaatttcataatacaactgcaagtattaacagcagtatagaccaaattgagaaaagaatctcagagtttgaagattggttcaccaaattaactcaatcagacataaataaagaaaaaagaataaacacaatgtgtgattaagtatatagaccaaacatacgactcactgatatccctgaaagacagggagagaaggcaaaaacttggaaacatatttgagaatatcttccatgaaaatttctccaaccttgctagaaaggycaatagtcaaattcaggacatgcagagaacccctgcaagatactatacaagacaaccatcctgaagacacatgg

SEQ ID NO: 385356 - DNA, 578 bp, Homo sapiens
gctcatgttttcctggatggtcttaacacttgtagatgtttgtcagtgaagagttaggtatttattctaatctttgcagcctggatttgtttgtatccatccttgagaaacctttataagtatttgaagggaatcgagtgttgtgatcraagtctttggtcactgcagacatacgtgcattagggggcaccccaagccccctaatgctgtgactcttgcagattcatagaggtactgctttggtggtcttgagtaaaatccaggagaattccctgaatcaccaggcagagtctcttgttctcttcctttatttcccgccaaacaaacaagagtctgtctgtctctgtgctgagctgcctagaattgggggaggggtgatgcaagcactctggtggccaccactactcggattgtgctgggttacacctgaagccagtgcagtactgggtcttctttgcccaaggactcttaattagcagatgataaatcctgccagtactggttctttcccttcagggaagatgagcctagaaatgctgtccctgagttagggcttggaattaggggctttagaaatc

SEQ ID NO: 385357 - DNA, 552 bp, Homo sapiens
tgaacaatactcctctggctagggctggtctaaattctccctccataggccctggttgaactctgctctatgttgctttctgctgtgacagggcagcatggagttccaatgcaaagtccccaaaatcactctactcttcctctcccaagtactcagattatctctccccacatgacaggtgccactgttggaggatcggggaatggtggtgtcagcaactcaagactgtctttcctaccctcttccatgcctttggttgacgtgatgttaaaaatcaagtgtgattgctcatctcattttaggttcttttgaaggtactttcttgtgtagayagttgttcaatttggtgtttctgtgtgaggaacaattactggaggcttctgttcacccatcttgctccacctcatctatctctttgtttaatgtgggtcctagaaagtttaaaatagcatacatagttaatatttgtggtttggattatattttaataaagactgccaatcttgataaataaccctgattgagtattcctctcacatgtgctctgtaggg

SEQ ID NO: 385358 - DNA, 508 bp, Homo sapiens
gatgagctgcaggtcacaaattgcctgtcacaatacgatatataagatcttctgaatccgtgcctcagttctcttgttctctctgcctttgagcttctctgtgacaacaggacaaattttaaacatctcatttagcaaccattgtctagacttaagctgtaaaatccaaagstatataaataatgtaattctcactcaaaacaaattcttagttaaaaagcaacttctatctttaaaagtttccagaaatttattgtgcagtcaatatgtatttttaccttatatttgttttccattaagaaaaagtttccttcccagcatgttgccagatacagtctataattacacatctaaatctaatgatatagagcaattttgatggcctactctttttagtgccattctttgaagagtactctttgccatttctgtctcgtggggttctataaggagaaaaggaggttaaaggtgtccacctatccaacaagagggtacgtagaagttctca

SEQ ID NO: 385359 - DNA, 636 bp, Homo sapiens
gtcatacaatttttgtttttaattatgtgtatgtggtgaattacatttgttgacttgtgtgtgttgaatcaaatttgtatcccaggaatgaagcctactttatcatggtgaattaactttgatatgtgctattgaatttgatttgctagtattttgttaaggatttttgggtctatgttcatcaggtgtattggcttgtagttttcttttcctcactctgtctttgccagctttgccagggcgatgctggctttgtagaatgagttaggcaggagtccctcccattcgattttttggaataattttagtagaattggtactagctcttccttgtatgtctggcagaatttggctatgaattcatctggtccagagctttttttcatgggtagggttttttttttttctgattcaatttcagaactcgacwttggtctattcagtctttcaaccttgggaggttgtgtttttccaagagtttatgctttgcctctatattttctagttcttatgtgtagaagtgttcatgatagcctctgaggattttttgtatttctgtaggatcaattgcaatgtcatgtttgtcatttctgattgtacttatttggttctcctctctttctgcattcttaattc

SEQ ID NO: 385360 - DNA, 573 bp, Homo sapiens
gtcatttctgattgtacttatttggttctcctctctttctgcattcttaattcaactagcagtctatgaatcttgtttatcctttggtttcattgattctttttatggatttttgggtctcaattctgttcagtttggcacaagaccagtatttttagaggcaatgtaatgctctgagcctgcactccatccaagggaaataaaaaagcaaaaacaacaatattttttctgattttatgtgtgtatgtgtttttttaagtagtttaatttgtgatttaaagttcagcagcattgttgacacttctttgctcttgctcttcgttcacacatccattacatttccatggattgatttttttttaaaacatactgttgtagagcttttattgtcggaggcttggatgacccagtagcctatgctaactatactccaagtcttcattttttaatttcttcaacttcctgacttccattatcaagttattattcacaaatcacatttttctcctccttctcccacttgaaaaattttagtcttagtgmccataagacagaatttaagttttatcatat

SEQ ID NO: 385361 - DNA, 584 bp, Homo sapiens
gccattatgctaagtaaaataaaccaggcacaggaagacatatacttcatgatctcccttacatatggaatttgaaaatgtggaactcatgtaaataagtagcagaatgcaggttacttggggctggaggggcagggagttggtgagatgttggataaagaatataaaatttcagttagatagaaggaataagtttgcaagacctattgtacaacatggtgcctatagttaacaaaatgtgttgtattcttgaaaactgctaatcaagtagattttaagtgttctcaccacccccccctcaaaaaactgataagcatgcaaggtaatgcatatgttaattagattgatttagtcatttcacaatgtagaaatatttcataacaaaattttgtacatgataagtatataatttktattagtcagtttaaataaatgtttattggagagcaaacgacttcacaggcatgacttatatgcaatcaatggaaattaataaaacagtaaggctaaagaattaatggaactagaggatttagcagtaagataatcaagaaaatcaagaatgctaaaaaaaaaaaaaaaga

SEQ ID NO: 385362 - DNA, 584 bp, Homo sapiens
gccattatgctaagtaaaataaaccaggcacaggaagacatatacttcatgatctcccttacatatggaatttgaaaatgtggaactcatgtaaataagtagcagaatgcaggttacttggggctggaggggcagggagttggtgagatgttggataaagaatataaaatttcagttagatagaaggaataagtttgcaagacctattgtacaacatggtgcctatagttaacaaaatgtgttgtattcttgaaaactgctaatcaagtagattttaagtgttctcaccacccccccctcaaaaaactgataagcatgcaaggtaatgcatatgttaattagattgatttagtcatttcacaatgtagaaatatttcataacaaaattttgtacatgataagtatataatttgtattagtcagtttaaataaatgtttattggagagcaaacgacttcacaggcatgacttatrtgcaatcaatggaaattaataaaacagtaaggctaaagaattaatggaactagaggatttagcagtaagataatcaagaaaatcaagaatgctaaaaaaaaaaaaaaaga

SEQ ID NO: 385363 - DNA, 616 bp, Homo sapiens
ttcctgaagaaactgtctacagattcaaaggttaatctcattcagaaacagcttcacagacatacccagaataatgttttactcaaatatctggatactccatggtccaatgaggttgacacataaaattaaccatcacatcttccttgttctttcccattttcttatacctggtgctccagtgtctgttgagctatctgatagctcaaccaaaataaatttaattttggtttaagatcatcamagccacatccttcattacattattattatttatcttattatttatcatcaccagaagttacaggtctagaagttatttccaactttgggtggtttattgacgcctaagacatacattaatcctcctgagtagtttctgctatccatcacatgaagatttcttggtatgtgcagatttcagatatgtggcatcattaaataattcactttaataagtctacacatgaaaggtgtaagaaagtgagtcttcagtcatgagttcattccctttatttgccctgtgaaggcctgttctgagaggctgtgtgaattagtccattttcatgatgctgataaagacatacctgagactgggaagaaaaagaggtttaat

SEQ ID NO: 385364 - DNA, 518 bp, Homo sapiens
gtacaatttaagttgagatttggttggacacagagccaaaccatatcactgtggcttcataccaactctccagaaacatctcatgtggatacatagccaacygtgtagtctatgaagtcatggccatctctgcaatacacaatcttgtatttattttcccactttttctcttttttaccccatttatccttattttgttgctctgtgactgtactcttcatcctaataaagcatttgcatgtgggctgtgcttcaagcttgatttctagggagccaaaatttaaaacatagtgaattgttgtctttgcaagattgtattggtagtatccatagtttactttaaatatattcatatatccagtaatttagacctcataatgaggttgcataatgaaactctttgtgtataagaactttgatgtctcagttttaattgaatagcattctcaggaagaaaagtgacatattggtcttaaaatgaatttttattttaatttagtaaagaactttactaaatt

SEQ ID NO: 385365 - DNA, 518 bp, Homo sapiens
gtacaatttaagttgagatttggttggacacagagccaaaccatatcactgtggcttcataccaactctccagaaacatctcatgtggatacatagccaaccstgtagtctatgaagtcatggccatctctgcaatacacaatcttgtatttattttcccactttttctcttttttaccccatttatccttattttgttgctctgtgactgtactcttcatcctaataaagcatttgcatgtgggctgtgcttcaagcttgatttctagggagccaaaatttaaaacatagtgaattgttgtctttgcaagattgtattggtagtatccatagtttactttaaatatattcatatatccagtaatttagacctcataatgaggttgcataatgaaactctttgtgtataagaactttgatgtctcagttttaattgaatagcattctcaggaagaaaagtgacatattggtcttaaaatgaatttttattttaatttagtaaagaactttactaaatt

SEQ ID NO: 385366 - DNA, 573 bp, Homo sapiens
tgttctggctcctttcttaaaagcttgtgatacttaactgctttcaaaaagttagttggacttaactttggatgagataaaagattatttttaattaagatgtttaatccttactaagggaagccaaggcactgactcactgacttatcgtttcacacattcaaaattttaatcacagtgtctttttttctttgtaaatatttgctaaaagaggtcaatgacaaattgtccttggcattttacttttaaatttctggttattgaataaaccattaagaaaaygttaagtatcaattaaaaattatgtttgactattaccagttcccaaaagtttatttaaaaatgtttaaagtgatttggtattttaagacatcttaatttctgataaattaattatttactatattgttttatttgatcaatcattagatcaataatattagactaattcagcaataaccaaactaataaaaaaagagtcaaaccctgctattaacatgattttaaattctagctaagatgaataaacagtcctaatcttttaaatgtagtttgaacattttaccatggtgt

SEQ ID NO: 385367 - DNA, 555 bp, Homo sapiens
tgttttgactttctactttatttatagtkcttttagatgaatagcacctccaaattttaatgttctcaaatttattgatttatgaagttgtttgtgtttgaggacaagtaaaacacttcaaaaaactaaaagttttcctcctaagataaggaaaaagacaaggatgtgtactctcagcattcttaacatacctctgaaaattctagtgagtacaataatgcaagaaaatgaaataaaaggcatacaaactggaatataataagtaaaactgtctttatttgtaggtgacaagactgcctacatagaaaattgaaatgaatctaccaaaaaaaatcctcaaaataatatgtgagttcagccaagtcacaagatacaagaaaaataaatatacaaattatttttatttttatatgttagcaatgaccctgtgaaagtcaaaatttaaaataaaataccattttcaatatctaaaaatatgcaatagctgtcaacaacatagacaggacttatatgctgaaaactgtaaaacacagatcaaagaaatcaaagaggatc

SEQ ID NO: 385368 - DNA, 405 bp, Homo sapiens
tgtgttttttaactacaaacttgtgatagtttaaccacatggttgtaaaacatatttattataggaaaatgtattttaagttattaaagagcaggaattaaacagacttgtttattgttcttaacccaccaatattatttaatatttttgaaataattttacctgtgctgcttctttatcagtggagattaatgttaccttccacagatctaatctgagcacaatgtgaagcttaggtttttttgataaaacacaaatttcttcctgtcatttatccatgattttgaatatgattcaaacaactctaaaatatcattattcttgacttcatcaaattctttacctttcacaagattttcaatttcactctgcartcattttgcaccacagttatactttatgatt

SEQ ID NO: 385369 - DNA, 660 bp, Homo sapiens
ttacctctaaatgcttcattgttctttcaaaggtactaaagaatattcctaaaacccacagacacccacagaaaattgatgagttagcctgatgtctacaatatattttgttggcagccaaagtaaaataaaaatatatctgaaaaactacttcactttagtaatgtcaaacaaattttaaaaaattatttgtattataagacactagagtaactatagacaaattcattgtactttaatgttttaaaatataatattaaatttattcaagaatctttaagagtaaaactatattctgtattatttttaaatatttaatgtactatcatgaatatgattaatttaaattctgaaattattatactctgctttgaaaataattgacctcacactttaaatatgtgcttattgtttasagagagatagatgagaagactttggacttgaaaacggttttggacctgaaagctttgtctgtagccctaaaagctagacctaaattccacatatgtcattgaatttctatgaaatttgacaacttaaatcactgtaaaatttgctttcttggttttctcttctgcaaaaaggagataatatcttcaggggcattgtaaacttaaaataaaagttgtccataaaagtttgttgaaaaataataca

SEQ ID NO: 385370 - DNA, 609 bp, Homo sapiens
taaattaatttaccttgctagggattgctttggagaatcaaattagaatttattctgctttaaccatcaaaggctaagtatgttaattaaggctagaggaggcaaagaaaaattcaaagtgagaggctgaatggggctgggggctgtttagycaagtgctaaatgttgtgttgcagaactggttgagattagagaggaatcatggaaaggaacagaaaactagaaatgagagaaaaatttagaaagtgatgggaaaaagataataggaatatatgttagcttaggatcttgaagacaatcaatgtggcaatgactggcctatacagacctaatattggttggaagtagagcatgctgtgaaatggacctgcctttttggttaaaaggagaaaaaacaaataaaatagcattgcatgttgactgctttcataatctttcactctactgttttaattgaatattccaaatgcttccatgaaggtatttttaatcttagttttaactatcatcagtataaaacttttaaaaaaacttttaataatgaatcatttataaagaatgtatccaaggggatttattctattcatattttgccctactacacaccct

SEQ ID NO: 385371 - DNA, 503 bp, Homo sapiens
tactcttctgttaagtttcagcccaggcgtaactctctttgaggggaggctttctagactttcaggggaatcctgggcaggccagctttgtttgtttattcatttcttcagcttatgtaatgcttaccttgctgcatttaacatttgctttatacatctctcttttcggtgagttgctggctctttaaaggcagacatccttgaagtactggtgctgtggacgatgtcatttccattctaagaattcagtaagtgccagttgaagtagactgtcctctccttgccagctcacctacgcctgcttcacctcatcaacttctcgcaaataaatctttcacccccttactcttttctctgggaagcttcattaaaaaatttatatttatgtttaatggaaagaaaaaaatgcaccagaactttatagaagmcatacatttatcttccattcgattcaatcaacttcagttagccaagaggtaaaaataggtccaccagatgagaaa

SEQ ID NO: 385372 - DNA, 635 bp, Homo sapiens
atctatttctgtgcgtattcaatttaaacaattatccccatgtcacaatagattggagaaaataagacagtaggaatgggagtaaaataagagcaaagataggtccttgttattgtatcataatagaaggataaagaatagagttagtttggttgcagtactaaaagaaagcaagctatgaatggtagaaacaaaaaacaagtgataaaactacacacatgattctccgtggtgggataaaaaagagcagaaagaataagtcaaaacagagtcagtgacaggaaagggaracacaaagaattataagatgacaattttgcaatttaatatgtcttaatttagccatattaggtggaagatgatggctggacttttctttgaatggccaacttgctttaaatacaataagataagatacttgaactcagaagaaatttaggctaaagatagagtctcttcagtgatcctcgcaaagatagtcatcacctaagagcagatgagttatttgtggaagaggaatatacacagagaacagagagccaaagcttgaccagcagaatgtatattattcacttttatatctaaactgcacagcaacttttttagagtcattaaaatacatacacacatacaca

SEQ ID NO: 385373 - DNA, 635 bp, Homo sapiens
atctatttctgtgcgtattcaatttaaacaattatccccatgtcacaatagattggagaaaataagacagtaggaatgggagtaaaataagagcaaagataggtccttgttattgtatcataatagaaggataaagaatagagttagtttggttgcagtactaaaagaaagcaagctatgaatggtagaaacaaaaaacaagtgataaaactacacacatgattctccgtggtgggataaaaaagagcagaaagaataagtcaaaacagagtcagtgacaggaaagggagacacaaagaattataagatgacaattttgcaatttaatatgtcttaatttagccataytaggtggaagatgatggctggacttttctttgaatggccaacttgctttaaatacaataagataagatacttgaactcagaagaaatttaggctaaagatagagtctcttcagtgatcctcgcaaagatagtcatcacctaagagcagatgagttatttgtggaagaggaatatacacagagaacagagagccaaagcttgaccagcagaatgtatattattcacttttatatctaaactgcacagcaacttttttagagtcattaaaatacatacacacatacaca

SEQ ID NO: 385374 - DNA, 572 bp, Homo sapiens
ttgctatgtgcaactttagatattggtaattttatatttcaccgatagttctacaacatataaactatcaacaaatcgtccatttaacagcacataggctgcacaagaaaagatcactttcttttctataaatcaaattaatttctaaatccaagacctgtcattctatgctagtggaaaactccagttcttcctgagtctgtgacccctttgcaaaattttatcaagataatacaatgccagkgcactgggtgggatttattttattctcagtatcatcacgtctcaacttgatatagatgtgagatttatttctgcataccccttcagtattagcacatttctttgatttttttgctgtaataaaaataatctgtaaggcctcctaccttagtttccatctgctatgcacaatgcaaaccttccttttaggtatctaataattatccttaaggtgattccagccagcagggcacaggtttcctttgctcttctggcataagaacatctctctgctccaccacttgaagtatttccttttaatcttttaatagggcagatagtcccacttt

SEQ ID NO: 385375 - DNA, 572 bp, Homo sapiens
ttgctatgtgcaactttagatattggtaattttatatttcaccgatagttctacaacatataaactatcaacaaatcgtccatttaacagcacataggctgcacaagaaaagatcactttcttttctataaatcaaattaatttctaaatccaagacctgtcattctatgctagtggaaaactccagttcttcctgagtctgtgacccctttgcaaaattttatcaagataatacaatgccagggcactgggtgggatttattttattctcagtatcatcacgtctcaacttgatatagatgtgagatttatttctgcataccccttcagtattagcacatttctttgatttttttgctgtaataaaaataatctgtaaggcctcctaccttagtttccatctgctatgcacaatgcaaaccttccttttaggtatctaataattatccttraggtgattccagccagcagggcacaggtttcctttgctcttctggcataagaacatctctctgctccaccacttgaagtatttccttttaatcttttaatagggcagatagtcccacttt

SEQ ID NO: 385376 - DNA, 572 bp, Homo sapiens
ttgctatgtgcaactttagatattggtaattttatatttcaccgatagttctacaacatataaactatcaacaaatcgtccatttaacagcacataggctgcacaagaaaagatcactttcttttctataaatcaaattaatttctaaatccaagacctgtcattctatgctagtggaaaactccagttcttcctgagtctgtgacccctttgcaaaattttatcaagataatacaatgccagggcactgggtgggatttattttattctcagtatcatcacgtctcaacttgatatagatgtgagatttatttctgcataccccttcagtattagcacatttctttgatttttttgctgtaataaaaataatctgtaaggcctcctaccttagtttccatctgctatgcacaatgcaaaccttccttttaggtatctaataattatccttaaggtgattccagccagcagggcacaggtttcctttgctcttctggcataagaacatcyctctgctccaccacttgaagtatttccttttaatcttttaatagggcagatagtcccacttt

SEQ ID NO: 385377 - DNA, 624 bp, Homo sapiens
gggtcacaagaccagatgaggtagtttatcaatcttggtggtatcagctggtgcatcagaacgtagagtcagcaaaatatctcaagcacactgatctcaggttttacaactgtgactcctaaatygtaatttctaatcttatggctaatttgttagtcctgcaatggcagtacagttcccaaggaagaggaagttttcttttgggaaagggctgttatcaccttaatttcaaagttaaacaataaactaagttcctctcaaagttagtttggcctatacccaggcatgaacaaggacagcttggaggttagaagcaagatgaagttggttaggtcagatctttttcactgtcataattttctcactgttataatttttgcaaagatggttccatttagaagtcagatttataaaaccttcaaataacaaagtattataatacttagataatatactgatgagaatattagcaatcaaaattattttaaaaccttagaatattgtgtcttaagcaaaataataatataaaactgaatgtaaatttctaaattgaactaatacagcaaggagatagcctgaaagtagttcctattaacaaaaatgtcttcacgatattatttaatt

SEQ ID NO: 385378 - DNA, 626 bp, Homo sapiens
tcttgttcatctttgttcggatagaggaaggtttcccatcaaaaccattgtcctcccaactcacactggtcttactttctgaaattccttcaaggctgatttttgagccagtgactaacaagaatgaaattggattcatcaggcccatttctaatgagcccctgatgagttgaatgtggactcagatttttctgagtggcatgggagtacggcaatagaggtgggggtaagggaggagtacctaaataaaactggagttctgtttgaactggcgaagaacgaataaatgckgaataaacatccaaccatgttcacaatgtgaataaatgaagaacatattctttagagcagtttttattttcattctttaggttaactccagtaatgttcaaacaaccaggatttccaatatcaagtttcaaagaatgataaaaagctagtcagtgtgtctctggtaacttgggctaccttttacaattttcatatatataattctaactacatttggtaaaaatagggtatcaatgtattacaataaactacaactgctggtgagcttaagggactgctagataaacaccattaaagtgattgattatggatttagttgaattgacccaattcag

SEQ ID NO: 385379 - DNA, 583 bp, Homo sapiens
tattcttgtgatagtgagtaagtctcatgagatctgataggtttatcaggggtttctactttggcttcttcctcattttctcttgccaccaccatgtaagaagtccctttcacctcctgtcatgattctgaggcctccccagtcacatagaactataagtccaattaaatctctttcttttgtagattacccagtctggggtatgtctttatcagcagtgtgaaaatggactaatacaccatgttactagctttggaatattccttaaattcttttccgtctctcatttattatatgggaacatctyagtaagattttcaaagcaacacttgttgatcttggccaatgttttattgcacctgccctaattctgcccttgagaacgttcagttctagagcagtttcctctatatatatgtgtgtatgcacacatgccggttttacaatatccttcatatcaatatcaaatgaaaaattatattgttgtcctagtctggaggcaattttggcagccagctcctagtgactcatgctcggtaagtatcaccatgaccatgaaatatgcaagatccattgttctaat

SEQ ID NO: 385380 - DNA, 583 bp, Homo sapiens
tattcttgtgatagtgagtaagtctcatgagatctgataggtttatcaggggtttctactttggcttcttcctcattttctcttgccaccaccatgtaagaagtccctttcacctcctgtcatgattctgaggcctccccagtcacatagaactataagtccaattaaatctctttcttttgtagattacccagtctggggtatgtctttatcagcagtgtgaaaatggactaatacaccatgttactagctttggaatattccttaaattcttttccgtctctcatttattatatgggaacatctcagtaagattttcaaagcaacacttgttgatcttggccaatgttttattgcacctgccctaattctgcccttgagaacgttcagttctagagcagtttcctctatatatatgtgtgtatgcacacatgccggttttacaatatccttcatatcaatatcaaatgaaaaattatattgttgtcctagtctggaggcaattttggcagccagctcctagtgmctcatgctcggtaagtatcaccatgaccatgaaatatgcaagatccattgttctaat

SEQ ID NO: 385381 - DNA, 534 bp, Homo sapiens
ctgttaattagacatttggtaaaattaattgataaacctattatgtgcctatttycttgattaatgtttacatttagtttatttttactgagttcctccagatttttttcaccacttgagcgaattttggcaatttttattttaatagaaaaattatcttggcatcaagactttaaaatttattgtatgacatttacgtatctgtagttaagtatcctttttcctccttgtgctattgattagtcagaatttgcaaaggttgtgaatatcatttatcttttcaaggatccagattctttaatttactttttaaattgctattttattaacttctactttttatttaattctttattatttcctttaaaatagtttttgccttttttccccaggtaataagagtctcatactttccccccgatctttctaataaatgtactaattttaaaaattcttattttcacataaatatactctatgctaatcattctccttttaatgctgtgttagcagcattctattcaggtttaactt

SEQ ID NO: 385382 - DNA, 534 bp, Homo sapiens
ctgttaattagacatttggtaaaattaattgataaacctattatgtgcctattttcttgattaatgtttacatttagtttatttttactgagttcctccagatttttttcaccacttgagygaattttggcaatttttattttaatagaaaaattatcttggcatcaagactttaaaatttattgtatgacatttacgtatctgtagttaagtatcctttttcctccttgtgctattgattagtcagaatttgcaaaggttgtgaatatcatttatcttttcaaggatccagattctttaatttactttttaaattgctattttattaacttctactttttatttaattctttattatttcctttaaaatagtttttgccttttttccccaggtaataagagtctcatactttccccccgatctttctaataaatgtactaattttaaaaattcttattttcacataaatatactctatgctaatcattctccttttaatgctgtgttagcagcattctattcaggtttaactt

SEQ ID NO: 385383 - DNA, 600 bp, Homo sapiens
gagagctgccatggcaaagtaccacaaactaggtgggttaaacaacaaaaattattgtctcacagttctggaggttggaagtctgaaatgcaggtgtgggtagggttgattccttctgagggctatgaaaacaggatgcattccagccctctgttcttggctttagatggcaatcttctccctatgttttcagattgtcttttctctgtacatgtctgtgtcaaaatttgaccttttcatacggacttcagtcagattgcattaggggcataacttacttcattattatcttatcttagtttaagtaattatagtcatgcttcacttaactgtgaggatacgttctaagaaatgtgtccttaggwgattctgtcattgtgcaaacattatagcctatacttataaagcctagatgatatggttttctatacaacttggctatatgatatgtcctattgctcttaggctacaaaactgtacagcatattactgtactgaatactgtaggcaattgtaacacaataagtatctgtgtaactaaatatatcaacatagaaaaggtgcagtaaagctatgatattataatcttatgggaccact

SEQ ID NO: 385384 - DNA, 600 bp, Homo sapiens
gagagctgccatggcaaagtaccacaaactaggtgggttaaacaacaaaaattattgtctcacagttctggaggttggaagtctgaaatgcaggtgtgggtagggttgattccttctgagggctatgaaaacaggatgcattccagccctctgttcttggctttagatggcaatcttctccctatgttttcagattgtcttttctctgtacatgtctgtgtcaaaatttgaccttttcatacggacttcagtcagattgcattaggggcataacttacttcattattatcttatcttagtttaagtaattatagtcatgcttcacttaactgtgaggatacgttctaagaaatgtgtccttaggtgattctgtcattgtgcaaacattatagcctatacttataaarcctagatgatatggttttctatacaacttggctatatgatatgtcctattgctcttaggctacaaaactgtacagcatattactgtactgaatactgtaggcaattgtaacacaataagtatctgtgtaactaaatatatcaacatagaaaaggtgcagtaaagctatgatattataatcttatgggaccact

SEQ ID NO: 385385 - DNA, 534 bp, Homo sapiens
tgttagactaatgggagatgctggtttgaatcttttactcttggaaactaaattactatcatagaagcaattacgatttgtgccttcatctttgtgcatgtgttccttcctgaaataattgcatccatcatacagctgggactgggatggtaacccaatttcacacatagcctctcctctctttctgccttaggcacactcagaaacagtcaaaaacacccgaaaggtgtttaactcacaaaactgaaagttcaygctctctaattagttaatgagactatgagtaagtaaacttgtttctatctgtatgtggtttgaaatgtctaataggtatctagtatctcacaaaaagttagaaaaattgcaaaatgttagagctgggaggagcattattctatttttacgtcctatggttgtgcattggcataacctggggaattaacatgcattggaatcacctgggtaattaaaacataccattgcccaggttcttccttacaccaattaactcatactgtccagggcagtgggtgt

SEQ ID NO: 385386 - DNA, 468 bp, Homo sapiens
ctaaactaaatattctaggttcttattaggcatgatgttacataatccagccacctcataaatatttttgaggagcttcctgtgttttttgtcacttgtcacrtgtaagactaccatacatggtcaatagatttgtgtattgtataccacacaattccaagggcacaactcactggaattggtattcactgtcctcccggagttgtacaatggacactgtgcataactgtacatagcagtcctgcagctctcatctcaaacctcctctctcagcttttgtgtgatcccctctcctgtattgctacgcatcatccctgcatcttcaagcatgtctgcctcacctcccatccaaatatggacgtgctacctccctttagacatctaaaccattggctgcagtctaaaaatttttgctctgaactttgtggtatcaaaagattatatatatacatatatatgtatatatat

SEQ ID NO: 385387 - DNA, 583 bp, Homo sapiens
agctagagtatgatccagtaatatcactcctagatatatacccaataaaattaaaaacatatgtacacacaataattgtatacaaatatggwaacattatttaaatatccaaaaagtggaaacaacccaaatatccatcaactgatgaatagataaaaagttgtggtatatacatataatagaatactattcagcaataaaaaagattgaacttctgacatatgatacattgtagatgaacctcagatcatgccaagtaaaataagccagatacaagagaccacatattgtatgattccatctatataaaatgtccataaaaagcatgctaatcaagacagagtgtagattaatggttgccttggaatgggcatgagaaaaagattaaatgttaataggcatgagggatattatttaaaggataaaattgttctaaaatttagttatggtgatgtctgacccactcattaaagttaataaaaatcattgacttgtatacatgaaattacggatgatttttataatatgtagactattcctcaataaagctgttttaaacaataaaaataaatttaaaaaaaat

SEQ ID NO: 385388 - DNA, 583 bp, Homo sapiens
agctagagtatgatccagtaatatcactcctagatatatacccaataaaattaaaaacatatgtacacacaataattgtatacaaatatggaaacattatttaaatatccaaaaagtggaaacaacccaaatatccatcaactgatgaatagataaaaagttgtggtatatacatataatagaatactattcagcaataaaaaagattgaacttctgacatatgatacattgtagatgaacctcagatcatgccaagtaaaataagccagatacaagagaccacatattgtatgattccatctayataaaatgtccataaaaagcatgctaatcaagacagagtgtagattaatggttgccttggaatgggcatgagaaaaagattaaatgttaataggcatgagggatattatttaaaggataaaattgttctaaaatttagttatggtgatgtctgacccactcattaaagttaataaaaatcattgacttgtatacatgaaattacggatgatttttataatatgtagactattcctcaataaagctgttttaaacaataaaaataaatttaaaaaaaat

SEQ ID NO: 385389 - DNA, 601 bp, Homo sapiens
gttaaacatagttattaaatttttaaaatgattgctttatgactattatctagcagatcaaaatattgttgaactaatttcttagcagtccaaatgatgtatttacacatcctcacaatcaacttatttgcctgagtgaaaaccaccttttaatatattaatgtatgaagtcaccatctgtcaattgttaatttattcatttaaaaattatctactttactggtaaagttatggggattatttgtgtccacgtgtggtatgtgtcygtatgatatattacaaaaagaattttctaatatcagtttggttaagataccaggacaaaaccaatacttattaacaacttccattatccaagtccaggaatttgtaactgattctgccaataatttccaactacttaagaaaaagtaaagaactctctagaaatttgaaagcaattaaaaattaaacatttccttactgtattcccctaaaattaaagtaaagtggagggatgtggagctttcaagagaatctcttagagagcttgaactttctagtctccaagaatgttggaaatgtgggaactaataaattactaacattgaaaacaaaataa

SEQ ID NO: 385390 - DNA, 613 bp, Homo sapiens
agtaggcaactgggatctatcccaggagagaaatgtacatactcttgcaaatgcctctccctttctctccccatccaagaaaaggattcttcataatttggaataaagactgtcattggttatactaaggggaagtataagaagaccccaaaaggaggactcacatcttaaacctataatacaactatgttgggaagactttcaatgaagcccaataaataaataagcccacatgagctggaaagaataatgtattggaaaaacattctcctctttaatatcctaagawgctaccattggtcatttgtttctttgtgaacgaggcttccctactgtattttgggattgaaatgataatgggatacttagggtaaagtcttcccattattatttttcttctagtgaaggaattttattttctgtggtatttaattttactttagaatttaaataggtctaccacactgcagtaaaaatgcatagataacagaattaatcaaaataacttggaagaataaaatgtggcataaaatcttaacatagctgagagttttaagttattctgtagaggagggtgaggaaaaaaaacagttttggaaaattaccataaaac

SEQ ID NO: 385391 - DNA, 613 bp, Homo sapiens
agtaggcaactgggatctatcccaggagagaaatgtacatactcttgcaaatgcctctccctttctctccccatccaagaaaaggattcttcataatttggaataaagactgtcattggttatactaaggggaagtataagaagaccccaaaaggaggactcacatcttaaacctataatacaactatgttgggaagactttcaatgaagcccaataaataaataagcccacatgagctggaaagaataatgtattggaaaaacattctcctctttaatatcctaagatgctacyattggtcatttgtttctttgtgaacgaggcttccctactgtattttgggattgaaatgataatgggatacttagggtaaagtcttcccattattatttttcttctagtgaaggaattttattttctgtggtatttaattttactttagaatttaaataggtctaccacactgcagtaaaaatgcatagataacagaattaatcaaaataacttggaagaataaaatgtggcataaaatcttaacatagctgagagttttaagttattctgtagaggagggtgaggaaaaaaaacagttttggaaaattaccataaaac

SEQ ID NO: 385392 - DNA, 592 bp, Homo sapiens
agctttaaatgtgattttgtgtttgacacactcttttgtgcctctgctccaggctccagactttaagcctctagaacgataagtgaataaatttcttttgttttaaaggcaccaagtgtgtggtgaatttgttacagtagccctagaaatctaatactaacaaaaagaatgttagagttgaattagaagtgtcagtgagaacttaggaatttaaaaaatcatattcttagcactgttcactgagggaatctagaagtaattacactgcagtaataacgagcccatcccatgcccaaatcttggtctctaactaccattttccagtcaaaagaatctgagctccctagagaaatgactttttcaaggctggatcaaggaaactgccaggcaatcttagatgatcttggtgatcttgatgtgccagaagattaatgggatcatgtgaaaagaacacagaaactggyctgaagggcttcctgttggccagatttgagacaatttgagcatcaaaaggaataatgagggtaatggatcataactggaaaatcagtttgcaaccatcaatgtacttactattgaatacttgtaaaga

SEQ ID NO: 385393 - DNA, 618 bp, Homo sapiens
ggatcccccttcttgccctccacccccataagattgtgaagggtttactgctccttccatctgcctgaccccttcactatgactacacagaatctcctgatagtaaagggggctggagacaaggataagttatagagcagttggaggaagcatccaaagattgcaacccagggcaaatggaaaacaggagatcctaatatgaaagaaaaatggatcccaatctgagaaaaggcaaaagaatggctacttttttctatgctggagtattttctaataatcctgcttgacccttatctgacctctttggaaactataacatagctgtcacagtatagtcacaatccacaaatgatgcaggtgcaaatggtttatagccctgtgaagttcttaaagtttagaggctaacttacagaaatgaataagttgttttgttttatagcccggtagaggagttaaccccaaaggtgatatggttttatttcctgttatgtttaacttrataatcttattttggcattcttttcccattgactatatacatctctatttctcaaatgttcatggaactagctcttttattttcctgctggtttcttcagtaatgagttaaataaaaca

SEQ ID NO: 385394 - DNA, 619 bp, Homo sapiens
ggcaggagtttcaccatgttgcccaggctggtctcaaactcctgggcttaagcgatctccccaccttggcctcccaaagtgctgggattacaggtgttagccactgcacctggcccaaacctcaccatcttatcaaagtttctacttagaaatcagagtcccttagaaatgatgtaagcctctactccagacttccttctctctcatcttctagtccttttctaggccttgggcaggccagtggacactgctcaggmataccatctattcccatctagggacccttctccttccccacacagtgaatggcacactcctcacagttctgcctattgggaagatcttccctccctactgtctttgagggtcacctctgggtgtgactggaatgcagctatcccctattttcagcagacccttccataagcccacttcaggcctattcctcctcctcgtcctcctcctcctcctccaggtggctatatcatttttgatttaatattttatctggggtgggcagggagcattttcagaggtttccatagtttttccccattgtgattgctcttacccagatcagtaagatgaggaaagaacagcaaagcaaactgagaaggag

SEQ ID NO: 385395 - DNA, 569 bp, Homo sapiens
tgacccaagagggagagaaaaattgattcagtaaattcctgttgcaaaaacgtggcactggatgggagtagagccactaaacataagagaaggagctcaagtyttgctgtggggtttgaaagtgggaaacctgggcttctggcatcaactgaggcaaacaggaacataaggcctagtccagggaaggggctcaggggatgagagaatgccatttgtgcctgctgaggaaagctttcatggggagggagcatggggtgctccaaactttccaaaagccactttggtgggggaaatgtaaagaggaactttgttgcacttcccaaaaatgattctaaaagaggaagtcaaactaagcacagaaacaagtttcacattaaccgctcttagtgttatggagacaatagatttcttatcttttaataacaatattggaagagaagtaacaccaagagtttatttgagtgcctactctgcactgtgcatcctgctagacaatgaagctagaaaaggggattagagctggtccctaaaagacctcactctctagctgggatagggagaagggtaga

SEQ ID NO: 385396 - DNA, 581 bp, Homo sapiens
aaagtgcttacaggatgaaagccagggtgatcagggactcacctcttttgctttcctttttatagaggccatagctctgcactgactgccatctaatgtctatttcatgtatttatttggtctagttttctaattggttttatgggtaggaggcaagttcagtgtccagtacactaatgtggctggaagtggaagtccttccaggtgattcagatgcataataaaggttgcagagtgtattagtttcccagggctgctgtaacaaagtaccacagactgggtggcttagacaagagaggtcattatagtctcacagttctggaggctggacatctgaaattgagctgtcagcagatttggttccttctcaaggctgtgagggaaggatgtgttccaggcttctctccttgacttgtagatggccatcttctctctgtgtcttttyacgatgtcttccttctatgcatctctgtgttccaatttcccctttttatgaagacaccagtcatatttgattatgaccccactttaacttgctaaagactatttccatataagtttatattcggggatactggggg

SEQ ID NO: 385397 - DNA, 609 bp, Homo sapiens
atacaattgcattagatgctggttggatctttagctgcagtcctcatgctgtacattggatctctmgacttgctcctcttacatatttgctactttgtatcctttgacctacatcttcccatttcctcccatcttgtccctggtaaccagttttttttttatatatttataaatataccacagtacatttgaccttttccccccacgtacaaaacagatcattcagtatttgtctttctgtgtctggcctgtttcacttaacataatgtcctctagatccatctatctttttgcaaatggcaggatctccttcctttttaaggatgaataatatttcatagtgtgatgcgatgcacatgccacaatatctttatccacttatctgtcaacagacacctaggttgtttccatatcttggccattgtaaattaatgctgcactgatcatgggagtgcagatatctttatgagagggtgatttcacttcctttgggtctatactcagaagagggtctgctgggtcagggtctgctgggtcatgtggtaggtctaatttcaacttccttaggaacctccatagtgttttccataagggttgtatgaatctaca

SEQ ID NO: 385398 - DNA, 609 bp, Homo sapiens
atacaattgcattagatgctggttggatctttagctgcagtcctcatgctgtacattggatctctcgacttgctcctcttacatatttgctactttgtatcctttgacctacatcttcccatttcctcccatcttgtccctggtaaccagttttttttwtatatatttataaatataccacagtacatttgaccttttccccccacgtacaaaacagatcattcagtatttgtctttctgtgtctggcctgtttcacttaacataatgtcctctagatccatctatctttttgcaaatggcaggatctccttcctttttaaggatgaataatatttcatagtgtgatgcgatgcacatgccacaatatctttatccacttatctgtcaacagacacctaggttgtttccatatcttggccattgtaaattaatgctgcactgatcatgggagtgcagatatctttatgagagggtgatttcacttcctttgggtctatactcagaagagggtctgctgggtcagggtctgctgggtcatgtggtaggtctaatttcaacttccttaggaacctccatagtgttttccataagggttgtatgaatctaca

SEQ ID NO: 385399 - DNA, 601 bp, Homo sapiens
agatatctttatgagagggtgatttcacttcctttgggtctatactcagaagagggtctgctgggtcagggtctgctgggtcatgtggtaggtctaatttcaacttccttaggaacctccatagtgttttccataagggttgtatgaatctacattcccaccaacagtatactagggtttccttttctccacaccctcaccaacacttgttatcgcttgtctttttgataattgccattctgatgaatatgaagtgatatctcattgtggttttcatttgcatttccttggtgattagtgatatcgagcatcttttcatatacctgttgctatacttgaatgtgtcctccaaagttcatgtgttggaaacttaatccctaatgcaacagtgttgggaggtgggacctttaagagatggttaggtcatgaagtcagccctcatgaatgggtttmtgtcagtgtcaagggagtgggtttgttatcaagagagtgggtttgttctaaaagtaagttcagctctctcttgctcttgcgtgcactcgcttgcccttctgccttctgctatggggtgacacagcaagcagatcctcaccagatgctg

SEQ ID NO: 385400 - DNA, 589 bp, Homo sapiens
ctgtgtccccactcaaatcttatcttgatctgtagctcctataatccccgtgtgtcatgggagggacctggtgggaggtaattgaatcacgagggcaggtctttccattggtgttcttgtgatagtgaatatgtctcaagagatctgatggttttataaagggcagttcccctgcacatgccctcttgcctgccgccatgtaaggcatgactttgctcctcctttgcctcccaccatgattgtgaggcctccccagccatgcggaactgtgagtcaattaaacctcctttctttatacattacscagtcttgggtatgtctttattagcagtatgagaacagactaatacaacatctcaggtttgaccatagtgggacatatttttgaaagacgtgaaagtacaaagaaactaaaggcaggcagatagcctctaaattcttgggcataccatttacactccattgacatcttggtttctttctaaggactgcactataatatccctacaatcattaaagcaaaaagcaggcttcctcgatctttcacaaaacgatcttgcctttgtcaatcttagcttttgtttctagg

SEQ ID NO: 385401 - DNA, 613 bp, Homo sapiens
tgtccaggactcactggatgtcagtcagggtatgtggagggcaccacagggtatggtgcagggcaccaccttcatccttcagcatagtaaggaagaaaggcatttacagaaacaatctcaataaaaatgagataacatgaaaccaacatacaaaatcagttattttttatacattaataacaaactctttgaaaactaaattaagaaagctatcacatgtacaataacataaagaattagtaataaatttaaccaaggaggtaaaagagctgcacactgaaaactataaaacatagatgaaagaaactgaaaaagacacaaataaatagaaagataatttgcattcatggattggaagaattaaaattgttaaaatgttcctattacccaaagctctctacaggatcaattaaatttctatcaagtttccaatgactttttttttttacagaaataggaaaaaaccttcctagaattcatatggaaccacaaaagacccagaagagccaaatcarttttgtgcaaaaagcaaaacaaaacaaaacaaaacaaaaaacaaaaaaaccaacttggtgacatcacacttctcgatttcagaatatactacaaagcc

SEQ ID NO: 385402 - DNA, 363 bp, Homo sapiens
agttaggctatgagtggataattgttttagcctggtaataggtatgtgaaagttgagtctacttttgtctgtgttagaaattttccacaataataggcttaaaacaaatgaatacaggaaaaatttaggagaaataactctwgcagaaaatttatatatttgtcaaataattttaaaggttaaaaatattcattagccagtaatataggcagtgttttgacatgtcctcaatattattaatatctttgcttttaaataaaacaaaacaaaacaacaaaactcatcagcaaaacaactttgagattgatagaaaaaaccctgacgacgtaaaatagtttaaaaaagtcattataagttagtgta

SEQ ID NO: 385403 - DNA, 628 bp, Homo sapiens
tcttattaattagtttatgagaaattctagcaggacaaattaacatgaatgggtggaatgaatgaaggcatagattaaacagttaggctatgagtggataattgttttagcctggtaataggtatgtgaaagttgagtctacttttgtctgtgttagaaattttccacaataataggcttaaaacaaatgaatacaggaaaaatttaggagaaataactctagcagaaaatttatatatttgtcaaataattttaaaggttaaaaatattcattagccagtaatataggcagtgttttgacatgtcctcaatrttattaatatctttgcttttaaataaaacaaaacaaaacaacaaaactcatcagcaaaacaactttgagattgatagaaaaaaccctgacgacgtaaaatagtttaaaaaagtcattataagttagtgtattataacagtacttcttattaaaaaaaaatctatttacatgtcttttacccaaagtagtatgtttttgctaagaaaatatatttttcaccagtaaagagattaaacatggagtatttacttctcccagaaatgcctcccaagctcggattttgtattcattggaattaaaatgacaatttctaaa

SEQ ID NO: 385404 - DNA, 628 bp, Homo sapiens
tcttattaattagtttatgagaaattctagcaggacaaattaacatgaatgggtggaatgaatgaaggcatagattaaacagttaggctatgagtggataattgttttagcctggtaataggtatgtgaaagttgagtctacttttgtctgtgttagaaattttccacaataataggcttaaaacaaatgaatacaggaaaaatttaggagaaataactctagcagaaaatttatatatttgtcaaataattttaaaggttaaaaatattcattagccagtaatataggcagtgttttgacatgtcctcaatattattaatatctttgcttttaaataaaacaaaacaaaacaacaaaactcatcagcaaaacaactttgagattgatagaaaaaaccctgacgacgtraaatagtttaaaaaagtcattataagttagtgtattataacagtacttcttattaaaaaaaaatctatttacatgtcttttacccaaagtagtatgtttttgctaagaaaatatatttttcaccagtaaagagattaaacatggagtatttacttctcccagaaatgcctcccaagctcggattttgtattcattggaattaaaatgacaatttctaaa

SEQ ID NO: 385405 - DNA, 628 bp, Homo sapiens
tcttattaattagtttatgagaaattctagcaggacaaattaacatgaatgggtggaatgaatgaaggcatagattaaacagttaggctatgagtggataattgttttagcctggtaataggtatgtgaaagttgagtctacttttgtctgtgttagaaattttccacaataataggcttaaaacaaatgaatacaggaaaaatttaggagaaataactctagcagaaaatttatatatttgtcaaataattttaaaggttaaaaatattcattagccagtaatataggcagtgttttgacatgtcctcaatattattaatatctttgcttttaaataaaacaaaacaaaacaacaaaactcatcagcaaaacaactttgagattgatagaaaaaaccctgacgacgtaaaatagtttaaaaaagtcattataagttagtgtattataacagtacttcttattaaaaaaaaatctatttacatgtcttttacccaaagtagyatgtttttgctaagaaaatatatttttcaccagtaaagagattaaacatggagtatttacttctcccagaaatgcctcccaagctcggattttgtattcattggaattaaaatgacaatttctaaa

SEQ ID NO: 385406 - DNA, 587 bp, Homo sapiens
caagagcacacccggaggggcacagggtgtcttggtaagaggaagaaatagggattattagaggacttggggtcatattagggtatttggggtagggttcaaggaagaatgggtttgctccagactgggcactgtcaatagctgggaaaactatgattgttctctccatgatttcatttacagagtagagagcstgaacgggccaaggtgttaaagaagccacagtgtgtagacgagcccgggaaggagggcatggggccatctgcatggcctggccagtgttctcaagctcatctttcctatgctcatcacagagtggccttgcctgatgcggtgtctgtgaaactctctatggtaacaagagagtgcctcggccctcaatgcctgacccactcccagtaaatggcagtcagggctgctttctctgcaatgcattttttacacatgcaatttcacctcttggatggcttcattgccatctgtgtgctgaagagttctaaattaaacccaggttgtctctccagcagcatttttaaactgtacctccctaactcatacgcagttttaagtgtcaaagtggtggacca

SEQ ID NO: 385407 - DNA, 622 bp, Homo sapiens
tttatattaaaagtccttatataaattatttcatatgtcattttcttgtgatatgttccaccctgatttataacaggattttgtaatgatcttgaatgcattggaagatagtgaagtgccttctcaatcaataaattgcaattgtaattaagttcaatctttaatatatgtaaatgttgacattctcagagaaattaattaagactatattgtttgagactgggatttgatyttcctggacgctaaataaaacctagaattcacctttacgtgtcccggtccagcagatggcagccaattcacaccattttggagtcaaggctcttgatgtttgagatgagatctgagctgaagctgcttttcaagaaaggttcgatgttgtttacactacagtttgtaaaatatgaacttgagtaacaataagttacagacaagcagcaatcaaactacatgattaattgttatttgttcaatttccattatctgagaataaatttaaaggattaaaacctgcttacatccttagtttacaatttttaccattagtgtctgcaggaaatcgtattgtctatcaaagtaagcaatttgacttgtatacagaagtacacaccagagtcagttt

SEQ ID NO: 385408 - DNA, 622 bp, Homo sapiens
tttatattaaaagtccttatataaattatttcatatgtcattttcttgtgatatgttccaccctgatttataacaggattttgtaatgatcttgaatgcattggaagatagtgaagtgccttctcaatcaataaattgcaattgtaattaagttcaatctttaatatatgtaaatgttgacattctcagagaaattaattaagactatattgtttgagactgggatttgatcttcctggacgctaaataaaacctagaattcacctttacgtgtcccggtccagcagatggcagccaattcacaccattttggagtcaaggctcttgatgtttgagatgasatctgagctgaagctgcttttcaagaaaggttcgatgttgtttacactacagtttgtaaaatatgaacttgagtaacaataagttacagacaagcagcaatcaaactacatgattaattgttatttgttcaatttccattatctgagaataaatttaaaggattaaaacctgcttacatccttagtttacaatttttaccattagtgtctgcaggaaatcgtattgtctatcaaagtaagcaatttgacttgtatacagaagtacacaccagagtcagttt

SEQ ID NO: 385409 - DNA, 622 bp, Homo sapiens
tttatattaaaagtccttatataaattatttcatatgtcattttcttgtgatatgttccaccctgatttataacaggattttgtaatgatcttgaatgcattggaagatagtgaagtgccttctcaatcaataaattgcaattgtaattaagttcaatctttaatatatgtaaatgttgacattctcagagaaattaattaagactatattgtttgagactgggatttgatcttcctggacgctaaataaaacctagaattcacctttacgtgtcccggtccagcagatggcagccaattcacaccattttggagtcaaggctcttgatgtttgagatgagatctgagctgaagctgcttttcaagaaaggttcgatgttgtttacactacagtttgtaaaatatgaacttgagtaacaataagttacagacaagcagcaatcaaactacatgattaattgttatttgttcaatttccattatctgagaataaatttaaaggattaaaacctgcttacatccttagtttacaatwtttaccattagtgtctgcaggaaatcgtattgtctatcaaagtaagcaatttgacttgtatacagaagtacacaccagagtcagttt

SEQ ID NO: 385410 - DNA, 622 bp, Homo sapiens
tttatattaaaagtccttatataaattatttcatatgtcattttcttgtgatatgttccaccctgatttataacaggattttgtaatgatcttgaatgcattggaagatagtgaagtgccttctcaatcaataaattgcaattgtaattaagttcaatctttaatatatgtaaatgttgacattctcagagaaattaattaagactatattgtttgagactgggatttgatcttcctggacgctaaataaaacctagaattcacctttacgtgtcccggtccagcagatggcagccaattcacaccattttggagtcaaggctcttgatgtttgagatgagatctgagctgaagctgcttttcaagaaaggttcgatgttgtttacactacagtttgtaaaatatgaacttgagtaacaataagttacagacaagcagcaatcaaactacatgattaattgttatttgttcaatttccattatctgagaataaatttaaaggattaaaacctgcttacatccttagtttacaatttttaccatwagtgtctgcaggaaatcgtattgtctatcaaagtaagcaatttgacttgtatacagaagtacacaccagagtcagttt

SEQ ID NO: 385411 - DNA, 619 bp, Homo sapiens
tggctctcattctctttgcttgtctgccaccatgtgagatttgccttttgccttctgtcatgattgcctcaccagccacgtgaaaatctgagtccattaaacctctttcttttgtaaattgcccagtctcaggtatgcctttatcagcagtgtgaaaatagactaatacacctgggaataaaactagtcttttttgaagatgtgaaaattgagccaagttgtgaagttcaaatgaatttcaggcagtggttttcaaagtgtggtccctggaccascagcatcaccatctcccaggaacgtggtagagcagcagactccagggtcgcactgcagacttacagaatctgccactcagggtggggcccagggtcctctgtgctaatatccagatgattcagatgcaggttgagtttagggcgaaagagcttgggtgaaggtaaaaagagcttcaggtagacctttggataattatatatgtaaagacacttctgtgaataaaatgttgtattttctttgagttcaattgaatagtgacatttgtttattttcttgtgttcttcacaaggatcttgcaactatatttataaaactagggcacgatgaaattaaatgcctgctt

SEQ ID NO: 385412 - DNA, 619 bp, Homo sapiens
tggctctcattctctttgcttgtctgccaccatgtgagatttgccttttgccttctgtcatgattgcctcaccagccacgtgaaaatctgagtccattaaacctctttcttttgtaaattgcccagtctcaggtatgcctttatcagcagtgtgaaaatagactaatacacctgggaataaaactagtcttttttgaagatgtgaaaattgagccaagttgtgaagttcaaatgaatttcaggcagtggttttcaaagtgtggtccctggaccagcagcatcaccatctcccaggaacgtggtagagcagcagactccaggrtcgcactgcagacttacagaatctgccactcagggtggggcccagggtcctctgtgctaatatccagatgattcagatgcaggttgagtttagggcgaaagagcttgggtgaaggtaaaaagagcttcaggtagacctttggataattatatatgtaaagacacttctgtgaataaaatgttgtattttctttgagttcaattgaatagtgacatttgtttattttcttgtgttcttcacaaggatcttgcaactatatttataaaactagggcacgatgaaattaaatgcctgctt

SEQ ID NO: 385413 - DNA, 450 bp, Homo sapiens
tcaaattagaattataaacacactttcctcattggaggcctaatctgctaagaagaagccagatgtttaatgatgaaaccattattcagaaggacctatcaaagtaaaacaaattgttgttgtttaagcggagaaaaaaacctgctttatgcaagggaacttagaaaaactgctttgagaggatcggtgcttgtactgaatttccatgtaccctttgctgctgctcaagagccagggtttcttctggaaacatcatttagcagatgggaatcyggccttcctaggacaaatctacaggccaggccagctcatttccttgtgcacaaatggtacctgacatgctgacatgctggagtagtcgaatgggaacaagttggtctaggaggctttttgatgttaactttttttttttttgtgagacagggtcttggtctatcactcaggctagag

SEQ ID NO: 385414 - DNA, 450 bp, Homo sapiens
tcaaattagaattataaacacactttcctcattggaggcctaatctgctaagaagaagccagatgtttaatgatgaaaccattattcagaaggacctatcaaagtaaaacaaattgttgttgtttaagcggagaaaaaaacctgctttatgcaagggaacttagaaaaactgctttgagaggatcggtgcttgtactgaatttccatgtaccctttgctgctgctcaagagccagggtttcttctggaaacatcatttagcagatgggaatccggccttcctaggacaaatctacaggccaggccagctcatttccttgtgcacaaatggtasctgacatgctgacatgctggagtagtcgaatgggaacaagttggtctaggaggctttttgatgttaactttttttttttttgtgagacagggtcttggtctatcactcaggctagag

SEQ ID NO: 385415 - DNA, 638 bp, Homo sapiens
ttaattgactcacagttcagcagggctggggaggcctcaggaaacttacaatcatggagtgacgcaaaggagaagcaaagcaccttcttcaaaaggtggcaagaagaagtgccgagtgacgaagggaagagctccttataaaaccatgagatctcgtgagaactcactgtcacgagaacagcatggggaaactggccccatgattcaattacctacacctggtctctcccttgacacgtggggattatgggggttgtgggtattacaactcaagatgtgatttgggtgtggacacaaagcctaaccatatcaatggtcaaataagaatggaaaaaatattgggtttaattacattcaatagactcctttctttcaaggcagggattctcagaagtaatacatatgtcagyctacttttcattgacatgaatataaaatcctcatttcacagaacacctgtgaatatattgaataacattagtattcaacagaacaggatcaggaaacttcctctagaaggcgctttccaaataaagaccaaatacactgctgcaggagggaagaataaattcatttacatatatgtctgtggtaagggataaaatcttaaatttttgctggcttcacttatatgaaat

SEQ ID NO: 385416 - DNA, 589 bp, Homo sapiens
gtgtggtggtatgcacctgtagtcccagctacttaaaagcctgaggcaggaggactgcttgagcctgagagttcaagattacagtgaaccatgattgtacctctgtactccagcctgatgacagagcaaaatcctgtctctaaaaaaataaatttttaaaaagtaaagtcagggaaaaagtaggatgaaaagccaaacgattgttgtctcagaaggaagaacccagcaccgtcaaatctcaaccatgatagaaacagttgtctccaccagcaaaaccatctagaggagccaacacatgctgggaggggtgggggtaggctaaagacaaataatttctattatgtcatgaatagaaagaaaatacatttytaaatcttaattactcaattttcagcttattttgcccatatcaatctagaagtgcaatctgtgatgttctggagttagaagagacctcaagggaaaacaaacaagttaacgtccctcgtcatgacaggactgcccccccccacccccaaatcagttacttattaatgaagggtgtctgcctctgctaacttaacctcatggctatgatattaagttaaca

SEQ ID NO: 385417 - DNA, 648 bp, Homo sapiens
actttcagttcagttatttctacttcacaatcctgggaggcaggctgagcaagggacaccaaagctgagggcagtaaaacgatttggggaagccacacacagcacacgccagagccagaacttgaacccgcatctgtgaattctataatcattccactccacaccacattgattaaaacggctcttaattttttatgtagaagagaccaaatcttcagaaacccaattactacctatttagttatgaaaagtcatttatcctttgctttttagcatttcttaggaggtagggaaggtgaggatatattaaacacagtttcttctttctgaggtttctcattgtttttagcaactaaaaccatgggattttagactaagatcttagayatcatttgcccagagcatttcaaactgtttgtggcagcagaatccctttttttccccaaataccatctttgtatatacaaccaatatattgacacagataaaagcagacccttctgatggagggggctgaggcactgccacagaacccgttttctgaaaaccactgtgttcatcaaagtgtttattaaacagctggaggaactgaggtccagagaggtgaggacacaagggaagtactcatgcaagataatagcagacctg

SEQ ID NO: 385418 - DNA, 604 bp, Homo sapiens
aatcacaatatttttctcacatcaaagtaataaatgtttattgtacaaagttgagaaaatttagaaaagaagaaaaaattatacagaaataatcttgatagctttttgatgtctttttctcatctgtattataggttaaaaaattgttcctactttttttgatcagtttttcatataagattttacataacagcatttccaatgttaattacattcttgaacatgatttttaataactcttgtgtattgcactatttggatgtcccatcatttatttaatcctgtagtcttggacatctaaggacaacctatttctgaagcactttgtttaattggagttttcctatatcttacttaatgatgaatttagttkgctttgcttaaaatgctctgtagaattgtcacactggctgcctgagaaggatgtgatccttggtcttgtcctgagtggatccaatcccaaaggccagctttgaaacaggtgtattttatgatccaaaatgtggtcatctttttgtatgctctaggttgagactatatattctgttgttagataaactatcctctaaatgtcaattcatattgatggtgctattctgttcac

SEQ ID NO: 385419 - DNA, 594 bp, Homo sapiens
aattgccattctcctaggtcggataagagtctggtaaagaaatttctcttgagggcaggattttattacagagaaaggaatgctcagttaacaaattataatggttactcctccaaccccaggtttatttcaaaattgttatttccttatctccctgctggatgccagacatttttctcgcatcttcagtgtgagaatctgatggggcttttggaggtgaaactcatgaaagtgttggagtmtccctatgagtgggcccccaggagtttttaactctcaagccagatcttgctccacctccagcaattcgtctattagcatccaagtgttcttcccagttactacttcctgtgacctctgtttctggtcatctgtgattccgtatattctcctgtttctccagttttggggatggtggtttgccctctttgctcaattctgtgatggatcaaaagagttttgacattcagagtgtccggcttttctcttgtgaggacagagtggtgatttctgagttctttaaatgttggagtggaaaactgtcttttgagaaaacaataacaacaacaaaacccaaaaaacaaccaaaaacca

SEQ ID NO: 385420 - DNA, 594 bp, Homo sapiens
aattgccattctcctaggtcggataagagtctggtaaagaaatttctcttgagggcaggattttattacagagaaaggaatgctcagttaacaaattataatggttactcctccaaccccaggtttatttcaaaattgttatttccttatctccctgctggatgccagacatttttctcgcatcttcagtgtgagaatctgatggggcttttggaggtgaaactcatgaaagtgttggagtatccctatgagtgggcccccaggagtttttaactctcaagccagatcttgctccacctccagcaattcgtctattagcatccaagtgttcttcccagttactacttcctgtgacctctgtttctggtcatctgtgattccgtatattctcctgtttctccagttttggggatggtggtttgccctctttgctcaattctgtgatggatcaaaagagttttgacattcagagtgtccggcttttctcttgtgaggacagagtggtgatttctgagttctttaaatgttggagtggaaaactgtcttttgagaaaacaayaacaacaacaaaacccaaaaaacaaccaaaaacca

SEQ ID NO: 385421 - DNA, 565 bp, Homo sapiens
aagaacttaccattattgataaggcactcagagttgagaatttwaaaaaaaaaaaaattgttgcttttacgaattcaagcagattcaaggctatataggtaaaatgtctttctaactctcttgtattctggaaggtttcttgagggaatgtggtatgctgaattatagttagttacccaagatgtacaagtattattttttaaacttttaaaaacctatattgaggtataactaatacacaaaaattgcacatatcgggccgggcacggtggctcatgcctgtaatcctagcaatttgggaggccgaggcaggcagatcatttgaggtcaggagttcaagactagcctggccaacatggctgaaaccccatctctactaaaaatataaaattagcccagtgtaatggtaggcacctgtaatcccagctactgaagaggctgaggcaggagaatctcttgaacctgggaggtggaggttacagtgagccaagatcatgccactacactccaaactgggtgacagagctagtctatctcaaaaaaaattgcacataattaatgtata

SEQ ID NO: 385422 - DNA, 555 bp, Homo sapiens
tatagttttatgggttttgacaaatgcataatgtcatgtatccaccattacagtatcacatagaatatttccaccaccctaaaattcctctctgttttacctatgtatccccgctcctctgacattttcccctcaaaccctctggcaaaactgatatttttactgtctctgcaattttatctttgctagaatgtcatgtagttggaatcatacggtttgttgccttttcacactgttttgtttcacttaggaatatgcacttaagattcttccatgtcttttcacagctkgatagctcatttattttcttgttcctcaatatataattccggaatgctcctatttcctttcagtactttaaagacctcattccattaactcctgacttccattattcatgctgaaaagttagctgtatgtcttatcgttgtttgttgaaataatttctttctgtagttgcttttaagatttttctctttgcctttggtttctacagttgtattaagaggggcctagatgaattttatttaaatttattctatttggggattcata

SEQ ID NO: 385423 - DNA, 483 bp, Homo sapiens
atccaccattgctgaggcatgagcagctcacagtataaacaaagaggcctggaagcatgaaatgggcggagcccaccacagctcagcaaggcctacrgcctctatagattatacctcttggggcagggcatagtagaacaaaaggcagcagacagcttctgcagacttttaaacgtccctgtctgacagctctaaagaaagcagtggttctctcagcacagcattcaagctccaagaacagactgcctcctcaagtgggtccctgaccctcgtgtagtgggactgggaaacacctcccagtaggggccagcagacatgtcaaacgggtagatgcctctctgggaggaagcttccagaggaaggatcaggcagcaatatttgctgttctgcagcctctgctggtgatacccaggcaaacagggtctggactggacctctagcaaactccaacagaccagcagctgaggggtctgactgttagaa

SEQ ID NO: 385424 - DNA, 568 bp, Homo sapiens
gatactctaggtgagaaaacatttagtcttttctcccctttaccttctctcacatccattttcattttttagctggaaacaaattatattgttaaaatcccaagcaaagtcttgatgcataaggcatgaaaaaatgatgatttgttataaaaggactgatttggctatgaataggagaaagatggaaagagagagggttaggaggtaattcagagaatgccagcagaatatgggtgaagctaattgcgtcaattctctttgaagcagcacctgcccattttattacaattccacaggcagctagtgatttggctctgcccttacactcaactacagcaaatcaaaaattctctctgctgaactttcrttgaggattccatatcatgtaagtgcaggccatttcatttttgcagtggcctaattaaggtgtttcagttcacatttgtactgtaaaccataccataaaaagctaccattaaaaaattttgcaagcaatcaatcccactgctttaataggggggaaaatgtcattttgaaattactgtcatgcaggattattgaactagtt

SEQ ID NO: 385425 - DNA, 568 bp, Homo sapiens
gatactctaggtgagaaaacatttagtcttttctcccctttaccttctctcacatccattttcattttttagctggaaacaaattatattgttaaaatcccaagcaaagtcttgatgcataaggcatgaaaaaatgatgatttgttataaaaggactgatttggctatgaataggagaaagatggaaagagagagggttaggaggtaattcagagaatgccagcagaatatgggtgaagctaattgcgtcaattctctttgaagcagcacctgcccattttattacaattccacaggcagctagtgatttggctctgcccttacactcaactacagcaaatcaaaaattctctctgctgaactttcattgaggattccatatcatgtaagtgcaggccatttcatttttgcagtggcctaattaaggtgtttcagttcacatttgtactgtaaaccataccataaaaagctaccattaaaaaattttgcaagcaatcaatcccactgctttaatagggggraaaatgtcattttgaaattactgtcatgcaggattattgaactagtt

SEQ ID NO: 385426 - DNA, 531 bp, Homo sapiens
ccttactgcaactgaggaactgaattttaaattttacttaatttatgtaaatttatgtaaagtacatagctacagtggctagtggttactgtatcagagagcacagagttacatcctctgttccttcccccacttggaatggctggatgattacccctccctcagtgtaacagagttgtgcggtttattctctgaackaaggggcaccatgaaggtaagaggatagggatatcatattgaaaagaggggcattacttgaatttgagaacctgctcttctcccaattgacttccaaaatgctggcagccagtttctacttccaggtatgagattaggaatttagtatctgataaatctgactagtccaaaagaaaagaccctgtgttaacattgggagttgtcctatgaaacaatccagccagattacctggggtaagacccagagttggcaacccaactcatatatcagaacttccaatcagatttttagtgctgtagtcttaaaggtgaacagacagttaaggatcacta

SEQ ID NO: 385427 - DNA, 531 bp, Homo sapiens
ccttactgcaactgaggaactgaattttaaattttacttaatttatgtaaatttatgtaaagtacatagctacagtggctagtggttactgtatcagagagcacagagttacatcctctgttccttcccccacttggaatggctggatgattacccctccctcagtgtaacagagttgtgcggtttattctctgaactaaggggcamcatgaaggtaagaggatagggatatcatattgaaaagaggggcattacttgaatttgagaacctgctcttctcccaattgacttccaaaatgctggcagccagtttctacttccaggtatgagattaggaatttagtatctgataaatctgactagtccaaaagaaaagaccctgtgttaacattgggagttgtcctatgaaacaatccagccagattacctggggtaagacccagagttggcaacccaactcatatatcagaacttccaatcagatttttagtgctgtagtcttaaaggtgaacagacagttaaggatcacta

SEQ ID NO: 385428 - DNA, 531 bp, Homo sapiens
ccttactgcaactgaggaactgaattttaaattttacttaatttatgtaaatttatgtaaagtacatagctacagtggctagtggttactgtatcagagagcacagagttacatcctctgttccttcccccacttggaatggctggatgattacccctccctcagtgtaacagagttgtgcggtttattctctgaactaaggggcaccatgaaggtaagaggatrgggatatcatattgaaaagaggggcattacttgaatttgagaacctgctcttctcccaattgacttccaaaatgctggcagccagtttctacttccaggtatgagattaggaatttagtatctgataaatctgactagtccaaaagaaaagaccctgtgttaacattgggagttgtcctatgaaacaatccagccagattacctggggtaagacccagagttggcaacccaactcatatatcagaacttccaatcagatttttagtgctgtagtcttaaaggtgaacagacagttaaggatcacta

SEQ ID NO: 385429 - DNA, 531 bp, Homo sapiens
ccttactgcaactgaggaactgaattttaaattttacttaatttatgtaaatttatgtaaagtacatagctacagtggctagtggttactgtatcagagagcacagagttacatcctctgttccttcccccacttggaatggctggatgattacccctccctcagtgtaacagagttgtgcggtttattctctgaactaaggggcaccatgaaggtaagaggatagggatatcatattgaaaagaggggcattacttgaatttgagaacctgctcttctcccaattgacttccaaaatgctggcagccagtttctacttccaggtatgagattaggaatttagtatctgataaatctgactagtccaaaagaaaagaccctgtgttaacattgggagttgtcctatgaaacaatccagccagattacctggggtaagacccagagttggcaacccaactcatatatcagaacttccaatcagatttttagtgctgtagtcttaaakgtgaacagacagttaaggatcacta

SEQ ID NO: 385430 - DNA, 499 bp, Homo sapiens
gccatgctcattggtttgttaaaaattttaaacgtactaatgttttttaagcagatctttcacttttaaaaagttggcaaataaaaatgaaatatatttatggtgtaccacatgatgtgttgatttacactgatatatagtggaatggctaaatcaatctaattaacatatatattacctcatttgttttaaaatatcttcaagtatatacatcttatagttatttagatgtttaaacaaaaagataaaaaggaacagaagttaagggcagacaacctgtcttctgctgatatatagattcttttttctagattttccacktgaaaatatttcaataggtttttttggggaacaggtggagcttggttacatgaataagttcttcagtgatgattcctgagattttggtgcacccatcccctgagcagtgtacactgtacccagtgtgtagtcttttattcttcatccctctcacaccctttctcctgagtccccaatg

SEQ ID NO: 385431 - DNA, 621 bp, Homo sapiens
cctctttgttttcattaacttgctaacttcttattcttgtcttatgtgtccatcaattttgcagtagtgatttacatgagcacatatgtttaatgctgctgacaataaaagattctagtatgctatgccattccgtactaaaacctggacccaccactgtaaacatccctacctaggatcaaattgtatcttttgtctccaggatgaaatcctgttatattcggtcacagttcttctcttttaatttaatatgcrttgaactgagcagctccaacatctagtaatgataatgagcaacatttattgattacttcctatgtagtgtagacactgttctgagttttaagtacttctcttcccattttgtaaatgagaaaatcttcatacagagagtttaaataatttgctgaaggtcaaatagctgtgtcagaaccagagttcaagcccagtattcggtatttctccacccccccagatatataactgcctcccattggcattagtcttgatgaccttaatcagaagttttggaagtgagttcaagattctttaatgtgtaaccggactacaatacaaatgctaaaactctttccttccaagatccattgaactccttaatcc

SEQ ID NO: 385432 - DNA, 575 bp, Homo sapiens
catgttaattcgctcaatttagccatgcyacatatgcatatttcaaaacaatatgtacacaataaatgtgtattcggttggtgcaaaagtaattgcagcaaaatttgccattaatggcaaaaaccgcaattacttctgcaccaagctataaaatttgcatttctcaatcaaaaaattgtaattgctattaattacaatgaagccatttatctgcattttatatataactacaaaaaacaaaccactaatatagaggaagctgtctagatataccatggttttctaaaaaaaactgcagtgtaaactttcacattcaaatcagatagtcatgactaaggtaaccccactcatctgtatttctgttttcttttaacattaatattccatttatatttaacatttttgttttgctttttatcatctcaaattctttttggagaagtacagaaaatagatttatacaaataaaattaagtgtctgcttccctttattatgtcaaatgaatgcaaccggatatattagcatcaaattgggagggtatatttgggatggtctgacttaaaatataggttac

SEQ ID NO: 385433 - DNA, 519 bp, Homo sapiens
tgctgctgacatacattttatatattacataagcttataaaatactcttggaaaatgccttccctgtgttttatctttaaagagtccaaagattaatgaatctcataaaaatgataaattagtatttcaaaagcacatttgcaaaagaaaccaataaagagttttggctttaaaagaaagttaagacsaaatatgaaagaagaaattatgaagctcttcaaagaaacatagaagatataattaaataacattagattgtagaatatttttttaaaagaaaacacaaaaagcaacaatcatgaagtaaaagtgataccataaaaaaaacagtgaaaaacatgctactaaatgagacatttatcccattaaacaaacaacaaaggcgtcattcatggattttataacaaagtcccacacatcaataaggaaaagtcaacctgttacaatagtggtcaagagacttaatcagatattttacaaaaataatatacaaatggccaatgaacatataaagagatt

SEQ ID NO: 385434 - DNA, 605 bp, Homo sapiens
gggtgaagcccactgcagctcatcaagaccttctgcctctctagattccacctctggggacagggcatatctgaacaaaaggtagcaaacagcttccccatacttaaacgtccctgctggacagctctgaaaagaccagtggttctcccagcatggcatatgagctccaataacagacagactgcttcctcaagtgggtccctgatccccatgtagcctgactgggagacacctcccagtaggggccaacagacacctcatacacgctcgtgcccctctcagatgaagctctcagaggaaggatcaggcagcaatatttgctgttctgcaacctccaccagtgatacccaggcaaacagggtctggagcagacctccatcaaactccaacagacctgcagctgagaggcctgtctgttagaaggaaaactaacaaacagaaaggaatagtatcaacrtcaacaaaaaggacgtccactcagagactacagccaaaagtcattgactttaaagaccaaagctagataaaaccacaaagacggggagaaaccacagcagaaaggctgaaaattccaaaaaccagaatgcctcttctcctccaaagga

SEQ ID NO: 385435 - DNA, 456 bp, Homo sapiens
ctgacagatagtagacaagcaataaacatttattaacttgttatctaatctagatgagaaaggctaacaatgaccaacatatacatatattgactatgttgatgttgaagcatataaaaaagtaatagtatagtttatttcagtctttaatttatacatgctgcaactttcattgtttcctcctaaatcacaagagtgaatatgggtttttattgtgaaatgctgcccaagaaatatttactacatattactgattttgaagctcatgatttcacttacacagaaaatttcgcagtgagttttaggacttacagaagtaaatttyttttaatcacggttcaaggaatcccatgcctatctacacctgagtcctgaaaagaaataaatctaacagaaaccaagagtttttcttcaaaagattacctatatggaaattaaactactgcatgtaaaata

SEQ ID NO: 385436 - DNA, 560 bp, Homo sapiens
ctattattatttttcattcattttattcaacaaatatttactgcatacctgccatgagtcaggtgctgtgataaatgctgatgatacayagtgaacgaaaatactgggatagaggttaaaaagacattaatctatgaatcactgatgaattaaaatcacaactgtgatataagctacaaagaagtacagaacactatgaatgcatataactggagaatttgatctaatgaggcagatcatggaatgcttcattgaagaaatgattgtgctgagatctaaaagacaaaggttagttcggcgctcacttcagcagcacacatactaaaattggaatgatacagagaagattagcagggcccctacaaaaggatgacacacaaattcatggagtgccccatgtttttaatcaaaaaaaaaaaaaacaggttagttttgtgaaagctgaaagaaaattaggaagaaagctacccaggatgaaggagagcaaaagaaaaggctctgtagaagagtaaaacaaagaaagaaaaactaaaagaaggccagtctggctagaagtgatt

SEQ ID NO: 385437 - DNA, 560 bp, Homo sapiens
ctattattatttttcattcattttattcaacaaatatttactgcatacctgccatgagtcaggtgctgtgataaatgctgatgatacatagtgaacgaaaatactgggatagaggttaaaaagacattaatctatgaatcactgatgaattaaaatcacaactgtgatataagctacaaagaagtacagaacactatgaatgcatataactggagaatttgatctaatgaggcagatcatggaatgcttcattgaagaaatgattgtgctgagatctaaaagacaaaggttagttcggcgctcacttcagcagcacacatactaaaattggaatgatacagagaagattagcagggcccctacaaaaggatgacacacaaattcatggagtgccccatgtttttaatcaaaaaaaaaaaaaacaggttagttttgtgaaagctgaaagaaaattaggaagaaagctaccyaggatgaaggagagcaaaagaaaaggctctgtagaagagtaaaacaaagaaagaaaaactaaaagaaggccagtctggctagaagtgatt

SEQ ID NO: 385438 - DNA, 560 bp, Homo sapiens
ctattattatttttcattcattttattcaacaaatatttactgcatacctgccatgagtcaggtgctgtgataaatgctgatgatacatagtgaacgaaaatactgggatagaggttaaaaagacattaatctatgaatcactgatgaattaaaatcacaactgtgatataagctacaaagaagtacagaacactatgaatgcatataactggagaatttgatctaatgaggcagatcatggaatgcttcattgaagaaatgattgtgctgagatctaaaagacaaaggttagttcggcgctcacttcagcagcacacatactaaaattggaatgatacagagaagattagcagggcccctacaaaaggatgacacacaaattcatggagtgccccatgtttttaatcaaaaaaaaaaaaaacaggttagttttgtgaaagctgaaagaaaattaggaagaaagctacccaggatgaaggaragcaaaagaaaaggctctgtagaagagtaaaacaaagaaagaaaaactaaaagaaggccagtctggctagaagtgatt

SEQ ID NO: 385439 - DNA, 576 bp, Homo sapiens
ttgagcagaaaaactttgtaaacaagatatagaaagcataaacaatgaagaaaaagatttcttaagctgactacatgagatttttaattttctgcatcaaaaaccatcatttaaaagaaaacaatcataaaagactggaatttatacattcaacaaaggagtcagcatcaataatatttaactagtacatttgtcttagtccatttgggctactataccaaaatatcaaagactctgacttatgaacaataaacatttacttctcacagttctggagactgagaagtccaatatcatggcaaaggcagattcactgtctcatgagggccmgcttacttcttagaagacagctgtcttttccctatgtcctcaaatggcaaaaagggcaatggagctctctaggacctctttcctaaaggcacaaatctcattcatgagggttccaccctatcacctccaaaaggcctccaaataccgtcatattggagattaagtttcaacatgtgaattttgggaagacataaacattaagtctataacagtatccataaaaacattactttaaaataatataaa

SEQ ID NO: 385440 - DNA, 576 bp, Homo sapiens
ttgagcagaaaaactttgtaaacaagatatagaaagcataaacaatgaagaaaaagatttcttaagctgactacatgagatttttaattttctgcatcaaaaaccatcatttaaaagaaaacaatcataaaagactggaatttatacattcaacaaaggagtcagcatcaataatatttaactagtacatttgtcttagtccatttgggctactataccaaaatatcaaagactctgacttatgaacaataaacatttacttctcacagttctggagactgagaagtccaatatcatggcaaaggcagattcactgtctcatgagggcccgcttacttcttagaagacagctgtcttttccctatgtcctcaaatggcaaaaagggcaatggagctctctaggacctctttcctaaaggcacraatctcattcatgagggttccaccctatcacctccaaaaggcctccaaataccgtcatattggagattaagtttcaacatgtgaattttgggaagacataaacattaagtctataacagtatccataaaaacattactttaaaataatataaa

SEQ ID NO: 385441 - DNA, 576 bp, Homo sapiens
ttgagcagaaaaactttgtaaacaagatatagaaagcataaacaatgaagaaaaagatttcttaagctgactacatgagatttttaattttctgcatcaaaaaccatcatttaaaagaaaacaatcataaaagactggaatttatacattcaacaaaggagtcagcatcaataatatttaactagtacatttgtcttagtccatttgggctactataccaaaatatcaaagactctgacttatgaacaataaacatttacttctcacagttctggagactgagaagtccaatatcatggcaaaggcagattcactgtctcatgagggcccgcttacttcttagaagacagctgtcttttccctatgtcctcaaatggcaaaaagggcaatggagctctctaggacctctttcctaaaggcacaaatctcattcatgagggttccaccctatcacctccaaaasgcctccaaataccgtcatattggagattaagtttcaacatgtgaattttgggaagacataaacattaagtctataacagtatccataaaaacattactttaaaataatataaa

SEQ ID NO: 385442 - DNA, 489 bp, Homo sapiens
gcctttgtggacccaggaaatatttgatatatatctgctatataagatatctgatatataggaaaatatacatatatctctctgatatataagatttcataaaggagaaaagaaagagaaagacaaagcgtagcagaaaacttttcaaatttsgagaaagatataaatatccaagtagaggaacagatacaggcctccagtcagattcaacccaaacaagactacaaaatgacaatatgtcaaaaatcaaggacaaagagaggatcctattagcaagagaaaattagcacgaggatccttattagtgagagaaaataagcaaaccatatatgaataagttccaataaggctagcaacaaatttctcagcagggacgttacaggccaagagagagtgagatgatgtattcaaagtgctgaagtgtaaaaaattttttttaaaaaatgtgccaactaagaatactgtatctagcaaagctgtttttcagaa

SEQ ID NO: 385443 - DNA, 174 bp, Homo sapiens
ttgggaatgcagcccaaagcgggtggtaaactccatttaaggctaaataccggcacgagaccgatagtcaacaagtaccgtaagggaaagttgaaaagaactttgaagagagagtacaagagggcgtgaaaccgttaagaggtaaaygggtcaggtccgcgcagtccgcccgga

SEQ ID NO: 385444 - DNA, 555 bp, Homo sapiens
atagccttgtagtttaatttgaagtcagtaatgtgatgcctccaactttgatcttttagctcaggatttctttgtgtatttgggctcctttttcgttccttttgaatttggggattgttttttctaattctggggaaaatgacattggtaatttgatagggattgtgttgaatctgtagattgctttggacagtgtggtcattttaagatacygattcttccaatccatgagcatgggatttttttccatttgttcttgtcatctatgatttagttctctttttttgagacaaagtcttgctgtgtcactgaggctggagtgcagtggtgcaatcatggctcactgcagcctcgacctcccaggctcaagtgatccttccaagtagctgggactactggcatggaccagcacacctgtctaatttttgcatttttgtagagagggagtctcactatgttgcccaggctggtcttgaactcctgggctcaagccgtttcccaccttgggcaccccaagtgctggaattatacgcataagctatcatgcccagcctc

SEQ ID NO: 385445 - DNA, 555 bp, Homo sapiens
acagagtggcaagctggataaagaagcaagacctaatggtatgctgtcttcaggagacccatctcacatgcagcaacattcataggcccaaaacaaagggatggagaaaaacctaccaagcaaatggaaaactaccaagcaaatggaaaagcaggggttgacgtcctaatttcagacaaaagagactttaagcccaacaaagataaaaaaaaaaaaaaaagacaaagaagggcattacataatgcaaaagttttaattcaactggaagacttaagtwtcctaaatatatatgcacctaacacaggagtgcctggattcataaagcaatttctcagagacctagattcccacacaattagagtacaggacttcaacaccccactgacagtattagacagatcattgaggcaaacaattaacagatattcaggacctgaactcaacacttaaccaaatgggcctaataaaaccctgcagtactctctgttcaaaaacattcttctcatcaccacatggcacaactctaaagttgtaatccttggcaaattcaaaaca

SEQ ID NO: 385446 - DNA, 600 bp, Homo sapiens
gctactgagatttaactgtctgtaaggtcaacgatctgtccattgctctaagctgcctccaagttcagagaattcctagaattattagacttttgggaaaacattttcaaagagattggttaagatcagtttgggaaacaattgccttttctgtctatctcatccctctcaaatttattgatgtacaagtctaatttcagttaaagttccaaaataaaaatacttatggtttctttgctttcttgggatttgaccttttcataatttttttttcagaaattttaagcttcaaatttttactttaatgtttagggtaatgactgagggaacacaaataaatcatgaaatatgtattagttttctagagctgccataataaatatcacaaattcaattgtttmaagagcaaaaatttattttctcacaattcttgaagctaatattccaagatcaaggtggttggcaatggttggcaaggttggtttctttgggacctctctccttggcttgcagatggctatcttccccttgtattgtcatatggtcttccttctgtatctgtgtcctaatcttctccttttcttataaagtcaccagtca

SEQ ID NO: 385447 - DNA, 561 bp, Homo sapiens
tccaaaataaaaatacttatggtttctttgctttcttgggatttgaccttttcataatttttttttcagaaattttaagcttcaaatttttactttaatgtttagggtaatgactgagggaacacaaataaatcatgaaatatgtattagttttctagagctgccataataaatatcacaaattcaattgtttaaagagcaaaaatttattttctcacaattcttgaagctaatattccaagatcaaggtggttggcaatggttggcaaggttggtttctttgggacctctctccttggcttgcagatggctatcttccccttgtattgtcatatggtcttccttctgtatctgtgtcctaatcttctccttttcttataaagtcaccagtcatattggattagsttccaccctaattacctcatttaacttgatttcctctttaaagaccccatctctaaatatagtcacattctgaagtactgggagttagaatttcaacatattagtttgggcagggggcaggggagacacaattcagtccataacaaatgtgttttt

SEQ ID NO: 385448 - DNA, 446 bp, Homo sapiens
ctaatgtctactaaaacatggatgaccttgaaaactttaagtgagagaagccagtcataaaaggctacatgttgtatgatttcatttatccaaaatccagaaaaggcacatgtacagaaagtagattagtagcctaggtgctgaggataggggatgtgaggagtaactactaaggggtctgaggatcctcgggggtgataaaaatgttctggaattatatagctataactgcataactttgtaaacttactaacaaaacgctgaattgtgtactttaaaggataaatgttatggtatatgaatcatatgtcaataaagctactagtaagaacaaaaataagcccagcccaaccactttgcaacatttgcctaaaaggagttctacatcaaaayggctccttactaatatttaaacggagttttgcaaatattagcacacggtaagt

SEQ ID NO: 385449 - DNA, 599 bp, Homo sapiens
tgtacaataagtcctattttcagagcaaaagmtgagtgtatgaggaaataaaactatattttatgggggtatctttggcttcaggaagaaagagtaaatattattctccattcaatattagagctgaactatggggtctttttgatactttttgcttacactctgtgattcaggggacacatggcaaaggtaaacagacagaaacagcaccgtggatattggtgagctgtgcttggaagggtcacagtgattctataataactctcaggtctttattctataatgaaaaattactcttttccatcataaaggtaaagcagagtatgtacaagtagagtgtgaaataactttgtcactcatgatgaacctacttggtccaatactttaacgacttctccaatgtctctgtactcaggtttgatttcctgagtggctcattggtagaatgaataaaatcaagactcctctaaaggaatgtttggaactaaatttcagtgtctccggaagcactggtaaaataaccatgtgtagcgaacgtgcagtatcaattggctctgtctgtgtctttggaactgcccatatgatcattacaaatggag

SEQ ID NO: 385450 - DNA, 599 bp, Homo sapiens
tgtacaataagtcctattttcagagcaaaagatgagtgtatgaggaaataaaactatattttatgggggtatctttggcttcaggaagaaagagtaaatattattctccattcaatattagagctgaactatggggtctttttgatactttttgcttacactctgtgattcaggggacacatggcaaaggtaaacagacagaaacagcaccgtggatattggtgagctgtgcttggaagggtcacagtgattctataataactctcaggtctttattctataatgaaaaattactcttttccatcataaaggtaaagcagagtatgtacaagtagagtgtgaaataactttgtcactcatgatgaacctacttggtccaatactttaacgacttctccaatgtctctgtactcaggtttgatttcctgagtggctcattggtagaatgaataaaatcaagactcctctaaaggaatgtttggaactaaatttcagtgtctccggaagcactggtaaaataaccatgtgtagcgaacrtgcagtatcaattggctctgtctgtgtctttggaactgcccatatgatcattacaaatggag

SEQ ID NO: 385451 - DNA, 555 bp, Homo sapiens
gcgtcttttagttaaaattaaaggatgagagttaaaacgagttacaaaagacagctggtgtttgaaagaaaaacactggaagtaataaaaacggagtgaaaaggctgatgttgggattaaaagaaaacatttttttaatacagctgcaaatcagtcattgttttctgagaggctaggttcatctccaggattttcttctaggagctcaaccaatggccacctttactgagttaaccagtctccaggcaagcagcccttgctgattggctcaaagatgtcgagtagaaaaagcagccaatcctgccttcaagccagaactgtgccatggagacattacaaccactgcatggcgagaatgtstacaaacctgtccgtgccacaaatatcagatcctagttacaaagactgccgccgaaaggaagagcctttgaagccaacactgacactgacctgtcatctacattctattactctagctctctttcggagggaaaaaaaaaactattttaaccaaaagcgcatgagagataaactgtgcccccgctaagatgactc

SEQ ID NO: 385452 - DNA, 549 bp, Homo sapiens
atgtaggatggagccccagggagctgaattagtgaagaaactgggaccttttgcctgaagagccggtcattgaaagccgtgataaatgctttcaaatatctgaggggytgccatgcgcaagcaggacagggcctgttctaatgtcattcttggagacagtgtgagtttgaagaaggcattttggggctccatgggacatagcgctttctaacaacctaagctgtaccagaatgaactgcattcccaggatagtgggggacccattgctgggaggctgtggaagatcctggatggttcctgctaggtttaccataaaggcaacatgatccctattccttccagtgctccaggattctgtaacagtcccattcccaggtgagcttaataccccctggggacatggacaggaccagagggctgcctgtgagatgctgtgtttccatgtgcaccagtgttcccgggccgcttatttctagccccaccaaagatgctaggaagctcagtctctctggctccaggcagctggagatatggaccatttggaggaag

SEQ ID NO: 385453 - DNA, 549 bp, Homo sapiens
atgtaggatggagccccagggagctgaattagtgaagaaactgggaccttttgcctgaagagccggtcattgaaagccgtgataaatgctttcaaatatctgaggggttgccatgcgcaagcaggacagggcctgttctaatgtcattcttggagacagtgtgagtttgaagaaggcattttggggctccatgggacatagcgctttctaacaacctaagctgtaccagaatgaactgcattcccaggatagtgggggacccattgctgggaggctgtggaagatcctggatggttcctgctaggtttaccataaaggcaacatgatccctattccttccagtgctccaggattctgtaacagtcccattcccaggtgagcttaataccccctggggacatggacaggaccagagggctgcctgtgagatgctgtgtytccatgtgcaccagtgttcccgggccgcttatttctagccccaccaaagatgctaggaagctcagtctctctggctccaggcagctggagatatggaccatttggaggaag

SEQ ID NO: 385454 - DNA, 583 bp, Homo sapiens
ctctccaggtattaagattccttgctttatatcaaggaayttctgtcaccttagctttatttagtataggatgccattcagttcaggtttcatttcagataacccactgagtgaacagaaccatacccagatgatccagccagtactttggatccagaatccatattgatcaatatggcccaattgaaaatgatcttctttcctccgtgatcagcaccttactatacatttctcagatttctgccaataaatattaaaaaacaaatggcacctactttggtgtgaaagtctactgtttcagaatcagactttgtgcttgtctcccttggccatgctgaaatctgattctagaataggtcaggagcagccaggggtggtaagtgtcgacctcagggagaatcaggattctcttgcaagacaggacctggggaaaaggggcagcttctgctggaaagggaggctcagcagggtctaagactcagttatatgaattcagcatccccattcacagggttccatctttcccagtcaacaccatctcccataagagacctgatgaggctgtgaacttaacttaggttgt

SEQ ID NO: 385455 - DNA, 516 bp, Homo sapiens
tggtttgcgcttatttttctggttcctttagatgcgatgttgttaatttgagatctttctaacttcytgatgtgggtgtttaacactgtaagtcttccacttaacactgctttagttgtgtcccatagattctggtatgttgtatctttgtttttattagtttcaaagactttattaagttctgccttaatttcattatttgtccagatgtcattcaggagcagattgtttaatttccatataatcatatggttttgagagatcttcctggtattgatttatatttttattgtactatggtccaagtgtagttgttacgatttaggttttcttttaagaattgctttattacgaagcatgtggtcagttttagagtatgtgccatgtgcagataagaagaatgtatattctgcttttggtggcaagttttttgtagatgtctgttagatctatttagttaagtgtcaagttagattctgaatatctttgttagttttctgcctcaatgatctgtct

SEQ ID NO: 385456 - DNA, 598 bp, Homo sapiens
tacttgtatgtacactaagagctttggccgtcacccgaattgtgctgtaaagaggaaaggattttgactgtttttccctgatacggcataaaattctttcttcctggatttggcgggtgctaccacagctgctatgaacaaacaacattgcagaggaagtctcctgaataagaatttttccattgtaacctgaatgtgttcacccttctaagaatattgtgtaggtatcgtttttggattcctaaaatttttatctacsacaaaggtggcaaactaagatttaatccacctgtaaattcatcataaccagtttacaaacagtggttacagacagaaaccaagaaaagggaaaagataaaggtaaaaagaggccaccaacaaagagtaagagagagaaagacacagagaaggggagaacacacacctgctggaaataataagaaaaatgtgaactaatatttatgccgggggttttactttctcccttcagacgatagaacgtttatttaatgagtctctctctatcaacttgtcaagcaaaacagctctaccttctgggcctcgagctttgggaaaggagctaaaatgtcattccccc

SEQ ID NO: 385457 - DNA, 488 bp, Homo sapiens
aggaaggagggagtgagagagggaggaaaaaaagaaaagagggaggtaaggagacccttatggcactctatcccttcatgcacacacacacactcacccacacacacatacacagtcacatatacctcaagcaggtagtgaattctatgctcggtgacaaataagagagaaatggcaaagcaaacattgcaagttgcctactgartacttttcttcatatactcttttccaaaactttacacctaatttggaaacaggtgtacaaaagaatattctccagagtagattaaatatgcaagacagaaacacaaaaggaaaaatatttttccgggattaaatgacattttcctcaactggaatgaacaagcaggaaaaaactgcagtctgcacattgctagagaggcagtatttcctaccacaagaagaaaagctggggacagagtgggtactgacactgtttttatttaaacttccgatattttgttcat

SEQ ID NO: 385458 - DNA, 508 bp, Homo sapiens
aagctagtcaataagtagaagcacactctatccctggttctgtcataacctcattctatcctcagccaagtctattaatcttcctatttcccagtttctctaaaaactgcgcaaatcagtgtcacaaaaatggcagggatgtgtacgagttaatgagagaatatccatcaagccctatgatcccagaagagagcaccaaaggaacacaaatttgattaaacctctcatgtcccagtgctgatagccctaggagaattgttaaggaataacttgcgggagggggrgaagtgattctttcttgacgtcctaattttgtgtatctaatttattcatcatttatgcatttatttattcattcaacaagttgagtatcttttattacataccagataccccattaggcaatggtgaaatgaaatgacatggtcccaaacctcatgatacctcatgggagatgctaaagaaatataaatgaattggagctttcagtatattaagacagcttagt

SEQ ID NO: 385459 - DNA, 455 bp, Homo sapiens
gtaagtatggacattgaacrtgtccataagatggacaataacaaataatttattaatattatgctagtaaacataacaaagaacaaatagaaggttctattaaggcactcagaaagggacttatcctggtcagggatatcaggaaacacttcctgaggaaattgcattaaagttggacctgaaagatggccccaggttactccttccaaatctatttttctgtcattgccagtttaatatttaatagaactttcaacacttctctcacattcaaaatctctacccactaagaaaataattaaactgaggtgacatcaggaaccactagactaggtgatctcttagatcccttgtagatctaaagatctcatgtttagttttcaatatgtgcataatgttccatcttatgggagtcctgcagttagctggaggtcccttatatttttgtatgtaag

SEQ ID NO: 385460 - DNA, 636 bp, Homo sapiens
aaacataaaacactgactggcagaaaatatttgtaaatcatattactggtaaagacatgtatccagaatatatcaagaactttggtgatctgcagatggtctccctgaagtattcaacactcgcatgtgaagaagttacccaaggctaggaaaagaaccacctggaaagatcagagggaacagaaaaactaaaagacctcctaattcacagagtattagagtcagaagagccttgcttcaatagtgggaaataattagccatagtctatatgtgggtctgattccacctaagaagtcataagagcaagatccaaaaggctcaaactgttaccaagtaattagctgtgacctagaacaatgcttaaggatatttataataaaccaaaaatctctagcatcaaataaatcacagtgtctgacatccaataaaaattaccaggcatgcaaagaagcaggaaayataattgataatgtggagaaaaataagtcaatcaaaactaacctggaactgactcaaattttagaattgacaaggaaattaaagtagttatttcataagttcaagcagttgagtcatgagagatatttttaaaaacaagcattaaacttatggagataaaaactacaatgtctgat

SEQ ID NO: 385461 - DNA, 636 bp, Homo sapiens
aaacataaaacactgactggcagaaaatatttgtaaatcatattactggtaaagacatgtatccagaatatatcaagaactttggtgatctgcagatggtctccctgaagtattcaacactcgcatgtgaagaagttacccaaggctaggaaaagaaccacctggaaagatcagagggaacagaaaaactaaaagacctcctaattcacagagtattagagtcagaagagccttgcttcaatagtgggaaataattagccatagtctatatgtgggtctgattccacctaagaagtcataagagcaagatccaaaaggctcaaactgttaccaagtaattagctgtgacctagaacaatgcttaaggatatttataataaaccaaaaatctctagcatcaaataaatcacagtgtctgacatccaataaaaattaccaggcatgcaaagaagcaggaaatataattgataatgtggagaaaaataagtcaatcaaaactaacctggaactgaytcaaattttagaattgacaaggaaattaaagtagttatttcataagttcaagcagttgagtcatgagagatatttttaaaaacaagcattaaacttatggagataaaaactacaatgtctgat

SEQ ID NO: 385462 - DNA, 557 bp, Homo sapiens
cagtagcccatgtggagcactgcatgcaaaagatgaggtgggggtatgaggtagagataaccagagttcaaatcatcatgtgcttaattcagtaaggcagagtttagtttcrtcctaaaggctctacagaactactgaaggagtttaaacagagaagtaatatgatcagatatgcgtgttagaaaaatcaccaaagcaaagagaagagcacataggaatgtggtcagaggagacagaaagacaataacataggttagaagtgaaaggattgtgaacttaaagacactgggaaagaggaaaaggcgcaattaaattcaagagtttgttagaaaatagaaggtgtaggcattgtgaatcaattggatgaggtggtgagagagaaagaataagaaagagagaagtataagaagtcatcaaccgaacttaaaccccactgacagcattagacagatcattgaggcagaaaactaacaaaaaattctggacttaaatatgacacttgacaaatggtacctaatagacacctaaaaatactccacccagcaaccatagaatgt

SEQ ID NO: 385463 - DNA, 564 bp, Homo sapiens
tctaaaatttattcatcctaaaggctcaagacttatctttctgcagtagtattttactgtgacctctactgaactctcctacctgaatttcaattacacttctaattcatagttcattacttctctctctctctctctttctctctctctcccgtccccccacccccacccttttgagatgaagtctcacaatgttgcccatgctggactcaaattcctgggctcaagtgatccttccacttcagtcttcccagtagccagtactacaggcacacatactgcacttggcttatgacttacttcttacatgatttttygtcgtaatttaatgctaattttctctctcaaattgtacattccttgaggataggaactgtatcttatattttgtctgaatctttcaaaaacctaatgctgggacatggtaagagggcttacaaatttgatatactaattatgaaggaaatgttgtatacaaataactttgttatcttctaaccagtataaacctggcattaatgtggaaaaaataaggttgtaaaatttatttgtcaaaatgcaagt

SEQ ID NO: 385464 - DNA, 425 bp, Homo sapiens
ttgggtttgctagtatttttgttgaggagtttggcatctatgttcacagcgatattggcctgtagagattaatttttttgtgtgttcttgcctgattttggtatcggggtgatactagtttcatagaacatcatagaatttgtaaaccaacttatcaaacttagcaggacagatcaatttactcatttgggaatgttttaatrctaaatttaaatatttattgctaaagtgaggtcaagactgtatctacataaaatgaatatttttaaataataaagataatttgacattgcatactagaaatatgtaaattatgttaaatctacaaatggacattgtactatttctatgcaccaaggcttgtgttcttggaaaatacagtacaaagtctttataatgtcagtgttatgttgtgaatgtgttac

SEQ ID NO: 385465 - DNA, 565 bp, Homo sapiens
aactgtaactatatgataaaaaagactattaaacatttaaataattccttaaaagaatacaatacttttgaccaccctaagaaataaaggtagatatcactgaggatgcagagcaatagaaaacataattaggtagctataaatactgtctacctttcacttgactctccattcttggacaattttcctacctgacgcacaaacacacaccgcccccccaccccccaccaccacacacacattctagaaacttacagcacctacagaatttccactggtcaagccagaattccatctcacaagactacagctatgcatgaatccgtgcttattccatgtcccactcctaccaaaggaaaactctctgactgctttggattacatcctctctcaccttctcaagaattttattttaaaaaatcatcttccttttctctcaaacagctttaatwctttttctctctcctgaatcattccaatcataacatgaacatattttagtctatcttgttcaaaaagaaagtcccactctttactccaccacaattcaatgactgctcttata

SEQ ID NO: 385466 - DNA, 580 bp, Homo sapiens
tatatgtataatgagctatagtccagttaatttgttgctactcctcaaactaagcatgctcattttcaatatctgcttccagcttccaggagaatatcaagacaagatttcactatgtagactggataaagaaaatgtgctacatatacaccatggaatactatgcagccattaaaaagcacaaaatcgtgtcttttgcagcaacatggatgcatctgaaggccattatcctaagcaaactaatgcagaaacagaaagccaaatactgcatgttctcacttataggtaggagctaaacactgggtatgtggggacacagagatgggaacaatggatactggggactactagagggggaagcaagggaggtaggtaagggctgaaaagctagctattgggtactgtgctcactacccagtgggtgacagattcattyctattctaaacctcagcatcatgcaatatacctttgtaacaaaccttcacatgtaccccttgattctaaaataaaaactggaaaataaattttaagaagaaaaatatttcactatgatgagttatagatttatttttttatttt

SEQ ID NO: 385467 - DNA, 602 bp, Homo sapiens
ctcttccccatttctcaaagtggctaactgctatgtaggcttggtgatagtcaccacctcctccaagaattgttccatttccctccagtctgagattgagtccttcccttggaactcccttagtactccatgtagaaggttcatcacaatacttctcatactatattttagtaatactggtttatttattacaggcagtataatctggcaaagactatctcttttatttctaagtaagctgtgtcccccaatactctacttggtccacattaagtgctcaccctataatcagggatggaaaaataacacagaaaggaaggaaagaagtatctaatartacctcatccttagagcatgaatccactggaagcttaacagaaaggaaaactgaatggtctgaccattttttaaaatggaaacaaagtagaacagcaaagtaacacaatattctgagtaaagaagtgactatagtgactagtatatgaataataccagagctaagatcatgaagtgtgatgtaaatttttgaagcaaatagtatagccaggctttactttgaaaaaaatcattttttcttcaatattctctttctcccaaagaac

SEQ ID NO: 385468 - DNA, 607 bp, Homo sapiens
tggtgggtagggggtaatctaataggaaggcagaaggctacgtggcaagtgactaatggaaactacatttgcatggtaaacacactctttttatttagtttacctgttatagattaatcaaaattgcaacactatctaaagaggcctttaataacacttcagataagctggagaaaacgtcaatcatgtatttcaaaaaataagcatgcccaggagtggcttgaggaagcagtaatggaaactttgatgaggacagaccytcccccaggcccatcacccatttgcaacactggaggttgtgtgctgttcctgtccaggcactatgctaagtgattaaatgtgttatatctcgtcatccccaatttacagataaaagctcggagggttagaaaggttaaatacattgccctactcacacagctggtgattttatttcaacgagcatctaaaaaaaaacataataaatgtatgaactaggattctgcactatccagcacagtagccattagtcacaaagtggctacttaaatggaaattaactaaaaattctgttcctgtttgcagttgtcccctttaagtgctcaacagccatgtcggtgaagggcta

SEQ ID NO: 385469 - DNA, 607 bp, Homo sapiens
tggtgggtagggggtaatctaataggaaggcagaaggctacgtggcaagtgactaatggaaactacatttgcatggtaaacacactctttttatttagtttacctgttatagattaatcaaaattgcaacactatctaaagaggcctttaataacacttcagataagctggagaaaacgtcaatcatgtatttcaaaaaataagcatgcccaggagtggcttgaggaagcagtaatggaaactttgatgaggacagaccctcccccaggcccatcacccatttgcaacactggaggttgtgtgctgttcctgtccaggcactrtgctaagtgattaaatgtgttatatctcgtcatccccaatttacagataaaagctcggagggttagaaaggttaaatacattgccctactcacacagctggtgattttatttcaacgagcatctaaaaaaaaacataataaatgtatgaactaggattctgcactatccagcacagtagccattagtcacaaagtggctacttaaatggaaattaactaaaaattctgttcctgtttgcagttgtcccctttaagtgctcaacagccatgtcggtgaagggcta

SEQ ID NO: 385470 - DNA, 462 bp, Homo sapiens
gacactcatagtaactctttggtcccaccctttcccatcatattaaaattgcattagataatttgtcatctaagactttagtgatgcttggtgagggcacattgttattgacacgcaaacagcaggatgctgcaagtcagaacaggtggaaaattgtttgctgtctgctagctattagaaatacccttgagatgtgagaataatgtatgttagcttttacgtatttattattcttggctagatagtctgctggaatatagttgcaaattatagtaccaaatatgcaacccttctgtgcgtttacagaaaatatttaaaatatgcctgtagtttattctactaaaatttgaaaattcttatatttaaatggtaatargtcaaattcagttataggatctgggggagggaaagttactgtgagcaggaatgagcatttacattaaaagaatgaataatattgaa

SEQ ID NO: 385471 - DNA, 462 bp, Homo sapiens
gacactcatagtaactctttggtcccaccctttcccatcatattaaaattgcattagataatttgtcatctaagactttagtgatgcttggtgagggcacattgttattgacacgcaaacagcaggatgctgcaagtcagaacaggtggaaaattgtttgctgtctgctagctattagaaatacccttgagatgtgagaataatgtatgttagcttttacgtatttattattcttggctagatagtctgctggaatatagttgcaaattatagtaccaaatatgcaacccttctgtgcgtttacagaaaatatttaaaatatgcctgtagtttattctactaaaatttgaaaattcttatatttaaatggtaataggtcaaattcasttataggatctgggggagggaaagttactgtgagcaggaatgagcatttacattaaaagaatgaataatattgaa

SEQ ID NO: 385472 - DNA, 427 bp, Homo sapiens
gtttcctgacttcttctttctcagcacatcatggyctgtaccgtgaagccttttatatgataaccagtcagaaatgcccatgaatattgactctccctaacaggccatggcaataaaccaaacatattttcactcttctaaccacacattgaaacacaagaatgttctacaaagcagtagtagtaaactttaataaatgtaaatgtgattcagatttcctagcttcctttctctttagttctctgtagtatactctcatgatgtttttatgtattttctgttgtctgaatgacaaactcatctgcctttttaagaggccagtctttgaggaactttaaactttgtaaaactaatgcattgtgcctgtgtataaaccagtggttctccaaatgtgctctgtggacctctcgggatcccgaagacccct

SEQ ID NO: 385473 - DNA, 427 bp, Homo sapiens
gtttcctgacttcttctttctcagcacatcatggcctgtaccgtgaagccttttatatgataaccagtcagaaatgcccatgartattgactctccctaacaggccatggcaataaaccaaacatattttcactcttctaaccacacattgaaacacaagaatgttctacaaagcagtagtagtaaactttaataaatgtaaatgtgattcagatttcctagcttcctttctctttagttctctgtagtatactctcatgatgtttttatgtattttctgttgtctgaatgacaaactcatctgcctttttaagaggccagtctttgaggaactttaaactttgtaaaactaatgcattgtgcctgtgtataaaccagtggttctccaaatgtgctctgtggacctctcgggatcccgaagacccct

SEQ ID NO: 385474 - DNA, 427 bp, Homo sapiens
gtttcctgacttcttctttctcagcacatcatggcctgtaccgtgaagccttttatatgataaccagtcagaaatgcccatgaatattgactctccctaacaggccatggcaataaaccaaacatattttcactcttctaaccacacattgaaacacaagaatgttctacaaagcagtagtagtaaactttaataaatgtaaatgtgattcagatttcctagcttcctttctctttagttctctgtagtatactctcatgatgtttttatgtattttctgttgtctgaatgacaaactcatctrcctttttaagaggccagtctttgaggaactttaaactttgtaaaactaatgcattgtgcctgtgtataaaccagtggttctccaaatgtgctctgtggacctctcgggatcccgaagacccct

SEQ ID NO: 385475 - DNA, 521 bp, Homo sapiens
cgttagaagacgcgtttctgttggtgattacaatatataaataataacagatttccctkttatatgcttttctaccgatgaaacctttcgtcccatgcgatttattttatgtatttatttattttttgacccagagtctgtctctcttgctcagactggactgcagtggtgccatcttgactcctcacaacctccaccacccaggttcaagcgattctcacgcctcagcctcccaagaagctgggactacaagtttgcgccactatgcccagataattttttttggggggggtgggtgggtggagtttcgctcttgttgcccaggctggagtgcaatggtgtgatctcggctcaccacaacctctgcctcccgggttcaagagattctcctgcctcagcctcccaagtggctgggattacaggcatgtaccaccacgcccagctaattttgtagagtgaggctcaaaacaactgagggaaggtaaatctcaattctactaataggtctacacaatattagc

SEQ ID NO: 385476 - DNA, 521 bp, Homo sapiens
cgttagaagacgcgtttctgttggtgattacaatatataaataataacagatttccctgttatatgcttttctaccgatgaaacctttcgtcccatgcgatttattttatgtatttatttattttttgacccagagtctgtctctcttgctcagactggactgcagtggtgccatcttgactcctcacaacctccaccacccaggttcaagcgattctcacgcctcagcctcccaagaagctgggactacaagtttgcgccactatgcccagataattttttttggggggggtgggtgggtggagtttcgctcttgttgcccaggctggagtgcaatggtgtgatctcggctcaccacaacctctgcctcccgggttcaagagattctcctgcctcagcctcccaagtggctgggattacaggcatgtaccaccacrcccagctaattttgtagagtgaggctcaaaacaactgagggaaggtaaatctcaattctactaataggtctacacaatattagc

SEQ ID NO: 385477 - DNA, 612 bp, Homo sapiens
cgcctctgcctggaccttgaccgctacatcttggtagacatcgatgacatctttgtgggcaaggaagggacccgcatgaaggtggctgatgttgaggtcagtcttgttacttaaatttttttcttagaagctattcacactctggcctgtcagactcccttccttgattctgagcttgtcataggtacactccctgcctttccaggcaggaagaatgctacttctcatgtatttcctgttcagtctgctctcctgatttctcttgtccctgctactcttcccaggctctgttgaccacccagaacaaactcaggaccttagttcccaacttcaccttcaacttgggcttctcgggcaagttctatcatactggtgagcttatacccctactcctttggcatatcatagyttgacctgtcccttcactgtccacctccctgggcagacaagttgaagaaaagggtcaaggtttggggtcagactgctgtgaggagctagtggtgggcatgaatttaggttcgcatgggtggctggatggcaagttggcagtggggcaaatagaaagtcttaggcaaggatcagggatggaaggtggtcagtgttgttacaaaa

SEQ ID NO: 385478 - DNA, 517 bp, Homo sapiens
agacccactgttataaatggacgtctgagaaatcagcgagcaagttcagacagatatgaaaaccttcctgtccaggactggcagtagctttgagctcccaagtgttgaatttgttaccttttccggagggcttgcaaaaaataaattgacaaatgccttcagattcctctaccagaaaagctggctgctcaaagttcgggttagctaaatctgagattttaaaatcaactcttactcaaaacgccatgacggtgccgtttacacaatactcgccttgagagcccagcaagtgtaacatactrtttcatattataagtatataggtatacgcatatttttaatactaccttgactcttgttatagcaaatcaattctgcctggtttagatttatttctgaaaaatggaaaatagagatgtgggtccaatcctagcctggaaaagctgtcacagtgaaggtaaacttttaatcggctacaggcgaacagtatacagttttatttccagagtaacagctt

SEQ ID NO: 385479 - DNA, 638 bp, Homo sapiens
gcttccctgcctctagtttcatccataccacccatcatccatgctggggcagtaatgattcttacggaaatacacacctgactcagtccctgaatttttttttttttttttgtgacagagtctcactctatcacccaggctggagtgcactggcataatctcagctcactctgtctccctctgtctcccgggttcaagtagattttcatgcttcagcctcccaagtggctgggattacagccaygacacccagctaatttttgtattttcagtagagacggggtgtcatcatgttggccaggctgatctccaattcctgatctcaagtaatccacctgccttggcctcccaagtgctgggattacaggcatgagccactgcacccggccaagttcctgaatattcttcactggcttcctttggcctactatagcaaatccacagtcctcagcaagacatcaagccctttaggacctgattccagcctagctctccaacctcatctcttgtggctcttctcccttgcctcccctcctacctgaaactcccctatatctttaaagagtaaagtcaatcatgtctcctttgatgatgccccagcagaggtagctatggtgttatggtttgaatgtatctct

SEQ ID NO: 385480 - DNA, 589 bp, Homo sapiens
cagaactgtcttcccaatctcctgtgaactctagtcacatatgaactctagctgcaagggactctgggaaatgtagttttaatttctagcctctatagtacaagaagagatgccagagggcttagagatgatactggatgagccattatgcattattctgtattattctgatgagccattatgcattattctgtattattctgatacagaaatggaagggttgaagttgtctaggaaacagaatcagaaagagacaagagcaagggctgctttggaggtctaggtgacagcaatcaagacacatttctcaaaaggacataattgttcccttcattatgaagacttgaagtcttggaaaagaggtcgtagytggcaaagctagggtcacatgcctatttcttgggtaggagaggattgcactgacagtctcaccaagatagcatttgatggagaattaattcctcaaaaggaaatgggatgttactgacaaaacaaagggatataaacttaaggataaaagcccacaagtgcccagtaacaaagctaaaaaataagcaatgacagtctaagtgttcaaattgcatttcac

SEQ ID NO: 385481 - DNA, 460 bp, Homo sapiens
tgtgggaagtgtgcaactgcaatgataaaaaggacactctatgtgacagcaagataaaattggctctcagtcaactgtgaaaggcattgcatgggtgacagatgagtgttattaacagaacagattatttgcttctttctatttcwgcaaattattcttgttaactacaatctaaactcgtctgtttccatgttgttgaggaagttctctgtgtagccaaaatagacacaaaacactgttgaaaattgcacaattgctcaaattccttgagtaaaacatttggtactcttgaaatcttcaaactagagtcaaagcctatattgccttgcccaaggtaactggtgtatgcatatgtgtgtgtgtgtgtgtgtgtgtgtgtgcgcgtgcgcatgcaagtgcctgcatgcagcaaacaagttacatttatttctgtaaaaaagtaaataatactgaagtgtag

SEQ ID NO: 385482 - DNA, 467 bp, Homo sapiens
gttattctcgtctttacgtgttcggttgaatgccgctgtgtcatgtagggccaagattgcagcaaaacaggatctgggtcattacacactttccactgaagggggtctcaagagtatcctcattttgggtttgagatgccgattcaccttaycagtatttactttttaaaaactagttgggtttttttgagacagagtctcactctgtcacacaggctggagtgcagtggcacaatcttggctcactgcagcctcaacttcccaggttcaagtgatcctcccacctcagcctcccaagtagctgggactataggtgtgtacccccatgctcagttagcctttcaatttttagatatgggtggaattgggtatgactggtcatatccagcaggatgcccagttaggagagaagcagtttgttgtttatgtggtgtttgatttgtctaaaatctaacaagttcctaaaa

SEQ ID NO: 385483 - DNA, 591 bp, Homo sapiens
tattccccgctgtctattctcctgccaggaattagatgggaaataaaaaaaagggaattaacagctttaaaaaaaatcatttaggaaaatctgtttcttgctgttggcaagtagctctctggtcatagccgcatctgagtatattcagactcccttaacattaaacgggagtgtgggggtgagggataacacaccctttttattgctttgctttttcccatttttattttctgcttgactttaatagtttcagtctaacaccagcctttgaaatgggttagtattgtyacagtggaaaggcccagagcccagggaagctgaagaccttgcctgaggacacccacctggtgagaactgagctgggatttgaacttgtgatttttacctaaagtgacagtatcaggactgccaagacaaaaattgatcttgtgttagaaattctgttttttaaataaaaactttcctatcactgtgtaagcttataactcttgacaagccaaggatagggacattgttaaactgccagcccctcagccaagtgagctgacatcattgcatccctgacagactcatgatagcaagtcacaggcc

SEQ ID NO: 385484 - DNA, 555 bp, Homo sapiens
ccttctttgtctgttacaaggaggctccaggcactccttggcttatgggtgcttracgccaatctctgcctctgtcttcacatggtcttctctctgtgtctctgtgctctatcctcttcttaaaacatcaccagtcattggatttagggcccaccctactccacagtgatttcttcttgatccttaagtaattacttctgcaaaggcccaaataaggtcaaattctgagttgccaggtgaacatgaatcttggcagacaccatcaacccacaagagctgattaaaggggttaatgagaaggtgcagttgaagtgccacacatattacctgcacattaggggtttttaataaataaagggagtggcttttgttttgttattattgctgctgcagggatcatgattgtttttccagggaatggaaggaaaaggttggatttgggagtggaaaggcaggcctgaggagtagatgaggagggagcagcataaagacccagcggagagaaaggaggagcctgagagagggggggaagaaagggctaaggggacagtcctt

SEQ ID NO: 385485 - DNA, 590 bp, Homo sapiens
ttcttctgctaccagaccctgcttcttggtgactgggctgacaacatgacccagcttggtcagtcatagaaactctatcttcctgaccacagagatcagtccagaaatgggtgggtcattgcctcagaatgaaccaatgactaaagggcagtataagtactctcctttcctgagattttctttttattagatgagatggggaacatgttttcctccctagtaactaaactgggaggatgtgcacctggaatgctctgagcccatttctcttaccatatgagagaaagaaaatttgtcttcagttggaggaaaaaaaaacataaaaagaraagcagaaacaagtgaaagacttggtctttatgactttcacatccccaaatccacctatttccaagcatagattcatctctccccttttgccctgtatgggaactaaaaaaattcttgttttaccaaagttattttggtgcaggtttctgacacttaaaactaaaagaatagtctgattttatttgtgacactacttttctttgttggcacagatcattgaaatttgcctgcttatacttgtctaagttaataacaatctg

SEQ ID NO: 385486 - DNA, 598 bp, Homo sapiens
tttttaaaaaaaaatcaaccataatctttaagtaaatgactttaatgtcacataccagaaagggaacatataaagatgaagcttatcatttctcaactagtttcatcaagaaktataattttcaatgggtaaactttgagagaaattatactattaatcgttaaactcaagagttttatcaaagcctcaaacattatcactggcaacaaaagactgaatataaacatagttaattatttctctggctttaccaaataccattgtgaggtactgaagatacctattaagatagacataattattattgaaggatatgatttatttatatattttccataatacctataaaataaataagttagaggaaatcataatcaaaatgtgtattaaaataacattgtcaatagctattgatatttggcaatagcagtcaataaattaaataattacaagcttgtcaaaattttgtattggagatgattgtcctttacccaactatcatttccttgatgcccataccccttcttagagagcatacctggcactgcctggaaagagcactagaacactgtgtccttgcctatctgagagtgtgagc

SEQ ID NO: 385487 - DNA, 542 bp, Homo sapiens
aaaacaatacttcccaactttgttgtgaagccagaataaccctaaaaccaaaactggcaagtacattacaagaaaagaagtaacagagaagtaagttttaacaaaatattaacamtataactctagcaatgtgcacatagggtaatacagcacaaccaagtggggtttatcccagggattcaaggtcaatttaatgtaaaagtgtaactcgtcgtgaggtgtggtggttcatgcctgtactcccagcacttttggaggccaaggcaggagggttgcttgagcccaggagtttgagatcagcttgggcaacatagggagatcctatctctacaaataatttaaaattagctgagcatggtggcacacacctgtagtctcagctactcgggatgctgaggcaggaggaacacttgagcccaggagttcaaggctgcagtgagccgtgatctcactactgcactccagcctgggcgacagaccaagactctgtctcaaaaaaaaaaaaaaagttcatcacattaacagaataaaggagaatcacc

SEQ ID NO: 385488 - DNA, 415 bp, Homo sapiens
agatttaaacaagaatgttcattactgcttcacttattaatttaaaaataacaaaattaaccatcaacaaaaggatagataaagaaattgtggcattttcatgcaatggaataccacatagcaataaaaagaaggaactactgatagatgcaacaacatgaatgaatctcaaaaacactctgttaagtgaaagacgctagactccccagaatgacatactgtgtgttcagtaacaggsgaaattaacatatgaaggtagaaatcagagcagtgatttcctgaagaggaggggctatagaccttgaagagaactttccagggtaagaattttctagggtgatggcaatgttctataacttaattggaatattgatttacagggtcatatatttgtcaaaattcatcaaaccgtaca

SEQ ID NO: 385489 - DNA, 442 bp, Homo sapiens
agatcatccagcacattgcagtacatagagaatccttgacacttacctaactgatggcaattacagccctcaaacactgtgaaaatcaaaatgtctcccccatatttccaagtggcccttaagggaaggtgtatccctgacagccactgtattagggcatcttactayaactgaaaatataaggatcatttaattagccctttttgcagtatgaagatactatattgttgaaaaccaaagtcatgcaccaaactatacaggccaaacctaccaggttgtaatcaaaagctcaggatggaaagcgttcacacattttaggttgcctcatccagtagagagattacaaacatggtatcaaatcctaatctgccctatacctgtaaccttctagaatactatgtgtctgcagaataaacatttagtattaactatctgtgactta

SEQ ID NO: 385490 - DNA, 628 bp, Homo sapiens
ggatcaaaacatctgagtaaatacttgtaacctttttacctttcgttttaaaattgctgttcagaaagattgtccaaatttagactctcaacataaggtataaatatacttattttatcaaattatccccagtattatcattatttaaaaatcactattaatctgatagttgaaaaatagaggctggaaatgggtgggtgtgcttgggagccttagtgcctgggttcagaggtcagtcctgcctataatccctgtcttttgggagaccaagtcaggaggatcacttraggccaggagttcaaaacagcctgggcaacatagcaacatagggagacctcatctctacaaaagtgttattattattattattattattattattattattattagctaggcatggtggtgtgtgcctgtagtcctagctacatgggaggctgaggtgggggactcgcttgagcccaagaattcaaggctacagtgagctatgatcacaccactgcactccagcctggacaaaagagcaagacccagtctcaaaaaacacaacaaaacaacaaaaaataaaaatagattattagtgtacaggttgagtatcttttatctgaaatgcttgggaccggaaata

SEQ ID NO: 385491 - DNA, 628 bp, Homo sapiens
ggatcaaaacatctgagtaaatacttgtaacctttttacctttcgttttaaaattgctgttcagaaagattgtccaaatttagactctcaacataaggtataaatatacttattttatcaaattatccccagtattatcattatttaaaaatcactattaatctgatagttgaaaaatagaggctggaaatgggtgggtgtgcttgggagccttagtgcctgggttcagaggtcagtcctgcctataatccctgtcttttgggagaccaagtcaggaggatcacttaaggccaggagttcaaaacagcctgggcaacatagcaacatagggagacctcatctctacaaaagtgttattattattattattattattattattattattattagctaggcatggtggtgtgtgcctgtagtcctagctacatgggaggctgaggtgggggactcgcttgagcccaagawttcaaggctacagtgagctatgatcacaccactgcactccagcctggacaaaagagcaagacccagtctcaaaaaacacaacaaaacaacaaaaaataaaaatagattattagtgtacaggttgagtatcttttatctgaaatgcttgggaccggaaata

SEQ ID NO: 385492 - DNA, 539 bp, Homo sapiens
gtctccttgcatcagctattgccccttmattattaggagccagagtaatattttcaaagcatatatcagcccttggctccagatcctttcagagcaaaagccgaagtctttgtggtgtcttaaaaagcctgatcagcacctctccttttccccaaaccatctctctgcccccctttgtgatcacatttgctactgttgactcctctggagccacactgacctcattgctgtgtctgggttatgtccggcaagctcccacctcagggcgttttgcagttacagttccttctgcctgaaatacccacgtggttcactctctgagttccttcaggtcctttcaaactatcactttattggagaagcctttcctgaccattctgtgttaagtaataattttccaccttgtattccttttctcctgctttattatgttccgttgtacttaccaacatctaatatatatattttttgaaatgtttccaagctataagtctaatatgttttgaactgtccagtatcgtagccactaatcacttgtg

SEQ ID NO: 385493 - DNA, 539 bp, Homo sapiens
gtctccttgcatcagctattgccccttcattattaggagccagagtaatattttcaaagcatatatcagcccttggctccagatcctttcagagcaaaagccgaagtctttgtggtgtcttaaaaagcctgatcagcacctctccttttccccaaaccatctctctgcccccctttgtgatcacatttgctacygttgactcctctggagccacactgacctcattgctgtgtctgggttatgtccggcaagctcccacctcagggcgttttgcagttacagttccttctgcctgaaatacccacgtggttcactctctgagttccttcaggtcctttcaaactatcactttattggagaagcctttcctgaccattctgtgttaagtaataattttccaccttgtattccttttctcctgctttattatgttccgttgtacttaccaacatctaatatatatattttttgaaatgtttccaagctataagtctaatatgttttgaactgtccagtatcgtagccactaatcacttgtg

SEQ ID NO: 385494 - DNA, 539 bp, Homo sapiens
gtctccttgcatcagctattgccccttcattattaggagccagagtaatattttcaaagcatatatcagcccttggctccagatcctttcagagcaaaagccgaagtctttgtggtgtcttaaaaagcctgatcagcacctctccttttccccaaaccatctctctgcccccctttgtgatcacatttgctactgttgactcctctggagccacactgacctcattgctgtgtctgggttatgtccggcaagctcccacctcagggcgttttgcagttrcagttccttctgcctgaaatacccacgtggttcactctctgagttccttcaggtcctttcaaactatcactttattggagaagcctttcctgaccattctgtgttaagtaataattttccaccttgtattccttttctcctgctttattatgttccgttgtacttaccaacatctaatatatatattttttgaaatgtttccaagctataagtctaatatgttttgaactgtccagtatcgtagccactaatcacttgtg

SEQ ID NO: 385495 - DNA, 555 bp, Homo sapiens
tgttttgctatgatgagtgcaaaaaacagtgatttttctaaactccatcatttcttctacatttattagttggcatcctaatatcgaaatgagctctaaattctccaytgaattattttatttactgggtaataatctagtggtatctagtggtataattttgatacccaaattatcccagatttggccagtaagccccttcaagatgcttcttgtgactttttaactggggcacttccttacattatggcaaaaaaaaagaacccgacgtcttttatactttctctgcccagccctgtgatcagtcatttcttaaagtagttctggtttcttctcagtggacacagttaggatatatgtgagggtctatgtatatcgcacaaatatatatacacgtacaccccatatatgcatatacctattctattcagctctctctccatatatgtccatatatataatacatgcacacacacatatacctaacaggtgtacgtatgaaccataaacatttcaaggttcattataatctactgaatttgtaattcccatttt

SEQ ID NO: 385496 - DNA, 555 bp, Homo sapiens
tgttttgctatgatgagtgcaaaaaacagtgatttttctaaactccatcatttcttctacatttattagttggcatcctaatatcgaaatgagctctaaattctccactgaattattttatttactgggtaataatctagtggtatctagtggtataattttgatacccaaattatcccagatttggccagtaagccccttcaagatgcttcttgtgactttttaactggggcacttccttacattatggcaaaawaaaagaacccgacgtcttttatactttctctgcccagccctgtgatcagtcatttcttaaagtagttctggtttcttctcagtggacacagttaggatatatgtgagggtctatgtatatcgcacaaatatatatacacgtacaccccatatatgcatatacctattctattcagctctctctccatatatgtccatatatataatacatgcacacacacatatacctaacaggtgtacgtatgaaccataaacatttcaaggttcattataatctactgaatttgtaattcccatttt

SEQ ID NO: 385497 - DNA, 555 bp, Homo sapiens
tgttttgctatgatgagtgcaaaaaacagtgatttttctaaactccatcatttcttctacatttattagttggcatcctaatatcgaaatgagctctaaattctccactgaattattttatttactgggtaataatctagtggtatctagtggtataattttgatacccaaattatcccagatttggccagtaagccccttcaagatgcttcttgtgactttttaactggggcacttccttacattatggcaaaaaaaaagaacccgacgtcttttatactttctctgcccagccctgtgatcagtcatttcttaaagtagttctggtttcttctcagtggacasagttaggatatatgtgagggtctatgtatatcgcacaaatatatatacacgtacaccccatatatgcatatacctattctattcagctctctctccatatatgtccatatatataatacatgcacacacacatatacctaacaggtgtacgtatgaaccataaacatttcaaggttcattataatctactgaatttgtaattcccatttt

SEQ ID NO: 385498 - DNA, 572 bp, Homo sapiens
aaacatccaataataccatatactccttgagaggggtactgtacatgattttaaaaatcacatccagcttgctagggtatcaaatcaaaagcaagagggaaaaagttcctgccatgtgaactaggaagttcaacagaagtgaggctcactcttatttatccggtcaactaatatttactgagctccactttgtatgagatattgtttcagggcctgaaacaatatctttgtatgagatattgtttcagtagtgaacaagataggtaaagttctttccttagttccaaagacaatgggagaaataaacaaacacatcctacaatgtctgatcgtgataagtgctataagccaaaataaatcagggttagggcatagtgatggggaaagaattattttaaataaggttgacagaaataaaggcaaacaatccacatttagctttcccaaagttattgtaggtaaatgatccaaaatctcaaacatgtataaacattcttttacagacataaaatgagaaaacmcctcaaaatgctcaaatcttggttttcaaattcatcgccctaaaaaaaaaa

SEQ ID NO: 385499 - DNA, 624 bp, Homo sapiens
ctgtcttcatgctttatttcattaattgatcttcaatctctgatatcctttcttccacttgaccagttcggctatcaatatttgtgtatgcttcacgaagttctcatgctgtgtttttcagctccattaggtcatttatgttcttctctaaattggttgttctagttagcaattcctctaaccgtttttcaaagttcttagcttccttgcactgggttagacatgttcctttagctcagaggagtttgtttcacctgttttttctctgcccctgagtatcttagggctaagagttggaatagatgtctttgtgtcccattgttgctttgaaaccattttactgccaccttcctataggttatctcttccctcaaaattcattccctcttcttccccccttattgctaatatttaatgtcctccctcccctttcatccactggaaattttagcttttggttcatagttcacgtttcacctccttctgcttaaaattttttccttgcagttaacccattctacacctgctttctcagttccytgatctcacctccaacaccttttcttgcatttcactctgggcacactcccatagccatttcccaaatttatcagaaccaaagtc

SEQ ID NO: 385500 - DNA, 597 bp, Homo sapiens
ttctgttatttaggtagagttgyatcatacaagcatttaatttacatgctgactttgaacgctcttcctaatgtaagatttaaattttaactgacatatccacttgggtgtctcacagacactcaatatgtccaaaatggatatctttgttttcccttaaacctgtccctactaccttcaaacttccttgtctcagtcaaccaatccagcatcctcccaaattctgattaccaagattacccataaatcttggtgtgatatgtacttaaaataaaatccacacttcttaccatgacctaaacattgtatgacctacgtgttatccatatttccaatgtcatctctttccattttcccttttgcccatggtgtttcagccatactggtctttgattgcctagaacaacccgcctctgcagctttagggcttttgcctttctctgcctgattcactcttctgctgttttttggctaggtccttattttttcaggtctcaatttgcacctgtctaaagtctttcctgacttttctatttaaggtaggttatcctcttcccactactatattcttatctcagccttttatggagtttaact

SEQ ID NO: 385501 - DNA, 651 bp, Homo sapiens
actaactgacggcatgttggatttccccatcagatatgaactccttgagattggggctatgtcttatacttgtttttaactccatggctaatgcaatgactggccattgtatgtcctcaaaatcatttgttgaatgaataaactaataaatgaaccaatgaacaaactcaggaaggaagatgtcagtgagcagaagccaggtccacctgctcagaagatacagcccaaacttccygaaaagtccttccagacccagcccctgtaccctcttctgccttccttcgaatcttcccctcccttcatgctccaggaagacaaaatcactttatgtcctccagcatgccctgaccactcctgtttccctactttgcctcctttacctgggctgctcccttcttctccttttctgactgattcagggtttgggactcacattggaagataccctctcctctgggctctctccttgtccacctccctacacttggttaaccattcttatgtgtgctcccaggcacaatgctacagtacgcattaaagtttattgaactattgacttcccccgacttggctgttagggccaaggacctaggagttctctaatctcatccttcccatctcctcttcctccccaaggagaacctgagaaag

SEQ ID NO: 385502 - DNA, 618 bp, Homo sapiens
ggccaagaaaacagtctctgtcaacacacacacacaaagaaatagcagaagcagaatcaaagtgccactttcctagcagctggaccagcagatggtggcactcatggattgatggtggacagatgatggtcccctagtaaaagtcaagttacaaaaacagctgcaacctaagcaggrccacctacttctccatccagtggaaaccttggaaccagtatagtagacagagtgacaagaagaaatatatggccaggtctccagttggaaggggatggggggagtcctgattcagtttactaactctgccacatatggaggaatagaaagtgtaagaaaagaacaaagaatgggcttctgcattgtggtatggtgaccctgcccccagcaaattattgcccagtgatgtcctgaactctgacttatacagcagcccctctttccttatggagagagaaagcactggaagaggacagggaggagggacagaagtgtgtgatactgttaccatccaatgggttctagatagagtcaatttaccaaaacaggggaattgaaatagagagtttacttcccacagagccaagcagcctgcacagaagacagagttttattattact

SEQ ID NO: 385503 - DNA, 618 bp, Homo sapiens
ggccaagaaaacagtctctgtcaacacacacacacaaagaaatagcagaagcagaatcaaagtgccactttcctagcagctggaccagcagatggtggcactcatggattgatggtggacagatgatggtcccctagtaaaagtcaagttacaaaaacagctgcaacctaagcagggccacctacttctccatccagtggaaaccttggaaccagtatagtagacagagtgacaagaagaaatatatggccaggtctccagttggaaggggatggggggagtcctgattcagtttactaactctgccacatatggaggaatagaaagtgtaagaaaagaacaaagaatgggcttctgcattgtggtatggtgaccctgcccccagcaaattattgcccagtgatgtcctgaactctgacttatacagcagcccctctttccttatggagagagaaagcactggaagaggacagggaggagggacagaagtgtgygatactgttaccatccaatgggttctagatagagtcaatttaccaaaacaggggaattgaaatagagagtttacttcccacagagccaagcagcctgcacagaagacagagttttattattact

SEQ ID NO: 385504 - DNA, 610 bp, Homo sapiens
aatttgttatcaagacttaatttaaggtcctggctgcttctctgcagcctgtgatcaattgatcccatgtacttccatttcagttatcataatctataaaatattcattagatgatgaactaaattagatgataattttccttttcctcttttcctttatccacagagccttcactagaaggacaaccacagaacttaagtaaggtaattactgggccaaattggacagtgatttcaggcagtctagggctccaagtcacaggccaacaattgtgggagtctatagcttgggtccctgcacacttggggaccctccytcaggcccaaagggcacagtgatggattcaaccacatgacaatgcctcaactagcctctctcaacaagccaagtttaagacctggaaccaaacaaatcacctcaaaaatctagctgcctgagtcatggacaacacagactacttgtaaaagcacagaaaatacctatagctaccatggtacaattcttgagaaaaaatgaaaccatgacaatgtgggtcagcaaattaaacagtgataaatatcatggcagttggaaattcatctgagttctatgtgtcacgtgaaatacaaa

SEQ ID NO: 385505 - DNA, 615 bp, Homo sapiens
tcagagcttgctatggttttaaagggtcctgaagagcccatttttccatagagatgtgatcatctgtgtcttggcatgctggcatttccttccctttcttctccatttattcaggtcctacccagccttcaagcatccctttttccataatgtggtttgacaggcccaactccttcaggtcactctccttcctgccatctcacatacccttatggtgtcatcttagcattcacactccatccttcctacagttgatttatttatctaggacaycctttccatcctgtcaaatttattgacgtaaggagtgaagataatattgtatagctattaaagattgactaaagggcccagcacaggacaaggcccacaatctacgttttaaaatatttaaagagaaaggaagcattcttccaatagactaacaggaacaagatttacctttccatctgaaataactaaaaacaaacaaaatatatgaagcaatagttttcaaggcactgggcatcagtcagtaaaggacaataatcctgaaagacaggaagcaagtgattgcctgagctttattattgctttaagagaatttttagactatggctcaggaagaggaaacca

SEQ ID NO: 385506 - DNA, 549 bp, Homo sapiens
aaggcccacaatctacgttttaaaatatttaaagagaaaggaagcattcttccaatagactaacaggaacaagatttacctttccatctgaaataactaaaaacaaacaaaatatatgaagcaatagttttcaaggcactgggcatcagtcagtaaaggacaataatcctgaaagacaggaagcaagtgattgcctgagctttattattgctttaagagaatttttagactatggctcaggaagaggaaaccaaggyggactccctgatttgagaatactaagctgagagtcctgggagaccaaggtggctacagtctgcagaacatactactctggagagttgcatagagagaaaaacctagagatctgaaaagggttcaatcagtgcatgcatgtgaggaaactgacatgggaaaagaaccatctggaaggatcagtacctggaactcacacagagctgagaataatttttgttcccaccagtcagactgagaaagattcatggggtagtaagttagagtattcagaaaagtcttgcttcagcagag

SEQ ID NO: 385507 - DNA, 549 bp, Homo sapiens
aaggcccacaatctacgttttaaaatatttaaagagaaaggaagcattcttccaatagactaacaggaacaagatttacctttccatctgaaataactaaaaacaaacaaaatatatgaagcaatagttttcaaggcactgggcatcagtcagtaaaggacaataatcctgaaagacaggaagcaagtgattgcctgagctttattattgctttaagagaatttttagactatggctcaggaagaggaaaccaaggcggactccctgayttgagaatactaagctgagagtcctgggagaccaaggtggctacagtctgcagaacatactactctggagagttgcatagagagaaaaacctagagatctgaaaagggttcaatcagtgcatgcatgtgaggaaactgacatgggaaaagaaccatctggaaggatcagtacctggaactcacacagagctgagaataatttttgttcccaccagtcagactgagaaagattcatggggtagtaagttagagtattcagaaaagtcttgcttcagcagag

SEQ ID NO: 385508 - DNA, 488 bp, Homo sapiens
agagagaaaaacctagagatctgaaaagggttcaatcagtgcatgcatgtgaggaaactgacatgggaaaagaaccatctggaaggatcagtacctggaactcacacagagctgagaataatttttgttcccaccagtcagactgagaaagattcatggggtagtaagttagagtattcagaaaagtcttgcttcagcagagtaaaatcactgtttctacatcatatgctgctctgatccttcctttaaaatcttaaaagttagatccaaagagatcaaaccttttaaaataatttaatatgtgtcctagaataaatttcaagaatatgtataggaatacaaaaatatctaggatttaacaaggtaaatacacaatgtctggcacccaatcaaagattactggcatcaaaaggaggaggaaaatatgactgataatgagggraaaaaatcaaccaaagaagaccaactcagatttgactgagtatatt

SEQ ID NO: 385509 - DNA, 583 bp, Homo sapiens
actcaagccataataaagacaaaatcataaaatgggtggggggaacatattgcatagtaaaagacaatgatatgaataacagcagatttttcaaaaatacaaccatggaaaaccagcatcttgaatgaatcaaaggaccactaggagtgtactagagcaccaaccacatacaaaattttcttttcccctaattaacacaacccagtgaacaccctggagagtcagaccagccatcttcccatcaccytgtggtggtccccaggtttatgatgccctccttgctcgacattctgcagagtctaggctggtctcagaagaagcagagcagcttctgtcatttgcctggacacacttcactgtgttgcttatgccaagagctacagttgctaagaatcagattttgtgtaaagcaataagtccagatgatttctttaaactatagtgacttttgaaaattgtctgcttgatttcttttcttcttgtctcatgagttcatgatgttatgggattttggcagcaaccagatagctccagggagtccagtttgtctgacttatgtgggtagatgctcaattccctcgtc

SEQ ID NO: 385510 - DNA, 566 bp, Homo sapiens
tcagtaccattagttaaaaagaatatcctttctccatggaattttcttaacatctttgctacaaatcaattgattatatttgtgtggstgtattttggggcttttctttctgttctattgagcgatgtgtttattctttctttagcatcatactgtagctttatagtaagttttgaaatcaggtagtattaatcctctagctttgttgttattcttttatggtattgtgttggctatgctatattctttgtcttttcatacaacctttagcattggtttgttgatattataaaacagcttgctgaagttttgattgacaatgcattgacctatagatcaagttgggaaaaattaacattttaacaatagcaagtcttccaatccatgaacacagaatatctcttcatttatttacatctttgatttatttcatcagtgttttgaagatttcttgtacaaattttgttaaatttatatttaagtatttcatttttggtgctattgtaaataatattgtttctttaatttcaaatttcaacgttagatggctgatataaaggaaaaca

SEQ ID NO: 385511 - DNA, 522 bp, Homo sapiens
ctctagctttgttgttattcttttatggtattgtgttggctatgctatattctttgtcttttcatacaacctttagcattggtttgttgatattataaaacagcttgctgaagttttgattgacaatgcattgacctatagatcaagttgggaaaaattaacattttaacaatagcaagtcttccaatccatgaacacagaatatctcttcatttatttacatctttgatttatttcatcagtgttttgaagatttcttgtacaaattttgttaaatttatatttaagtatttcatttttggtgctrttgtaaataatattgtttctttaatttcaaatttcaacgttagatggctgatataaaggaaaacaattgacttttgtatattgacattgtattctgtgacttatttgtttattagtcttagaaatgttttggtgggtcctttgggattttctgtatagaaagttatgtcattggtagataaacatagttttatttcttcctttctgatatgtatg

SEQ ID NO: 385512 - DNA, 579 bp, Homo sapiens
atattgactcattgaatgtgtgtgtgtgtatgctgcattatgtctattatatatgttgcttcttcccatcttagcttatactttaatttcacttacgtgacgtttcttattaggaagtttaattttaatttgataaaattcatcaaactttgtattactaggtcaagatttttgtatcttgttgatagagtttggttctgtgtccctgcccaaatctcattttgaattatgatcttcagtgttggagaaggggcctggtgggaggtgactggatcatgggggcaaatttcccacttgctgttctcataatagtgacttctcgtgagatctggttgtttaaaagtgtgtagcacttcctccttcrccctctttctctcccactccaccatggtaagacatgcttgcttcctcttcacctttcaccatgatggtaagattcctgaagcctccccagccatgctttctttacagcctgtggagctgtaagccaattaaacctctttgctttataaattacccagtctcaggtagttctttatagcaatgtgagaagacactaatacagaaaattggtaccag

SEQ ID NO: 385513 - DNA, 579 bp, Homo sapiens
atattgactcattgaatgtgtgtgtgtgtatgctgcattatgtctattatatatgttgcttcttcccatcttagcttatactttaatttcacttacgtgacgtttcttattaggaagtttaattttaatttgataaaattcatcaaactttgtattactaggtcaagatttttgtatcttgttgatagagtttggttctgtgtccctgcccaaatctcattttgaattatgatcttcagtgttggagaaggggcctggtgggaggtgactggatcatgggggcaaatttcccacttgctgttctcataatagtgacttctcgtgagatctggttgtttaaaagtgtgtagcacttcctccttcgccctctttctctcccactccaccatggtaagacatgcttgcttcctcttcacctttcaccatgatsgtaagattcctgaagcctccccagccatgctttctttacagcctgtggagctgtaagccaattaaacctctttgctttataaattacccagtctcaggtagttctttatagcaatgtgagaagacactaatacagaaaattggtaccag

SEQ ID NO: 385514 - DNA, 528 bp, Homo sapiens
aaaatctctttcctttataaacttcttttcaaagccagggtgtgacatattaccaaacccaataaraagtttacagttcacaatctaaaacaaagatgataccagccccttcctaagatatacttccctcttacctgggaaccagaccaagaaactagccacaagattagaaaccatggcttaggagtcacacagctagaggctacaagattttgaccctctctaaactgctctcaagatcagtgcttaagatattttataaaccctgcccttgatggatcagcttgcctacccagatcgataaactggcttatccaggcacggtgttgaatgtgccacccatggttgcaggcgtgacctcggccatggaaccagaggaactaggtaattgggatttgtcacgctcacccatgcaactctagtgctctgcctgtgacttccctttgactatctagacttttgtgacctgcctggctcccccagccaaaaagaaatggatctcaggagagactacgtgacatttgcact

SEQ ID NO: 385515 - DNA, 619 bp, Homo sapiens
attgtcactctctcaggctttgccacttgcctccatcacacctactcggagccaacctcctatcctcttgacaggcttacagggaggcaagagggtgttacgcaaaggaaactttcttcaaattctgctttttcacttgcaagctgtgtggtctgggccaatattttacctctttatacctcatcatttcctccgtcaaacaggaatgactcagccttcatgtagctgcatctgagacagccagctggaatataaactccaggagggcagggacttttgcctgtttagtcctctgctttgtctccagcaccagcaccagcacctagaacagctccargtcgttctggtgttagttaagcttccttggagaagaagaacctctcacttcaggcttctgttccccagtctgaccagaagatggcagcaaaggaaagcgtgtcccctggacaaggctgttgccgtgctgaaggcctctgcagatttcctgattgcttgtccctgcattaggaagcagagctgtcactgctccttgagcttcagaactgtgggcctgtgcggagcctagttatgaatcctttttatagaggcctggtgctgcttgggtgagaaggggcagcat

SEQ ID NO: 385516 - DNA, 522 bp, Homo sapiens
aacattgaagattacaattcaacatgagatttgtgtggggacataaatccaaaccatatcaactggtatggtgcycttggtctggggctttttgcccagaagacagcggtgggaccatccatctcatgttcccttgacagtcttcctctgctgacttccccaggagcaggtctgttcagctagttttgtcccaagccatctgcacccaggttgctgggctactccaggtgttgtaagccatggggctccctcaggcagaagctgcagctggccaacaggataccccttcccagactggtcttgtggagagagggatgcccagctcctgcaccagcacacaaacccacagctcactcttctcagtgttctgagagtggtagctcgatctcaggccacagatctcatcttactactcctgggcagtgtgcttgaatgctgaggggttaacactgggcccacaggtttgtacctgggcccttggctgttctggggtccatattgctcctgggtggatggcaaaac

SEQ ID NO: 385517 - DNA, 522 bp, Homo sapiens
aacattgaagattacaattcaacatgagatttgtgtggggacataaatccaaaccatatcaactggtatggtgcccttggtctggggctttttgcccagaagacagcggtgggaccatccatctcatgttcccttgacagtcttcctctgctgacttccccaggagcaggtctgttcagctagttttgtcccaagccatctgcacccaggttgctgggctactccaggtgttgtaagccatggggctccctcaggcagaagctgcagctggccaacaggataccccttcccagactggtcttgtggagagagggatgcccagctcctgcaccagcacacaaacccacagctcactcttctcagtgttctgagagtggtagctcgatctcaggccacagatctcatcttactactcctgggcagtgtgcytgaatgctgaggggttaacactgggcccacaggtttgtacctgggcccttggctgttctggggtccatattgctcctgggtggatggcaaaac

SEQ ID NO: 385518 - DNA, 520 bp, Homo sapiens
gtccaggtggagataactgagccatgggggcagtttcccccatactgttctcatggtagtgaatgactttcatgagatctgatggttttataaatgggagytcccctgcacaagctctcacttgcctgctgccatgtaagaggttcctttgctcttccttcatcttccaccatgattgtgaggcctcctcagccatgtggaactagaagtccattaaacatctttcctttataaattatccagtcttgggtgtattttgattagcaccacgagaatggactaatacaccatacaacactgacagtctagtagaggacaccaacattatcaggtaatcacacaaacaagtatgaaattacagggggcaataatgctgtgaaaggcaggcgcacatccctgtgaaacctaatcattctctgatcacttggcttccaacaaaatgcctcccaaaatattcagatcaggctctgtttcatttgtgaagagttccagagaagcctttcctgcctcccagttgtct

SEQ ID NO: 385519 - DNA, 593 bp, Homo sapiens
gaattataagaaaaattgatgtagctayacttttaagagcagatttaatatatttatttatatttatttaatatatttatttattggtagctctttgacttataggtcaagagctaccaatatattaatatatttatttattaatatatttatttattggtagctctttaacctataggtgaagatattttgagagagagagaaagagacctataggttgaacagctaccaattcattgagagtgcagaagtttgaaaactgagaacaaacttgaaattatatatgtggcttcatgaaaacatagaggatgtacatacatacatacaaaacatttataaacacacaagaacatttatagacaaacacacatagaacatttataaacactatgtatcaaaccataaagttttaacaaaatccaagacattgtagagaccagatttctttccaaaatgcaatttaattagaaatttacaagtaaaatgtaacttttaaaaatacatatacaatttggactaagtaaaaacccactcctcctatgcctcaaagtaatcacaatagaatttaaaatcatttagaatgaaatgttatt

SEQ ID NO: 385520 - DNA, 636 bp, Homo sapiens
gggggttgccttggcatcagttagacatttgatctcctagttcaggtaagyggtcctcacttaacacttaggtttgagaatcatctgcagaggtggtggctgacatcatgggaagaagtatgattgagcatggggcgtgtggagggacaaagcaggtgaggatgcaggaggagtcagggaaccacaatgagatgtctgactaagccaaagaggtgtaatcaacaccagcagggtgtgatgggcattatcagcagggagatgaaccttatatggaggagggaggggtctggttggctcaaacactccagaaaggtccagtgtgtgactgcatgtatctccagcttggatcttcccctggactctagactcacacatccagatgtacattaggcctctcaaacttgcttgtccaaaagcaaactgatcatcctgtcccaagcctgctcctcctgttgtcttcaggatctcagtaaatccccccggcttcttgtcttccatctcttgcattcaatctatcttcaaatattgtgaactcagtgtttatatatccaggtatatcctgagtctgaccactttttgccacccccatgtcaaccagtctggcccaagcacattctccaggttatcgcaccagcc

SEQ ID NO: 385521 - DNA, 636 bp, Homo sapiens
gggggttgccttggcatcagttagacatttgatctcctagttcaggtaagcggtcctcacttaacacttaggtttgagaatcatctgcagaggtggtggctgacatcatgggaagaagtatgattgagcatggggcgtgtggagggacaaagcaggtgaggatgcaggaggagtcagggaaccacaatgagatgtctgactaagccaaagaggtgtaatcaacaccagcagggtgtgatgggcattatcagcagggagatgaaccttatatggaggagggaggggtctggttggctcaaacactccagaaaggtccagtgtgtgactgcatgtatctccagcttggatcttcccctggactctagactyacacatccagatgtacattaggcctctcaaacttgcttgtccaaaagcaaactgatcatcctgtcccaagcctgctcctcctgttgtcttcaggatctcagtaaatccccccggcttcttgtcttccatctcttgcattcaatctatcttcaaatattgtgaactcagtgtttatatatccaggtatatcctgagtctgaccactttttgccacccccatgtcaaccagtctggcccaagcacattctccaggttatcgcaccagcc

SEQ ID NO: 385522 - DNA, 636 bp, Homo sapiens
gggggttgccttggcatcagttagacatttgatctcctagttcaggtaagcggtcctcacttaacacttaggtttgagaatcatctgcagaggtggtggctgacatcatgggaagaagtatgattgagcatggggcgtgtggagggacaaagcaggtgaggatgcaggaggagtcagggaaccacaatgagatgtctgactaagccaaagaggtgtaatcaacaccagcagggtgtgatgggcattatcagcagggagatgaaccttatatggaggagggaggggtctggttggctcaaacactccagaaaggtccagtgtgtgactgcatgtatctccagcttggatcttcccctggactctagactcacacatccagatgtacrttaggcctctcaaacttgcttgtccaaaagcaaactgatcatcctgtcccaagcctgctcctcctgttgtcttcaggatctcagtaaatccccccggcttcttgtcttccatctcttgcattcaatctatcttcaaatattgtgaactcagtgtttatatatccaggtatatcctgagtctgaccactttttgccacccccatgtcaaccagtctggcccaagcacattctccaggttatcgcaccagcc

SEQ ID NO: 385523 - DNA, 562 bp, Homo sapiens
ttaggacatagaatcaatagttcttgataatggagcagatgtgggaggtgagaaatgacaaaatcaaatgatttggttccccctctaaccttcaagggaaagtaactcaagagggaactgaaggtgtctttgaaagcccaaagtggcattattatgtgaatgggtttggtcttactctgtgagactcccaagggaaggtctagaaccatggactggcccacaggggacatctttgggtttcgtgttaggaggagccttacaaggacagagccatcaggccatctcatcctcctaacacagtgagatccacaaagcagggactacatcacccttggtcaccactgtgcctggctgtggcccctgctcttaaaatgcctgtggatgaactggagtagtgggctcccttgctgaggcatttaacttgggaaagctaaccccttgctgaggatgctacaaaggcaatatggattgtctgagaggcagggataataccgctcttccaggactakattttcagactgagctaaacaggaaatgaaaaacccttaggacaagaattacg

SEQ ID NO: 385524 - DNA, 543 bp, Homo sapiens
aggatgactcaaaccatccaaacacaggcggtggacagggcctcacacccagaagcattctgtccaaggcagtgttacccacaccaacattctggcagcttctgctattctgctgtgcttttggcttagaatagcactcacttcctctggtcaggaacattcttgcagataaagccagctggaggtccaggcctgagtatctcatcaatgtcaagcaggctagctctgagtcccgggaaacccgctggctcatcatggctttatgagttgttgaaaagacactagcaagggcagctgtcccaggtgctggagagtccacacagcataaatcccatctctgtcactaactagctgtgtgacctacgccaggttacccaactctttggagtccatttcctcatctgattaataggggaaataataccgaccttgctgaattggggtcagagctaaatcggataacaacacattaagtccccaatgcagcccrgtgccaggcagcttcattatagaaaggccgtgtgtaggtgcattcaaaacccc

SEQ ID NO: 385525 - DNA, 543 bp, Homo sapiens
aggatgactcaaaccatccaaacacaggcggtggacagggcctcacacccagaagcattctgtccaaggcagtgttacccacaccaacattctggcagcttctgctattctgctgtgcttttggcttagaatagcactcacttcctctggtcaggaacattcttgcagataaagccagctggaggtccaggcctgagtatctcatcaatgtcaagcaggctagctctgagtcccgggaaacccgctggctcatcatggctttatgagttgttgaaaagacactagcaagggcagctgtcccaggtgctggagagtccacacagcataaatcccatctctgtcactaactagctgtgtgacctacgccaggttacccaactctttggagtccatttcctcatctgattaataggggaaataataccgaccttgctgaattggggtcagagctaaatcggataacaacacattaagtccccaatgcagcccggtgccaggcagcttcattatagaaaggmcgtgtgtaggtgcattcaaaacccc

SEQ ID NO: 385526 - DNA, 514 bp, Homo sapiens
ttcctgaattagaagtatgtttctgtttgcctacatttttggtccattcagctcacttagtaaaagaacctgaaatgtcaagtgatttctgggaaacctggcatagtattttagacagggatatcaatcttaccttttcctgctctgaactatgcctgtgagatgtggggtttgattttagaaatgtcaaggataaacacatgccaagggaatggtgcccgaaatgctgaaatacaaggagaaattcaataaggtttagttgaggctttctcaataactctgtatttttgacttactcttctggaagctgatccaggtgggtgcccccaccattcatcagcctgtgtaggaaaagcacagtctcccgtgagacaagcacagccttgcytagagattgggcaaggtatctttagctttcattcaaggactgggtttgaggagctgctgcctcacaatctgccatcacataaagccaggtgggtcacctggagctcagaaatgcccccacaccagt

SEQ ID NO: 385527 - DNA, 553 bp, Homo sapiens
agtctcccgtgagacaagcacagccttgcctagagattgggcaaggtatctttagctttcattcaaggactgggtttgaggagctgctgcctcacaatctgccatcacataaagccaggtgggtcacctggagctcagaaatgcccccacaccagtttcaccaattccttccttctttaggraccatgggagtgtagctgctttccactggaagttacaactatgttgtcatctccattttacaaatgaggaaactgaggcacaaagagcttgagcaactcacccaaggtctagcaactggaaaacagggattcaaagccaggtggtctagctcaagagtcctgtccttaaacaccactgttgaagcttgtaagggggtgaataatgttcattaaatgaaagttggatgtctgagtagactccccacttgcatgctgcaggctgtgtgaatgggtaagctgtgaaaaactctggaatgacagccattcagacagcctggggccacttgtcctgatcccaaacagcttcatcctcttcccccaatgggttaaac

SEQ ID NO: 385528 - DNA, 551 bp, Homo sapiens
tccaccaaataccctaaatcagctctctcaagttcaaagttccacaaatctctaggacaggggcaaawtgctgccactctctttgctaaaacacaagaatcacctttgctccagttcccaagaagttcgtcatctccatgtaagaccacatcaccatggaccttattgttcatattactatcagcatttttatcaaagccattcaatgagtgtctaggaagctccaacaagtgtctagaacttcaacaagtgtctaggaagttcctgtcttcttctgagccctctaaactcttccaacctctgcctgttacccagttccaaagtcacttccatgtttttgggcaccttttcagcagcattgtactctactggcaactatttagtgtattagtccattttcatgctgctgataaagaaatacctgagacagggcaatttacaaaagaaagaggttttaaggagtcaaatcttatatggatggtggcaggcaaagggagagcttgggcagggaacctcccatttttaaaaccatcagatctcatgagactcat

SEQ ID NO: 385529 - DNA, 551 bp, Homo sapiens
tccaccaaataccctaaatcagctctctcaagttcaaagttccacaaatctctaggacaggggcaaattgctgccactctctttgctaaaacacaagaatcacctttgctccagttcccaagaagttcgtcatctccatgtaagaccacatcascatggaccttattgttcatattactatcagcatttttatcaaagccattcaatgagtgtctaggaagctccaacaagtgtctagaacttcaacaagtgtctaggaagttcctgtcttcttctgagccctctaaactcttccaacctctgcctgttacccagttccaaagtcacttccatgtttttgggcaccttttcagcagcattgtactctactggcaactatttagtgtattagtccattttcatgctgctgataaagaaatacctgagacagggcaatttacaaaagaaagaggttttaaggagtcaaatcttatatggatggtggcaggcaaagggagagcttgggcagggaacctcccatttttaaaaccatcagatctcatgagactcat

SEQ ID NO: 385530 - DNA, 551 bp, Homo sapiens
tccaccaaataccctaaatcagctctctcaagttcaaagttccacaaatctctaggacaggggcaaattgctgccactctctttgctaaaacacaagaatcacctttgctccagttcccaagaagttcgtcatctccatgtaagaccacatcaccatggaccttattgttcatattactatcagcatttttatcaaagccattcaaygagtgtctaggaagctccaacaagtgtctagaacttcaacaagtgtctaggaagttcctgtcttcttctgagccctctaaactcttccaacctctgcctgttacccagttccaaagtcacttccatgtttttgggcaccttttcagcagcattgtactctactggcaactatttagtgtattagtccattttcatgctgctgataaagaaatacctgagacagggcaatttacaaaagaaagaggttttaaggagtcaaatcttatatggatggtggcaggcaaagggagagcttgggcagggaacctcccatttttaaaaccatcagatctcatgagactcat

SEQ ID NO: 385531 - DNA, 551 bp, Homo sapiens
tccaccaaataccctaaatcagctctctcaagttcaaagttccacaaatctctaggacaggggcaaattgctgccactctctttgctaaaacacaagaatcacctttgctccagttcccaagaagttcgtcatctccatgtaagaccacatcaccatggaccttattgttcatattactatcagcatttttatcaaagccattcaatragtgtctaggaagctccaacaagtgtctagaacttcaacaagtgtctaggaagttcctgtcttcttctgagccctctaaactcttccaacctctgcctgttacccagttccaaagtcacttccatgtttttgggcaccttttcagcagcattgtactctactggcaactatttagtgtattagtccattttcatgctgctgataaagaaatacctgagacagggcaatttacaaaagaaagaggttttaaggagtcaaatcttatatggatggtggcaggcaaagggagagcttgggcagggaacctcccatttttaaaaccatcagatctcatgagactcat

SEQ ID NO: 385532 - DNA, 574 bp, Homo sapiens
gcaagctgttacataaccacgctgttctttgatttcctcatctgtaaaatggggaataatagaacgtggcctggttctctcaattgatatttgttgaaaaaataaataaagaaaaaagaaacggaaaagtatttattttaaagtagtttaaacataggtaggtgatgattaggcttcagaaaaaaaggcttttatgttatagaactgctccaatttcctagacataaaactagaggaatctaaaagtgttgagtcatatcactcactggctgacacgcataatagagatattatctatttcaagcatatatgaacaacatagttgtatggattatttatttgttcatttatttatccacttagaaaacttgattcctctttatatgctggacaatgtgcaaccattaaataaatataatccttgttctagaagagttgacaatctaactgaaaagaaagagaaatggatactagaggatgaatgctgaaatagatgtctgaacaaagggttgctagaacaaaggatggagggattaaccctsatatctataagaagtacccatgaaacactaca

SEQ ID NO: 385533 - DNA, 435 bp, Homo sapiens
atatccctgatgaacatagacacaaaaaccctcaacaaaatactagcaaactgactatagsaacgcgccaaaaaattaattcacaatgaccaagtaggctttactcctgggatgcaaggttgattcagcatacacaagtcaataaatgtgattcaccatataaacagaataaaaacagaaaaccatatgatcatctcaatagatgcagataaagcctttgataaaatccagcatctcttcacgataaaatccctcaagagactagacatcaaaggaccttacctcaaaataataaaagccatctatgacaaacccacagccaacatcatactaaatgggcagaagctggaacaatttcccttgagaactggaacaagacaaggatgtccactctcaccactgctattcaatatagcactggaaatcctagccaga

SEQ ID NO: 385534 - DNA, 435 bp, Homo sapiens
atatccctgatgaacatagacacaaaaaccctcaacaaaatactagcaaactgactatagcaacgcgccaaaaaattaattcacaatgaccaagtaggctttactcctgggatgcaaggttgattcagcatacacaagtcaataartgtgattcaccatataaacagaataaaaacagaaaaccatatgatcatctcaatagatgcagataaagcctttgataaaatccagcatctcttcacgataaaatccctcaagagactagacatcaaaggaccttacctcaaaataataaaagccatctatgacaaacccacagccaacatcatactaaatgggcagaagctggaacaatttcccttgagaactggaacaagacaaggatgtccactctcaccactgctattcaatatagcactggaaatcctagccaga

SEQ ID NO: 385535 - DNA, 435 bp, Homo sapiens
atatccctgatgaacatagacacaaaaaccctcaacaaaatactagcaaactgactatagcaacgcgccaaaaaattaattcacaatgaccaagtaggctttactcctgggatgcaaggttgattcagcatacacaagtcaataaatgtgattcaccatataaacagaataaaaacagaaaaccatatgatcatctcaatagatgcagataaagcctttgataaaatccagcatctcttcacrataaaatccctcaagagactagacatcaaaggaccttacctcaaaataataaaagccatctatgacaaacccacagccaacatcatactaaatgggcagaagctggaacaatttcccttgagaactggaacaagacaaggatgtccactctcaccactgctattcaatatagcactggaaatcctagccaga

SEQ ID NO: 385536 - DNA, 571 bp, Homo sapiens
tacacaagtcaataaatgtgattcaccatataaacagaataaaaacagaaaaccatatgatcatctcaatagatgcagataaagcctttgataaaatccagcatctcttcacgataaaatccctcaagagactagacatcaaaggaccttacctcaaaataataaaagccatctatgacaaacccacagccaacatcatactaaatgggcagaagctggaacaatttcccttgagaactggaacaagacaaggatgtccactctcaccactgctattcaatatagcactggaaatcctagccagagcaatcaggcaagagaaagaaataaaaggcatccaaataggggggaaaaaagtcaaactgtcttctctggtgttataattttagacctasaatacctaaagactctgtcaaaaggctcctggcactgataaataacttcagtaaagtttcaggatacgaaatcaatgggcaaaaatcagtaatatttctatacaccaataacattctagctgagagccaaatcaagaacataattccatttataacagcaacaaaaactgaaatac

SEQ ID NO: 385537 - DNA, 561 bp, Homo sapiens
taggaggaatgaacaaccaggaaataatccacgtgtagagtcaaagccaaataacatttgtccaacatcacacgaccttcgtgaattcgtccatgtatccattcaatacacattacattgttttctgtgggtttttactaggccctgcaggttcatagatgaataaggcattatttttatcctttaggaccttaagggcaagcaattrtaagtaggtacacagaggagggcattgtagctactgaaaaataccactgagatctgaattgatagctagtcttcactgttcgctagctaattaagttaaattttttaacatctcagtcttggattttttttctagaatgggaataatagtatcttgattgttgatatgacaattaaagtaggcagaatatgtaaagtggttattagagtatggcataaaattagcacttacagtcattattatgacaacagaataaaagataaattcaagctgaatggtttattatgagtgtcatagaagcaattgggaactaataataaactaaaaattcggggtcaaatgtgctataatga

SEQ ID NO: 385538 - DNA, 561 bp, Homo sapiens
taggaggaatgaacaaccaggaaataatccacgtgtagagtcaaagccaaataacatttgtccaacatcacacgaccttcgtgaattcgtccatgtatccattcaatacacattacattgttttctgtgggtttttactaggccctgcaggttcatagatgaataaggcattatttttatcctttaggaccttaagggcaagcaattgtaagtaggtacacagaggagggcattgtagctactgaaaaataccactgagatctgaattgatagctagtcttcactgttcgctagctaattaagttaaattttttaacawctcagtcttggattttttttctagaatgggaataatagtatcttgattgttgatatgacaattaaagtaggcagaatatgtaaagtggttattagagtatggcataaaattagcacttacagtcattattatgacaacagaataaaagataaattcaagctgaatggtttattatgagtgtcatagaagcaattgggaactaataataaactaaaaattcggggtcaaatgtgctataatga

SEQ ID NO: 385539 - DNA, 558 bp, Homo sapiens
atggtttattatgagtgtcatagaagcaattgggaactaataataaactaaaaattcggggtcaaatgtgctataatgaacatgctgaatttggtgcctgagctatgagttctcatcctggctctgacacaaatgagctatgtgaccttgggaaaatgactactcctccgtgggcctcagtctctacctgtaaaataaaaggcttcaagggatattacattatgtgtggtgcacataatatgaactagaataaatctgctaagtgcacaaaaggtacttaattacttgaaattattttcataatttttagtaagtctgaagtagcttacgaaacagtatgagagctatgcaatcctaaatttgtaaacatacttttttgtatggggtaaaaggaaatgacatttagttaactccaaaattttaaccattgtcttctctgggtggtaggcttaagggcaatttttatttttttatatgtgcatctttattagtttccaaactcactataattagcataaatatttctgtaatgaatarcactcaaatattaatttttgt

SEQ ID NO: 385540 - DNA, 570 bp, Homo sapiens
gtgattcttgtttctttcccttttttctcctcagwtggctggatagagagggccaagaagagaactccaatgcagaaggaggttaggcttcccaaaaattgcacaggagaccccttgacacatatccaatagaacataagcaagaagtacatcttttattgtgttttagccactaagattgggagttatttgttatagcagttggcttttattgaacaatatagttatgaagctagttctacaactaactacatgaccttggccaaatcctttaatttttctgggctttctcacctgtatgaaattttcctggcaatcttgtggtcataagcacgtaggtgtcttccaggaaacagtgtgcttgcccacagtagctcacttacccattgcctttctcattgttcctccaatgtgccggacttgatacccctctgggctttcgcacttgctgttactttttcttgtgaaacttttctctcaggtcttatgggtcacctctttctattatttagggccaatcattgacatcacatcttcaaaaaagccttccctggtgactcagttaaatca

SEQ ID NO: 385541 - DNA, 570 bp, Homo sapiens
gtgattcttgtttctttcccttttttctcctcagatggctggatagagagggccaagaagagaactccaatgcagaaggaggttaggcttcccaaaaattgcacaggagaccccttgacacatatccaatagaacataagcaagaagtacatcttttattgtgttttagccactaagattgggagttatttgttatagcagttggcttttattgaacaatatagttatgaagctagttctacaactaactacatgaccttggccaaatcctttaatttttctgggctttctcacctgtatgaaattttcctggcaatcttgtggtcataagcacgtaggtgtcttccaggaaacagtgtgcttgcccacagtagctcacttacccattgcctttctcattgttcctccaatgtgccggacttgatacccctctgggctttygcacttgctgttactttttcttgtgaaacttttctctcaggtcttatgggtcacctctttctattatttagggccaatcattgacatcacatcttcaaaaaagccttccctggtgactcagttaaatca

SEQ ID NO: 385542 - DNA, 570 bp, Homo sapiens
gtgattcttgtttctttcccttttttctcctcagatggctggatagagagggccaagaagagaactccaatgcagaaggaggttaggcttcccaaaaattgcacaggagaccccttgacacatatccaatagaacataagcaagaagtacatcttttattgtgttttagccactaagattgggagttatttgttatagcagttggcttttattgaacaatatagttatgaagctagttctacaactaactacatgaccttggccaaatcctttaatttttctgggctttctcacctgtatgaaattttcctggcaatcttgtggtcataagcacgtaggtgtcttccaggaaacagtgtgcttgcccacagtagctcacttacccattgcctttctcattgttcctccaatgtgccggacttgatacccctctgggctttcgcacttgctgttactttttcttgygaaacttttctctcaggtcttatgggtcacctctttctattatttagggccaatcattgacatcacatcttcaaaaaagccttccctggtgactcagttaaatca

SEQ ID NO: 385543 - DNA, 564 bp, Homo sapiens
tatttcattctacaaacattgactaggcacttgctatgagccaggtacagtcctaggcattggggatgtggtgggaaaggaaagaaatacagccctggtccccatggaatttaccttctactggggagagatagaaaataattttacaaatgtaatataatattaatgaatgattagggctacaaagaaaaatcaatgagggtaaaataatggagaaagatggaagagagtayatctcggagtaaggaggttagcaaagaccttgttgagcagagaatatggtgggaatagccatgcagatatctcggtaagattattctaggccgaggcaaaagcaagacacgtatacccactgatataagtgactggaaatttgaaaatctcactctatggagtacatgggaatcacaatgatagttagctctttaaaatttgcagagaactttgacagccaatatcccatttgattctcatattattattgtgaggtagagaggcagaggaggtaataatttaacacccagcttacataggaggaaacggagacacagaaggtttaaatga

SEQ ID NO: 385544 - DNA, 564 bp, Homo sapiens
tatttcattctacaaacattgactaggcacttgctatgagccaggtacagtcctaggcattggggatgtggtgggaaaggaaagaaatacagccctggtccccatggaatttaccttctactggggagagatagaaaataattttacaaatgtaatataatattaatgaatgattagggctacaaagaaaaatcaatgagggtaaaataatggagaaagatggaagagagtatatctcrgagtaaggaggttagcaaagaccttgttgagcagagaatatggtgggaatagccatgcagatatctcggtaagattattctaggccgaggcaaaagcaagacacgtatacccactgatataagtgactggaaatttgaaaatctcactctatggagtacatgggaatcacaatgatagttagctctttaaaatttgcagagaactttgacagccaatatcccatttgattctcatattattattgtgaggtagagaggcagaggaggtaataatttaacacccagcttacataggaggaaacggagacacagaaggtttaaatga

SEQ ID NO: 385545 - DNA, 564 bp, Homo sapiens
tatttcattctacaaacattgactaggcacttgctatgagccaggtacagtcctaggcattggggatgtggtgggaaaggaaagaaatacagccctggtccccatggaatttaccttctactggggagagatagaaaataattttacaaatgtaatataatattaatgaatgattagggctacaaagaaaaatcaatgagggtaaaataatggagaaagatggaagagagtatatctcggagtaaggaggttagcaaagaccttgttgagcagagaatatggtgggaatagccatgcagatatctcggtaagattattctaggccgaggcaaaagmaagacacgtatacccactgatataagtgactggaaatttgaaaatctcactctatggagtacatgggaatcacaatgatagttagctctttaaaatttgcagagaactttgacagccaatatcccatttgattctcatattattattgtgaggtagagaggcagaggaggtaataatttaacacccagcttacataggaggaaacggagacacagaaggtttaaatga

SEQ ID NO: 385546 - DNA, 564 bp, Homo sapiens
tatttcattctacaaacattgactaggcacttgctatgagccaggtacagtcctaggcattggggatgtggtgggaaaggaaagaaatacagccctggtccccatggaatttaccttctactggggagagatagaaaataattttacaaatgtaatataatattaatgaatgattagggctacaaagaaaaatcaatgagggtaaaataatggagaaagatggaagagagtatatctcggagtaaggaggttagcaaagaccttgttgagcagagaatatggtgggaatagccatgcagatatctcggtaagattattctaggccgaggcaaaagcaagacacgtatacccactgatataagtgactggaaatttgaaaatctcactctatggagtacatgggaatcacaatgatagttagctctttaaaatttgcagagaactttgacagccaatatcccatttgattctcatattattattrtgaggtagagaggcagaggaggtaataatttaacacccagcttacataggaggaaacggagacacagaaggtttaaatga

SEQ ID NO: 385547 - DNA, 618 bp, Homo sapiens
actgattgcaggccttgtcttcctttgcataaaagcgtaactttgtaacttcattttagtctctgaatggttgctttccacaaccaatcagacgtttgcaaatggtgtaacctttgtaacttcacttcactgattgygggccactacttcatttgcatgggttgtacaccaagtgaccaatggaaaacctctagaggatatttaaaccccagaaaattctgtagctgggctcttgagtccctgtgcttggcctgctccaaccctgtggagtgtacttttgtttgcaataaatctctctttttattgctgattctttcttggctttgtttgtccattttgtccaattctttgttcagaatgccaagaacctggacactctccgacggtaacatggagacactgagagaaggtggccatctgtaagccaaggagagagaccttagaagaaaccaaacctgccaataccttgatcttggacctccagcctccagtcatgagaaaataaataaaataaatttctattgtttaaccacccagcccgtggtattttgttatggtagccccagccgactaacacagttgcttaagagagctgggtgtgatctggatccctgctaa

SEQ ID NO: 385548 - DNA, 538 bp, Homo sapiens
ctttcgacaccaaacagaactcagttcatgtacttgagttatcgtgtgctctccaaagtcatacaatcgcatttcttaaactcctcccccgcctcygacttcctcctgattcagactgacctttaccatacatcactgtaaagaaatccccttggggtgagttatcatggcaagatgctcgtcaactgaaaggcgaggtcagtgcctctttgtaaggtctgctcacactctgaaaagggctgctggaggcctgacaaggaggctcgcccagcccgttccaccccactgacttccaggcaagatcgccccagcacacagctaagtgtgttgtttttaccttctctctacctgagatcctgacaccagcccctggtttctgcaataggacatggcttggactcacccagttcacgtagcagtaattgggtcagtcctatagttatcaacttatttataatttcaaaaaaggctgcatgtctggcaaaggattccccatttgctagggtagaaaaaaagggggcagcttaagctctggggt

SEQ ID NO: 385549 - DNA, 663 bp, Homo sapiens
cttaagttcctgttattcattattcacatgtgtttgtatacgttctgcctggaattgaattctctaatgctttatttcccaagtcttaatttctgaatctcttgtggtgatgtaatcgtgttattcrttatttctttagtttctttggtttcttttaggaaatgcatgtctgcttctaacatttgtcccccatcttctgagaattccaaggcaaaaaaatatttttttaaataattaaataattacattattttttttagctacatctacctctttttaaattaccctccaattcttcatcatccaactatcgccttcaatgacccctatgttccttacacacttgaaattttccccattatttatcttaaccttcagtgcaatctctttttcattcactacctttgccttccttatctttttttacactccctggactttgttcagtaatcttccctggctgcctctgtactcgatgcttaatgcctcacatatgtctctttcttacctttgattacttttttttcacttgttcatccacattgtggagtctcttattgctaggagtgcatgcaagatgacccctgggtttatgttaatttatagttgaatacttttcatttccaactatgttcatcatttcttccctctcttcagcccaca

SEQ ID NO: 385550 - DNA, 663 bp, Homo sapiens
cttaagttcctgttattcattattcacatgtgtttgtatacgttctgcctggaattgaattctctaatgctttatttcccaagtcttaatttctgaatctcttgtggtgatgtaatcgtgttattcgttatttctttagtttctttggtttcttttaggaaatgcatgtctgcttctaacatttgtcccccatcttctgagaattccaaggcaaaaaaatatttttttaaataattaaataattacattattttttttagctacatctacctctttttaaattaccctccaattcttcaycatccaactatcgccttcaatgacccctatgttccttacacacttgaaattttccccattatttatcttaaccttcagtgcaatctctttttcattcactacctttgccttccttatctttttttacactccctggactttgttcagtaatcttccctggctgcctctgtactcgatgcttaatgcctcacatatgtctctttcttacctttgattacttttttttcacttgttcatccacattgtggagtctcttattgctaggagtgcatgcaagatgacccctgggtttatgttaatttatagttgaatacttttcatttccaactatgttcatcatttcttccctctcttcagcccaca

SEQ ID NO: 385551 - DNA, 663 bp, Homo sapiens
cttaagttcctgttattcattattcacatgtgtttgtatacgttctgcctggaattgaattctctaatgctttatttcccaagtcttaatttctgaatctcttgtggtgatgtaatcgtgttattcgttatttctttagtttctttggtttcttttaggaaatgcatgtctgcttctaacatttgtcccccatcttctgagaattccaaggcaaaaaaatatttttttaaataattaaataattacattattttttttagctacatctacctctttttaaattaccctccaattcttcatcatccaactatcgccttcaatgacccctatgttccttacacacttgaaattttccccattatttatcttaaccttcagtgcaatctctttttcattcactacctttgccttccttatctttttttacactccctgkactttgttcagtaatcttccctggctgcctctgtactcgatgcttaatgcctcacatatgtctctttcttacctttgattacttttttttcacttgttcatccacattgtggagtctcttattgctaggagtgcatgcaagatgacccctgggtttatgttaatttatagttgaatacttttcatttccaactatgttcatcatttcttccctctcttcagcccaca

SEQ ID NO: 385552 - DNA, 586 bp, Homo sapiens
acattcctggagcatggatgttcttgagattatgcttttggattacttgaatagaaacaataaatactttcagtacttaaagctgtaatgctttaggttggatttggatttttgtttcattttagtraaaggtggagattcaaagtcgcctccttaaccagaaggatatattggatatgaatatagtttattgctttctgacctacatttcccctttttttatcatttgaaaagttacttgacaagttgaacgcctgcagctcagcatttccaaacatctgccttgaaggaagcactttgcttcagattttcacataatgatcaaaagtgggtttaactttctcaggttaaatgggaacaagggggatggtctgacagggatagaaatatatttgagagcaacataaaagagaaaaaaaatacttggagctgtcagaagcttaaccctggagtcagcttgggcacatgaagacagccttcagctgagagataagtaatctgccatctggcgttggttctagcacagtttgcccatctgtacaatgggggctgtagggtctatacactttgaaagaatgtaaaatca

SEQ ID NO: 385553 - DNA, 547 bp, Homo sapiens
agagggaaaatgggagggagtataaattcttctaatttttgcaaatttttatayataggcatacctcaaagacattgcaagcttggttccagaccacaacaataaagtgactatcataataaagtgaagcatgcacattttttggcttcccagtacatataaaagttatgtttacactatactgtagtctattaagtatgacttaataggaataaggcattgtgtttttaaaaaatgtacataccttaattaaaaatactttattgctaaaaaatgttaacaatcatctgaaccttcagcaggtggtaatctttttgctggtggaaggtcttgccttgacgttgatggttgttgactaatcagggtggtgactgctgaaggttagggtggctgtagcaatttcttaaaatagtacagtgaagtttaccacatctattgactctgtctttcacaaaaggtttctctgtggcatgtgatgctgtttgatagcattttacccacagtagaacttctgtcaaattggagtcaatcctctcaaaccctgttg

SEQ ID NO: 385554 - DNA, 547 bp, Homo sapiens
agagggaaaatgggagggagtataaattcttctaatttttgcaaatttttatatataggcatacctcaaagacattgcaagcttggttccagaccacaacaataaagtgactatcataataaagtgaagcatgcacattttttggcttcccagtacatataaaagttatgtttacactatactgtagtctattaagtatgacttaataggaataaggcattgtgtttttaaaaaatgtacataccttaattaaaaatactttattgctaaaaaatgttaacaatcatctgaaccttcagcaggtggtaatctttttgctggtggaaggtcttgccttgacgttgatggttgttgactaatcagggtggtgactgctgaaggttagggtggctgtagcaatttcttaaaatagtacagtgaagtttascacatctattgactctgtctttcacaaaaggtttctctgtggcatgtgatgctgtttgatagcattttacccacagtagaacttctgtcaaattggagtcaatcctctcaaaccctgttg

SEQ ID NO: 385555 - DNA, 514 bp, Homo sapiens
tggagtcaatcctctcaaaccctgttgctgctgtattgcctataataagtttgtggaatattataaatcctctgtcatcattttaacaatgttcatagcatcttcaccaagagtagattccatctcaagaaaccacgttctttactcatccataggaagcaatttttcacctgttcaagttttaccacaagattgcagcaattcagtcccatcttcagggtctacttctaattctagttctcttgctatttctactacatctgcrttgactttgtccactgaagtcttgagtccctcaaaatcatctatgagcattggaatctacttcttccaaactcctgttgatatggatattttgacctcttgccatgaatcacaaatgtccttaatggcatctaacatggtgaatcctttccagaaggttttcaatttactttgcccagatccatcagaggaatcactatttatgacagctaaagccttacaaaatatgttttttaaataataagacttg

SEQ ID NO: 385556 - DNA, 635 bp, Homo sapiens
gcattttcatccagggcaacaggtaggcagaccatacaaggagaagatgtagaagcaagaaataaaaggagaatttccaaaaggagagggtggggtgaattagttaaggctctgttttttgatgcaagtgacagaaatgcaactcaaaccrgcattcgggaactggctcaaactggcttcaggcaatgcagaatccaatgaattgagcaacatcttcgggattcagctcccttgcatcctctttgctttactctttgtcaacttcattcgcagaaaggcatctccatgtggtggcccagaaacttcatgcctacatcctgcaggtttaaaaattgcaacagaaagagtctctttccagacaactccagcaaaaggacctgcaattgcacttcattgtgctggctggtcacgtgttcttctctgagccaatcagtatggccagggggccctggactgctctgattggctagctctgattatgttttcactcacaaagccaagcgatgaggtcagtccaccaaaatcacatgacctgagggcatggggacagttcctcaagggaaaattggagtagtgtaacctaacagggatggacatgctggacaggtgcaggcaaaaacaactacaggggttga

SEQ ID NO: 385557 - DNA, 542 bp, Homo sapiens
tctacccagagtccacaccccacacccttagcrgggaagatgctgagtaagcgtgggtttatgaagattgatgaccactctcagattactctcagttggtgtggggccctgagcttcctcaattttcatttaattagcttccccctttcttcagctttgcccagggaaagatagctcttgttgtctctaagaaatgttttgccattccccacccttttggaagccaccctgtggaatgcggagaccttggttagaaaggaagtagttcttcctccgtctcggtctgagtcccctgtaccctcccacttccttctccccaagctcaattcaaggtcacctctagttgtcttggctttatcctacctgggacaatcctcaggctcccagatgtcataaataatacttatatcacctcttttattgtataagcacaactgaacttcttcctcagtctccaccctccttgaactatctctgattctctgatctttcagttcccacagctgggaacagtccaggaagtacttctgaacatggccgga

SEQ ID NO: 385558 - DNA, 542 bp, Homo sapiens
tctacccagagtccacaccccacacccttagcggggaagatgctgagtaagcgtgggtttatgaagattgatgaccactctcagattactctcagttggtgtggggccctgagcttcctcaattttcatttaattagcttccccctttcttcagctttgcccagggaaagatagctcttgttgtctctaagaaatgttttgccattccccacccttttggaagccaccctgtggaatgcggagaccttggttagaaaggaagtagttcttcctccgtctcggtctgagtcccctgtaccctcccacttccttctccccaagctcaattcaaggtcacctctagttgtcttggctttatcctacctgggacartcctcaggctcccagatgtcataaataatacttatatcacctcttttattgtataagcacaactgaacttcttcctcagtctccaccctccttgaactatctctgattctctgatctttcagttcccacagctgggaacagtccaggaagtacttctgaacatggccgga

SEQ ID NO: 385559 - DNA, 628 bp, Homo sapiens
tccctccaaactgcatcatttcattyggtagttaccaggcatatggctgcttgtctggtggactctccctgtaatatcatcaccaagtttactgactggccaatcaaagggagttcctgccttactttcctagagggaggagtaggatgggctgattacctcattctcctttgaagaggttgctgtctaccttggtgtttttagaccttgggctttacagtcaagcagatataaattctgattgtgactctatttgttgccagctgccttacattgcataaatttcttaatctcagcaagcctcagttttctcagctgggaaatggggataagaatacagtatctatcacatagttttgttggggaaggttaaataaaataatgcaattgaaacacttgcacagtggcttgcacaaagtgggcactcaaaaatgtcagccactgaaggagctataaaagggctttctgcttttgtgaaagtccaaggtactcctggctgttgtcttctttattaccctgctaacttctccttgattgttttatttttccctccatctcttggagggcatcatcagaacagcaagagagagtgtgagagaagtccctcatccctccaggaaggggcccc

SEQ ID NO: 385560 - DNA, 640 bp, Homo sapiens
aatcaccactggactgtaagttccttgagggcagggctatgcctttttcattttcatatcaacagcaggacccaagcctctgaatctagtgccctattcattttgccatgctgctagctggccagcctcacatggcttcctcaagcctgtagcaaacaycaggaaaaaaagatttggaatcagcgcagaatttcttaaaccttcttcccaaccttctgattctgagcctataaattttgggttttctcttatctctgccataattagctcatcttgggaaaatgaataaatctttctagtttgcatcggttttctcataagttaaataaacataaacaaacttccccaagtatttttcatagggatgttataaatattagccagacgtttaataagcatctgttaacacctattatgtaaaacccagtgtaaaattttatccaaaggaaagaaagatgaaaaagacatagtcactgctcccaagtaatttatcatcaaatagataggaaactatatatatacccaaattaaatagtaaaatatagaatgtactaagaatcataagagaagtacaaattatgagctgtagaagtgtgaagaagggaattatataaatattgtttacatcttttgttatatt

SEQ ID NO: 385561 - DNA, 627 bp, Homo sapiens
ccacatttgagaaactcctatttaaataaactgaatagacttttatattatagaatttcttggattctttgatatagtgatgtgttttagaaattttgaagagaaaataagcatttcccaaacttgctagactataaawttttatatttttccaaagcatttcatggagcttatgttgcacaaaatattttagaaaatgctgaatttaaaaaaaaattaaaacttaccagttaaatctcatgtacgtttgcatatttaaaagcattcaaatcttgagaggggcatttggagacaatggaccctccctgcctgtatcttactgattcataggaggaaagaggaaaagggctcacagggagaatgaatggctgatttctaaatctcaaatgtctttcctggctttattatatttttccctcttacaaatgccaataatgatgaaaacagatgatggactaatctgatccaattgcattactgggatccaggctggttttgaacaatttgagaaaaacacacactgcccagactttacctcttcaggaaagatgtctttgtttttaaagctctctgtgaattttcagacagctaagatatgaaccatgaatgtcaactagaattctctgg

SEQ ID NO: 385562 - DNA, 627 bp, Homo sapiens
ccacatttgagaaactcctatttaaataaactgaatagacttttatattatagaatttcttggattctttgatatagtgatgtgttttagaaattttgaagagaaaataagcatttcccaaacttgctagactataaattyttatatttttccaaagcatttcatggagcttatgttgcacaaaatattttagaaaatgctgaatttaaaaaaaaattaaaacttaccagttaaatctcatgtacgtttgcatatttaaaagcattcaaatcttgagaggggcatttggagacaatggaccctccctgcctgtatcttactgattcataggaggaaagaggaaaagggctcacagggagaatgaatggctgatttctaaatctcaaatgtctttcctggctttattatatttttccctcttacaaatgccaataatgatgaaaacagatgatggactaatctgatccaattgcattactgggatccaggctggttttgaacaatttgagaaaaacacacactgcccagactttacctcttcaggaaagatgtctttgtttttaaagctctctgtgaattttcagacagctaagatatgaaccatgaatgtcaactagaattctctgg

SEQ ID NO: 385563 - DNA, 627 bp, Homo sapiens
ccacatttgagaaactcctatttaaataaactgaatagacttttatattatagaatttcttggattctttgatatagtgatgtgttttagaaattttgaagagaaaataagcatttcccaaacttgctagactataaatttttatatttttccaaagcatttcatggagcttatgttgcacaaaatattttagaaaatgctgaatttaaaaaaaaattaaaacttaccagttaaatctcatgtacgtttgcatatttaaaagcattcaaatcttgagaggggcatttggagacaatggaccctccctgcctgtatcttactgattcataggaggaaagaggaaaagggctcacagggagaatgaatggctgatttctaaatctcaaatgtctttcctggctttattatatttttccctcttacaaatgccaataatgatgaaaacagatgatggactaatctgatccaattgcattactgggatccaggctggttttgaacaatttgagaaaaacacacactgcccagactttacctcttcaggaaagatgtctttgtttttaaagctctctgtgaattttcagacagctaagatmtgaaccatgaatgtcaactagaattctctgg

SEQ ID NO: 385564 - DNA, 538 bp, Homo sapiens
gcttaactaagtagggaactagacaaatgtatagtttgagagccattaacctaaaagtaatttttttacgtttttttttttttttgagacggagtctctccctgtcgcccagactggagtgcagtggcatgatctcagcttactacaacctctgcctcccaggttcaagcaattctgccttakcctcccaagtagctgggattacaggcacccgccaccatgcccggctaatttttgtatttttagtagagacaggatttcaccatgttggccaggctggtctcaaactcctgacctcaggtgatccacctgccttggcctcccaaagttctgggattataggtgtgggccactgagcctggccttaagggtaatttttgcttttgttttcccatctcagtgacgaagctgcctctgggagttctttgtactgaccaggtcagcccaaaaaacaggaaccaaacgacgagagtcccttcatttctatcaaactttcacttccttcccctcttagcacctgacttgattcccaggagac

SEQ ID NO: 385565 - DNA, 524 bp, Homo sapiens
aaataatatttacattttattaacatttcttagttcgttttttttaaacatctcttgaacatgaagaggcaaaaagaggaagtaaatgatacgtccaggaagctctggagcatggaaggggaccatgtgaccaagctgcaggcatggaaggatgtggtctctgtccctgaggacctactgccagtgatccccattggccaagccaaaccagaagcgggggcagtggcatggtggcaagggtgcccaggtgtcatacagtacgtggaaggtggtatcccggtcragagcaggatgatgaattaatgttggtgatagggaggagagggttggcaagaggagagtattagctagaccagatatttgtgcctactttacgtgatatactctgatattttctattctatcctatttcattatcttccatttctttacctttcttcccactcagtcattccccctttcctttctgcctgctcttcctgccttcctctttccccacacttttagtaaaaaggtggcatgag

SEQ ID NO: 385566 - DNA, 568 bp, Homo sapiens
atatgatcctcagggtggatcaaagtcgtggtgaggagggagcatggggctcaaagtcacatgaaatcaccagctttcttccactatattgaacagtgtatgtggtsagagactaccaaggagctgattcttggacctgagccaaatccagtcaattaagagaggtctgggagtgtttaaggactagtaacaacatctatcattagaattgacgcactcaacagaggatcgcctggaggctcttcacaaatttttcttgacattggaaaaactggcttaaggggatttgtacaacgttccaaaggttcttgattggaattctaacacatatcttgcagctagaaagaaggaagcaactcaaatacattcaaataaattcattcatgtgctgtccagcacagcgataaaaatcaaaatgccaggagaactcattataggtagaggatttagagatagatagggttcctacagatggtgacccaaagaataaaaaatgtcaggagaacttgttttaggtacagagaatttagagataggttcttagagatggtgacccatagcccatagt

SEQ ID NO: 385567 - DNA, 453 bp, Homo sapiens
cggagtttcactatgttggccaggctggtctcaaactcctgacctcaggtgatccacccgtcttggcctcccaaagtgttgagattacaggtgtgagccactgcgcccagccttttgtagctttcttaactctgctttgtttaaagccacaaatgtgtgctcttttccctccctatcctggtcacttgtctcgccaatacaaacctgagatcacaaggggctctatgagtaagaccgtggctggctggcagcaaacaagggccatggtggagaaacactccaaggcattcacccgacagcctaggagatgggcacacagttatcctcatgaacaaaagcctgacagtttgagccaggtatagyggctcgtgcttgtaattctagtgctttgggacatgaaggtgggaagatcacttgaggccaggagttttcaagaccagcctgggtaacaca

SEQ ID NO: 385568 - DNA, 408 bp, Homo sapiens
acagggctggcttacgtttgcacagaaaatttaatggcagtcagaagtataacttaggtttccttattccccagaacatgagggttttttttttttttttttttttttttaccagtggacgatgctgagacacagggcagggtaagcacattttaaaacagagggcaaaggtcagcacagagcatggggagatcagtaaatatgtccaaagtgcttagtgagaggtaaaagtttaaaagacgacagttaggttttcacaatagtgaacggacaattcaatgccagaggtcctggaacctgcagtgttttctcattgacctactatttccctaggagccaragtcagcatgacggtagacttttccagaagtaagcaggttacctcttatctcttctgtcatccacatc

SEQ ID NO: 385569 - DNA, 554 bp, Homo sapiens
gatgctaatatgtagccatttgagaagctgaagagaactgggctggtaattggcagatctgggttcaactctagtctatctgaccatttataaatggatctcccgagctgaactctcttccacacttgtaaaatgatgatactagactagacctcttgtggactagatcttttcagctgtcacattctaagttttgatggtctggtaccagttcaggtgaggagtgagagttgaatggggaataacaagagaccttgttcctttaaaagggccagatgctcttagggatggagaaggcaagagagaaagaacatgaactagatgctaattggaaaggataaggggcatgtcgagttgtcattttcattctctgggacctggtctgyaagtgctggaactgcatcgtatggatcacaggaaggatcctgggcatgccaatttctgtcctctctcctatctatctatctgtcagcatgctgctcctcagcagagggcctctgtttgttttcttaagatgattaagtcctaagtctccctcagcagagcctatgatt

SEQ ID NO: 385570 - DNA, 522 bp, Homo sapiens
aatgagagaaaatatttgcaaacaatgcaaccaacaaaggtytaatacccagaatctataaggaacttaaacaattcagcaagcaaaaaacaggaaaccccattaaaaaatgggcaaaggacacgaacagacacttctcaaaagaagacatacaagtggctaacaaacatgaaaagatgcctcacatcacaaatcatcagagaaatgaaaatcagaaccacaatgagataccatcttataccagtctgaatggctattattaaaaagttaaaaaaaagataaagcagatgctggcaagccttcagagaaaaagggaatgcttatgcactgttggtgggaatgtaaattagttcagcccctggggaaaacagtctggagaagtaaaatataactaccattcaacccagcaatcccattactgggtttatatccaaaagaaaataaactgttctaccaaaaagacacaggcatttgtatgttcatcacagcactatttacaatagcgaagtcatggaatcaacc

SEQ ID NO: 385571 - DNA, 522 bp, Homo sapiens
aatgagagaaaatatttgcaaacaatgcaaccaacaaaggtctaatacccagaatctataaggaacttaaacaattcagcaagcaaaaaacaggaaaccccattaaaaaatgggcaaaggacacgaacagacacttctcaaaagaagacatacaagtggctaacaaacatgaaaagatgcctcacatcacaaatcatcagagaaatgaaaatcagaaccacaatgagataccatcttataccagtctgaatggctattattaaaaagtwaaaaaaaagataaagcagatgctggcaagccttcagagaaaaagggaatgcttatgcactgttggtgggaatgtaaattagttcagcccctggggaaaacagtctggagaagtaaaatataactaccattcaacccagcaatcccattactgggtttatatccaaaagaaaataaactgttctaccaaaaagacacaggcatttgtatgttcatcacagcactatttacaatagcgaagtcatggaatcaacc

SEQ ID NO: 385572 - DNA, 630 bp, Homo sapiens
tagtagcttcaggtctatgacatattcttagcgtggagcctcaaaagccctcccatgtagaactctatctcttttcccagagtttggggtaggaaagatagtgaagatgggacagattttgataatttttcttataaggtacaactggaggcacttgggtggagggagatgtttctcaggtttctggcctgatgggaacctgagatggatggaaatgccagcaactgagattggaaatggtgaagaaaacgtacaggratgagatgacgagtttagtattggatatgctgaatggtccatccaggtaaaaacatctagcccactgttggttatgcaagtgtgaagctcaggggaaagctctggaccgaaaataatgatttgaaaattattagtttatatgtgggagttgaaacactcagagtggataaggctagatgataaaagagtgtagagtaaaactctagaatgatgaattttatgagtgcatagaagaggtccccacagaggagataaaggggtaataagagacatagcaggaaggccaaaggtgcatggaatcacagaggctaagataatctaacatctgaagtagaatggcattttcactgtctcactttcagcaaacaggtc

SEQ ID NO: 385573 - DNA, 630 bp, Homo sapiens
tagtagcttcaggtctatgacatattcttagcgtggagcctcaaaagccctcccatgtagaactctatctcttttcccagagtttggggtaggaaagatagtgaagatgggacagattttgataatttttcttataaggtacaactggaggcacttgggtggagggagatgtttctcaggtttctggcctgatgggaacctgagatggatggaaatgccagcaactgagattggaaatggtgaagaaaacgtacagggatgagatgacgagtttagtattggatatgctgaatggtccatccaggtaaaaacatctagcccactgttggttatgcaagtgtgaagctcaggggaaagctctggacygaaaataatgatttgaaaattattagtttatatgtgggagttgaaacactcagagtggataaggctagatgataaaagagtgtagagtaaaactctagaatgatgaattttatgagtgcatagaagaggtccccacagaggagataaaggggtaataagagacatagcaggaaggccaaaggtgcatggaatcacagaggctaagataatctaacatctgaagtagaatggcattttcactgtctcactttcagcaaacaggtc

SEQ ID NO: 385574 - DNA, 630 bp, Homo sapiens
tagtagcttcaggtctatgacatattcttagcgtggagcctcaaaagccctcccatgtagaactctatctcttttcccagagtttggggtaggaaagatagtgaagatgggacagattttgataatttttcttataaggtacaactggaggcacttgggtggagggagatgtttctcaggtttctggcctgatgggaacctgagatggatggaaatgccagcaactgagattggaaatggtgaagaaaacgtacagggatgagatgacgagtttagtattggatatgctgaatggtccatccaggtaaaaacatctagcccactgttggttatgcaagtgtgaagctcaggggaaagctctggaccgaaaataatgatttgaaaattattagtttatatgtgggagttgaaacactcagagtggataaggctagatgataaaagagtgtagagtaaaactctagaatgatgaattttatgagtgcatagaagaggtccccacagaggagataaaggggtaataagrgacatagcaggaaggccaaaggtgcatggaatcacagaggctaagataatctaacatctgaagtagaatggcattttcactgtctcactttcagcaaacaggtc

SEQ ID NO: 385575 - DNA, 539 bp, Homo sapiens
ctgttgctcacctgtggagctgctcttccccctactgctcattcttccagcaaaacaggcccctaggcaggctgcctgggacagtcaacgaaaacaggctggccaaaagggctcccaagtgagcagtagcccagatcccacagactggcacagcctcctccctctggcttggggctgaggasagcatccactgttaagggcagatgagttgaaataacagaaaatgggaagcctctctcacctacaggaacagcacagggacctcctcgaaggatttgcacactcctgccctggagccttcaatgccccctgtaggatggagtgggtgcataatacctgcttcattttgcagatgacaaaactaaaacccataaaaagtttcctgagcaatttgggactgcagagccaggataataacacaacattagactcctttccctgtactccactgaccattccacaggatccctaggtgaggctggaagaccccagacaggcattccaggggagggccagactgggctgagaaaagtgtgaac

SEQ ID NO: 385576 - DNA, 539 bp, Homo sapiens
ctgttgctcacctgtggagctgctcttccccctactgctcattcttccagcaaaacaggcccctaggcaggctgcctgggacagtcaacgaaaacaggctggccaaaagggctcccaagtgagcagtagcccagatcccacagactggcacagcctcctccctctggcttggggctgaggacagcatccactgttaagggcagatgagttgaaataacagaaaatgggaagcctctctcacctacaggaacagcacagggacctcctcgaaggatttgcacactcctgccctggagccttcaatgccccctgtaggatggagtgggtgcataatacctgcttcattttgcagatgacaaaactaaaacccrtaaaaagtttcctgagcaatttgggactgcagagccaggataataacacaacattagactcctttccctgtactccactgaccattccacaggatccctaggtgaggctggaagaccccagacaggcattccaggggagggccagactgggctgagaaaagtgtgaac

SEQ ID NO: 385577 - DNA, 539 bp, Homo sapiens
ctgttgctcacctgtggagctgctcttccccctactgctcattcttccagcaaaacaggcccctaggcaggctgcctgggacagtcaacgaaaacaggctggccaaaagggctcccaagtgagcagtagcccagatcccacagactggcacagcctcctccctctggcttggggctgaggacagcatccactgttaagggcagatgagttgaaataacagaaaatgggaagcctctctcacctacaggaacagcacagggacctcctcgaaggatttgcacactcctgccctggagccttcaatgccccctgtaggatggagtgggtgcataatacctgcttcattttgcagatgacaaaactaaaacccataamaagtttcctgagcaatttgggactgcagagccaggataataacacaacattagactcctttccctgtactccactgaccattccacaggatccctaggtgaggctggaagaccccagacaggcattccaggggagggccagactgggctgagaaaagtgtgaac

SEQ ID NO: 385578 - DNA, 539 bp, Homo sapiens
ctgttgctcacctgtggagctgctcttccccctactgctcattcttccagcaaaacaggcccctaggcaggctgcctgggacagtcaacgaaaacaggctggccaaaagggctcccaagtgagcagtagcccagatcccacagactggcacagcctcctccctctggcttggggctgaggacagcatccactgttaagggcagatgagttgaaataacagaaaatgggaagcctctctcacctacaggaacagcacagggacctcctcgaaggatttgcacactcctgccctggagccttcaatgccccctgtaggatggagtgggtgcataatacctgcttcattttgcagatgacaaaactaaaacccataaaaagtttcckgagcaatttgggactgcagagccaggataataacacaacattagactcctttccctgtactccactgaccattccacaggatccctaggtgaggctggaagaccccagacaggcattccaggggagggccagactgggctgagaaaagtgtgaac

SEQ ID NO: 385579 - DNA, 543 bp, Homo sapiens
tccatgggctcagtgtggagtaaggactttctcctggcttatgaataaattgattatgtggagtaaggacttattcctggcttatgaataaattgattatcccaggaagrggaggagggactgtaacatttttatttttctaggggtgaaagcaaatattgaaaattctacaggctgtccagcctggtgaacattttcatagccaacactgcggagggtctggttcattctctggacaataattaagactgccatttacatgaggtatccaaacagattctcctgggagatccaaaacccagcatgttgtcagtaaacatgttagtcagaaggaaaaggagagacagttctgcttaagctggtgttcaacatcagtttgaaaggtgatatatctctcctcttggctagaacagacagcagaggattgtcatgatgttattagaaaaacagacattgctctagtattgcctgagatggcctttatagcccagcatcattatttggttttatctttcttataattctagaacacaaaatgaacta

SEQ ID NO: 385580 - DNA, 539 bp, Homo sapiens
ttcaccatcattgtgatctggtcattgatacaaatttttcctgctgtgtttagtgattactacatagatgaccatgttgggtaataattgaatttatcggtgtctgtgttgtaaaactgaatagctaatatagcttaatgaaggaagtaaacttatcaaaccattgtcrtattgtttttctcttctgtatatcattttcctctaaataaaagatttacaagaaagcctttttctttatgaagttaaagcaatttcaatattgaaagttttgatagattaagaataaccacatactttctttcccagtagaatatttttaaactgaagacttatctggaagtaacttcataatcataaatattatgtatatatgtacacacatatattagcagcatgactttaggtttttaaagtaatctatgcctcatatttgcaactgaaaaggtaaggatatcttaagaaagatgccatagatttttgaaaattgagttttataactccattgatttagtttgggttcatattgaagaaattagaag

SEQ ID NO: 385581 - DNA, 506 bp, Homo sapiens
ttttatgtcccatatagcacaagtgccaagctggaactgattacacttacactcatcagattctatcttgtagtagcaaaagttgccttatccgttatactgcaaattccttgaccaatggcgaagtcttccacacttttgtattctcatactgccagatataataatttacaaaaggcaggcactaaattaatttttgttgcattgattatactgaattgaatagatcactcatatcctttggaaaaggcaagagaaggatacttgaaaaccatgaatcaaagaaggcagcatgtacaatcagagtgtttcctataactgtgatagataaacttttagaaggatatcacaaagctggaaagactagagaagagcaataaaggaagagtatccatatactgattttkaaaaattaattagacttctcatatacagacaataaagaataacaatgatgtaattcaataaatctttctgtttaaggaactacagatgatacaaatttg

SEQ ID NO: 385582 - DNA, 532 bp, Homo sapiens
tcaagacagcctctacccaagacctacagagtctgtttttatatggcctgtgagccaggaatggtttttatatttttaatggkttaaaaagaaaaataaaaaaataacatttcaaatcacctgaatattgtataaaatataaatcttagtgtccataacattttataggaacatagacacactgattcatgtaagtactgtccatggctgcttttacactataacaaagttgaatggttgtgacagagaccatactgtccacaaagtctgaaatatttactacgtggctctttacaaaaaaagcttgctaacaccctacctagataatcagagctaaagattgcaatgcttttatttgcaggcttttgttctttattttctgaggtactttctttcccctttcttaatccagccccttaagtgagtaaaaacatattatttattaaccatgatggtttcaaaggtccttatccttaatattgctccctacattcttggccactctatggtgtgagtccaattactaatggaa

SEQ ID NO: 385583 - DNA, 400 bp, Homo sapiens
acatttcaaatcacctgaatattgtataaaatataaatcttagtgtccataacattttataggaacatagacacactgattcatgtaagtactgtccatggctgcttttacactataacaaagttgaatggttgtgacagagaccatactgtccacaaagtctgaaatatttactacgtggctctttacaaaaaaagcttgctaacaccctacctagataatcagagctaaagattgcaatgcttttatttgcaggcttttgttctttattttctgaggtactttctttcccctttcttaatccarccccttaagtgagtaaaaacatattatttattaaccatgatggtttcaaaggtccttatccttaatattgctccctacattcttggccactcta

SEQ ID NO: 385584 - DNA, 623 bp, Homo sapiens
tgtaacaaacctccccaaaacataatgacttaaaataacaatgatttaaatttcttttgttttatttagctcaggattcttaggattgctaatttgtactgggctcagctaggtggttcctctgttctctgctgggtttattaatgagtctgtgatcagctgtctgtctgaaaagtctgtttctagggattcgctgtccactgtggtacaaggacaactggaccacatacctctcatatagtaaggtagacttggtttgtttatatagtggctggactgggttccaagaggaagagcagaacattcaaggctttctgagacccaggttcagatatggagtaacactgctcctgtcacattctattcaacaaagcaaatcacaaaaccagcaaagattcaagggatggagaaatatactccatcttttgatgtaggaagacacaaaaggagcatttcaaagagtgttactatagagaggggagaaattgtggccatttaaacaatccactagacatctctatgactcagcaattgctctcttccatgtatatccctactctcatttttatctgtcaaaatcttacccatccttcaaygatccactaaaatatctcttcctccaa

SEQ ID NO: 385585 - DNA, 541 bp, Homo sapiens
ctgagcaaccattacaatatgtaactattttattacacaacacattttatatctggaatctytgtaacctcccaaagccagtggcatatattttagatttgtattatggtatcctttcacttccagcactgatttctgtattagttattgctgtataacaaaccacccaaaacttaatggcttacagcagtaatttattatttgtcatcattttgtggactggctgggttgtttgtctgctggttttatataggctgttttatacaagtttattcagttgttagatttgcttagttagggctgaactcagctggaaatgctggaacttatgggtctctttcttcacatggttttcaccccagacttcttcatagcatggtgatctctggggagtatttttaagagttcaaaggtagaaactgcaaggcctcttgaagcctacactgtagagctcatacagtgtcaattctgccacattctattaactaaagcatttcataaagctatcctagattcaaaggggtgaagaaattgattccaa

SEQ ID NO: 385586 - DNA, 514 bp, Homo sapiens
gctgccctccagcctgggtaacagagcaagatgctgtctcaaaaaaaaaaaaatgaatagaagcactgagggagggcttattgattgataggtttcactactgggtgatcaggtaacaaaacagatttttcattaggggttcacctccctaatgtcaatatgtagacatgttttctctcaggtgtttcattttccccagagaactctccattttcttgtcctgaagtttaagagaagasggtagggggttttatctggcagtatgccttctgatagaagatgatagtagaaagtaaggattccacagttcaatgagaagatttttacttaattttcattttcagccccatgcgtcatccctttcccttgctttatctggtgtactcctaactagaattgccatggatccatttttccagcacacaaacttctcatcttctgcagggaaggagacctggaaaggttcaagtactctatagatatattttcaacaagtctccctttttattcccaa

SEQ ID NO: 385587 - DNA, 508 bp, Homo sapiens
gctgtataacaaataatacccaacttaattatgtaaaacaatgatttattatttcttataatttcatagagcagttgattaaagaaacactgattagcttcctagcataggtacagcacaatgcaagtacttcaggatagagttcacaatctggttggagagacagacatggaaaccaacagtgtgataagcactagaacagaaacatgtacaaagtgcctataaaaatacaaatgacaaagcaattaattctgtccacaggaaggttttaaggtgagtgttttggaaaaagtggtatctatctaggccttaaatattctctgacaaaaaatatgaggaaaaaataacattttaaaaattatatgtttatatagtttatcatttacattaaatacatcaatttaccaatagaactgtctaccagatggtgcatcaaatgtagatgatttytttgccactcagctttgggagccagtgttgtcactttagccactgttgtatcccccag

SEQ ID NO: 385588 - DNA, 593 bp, Homo sapiens
aaatgattaccagattggaattttaacagccatgtcaacagtgaagatagaagatattttcagatatgcagtatccaaaacaatttaccttctatgcaccctttctcaggaagctccttaaggatttctttaaggaagagaaaggcrtgggatccaggaaacagcggatccttgtcttaatctgttcagatgactataacaaaatatcagaccaggtggcttataaataacagaaatttatttctcgcagttctggaagctggggagtcctagatcaaagtgctagcagattcagtgtctggtgaggtcctgcttcctgtgtcctcacatggtggaaggggtgaggaaactctctgaggcctttttattttatttttatttttttttcctggggtcttttcataagggtgctaatcccattcaagaggactctgccttcatgacctaatcacctcccaaaggccccaccaaatactaccacactggggattaggtttcaacgtatgaatttgggggagacacaaatatttattctatagcaatcttgcataggcaagaaagagaggaaaggaaccctagcacggtggaggaca

SEQ ID NO: 385589 - DNA, 573 bp, Homo sapiens
tgaactgtatatgtgtgaagagattgagagaattagatattatctccgtaaagatcattatgaaactataacataaaataagctactaaatgtactataaattcaaccaatctaaggcaacataccagagacctttggaacaggtacataaacactaatttgagccaccttataaataaaatgtagcaaaatcctttaaggattttataaaacacaacttttaactaaactaaactccaatttttttcaaatatgmaacaagaattgccaaaatagcttaataaagttgaatccaacacagctagaaatgtactgctcattgaacttaactgaaaataagttttagttttatatgaaattaatcagtgccagaaaatctcatacaggtttttcttgttactaacagaaaatttccatgggtcatcaggaaattaagaaagctgaatgacttcctgatgtgtttctctgtcatgtcaatattagcaaataaacgaattaggaaaatgacatcaataatttacaataaaaattttcacctaaatgtacattacaacaaaaacatttctgccttaa

SEQ ID NO: 385590 - DNA, 609 bp, Homo sapiens
ctggtttgtattagggcagctcttgtagatgagtaacttttcccatggcctcatagaggctgatatagaaacttctggattcaaatgattgtttggaggcattagccaggcattgaaccaattataaagagtgaggttttgccatattctaaccgtaagaaacagaaacggtagagggtaaaaatagaatagaatgtcaatacaactttagccttttccctggattctgagagttcataacctgaaaatcagagattcaaactgggagagatgggctaacaggtatgagcatgggaaaagcatgtttcaagaatttgagatgtatttcccagaaaagsaacatgatgaaaatggtcagaaaaggcaatttccttcctcttttctaatttggctctggagccaccagcagaacctcttcaatatcttgcatgttacagatttcactgctcccaccagcttggagacaacatgtggttcttgacaactctgctcctttggggtaagttggactcagaggggacagttagaagggtacaggctgtggctgttgtgagtcaagagttttgtcttcctgtggtaactctgggtagaactcatgagtatgaagca

SEQ ID NO: 385591 - DNA, 609 bp, Homo sapiens
ctggtttgtattagggcagctcttgtagatgagtaacttttcccatggcctcatagaggctgatatagaaacttctggattcaaatgattgtttggaggcattagccaggcattgaaccaattataaagagtgaggttttgccatattctaaccgtaagaaacagaaacggtagagggtaaaaatagaatagaatgtcaatacaactttagccttttccctggattctgagagttcataacctgaaaatcagagattcaaactgggagagatgggctaacaggtatgagcatgggaaaagcatgtttcaagaatttgagatgtatttcccagaaaagcaacatgatgaaaatggtcagaaaaggcaatttccttcctcttttctaatttggctctggagccaccagcagaacctcttcaatatcttgcatgttacagatttcactrctcccaccagcttggagacaacatgtggttcttgacaactctgctcctttggggtaagttggactcagaggggacagttagaagggtacaggctgtggctgttgtgagtcaagagttttgtcttcctgtggtaactctgggtagaactcatgagtatgaagca

SEQ ID NO: 385592 - DNA, 607 bp, Homo sapiens
aacaaaactgctaatatatatatacatattatgcatatatatgtatatattagcattattatatataaactatatatatatatatatatacacacatatatatagttttaaagctgtgggtggtagaacactttctaagtattgtcctatatcttacttttatcacttaaaataccttraagttctgtttatattaatagaaatccactttaaaatgtctgctgcacagctgtaccagaattaatttaaccattctgcctattagcaaatttataagatgtttccactcttttgattttacaagcattgctgcaataattatctttatacatacattccgggggcacatttcatagggtatctgtaagataatattctggacatggaattattgtcatattttaataaatggaagcagaaaagcccaccacccacttaaacctgtaaggagtttctattcatcaagagatggagactgcaatattcttcagggaaaaatgcttcattcaatatgcaagacaaaataaccaaatgtattatttagttattcagaagtgatgagtttaaacttcgttaaaaatgataatgcaaaagtcaatccacactg

SEQ ID NO: 385593 - DNA, 607 bp, Homo sapiens
aacaaaactgctaatatatatatacatattatgcatatatatgtatatattagcattattatatataaactatatatatatatatatatacacacatatatatagttttaaagctgtgggtggtagaacactttctaagtattgtcctatatcttacttttatcacttaaaataccttaaagttctgtttatattaatagaaatccactttaaaatgtctgctgcacagctgtaccagaattaatttaaccattctgcctattagcaaatttataagatgtttccactcttttgattttacaagcattgctgcaataattatctttatacatacattccgggggcacatttcatagggtatctgtaagataatattctggacatggaattattgtcatattttaataartggaagcagaaaagcccaccacccacttaaacctgtaaggagtttctattcatcaagagatggagactgcaatattcttcagggaaaaatgcttcattcaatatgcaagacaaaataaccaaatgtattatttagttattcagaagtgatgagtttaaacttcgttaaaaatgataatgcaaaagtcaatccacactg

SEQ ID NO: 385594 - DNA, 607 bp, Homo sapiens
aacaaaactgctaatatatatatacatattatgcatatatatgtatatattagcattattatatataaactatatatatatatatatatacacacatatatatagttttaaagctgtgggtggtagaacactttctaagtattgtcctatatcttacttttatcacttaaaataccttaaagttctgtttatattaatagaaatccactttaaaatgtctgctgcacagctgtaccagaattaatttaaccattctgcctattagcaaatttataagatgtttccactcttttgattttacaagcattgctgcaataattatctttatacatacattccgggggcacatttcatagggtatctgtaagataatattctggacatggaattattgtcatattttaataaatggaagcagaaaagcccaccacccacttaaacctgtaaggagtttctattcatcaagagatggagactgcaatattcttcagggaaaaatgcttcattcaatatgcaagacaaaataaccaaatgtattatttagttattcagaagtgatgagtttaaacttckttaaaaatgataatgcaaaagtcaatccacactg

SEQ ID NO: 385595 - DNA, 619 bp, Homo sapiens
agatgtttccactcttttgattttacaagcattgctgcaataattatctttatacatacattccgggggcacatttcatagggtatctgtaagataatattctggacatggaattattgtcatattttaataaatggaagcagaaaagcccaccacccacttaaacctgtaaggagtttctattcatcaagagatggagactgcaatattcttcagggaaaaatgcttcattcaatatgcaagacaaaataaccaaatgtattatttagttattcagaagtgatgagtttaaacttcgttaaaaatgataatgcaaaagtyaatccacactggaggcaaaattgcctttatgcagacatggttgctgttagaggaaatgtgttttagccaaggaaatgttgagaatgtctgagggaaggcttgatgttcctcatgtgtcccttaggtctctgtaaataagttcttaggatggagaggttagggaagctgacagagctgtttcgttttttttttttttttttttttttttgagacagagtctcactccgttgcccaggctggaatgcagtggtgtgatcttggctcactgcaacctctgacagagctgtttcaacaagat

SEQ ID NO: 385596 - DNA, 619 bp, Homo sapiens
agatgtttccactcttttgattttacaagcattgctgcaataattatctttatacatacattccgggggcacatttcatagggtatctgtaagataatattctggacatggaattattgtcatattttaataaatggaagcagaaaagcccaccacccacttaaacctgtaaggagtttctattcatcaagagatggagactgcaatattcttcagggaaaaatgcttcattcaatatgcaagacaaaataaccaaatgtattatttagttattcagaagtgatgagtttaaacttcgttaaaaatgataatgcaaaagtcaatccacactggaggcaaaattgcctttatgcagacatggttgctgttagaggaaatgtgttttagccaaggaaatgttgagaatgtytgagggaaggcttgatgttcctcatgtgtcccttaggtctctgtaaataagttcttaggatggagaggttagggaagctgacagagctgtttcgttttttttttttttttttttttttttgagacagagtctcactccgttgcccaggctggaatgcagtggtgtgatcttggctcactgcaacctctgacagagctgtttcaacaagat

SEQ ID NO: 385597 - DNA, 619 bp, Homo sapiens
agatgtttccactcttttgattttacaagcattgctgcaataattatctttatacatacattccgggggcacatttcatagggtatctgtaagataatattctggacatggaattattgtcatattttaataaatggaagcagaaaagcccaccacccacttaaacctgtaaggagtttctattcatcaagagatggagactgcaatattcttcagggaaaaatgcttcattcaatatgcaagacaaaataaccaaatgtattatttagttattcagaagtgatgagtttaaacttcgttaaaaatgataatgcaaaagtcaatccacactggaggcaaaattgcctttatgcagacatggttgctgttagaggaaatgtgttttagccaaggaaatgttgagaatgtctgagggaaggcttgatgttcctcatgtgtcccttaggtctctgtaaataagttcttaggatggagaggttagggaagctgacagagctgtttcsttttttttttttttttttttttttttgagacagagtctcactccgttgcccaggctggaatgcagtggtgtgatcttggctcactgcaacctctgacagagctgtttcaacaagat

SEQ ID NO: 385598 - DNA, 544 bp, Homo sapiens
cgtggtcctattaacaaatttgtcaagagttggagtgtatttgttttctattgctgtgtaacaaatttagcaacaacatacatttaagatcttccagtttccatgggtcaggactcccatcacagcttagctgagtgctctgctgagagtcttccaaggctgcagttagggtgttgactttgctgtgtttctttttgcagctcttccaggctcacaaggtcactggcagaattcagttctttgtggttgtaggactgaggttcctgctttcttgctgcccatcagtggggggccactctcagctcctagaggcccttgccttgtggcactcttgtaggccctctcctggcrtggcagcttacctcttcaagttcaggaggagactttccatccagactgctaagatagagtcttacataatgtagcaatcccaagagtgacatttcatcacccttgtcatattctgttggctagaagcaagtcataggttccacccacactcaaggggattatgcaagggagtgagtcattgggatcattttag

SEQ ID NO: 385599 - DNA, 612 bp, Homo sapiens
atctgtcactgtgaaaggtattgtattggaatagtcatagaactgatagtccctccccctgagggaccatcataaatattctaaactcctcactttaatttacaagtgaagaaaccgggctccagagaggtaaactgcattactaaaggccacaccatgaccagtagctggaaccagaactgaggtctctgggtcctagtccaatactctttccagtgtaccgcaasccccatcaacaatcacaggagctaatgtcaatgtcagggcataatggtgatccatttcatccatcattattttagttgtaaagaatacagactcactctaggtagataggagagttagaaaataataccatggaatctcatggaagccccatagaaagagaaacctggaaaatatgaagaacgggctatactgtccatctacctctcagggacaaagcagcctctgtggtgccacttcttcctgagcatctgcaggctaagcagtttgcatatggccttgttctgaccctttcacggcctttcctcttaatacaatcactagcaacctttctctgtctgagaaaaaaaaaagttcactcctgtgggaaagaaattattgtcccag

SEQ ID NO: 385600 - DNA, 612 bp, Homo sapiens
atctgtcactgtgaaaggtattgtattggaatagtcatagaactgatagtccctccccctgagggaccatcataaatattctaaactcctcactttaatttacaagtgaagaaaccgggctccagagaggtaaactgcattactaaaggccacaccatgaccagtagctggaaccagaactgaggtctctgggtcctagtccaatactctttccagtgtaccgcaacccccatcaayaatcacaggagctaatgtcaatgtcagggcataatggtgatccatttcatccatcattattttagttgtaaagaatacagactcactctaggtagataggagagttagaaaataataccatggaatctcatggaagccccatagaaagagaaacctggaaaatatgaagaacgggctatactgtccatctacctctcagggacaaagcagcctctgtggtgccacttcttcctgagcatctgcaggctaagcagtttgcatatggccttgttctgaccctttcacggcctttcctcttaatacaatcactagcaacctttctctgtctgagaaaaaaaaaagttcactcctgtgggaaagaaattattgtcccag

SEQ ID NO: 385601 - DNA, 612 bp, Homo sapiens
atctgtcactgtgaaaggtattgtattggaatagtcatagaactgatagtccctccccctgagggaccatcataaatattctaaactcctcactttaatttacaagtgaagaaaccgggctccagagaggtaaactgcattactaaaggccacaccatgaccagtagctggaaccagaactgaggtctctgggtcctagtccaatactctttccagtgtaccgcaacccccatcaacaatcacaggagctaatgtcaatgtcagggcataatggtgatccatttcatccatcattattttagttgtaaagaatacagactcactctaggtagataggagagttagaaaataataccatggaatctcatggaagccccatagaaagagaaacctggaaaatatgargaacgggctatactgtccatctacctctcagggacaaagcagcctctgtggtgccacttcttcctgagcatctgcaggctaagcagtttgcatatggccttgttctgaccctttcacggcctttcctcttaatacaatcactagcaacctttctctgtctgagaaaaaaaaaagttcactcctgtgggaaagaaattattgtcccag

SEQ ID NO: 385602 - DNA, 290 bp, Homo sapiens
gtaaaatttcaggatatggctgaattaaaatcttggtcctgcacttaartagctccttgaattgcaatttcttatcccaattattttatcctttcattccactgtgaaatctatatcatggcacttaatagtcaactttattattttaacaaatgcttatttacctttcatgggttatttcatttagccttcataatatctgttgtcattgcctcacactcagtcggtggcttttaatactattctattattttgatcaatttgtataatatattctctcctcagtgttt

SEQ ID NO: 385603 - DNA, 620 bp, Homo sapiens
acagctaactatgagagtgacttaatgtaattatattacctgtcaatcgctacttttcctttcttaccaaaattcacacaggtatgaaagcaatatgacattcaggctccattatgtgtatttgtgcacatcacttcccacgataagggagaagaaaagaaaccactgcacattcggataaaacatgctgggaatacagcagtaaacagaatagaaaaagtctacattttaattagcagataagtaaaaataagtgactaaatgtatattattcagggggccatatgtgcaattgctgttaagtaaagcagaacatggagtggagtagggatgacaggtttcatcagttaatacttgagcagagagctgaatacagtaagatagttgtaggataycttgaggcagagtattctcagaacagaacatggtaagtacaaaggccccaaggcaggaacaagcttggtgaatgtgagaaatatgcaagctggttaatgtggctgaagcacagtgaccaagggaaagttttacagagatcacggaggtgcttgagggctggattatgtaggccattaaggagcatcacaggccactgcaaagattttgtcttttaaatgagatag

SEQ ID NO: 385604 - DNA, 527 bp, Homo sapiens
ttgcctcacctactgcattgagagggtctccaggctgtggtacaggggaactcaggcaggtcccagtggagtcccagaattgaggagacagagctgagtctggagagaccaaggtggctagarctcatggatccaagaaatggaaatgaaaaagctgcacacagagagaattccagagatctgctgagggtccccaccaagtattcagcagagtagtaatcagtgtgctgatctagaaggaaggggctgaagcacaagatataatttaaagagtttacttgagccaaagtgagcacagctgcccaggacacacttccaagttaactcagggagtgctcaatcagcttttgttacaagcaggtttttaaaggcaaaggtaagaagaagtggatggatacaaagttctttgatagaaattttcattggcttacagagatgacatggattagttattggttatacactgttgaactataggatatgagtcgtggtgtccagcatatggtattttatggctgcttggcatc

SEQ ID NO: 385605 - DNA, 527 bp, Homo sapiens
ttgcctcacctactgcattgagagggtctccaggctgtggtacaggggaactcaggcaggtcccagtggagtcccagaattgaggagacagagctgagtctggagagaccaaggtggctagagctcatggatccaagaaatggaaatgaaaaagctgcacacagagagaattccagagatctgctgagggtccccaccaagtattcagcagagtagtaatcagtgtgctgatctagaaggaaggggctgaagcacaagatataatttaaagagtttacttgagccaaagtgagcacagctgcccaggacacacttccaagttaactcagggagtgctcaatcagcttttgttacaagcaggtttttaaaggcaaargtaagaagaagtggatggatacaaagttctttgatagaaattttcattggcttacagagatgacatggattagttattggttatacactgttgaactataggatatgagtcgtggtgtccagcatatggtattttatggctgcttggcatc

SEQ ID NO: 385606 - DNA, 553 bp, Homo sapiens
ctcaagggggagtgatgtgactgcagtttcattccaatgcctctccragcctgataatttaaaggggctcacattcctcagataaaaagtttcttcttctttttttttttaatttcacaggtgcatgtgtgtgaaaaaactaccccaggaaagaaccacttgaaagcattagctagaacagtacccaacagtcacacagggctggaaatagtgccagttcccaaaaaaggagagcacaattcacaaggcatgtgatagagaacccagaagggtcttacctcaattaagacatggaaaatagaaaaacactaaaagccaacttctagagatgaataccagtatgctggatgggattgagagcacattagaccacagaaaacaagattaatgaatgcaaagacagagcaatagaaacaatccaaaatgaaacagagggttaaaaaaaaatgaaaagagcatcagtgaggtgtgggacaacttcaagtggcctaatatatgtgtaattttgaaaggagggggccagctgggcttcctgagtcaaacgggctcagaa

SEQ ID NO: 385607 - DNA, 553 bp, Homo sapiens
ctcaagggggagtgatgtgactgcagtttcattccaatgcctctccgagcytgataatttaaaggggctcacattcctcagataaaaagtttcttcttctttttttttttaatttcacaggtgcatgtgtgtgaaaaaactaccccaggaaagaaccacttgaaagcattagctagaacagtacccaacagtcacacagggctggaaatagtgccagttcccaaaaaaggagagcacaattcacaaggcatgtgatagagaacccagaagggtcttacctcaattaagacatggaaaatagaaaaacactaaaagccaacttctagagatgaataccagtatgctggatgggattgagagcacattagaccacagaaaacaagattaatgaatgcaaagacagagcaatagaaacaatccaaaatgaaacagagggttaaaaaaaaatgaaaagagcatcagtgaggtgtgggacaacttcaagtggcctaatatatgtgtaattttgaaaggagggggccagctgggcttcctgagtcaaacgggctcagaa

SEQ ID NO: 385608 - DNA, 553 bp, Homo sapiens
ctcaagggggagtgatgtgactgcagtttcattccaatgcctctccgagcctgataatttaaaggggctcacattcctcagataaaaagtttcttcttctttttttttttaatttcacaggtgcatgtgtgtgaaaaaactaccccaggaaagaaccacttgaaagcattagctagaacagtacccaacastcacacagggctggaaatagtgccagttcccaaaaaaggagagcacaattcacaaggcatgtgatagagaacccagaagggtcttacctcaattaagacatggaaaatagaaaaacactaaaagccaacttctagagatgaataccagtatgctggatgggattgagagcacattagaccacagaaaacaagattaatgaatgcaaagacagagcaatagaaacaatccaaaatgaaacagagggttaaaaaaaaatgaaaagagcatcagtgaggtgtgggacaacttcaagtggcctaatatatgtgtaattttgaaaggagggggccagctgggcttcctgagtcaaacgggctcagaa

SEQ ID NO: 385609 - DNA, 553 bp, Homo sapiens
ctcaagggggagtgatgtgactgcagtttcattccaatgcctctccgagcctgataatttaaaggggctcacattcctcagataaaaagtttcttcttctttttttttttaatttcacaggtgcatgtgtgtgaaaaaactaccccaggaaagaaccacttgaaagcattagctagaacagtacccaacagtcacacagggctggaaatagtgccagttcccaaaaaaggagagcacaattcacaaggcatgtgatagagaacccagaagggtcttacctcaattaagacatggaaaatagaaaaacactaaaakccaacttctagagatgaataccagtatgctggatgggattgagagcacattagaccacagaaaacaagattaatgaatgcaaagacagagcaatagaaacaatccaaaatgaaacagagggttaaaaaaaaatgaaaagagcatcagtgaggtgtgggacaacttcaagtggcctaatatatgtgtaattttgaaaggagggggccagctgggcttcctgagtcaaacgggctcagaa

SEQ ID NO: 385610 - DNA, 518 bp, Homo sapiens
gggtcttacctcaattaagacatggaaaatagaaaaacactaaaagccaacttctagagatgaataccagtatgctggatgggattgagagcacattagaccacagaaaacaagattaatgaatgcaaagacagagcaatagaaacaatccaaaatgaaacagagggttaaaaaaaaatgaaaagagcatcagtgaggtgtgggacaacttcaagtggcctaatatatgtgtaattttgaaaggagggggccagctgggcttcctgagtcaaacgggctcagaaagctgtaaaactcactcattttctgcatcagaacttacttcggtcctgaatgaataatattaaagatatatgcttaaaatattcctaacaccaggatttgtgcatgtgttttyttcccaaaaaaagctataaacagcaaaaattttgctgtaagcttccctgtgtcctctctccctctctcccttccccctcccctaaaactaaaaggaatattaaatgcctgtttttctatga

SEQ ID NO: 385611 - DNA, 573 bp, Homo sapiens
tctaagacatgtcacaaaataatttactgcctttgtttctcgctctggtaacatcttccctctacacgtatttcccgccttaaagagtttcaaaagcaactgcatcatcgacctctgactacccgctcgaaaccccttccacgctgaaaagctttgtactgtcactctgctcaataaagcctacagccttttttctcttggtccgtgtttccatcgccaygggcagccgccacaccaattctttggtctggctaaggcaaaaatctttagcgttacaattggagtccttgaaaaaagaggaaggtggatatgtcagaggcgtttgaaccagagcaactccatcttgaataggggctgggtgaaataaggctgagacctactgggctgcattcccaggaggttaaggcattcttagtcacaggatgagataggaggtcagcacaaggaacaggtcacaaagaccttgctgataaaaggatatggtaaagaagctggccaaaagccactaaaaccaagatggtgatgaaagtgacctttgatcgtcctcactgctcattatatgctaattataac

SEQ ID NO: 385612 - DNA, 555 bp, Homo sapiens
ccataaacttaatgtatctattaaattatgtggtctttcttaataacttcccataaattgcacagttttcttcataaatgccctgcacaaatcttacgggatttctttctaggtgtgtgcgtgtgtgtgtgtgtgtgtgtgtgtgtgtgtgtgtatctttgttaattcaaatggtaatttctaaaagtttatttttgatataatggaaacacagctgatttagggaacactgatttttatatccagataccttactaatgtaagtcctgggagatagctatttgcakgaaaatcttacactttgggggatcaggaggagcatgtgcagtggttctattccttgaaaaaaattttttttgagacagggtcttgctttgtctctcaggctggagtgcagtggcatgatcatggctcgctgcaggcttgacctcccgtgctcaagcgatcgtcccacctcctgagtggctgggactacaggcatgcactaccaggcttgggtaatttttatattttttgtagagtcaaggtcttcttatgttgcccaggctggcattg

SEQ ID NO: 385613 - DNA, 555 bp, Homo sapiens
ccataaacttaatgtatctattaaattatgtggtctttcttaataacttcccataaattgcacagttttcttcataaatgccctgcacaaatcttacgggatttctttctaggtgtgtgcgtgtgtgtgtgtgtgtgtgtgtgtgtgtgtgtgtatctttgttaattcaaatggtaatttctaaaagtttatttttgatataatggaaacacagctgatttagggaacactgatttttatatccagataccttactaatgtaagtcctgggagatagctatttgcatgaaaatcttacactttgggggatcaggaggagcatgtgcagtggttctattccttgaaaaaaawtttttttgagacagggtcttgctttgtctctcaggctggagtgcagtggcatgatcatggctcgctgcaggcttgacctcccgtgctcaagcgatcgtcccacctcctgagtggctgggactacaggcatgcactaccaggcttgggtaatttttatattttttgtagagtcaaggtcttcttatgttgcccaggctggcattg

SEQ ID NO: 385614 - DNA, 605 bp, Homo sapiens
gggaatttaggtaatgttgctgtatttactcacgtgcttccttattcccttagtcaactcagtttcataaatttcttcaggatctttttcaagaagatctttcgattttttttcagcctactctaattactccttgtctatgttactgttcctatttgtacagagctcagactaccctatcatgtgttcctgctttttcatttctttttttttttgagatggagtctcactctgtcacccagactggagggcagtggtgtgatctcagttcacagcaacctccacctcccaggttcaggggatcctccacctcagcctcccaagtagctgggattacaggcctgtgccaccacgctcggctaatttttatatttttaatagagatggggtttcaccacattggccaggctagtctcaaactcctgacctcaagtgatccatctgccttggcctcccaaagttctggattgcaggtatgagccgtcgtacctgccccatgtgttcttttttatagtctattcrttatatacatgatatatttacttccccaattgtggtgtaagcatttttagaggatgcttacaccacaactggggaagtaaata

SEQ ID NO: 385615 - DNA, 506 bp, Homo sapiens
aatgagagagagaaaaaatacttgtcyaagaattacatttagtgtctaaaagccaaatagctcaatttctgctcatgagattcaacagatgaactgagggaacatatgccaatagctctgagattacaggtccgcatgggatgcccataaggtgcaggattctattagctaagattatgtctcaggtgggcaaatctctgtggacatagcaagaaaaaagaaaaactgtcaaggaataatatagagacagtgtgatggttaattttatgtgttaacttggctagaccacagtgcccaggtatgtggtcaaatataattctggaggtttctgagaaagggtattttggatgagagtaacatttgcattagtagactttgagtagagcaggttgccccatgtcatgtgggtggacctcatccaatcagttgaaggcctgaatggaatgagattgaccttcctggaagaagaggaaattctaccaacagaatatcttaggactcaaata

SEQ ID NO: 385616 - DNA, 506 bp, Homo sapiens
aatgagagagagaaaaaatacttgtctaagaattacatttagtgtctaaaagccaaatagctcaatttctgctcatgagattcaacagatgaactgagggaacatatgccaatagctctgagattacaggtccgcatgggatgcccataaggtgcaggattctattagctaagattatgtctcaggtgggcaaatctctgtggacatagcaagaaaaaagaaaaactgtcaaggaataatatagagacagtgtgatggttaattttatgtgttaacttggctagaccacagtgcccaggtatgtggtcaaatataattctggaggtttctgagaaagggtattttggatgagagtaacatttgcattagtagactttgagtagagcaggttgccccatgtcatgtgggtggacctcatccaatcagtkgaaggcctgaatggaatgagattgaccttcctggaagaagaggaaattctaccaacagaatatcttaggactcaaata

SEQ ID NO: 385617 - DNA, 471 bp, Homo sapiens
tggctgacgcccttgcgtcagaataaataaccattgcttttttcatttgatgggccttcgttttcacactttgtcatctttaagcttttagccctttgaaggattctgagactggaaaataaatgaaaggatttttcaaagggggaagttctttttttaaaggctttattctrgtcaattgatttccaagtgtgcaatgtcccatggggtaggccacaaagaggcctagagtgcaccatctgtgcggctgcagctcctggctctcaacagaactgagatctaagtcctcatgatctgatcagcttccaagggcctaaacctcctattaccaccaacttggggattaggagttcaacaaataaatttggtgaggggacgcagacacacaaacattcagaccatagcaatgcataaaggtagctcatcactgaagttttaatttgtgtttccctaacgagtaatgattttgaa

SEQ ID NO: 385618 - DNA, 471 bp, Homo sapiens
tggctgacgcccttgcgtcagaataaataaccattgcttttttcatttgatgggccttcgttttcacactttgtcatctttaagcttttagccctttgaaggattctgagactggaaaataaatgaaaggatttttcaaagggggaagttctttttttaaaggctttattctagtcaattgatttccaagtgtgcaatgtcccatggggtaggccacaaagaggcctagagtgcaccatctgtgcggctgcagctcctggctctcaacagaactgagatctaagtcctcatgatctgatcagcttccragggcctaaacctcctattaccaccaacttggggattaggagttcaacaaataaatttggtgaggggacgcagacacacaaacattcagaccatagcaatgcataaaggtagctcatcactgaagttttaatttgtgtttccctaacgagtaatgattttgaa

SEQ ID NO: 385619 - DNA, 596 bp, Homo sapiens
tcactttttaaatccccttaccaactgcacccagtagctgtggtcagaragcagagtttactgtgtctccctgtgacgcagtcaggacaagagaaggaaacccccacagtgcactaacctacggcagaatctttggggaaggttagaagggaccgtgtgtctgagcatgtgcaggaaccatctcaaaaggtaaagccctgactcttcaggagccttgtctgtagcttcaactgacgtaatggtgtggtaataaccatttttctggctgagatatttcaaaggtcagtaaggcctttttagatgcaatgacaatgagctttgtatgagttctcattcaacagggtattttacaataaaatctgatcatataaaacccaataaatgtaatagaacctaaacttgatgccatcctccacctcccccacctaattatttggcgggggaacgggagcgctaatagtacattattgaagtataattcacatagagtaacatgcacaaatcttaagggcatagaaacgtaaccatcgcctagatcaagttatagaaaatttccatcagcccagaaaggtcaataacctcctttagattcccat

SEQ ID NO: 385620 - DNA, 596 bp, Homo sapiens
tcactttttaaatccccttaccaactgcacccagtagctgtggtcagaaagcagagtttactgtgtctccctgtgacgcagtcaggacaagagaaggaaacccccacagtgcactaacctacggcagaatctttggggaaggttagaagggaccgtgtgtctgagcatgtgcaggaaccatctcaaaaggtaaagccctgactcttcaggagccttgtctgtagcttcaactgacgtaatggtgtggtaataaccatttttctggctgagatatttcaaaggtcagtaaggcctttttagatgcaatgrcaatgagctttgtatgagttctcattcaacagggtattttacaataaaatctgatcatataaaacccaataaatgtaatagaacctaaacttgatgccatcctccacctcccccacctaattatttggcgggggaacgggagcgctaatagtacattattgaagtataattcacatagagtaacatgcacaaatcttaagggcatagaaacgtaaccatcgcctagatcaagttatagaaaatttccatcagcccagaaaggtcaataacctcctttagattcccat

SEQ ID NO: 385621 - DNA, 596 bp, Homo sapiens
tcactttttaaatccccttaccaactgcacccagtagctgtggtcagaaagcagagtttactgtgtctccctgtgacgcagtcaggacaagagaaggaaacccccacagtgcactaacctacggcagaatctttggggaaggttagaagggaccgtgtgtctgagcatgtgcaggaaccatctcaaaaggtaaagccctgactcttcaggagccttgtctgtagcttcaactgacgtaatggtgtggtaataaccatttttctggctgagatatttcaaaggtcagtaaggcctttttagatgcaatgacaatgagctttgtatgagttctcattcaacagggtattttacaataaaatctgatcatataaaacccaataaatgtaatagaacctaaacttgatgccatcctccacctcccccacctaattatttggcgggggaaygggagcgctaatagtacattattgaagtataattcacatagagtaacatgcacaaatcttaagggcatagaaacgtaaccatcgcctagatcaagttatagaaaatttccatcagcccagaaaggtcaataacctcctttagattcccat

SEQ ID NO: 385622 - DNA, 542 bp, Homo sapiens
tcagaaaacaatacataagtgtggtgtttgggcatgctgagtactttgaatcgaaggacatttaaaaggcctcagaaggaaagtatctttctgcccttctcctatcctcctttctcctgctcccctttctccaccaaggcaggtcatagaaactagagttccttttccccaatgtcagccatagaagctagaacccctctctccaaaacccagacataaaccctagagacattactctaacattcccctacctttctgtgtaggagctggccacaaagacattctgtgacctacactgtctgatagtagggcatatgaccttcatttcagaaggggccctgccctatgcatgggaggaagggatgccacagagagaccaagaagaatctgaacaggcagamcttgcttggtgtcctggccagtgtattatcattaggtgatactttttttgttcattcacatttctacatagctgcattccacattgaaactaagcataaaaatggacagttttcctgggtatttgggtctttatttttaaa

SEQ ID NO: 385623 - DNA, 586 bp, Homo sapiens
tatctaccaacatagtagccaagcaacagcaatctcttttcctttggtcattagagtcctagagaccaagaggatgttgggaaaagaattaccatggatcagctctcagaggcagtaggttctggactcatgctggctttgatacgtgtgcattggaaaagctcaagtacctggcaatacttggagattaggaagaaaggatgaaaataaaccactgcactaaataacatgacaataatcacttatacaaaaattttaaagataaggaatatttaaagatttattagtttattatagctttatagttggagagtgaagaagaaaataccaaagctttttgtcttaacaaaatggtgcagacagattaacatatattgtcacctatgataaccagtcagcataaaaagtatttagaaaggaatggttatattctctaagagatatattctgatgtcatgttttttgctttagagtctattaatatagccacctttttgttaatgttttcagtcaagctccttttctygcctttcatttccaacctttctctcactttctggtttagatacaactcctaaatatatca

SEQ ID NO: 385624 - DNA, 639 bp, Homo sapiens
catgcagcttctaagaggaccgagtgccttcactggaatagtgaatctccttctgtggacatggacagggaacggctcgataaagcccagattcacaaaattccgcccacaccccgtgcccccgggaattttggcttaggggcaggatatgggggttaccactgtgctagtggaggtggcgcggggactgaacggcagccccagcgcagttctccccacgtttgyccgcagaaccccggcgaggccgaggtggtcatttccctccctagccggatggccgcgccgggtgaggccggtttgggcgcgaagcacgggcgtgtggcgctccacttccgcaaaggccagccgcgctcaggaccgcgagccctgagcgtccccctagtgacccctggcctcgtgcccgacgccccgtctctcctgccccggcccccccgccacgcagggccccggtcacgcgcggggggagccggaccgccaaagcccgcgagccggcgcccaggaaagcgtccgcagcccggccagtgcggataggccaattggccgaagtcggcaaagctcaagacggcaccgcagcagggggacccgaccccgttttgttgggagcctaagcggaagtgccttccccgctctaatgccgga

SEQ ID NO: 385625 - DNA, 578 bp, Homo sapiens
tgcaaaaaagcaactgaccaaatccaacacccactcgtgatatttctcagcaaagtaggaatacagcaggttattttctcaacataatttaaaaaatctaggaaaaaaaatcctgacaactaacattgtacttaatgatgagaaactaggagctttactgataacattaggaataagatgaagatgtaccctctcacccctcctttccaacattgtacaggaaggcatagctaattcaataatacaagaaaataaaatgaaaggtatactgattaagatggaagaaaaaaactgtttttgttcacagatcacatgttcatcaacatgtacaattccaaagaawcaataaaaaattgcaaataacctaatttgcaggatactaaattaaatataaatatcaaacacttttctatataccaataatttgttaaattttaagtgttatgataccacctcttatattagaaccccccaaaataaaacatatatgtataagtctaacaaatatacagaagatctacatgaagaaaagtacaaaaactctgatgactgaaatcaaagagaactaaataaatgaa

SEQ ID NO: 385626 - DNA, 576 bp, Homo sapiens
gaactgcaaattaaatcaggataacccaacacacctattagtatagccaaaatcaaaaacactaacaacatcaaatgctagtgagaatgtggaataaaagggattctcattgactgatggtagaaatgcaaaatagtacagctactttggaagaaartttcgtagtttcttgcaaaactgaatgcactcttaccatatgatccagcaattgtactttttgatatttataaaaatgaggtgaaaacttacgtccacacaaaaacctgcacatgagttttatagtagcttattcataattgccaaaacttggaagcaatcaagatttccttcagtagatgaatgaataaatgaataaggtacatccagataatgaaatactattcagcactaaaaagaaataagctattaagccaagagacatgaagaaacctaaacacatattactaagtaaaaataaaaaagccgatctgaaaactctgcatactggattctggaaaaggcaaaaccataaagacagtgaaaggatcaatgcctaccagatattaggcagtaggatataggcaagacacagaagat

SEQ ID NO: 385627 - DNA, 539 bp, Homo sapiens
ggaggtatttgggtcataggggtgagtttctcatgaatatattaatgctctttattgttgggggtatgaatgaattcttattctgttagttcccataagagctggttgttttaaaaggcctggaaatcccctctcctggtttcttctctctcactctgtgatctctgtacatggtggcttccctccccttttgtcatgagtgcaagcagtctgagggcttcatcagaagcagatgctggtgccttgcttcttatacagcctgcagggccatgagccagataaacctattttctttataaattacccagcttcaggtattcctttagcaacacmagcagactaagacaactaatattctaagagaggagataaaatcgaattttatgaaatgctcaattaaaggcagaggaggcaggaaaaatgaacaaaaaacaaatgcaataaatagaaaacagttacaaacatgattgatataaatctaaataattaataatcactttaaatatgaaaggtataaatctaccaattaaagacaatga

SEQ ID NO: 385628 - DNA, 572 bp, Homo sapiens
gaaaagagacccatagttcaaagraaaagaataaagaacccagaaatagacctgcagaagtatagtcaattcattttggacaaacgagaaaaagcaatttttttaaaaaaagatactttttgtcaacaagtagtactggaataagttgacattcatatacaaaaaaaaaaaaaaaacaggcaaaaatgaaaacaaaaaaatcccacagaagtataagttctaaaagaaatacaagagaaaatctagatgaccttaagtatgttgatacatttataggcaccataccaaaaacatggtctatgaaaagaaatttacaaactggactggattaaaattaaaatttacctataaaagacattgttaaggaaaggaaagaataacccacagactgggaaaaaaatacatgtttgataaagttattgtattcaaaatatataaataacacttaaaactcaacaataagtaaacaacccaattaaagagtatacaaaatctattaatttaaattaaaaaaatctgagcagacatgtcaccaaaggtaatatagagatgacaaataagtttgatgaaaa

SEQ ID NO: 385629 - DNA, 572 bp, Homo sapiens
gaaaagagacccatagttcaaaggaaaagaataaagaacccagaaatagacctgcagaagtatagtcaattcattttggacaaacgagaaaaagcaatttttttaaaaaaagatactttttgtcaacaagtagtactggaataagttgacattcatatacaaaaaaaaaaaaaaaacaggcaaaaatgaaaacaaaaaaatcccacagaagtataagttctaaaagaaatacaagagaaaatctagatgaccttaagtatgttgatacatttataggcaccataccaaaaacatggtctatgaaaagaaatttacaaactggactggattaaaattaaaatttacctataaaagacattgttaaggaaaggaaagaataacccacagactgggaaaaaaatacatgtttgataaagttattgtattcaaaatatataaataacacttaaaactcaacaataagtaaacaacccaattaaagartatacaaaatctattaatttaaattaaaaaaatctgagcagacatgtcaccaaaggtaatatagagatgacaaataagtttgatgaaaa

SEQ ID NO: 385630 - DNA, 532 bp, Homo sapiens
gttttttaaaacttttcaaaatgaggtatcaaaatgtatacaaacattcgaaaaccgaacttttaaagcctcaaaatatttttgtaaaagtacttaatgatcatatttctaagaytgatttccctgtcttatattatttttagatttactgctttcaccaaagctatgaagaaaatatacagaatccaactctatttaaacagagattttgttatccatagattgatatatcaggatggtatgtatttttaaaactacaaatgtattaaatttataatcttggcaattcatgtttctaaatctggttgcgtataaaaatgtaaacagaaaatattaatgcaagaatgcaaaagtaatgaggttcttccagcttttattatcagctcttcaatcttgactatatgttagctctgtcaccatttcatgtagctaaacctttttcttcctaaggattcaacattgaacatacagttttaataaacggcatctgttttcccttttattccccagtttcacaaagacttctaagctt

SEQ ID NO: 385631 - DNA, 532 bp, Homo sapiens
gttttttaaaacttttcaaaatgaggtatcaaaatgtatacaaacattcgaaaaccgaacttttaaagcctcaaaatatttttgtaaaagtacttaatgatcatatttctaagattgatttccctgtcttatattatttttagatttactgctttcaccaaagctatgaagaaaatatacagaatccaactctatttaaacagagattttgttatccatagattgatatatcaggatggtatgtatttttaaaactacaaatgtattaaatttataatcttggcaattcatgtttctaaatctggttgcgtataaaaatgtaaacagaaaatattaatgcaagaaygcaaaagtaatgaggttcttccagcttttattatcagctcttcaatcttgactatatgttagctctgtcaccatttcatgtagctaaacctttttcttcctaaggattcaacattgaacatacagttttaataaacggcatctgttttcccttttattccccagtttcacaaagacttctaagctt

SEQ ID NO: 385632 - DNA, 472 bp, Homo sapiens
cagttggcatttcagtcaattgtttttccaaagctatttctgtcccatgaacattatctttgtttcatttttggataaaggtaactttattctgtcaatgacaggttagctatttggcagcttttagctggatcatacttggtgagaagaagcccatattattggactgtacatagaacccattcctgcctctgactttggagtcattgcacagggttggctgagactggcacacaccagacagatgagtcatatttcttacttgttgatgaatacctcttttgctgacagtcctctctagtgtgtgctgatatgagacacaaagatccacagactttctgctgacctwcataagtctatctttatgcctcttcctgaaaccactttggctctgattttccatcttgttatttgcaggctccagttagacctgccagttgattaaatactacttaggagtctgtatacacat

SEQ ID NO: 385633 - DNA, 247 bp, Homo sapiens
ccaaactatgtgacctatctattttacccaagctgtctataccttcatatcctaaggctcctaagtagaggattctttgagtttctcagggaattccaggagttcaaaatgggaaatcagaaaaatcatcaaygtggccctatttcagctattcctggaactaagaagcctcattcttctataagccactgccccagttccagggagaattaggttctgtccttcccatgaagtgatttcctttatc

SEQ ID NO: 385634 - DNA, 557 bp, Homo sapiens
ttgctatggagaacgcccactcatctgaggtcctgtgttttatttcctggtaagtcattcgctggaaattttaaaaagatcatctwgtaagagcttaagctgtgaacttttcagaagcagcatttaggacacaacaaatgatggttgactgatcagcagtcaggcaataactctgaagactcaacacctaagcaaccacccatgatgtatctattcccacagccagttctgcctgttggacaacattgtgaggcttgcttttgatcccagtcattgaaaattcctattcaacagaagatttcccactgtttacatttcccttaaggaggaagcagtctgtggactcctgacatttaaatttaccattaaaatgaggtttttctttttcccatccttgctgccaattatttcatagtggcagatttggaacatttgccagccccacaaggcgtgtaaatgggttctccatggagacgaaattcttcattgttgccattccaaaaatgtatgctttgaaaagaatgtgctgtgttctgtaaatatctctcctactgata

SEQ ID NO: 385635 - DNA, 557 bp, Homo sapiens
ttgctatggagaacgcccactcatctgaggtcctgtgttttatttcctggtaagtcattcgctggaaattttaaaaagatcatctagtaagagcttaagctgtgaacttttcagaagcagcatttaggacacaacaaatgatggttgactgatcagcagtcaggcaataactctgaagactcaacacctaagcaaccacccatgatgtatctattcccacagccagttctgcctgttggacaacattgtgaggcttgcttttgatcccagtcattgaaaattcctattcaacagaagatttcccactgtttacatttcccttaaggaggaagmagtctgtggactcctgacatttaaatttaccattaaaatgaggtttttctttttcccatccttgctgccaattatttcatagtggcagatttggaacatttgccagccccacaaggcgtgtaaatgggttctccatggagacgaaattcttcattgttgccattccaaaaatgtatgctttgaaaagaatgtgctgtgttctgtaaatatctctcctactgata

SEQ ID NO: 385636 - DNA, 591 bp, Homo sapiens
cagtgagcaagtgaaagcaagagacgagattccagtctcctcatccatgtgaacacatttcttagcaccacttatgagtgagaccatgcaatatttgtctttctgtgcctgacttgtttcactcaagataatgaccttcagttccatcccttttgctacaaaatgcatgttttcattcttttttatggctgaacactattctattgtgtatatataccacattttctttatccattcatgcgttgattgacattaagtttgatgctgtacatttgcttttgtgaatagtgctatgatgaacatacatgtgcaagtacctttttgatatattgatgtcttttcttttgggtagatacctagtaatgggattgctgcatcragtggtagttctattttcagttctttgagaaatctctatactgttttccatacaggctgtaatcatttacattcccaccaaaagcctatctactttctccacatcctcaccaacatctgttattctttgtctctttattaatagccattctaactggggtgagattatatctcactgtggtttggatttgcatttctctgatgattagtgat

SEQ ID NO: 385637 - DNA, 612 bp, Homo sapiens
ctgttaaaataaataaataagatttatatttagcaacatggctagaactaaaataatgttgcatgacaaagaaaaacagaatgaaaaatgttacatggtatataatgcccgcaaaacgtaatgccaaatattatttatgaatacacttacataaagtaaaaggtaaagtaaaattagtatggatatatatcaaatttaatgacaataactgttttgatggtagaggatagggactgaacctataatgcacatattagggattccaaatttacctgtgtyatttactcctcaataaatagaggaaactgatgttacaattctgtaagacttgggtattttgatatcgcttgcataaagattgttataatattttagtaatatgatattttgtaaaaacatgtaaataaatagtaaaaaagtgaatgtgagtttataagttgtacgtaaacattcttgaactacaagtgaaaaactaattgcaaaaataaacagattgcaatgaaaaagctagtaagtaacaagaaacaaaagctaccaaactctcagccataactaatagttaggggtttgggagtgagggtataaaggaaggaggagaaggaagaagggaga

SEQ ID NO: 385638 - DNA, 589 bp, Homo sapiens
ttggtctctgctgccagcagattgggcacttagtggtggccatagccaggttagccttggtgagtggaagtrcatgttgctgagcccatgcataacctccatccctgccaccatggccactttgctcatgggcccattgggcgatgacaggatgactggaaaaagaggctgagtggtgtccacagaacgaatcatcctctccacttgattattaaaatcctcctctgctgaggtcaatctttggtgagtattcacgtggcataaaaatgtcttcagtttttgaccactcagagaggtccgtccacatacctcttccccaaatttctttgtcaccaattttccaatcatgcttcttccaagtccctgaccatccagccaaatgattggctacagcccacgaatcagtacataatcatacatctggccattactctttccaaacaaagtgcacaaccaagtgcactctcaaagctctgcccagtgggaaaatttcccttcactgctgtccttcagggatgtcctagaaaggggctgtagtgctgcagctgtccacttccaggtggtgcctgcatatcgtacagagccatct

SEQ ID NO: 385639 - DNA, 589 bp, Homo sapiens
ttggtctctgctgccagcagattgggcacttagtggtggccatagccaggttagccttggtgagtggaagtgcatgytgctgagcccatgcataacctccatccctgccaccatggccactttgctcatgggcccattgggcgatgacaggatgactggaaaaagaggctgagtggtgtccacagaacgaatcatcctctccacttgattattaaaatcctcctctgctgaggtcaatctttggtgagtattcacgtggcataaaaatgtcttcagtttttgaccactcagagaggtccgtccacatacctcttccccaaatttctttgtcaccaattttccaatcatgcttcttccaagtccctgaccatccagccaaatgattggctacagcccacgaatcagtacataatcatacatctggccattactctttccaaacaaagtgcacaaccaagtgcactctcaaagctctgcccagtgggaaaatttcccttcactgctgtccttcagggatgtcctagaaaggggctgtagtgctgcagctgtccacttccaggtggtgcctgcatatcgtacagagccatct

SEQ ID NO: 385640 - DNA, 589 bp, Homo sapiens
ttggtctctgctgccagcagattgggcacttagtggtggccatagccaggttagccttggtgagtggaagtgcatgttgctgagcccatgcataacctccatccctgccaccatggccactttgctcatgggcccattgggcgatgacaggatgactggaaaaagaggctgagtggtgtccacagaacgaatcatcctctccacttgattattaaaatcctcctctgctgaggtcaatctttggtgagtattcacgtggcataaaaatgtcttcagtttttgaccactcagagaggtccrtccacatacctcttccccaaatttctttgtcaccaattttccaatcatgcttcttccaagtccctgaccatccagccaaatgattggctacagcccacgaatcagtacataatcatacatctggccattactctttccaaacaaagtgcacaaccaagtgcactctcaaagctctgcccagtgggaaaatttcccttcactgctgtccttcagggatgtcctagaaaggggctgtagtgctgcagctgtccacttccaggtggtgcctgcatatcgtacagagccatct

SEQ ID NO: 385641 - DNA, 446 bp, Homo sapiens
ttatgctcttcttgtcattatttatcatctttctatttccaactcaaatatcagcacacctttgaagttgtcattgatctcagagtcaacatttatttatcctttttctatatttgcacaggaaattatttgaattaagaagttactttattttgccttaaattataccagagtctgagtaaatttttaatttttaaaattaaaatcctacatcttgcacaacaggtcttctaattaaaatttgtccaayggaattgtatagatgaggtcagatgattttacatacacctgcacaagatgttacaatagcattctaggtcaatgctatggttaaaacaataaaaattaatttaaaaacttaagaagttatttttataatcataaaaacagttcttaagcagaaaaaaagtgaagaattagtcatcaaatgattaataaatattact

SEQ ID NO: 385642 - DNA, 446 bp, Homo sapiens
ttatgctcttcttgtcattatttatcatctttctatttccaactcaaatatcagcacacctttgaagttgtcattgatctcagagtcaacatttatttatcctttttctatatttgcacaggaaattatttgaattaagaagttactttattttgccttaaattataccagagtctgagtaaatttttaatttttaaaattaaaatcctacatcttgcacaacaggtcttctaattaaaatttgtccaacggaattgtatagatgaggtcagatgaytttacatacacctgcacaagatgttacaatagcattctaggtcaatgctatggttaaaacaataaaaattaatttaaaaacttaagaagttatttttataatcataaaaacagttcttaagcagaaaaaaagtgaagaattagtcatcaaatgattaataaatattact

SEQ ID NO: 385643 - DNA, 446 bp, Homo sapiens
ttatgctcttcttgtcattatttatcatctttctatttccaactcaaatatcagcacacctttgaagttgtcattgatctcagagtcaacatttatttatcctttttctatatttgcacaggaaattatttgaattaagaagttactttattttgccttaaattataccagagtctgagtaaatttttaatttttaaaattaaaatcctacatcttgcacaacaggtcttctaattaaaatttgtccaacggaattgtatagatgaggtcagatgattttacatacacctgcacaagatgttacaatagcattctaggtcaatgctatggttaaaacaataaaaattaattwaaaaacttaagaagttatttttataatcataaaaacagttcttaagcagaaaaaaagtgaagaattagtcatcaaatgattaataaatattact

SEQ ID NO: 385644 - DNA, 573 bp, Homo sapiens
tcaatattgttaaaatggtcatactgcccaaggcaatctagagatttaatgcaatacctattaaattaccaatgtmatttttcacagaattaggaaaaacaatcataaaattcatatgggacaaaaaaagagacaaaatagccaaagcaatccaaagcataaagataaaatccagaatcaccacattgcctgacttcaaataatattataaggctgtggtaaaatagcaaggtattggtacaaaaatagacacatagatcaatggaacagaagagcaaacccaaaataaaaccacatacctacaaccgactgctcttgaacaaagtcaacaaaaataagccatagagaaaagacattctattcaataaatggtgatgggaaacttggctagccatgtgtagaaggattaaactggacccctatctctcacaatatacagaaattaactcaacatggatgaaaggcttaaatgtaagatctcaaagtatacaaaacctagaaaaaaacctgggaaatactcgtctgtatattagcctaggcaaagaatttatggtgaagaccctaaaagcaaat

SEQ ID NO: 385645 - DNA, 452 bp, Homo sapiens
ctttttggcaacacaactagccattggcagaactgggaccagaaccacagacttctggctcctttaaaatattttcagttttcctcctctcttctaaaaatcagaggcaatgttatgattcttaaggtttcttagaatttgtcacaagactcccaaactctttggaaggaaagagaccactaagtgacttttacataagatgcctgctgataccagtatagataattctcawattctttaaaattagagctttgaagtcatgaaggaatattttgaatccttaaccaatgtggttttaattttgaatttttccccacataacccttctcctcatttcagggagacatagtattttagtttcactgcctcaagaaaggaaagatacagcaaaaaagaaaagaaataaataaaacaatgagaaataagtaaggactcatgttgtggatttcaaa

SEQ ID NO: 385646 - DNA, 500 bp, Homo sapiens
tacagtaagaaaagaaagatagccatggaccagtgtcctcttgaattagagattattctgactgcactcctgggtagagtgacagagcatccagctttctgattggaatactttaaacatttagaacactcccaaaaccatgaccctgtgaatacatagtgatgtttacgtgagttatttggctgatggacacgaggcccagaggccctgtaaacctcaataggttctaggagtgagcagacaagtcattttataccacatgtattgcacatgagtggcacagtcgggacttagagaaccagcagtctgcagagggagggatgaggaagccgctgtggaatgcstcacattaccttccaaatataatacaatagcttcagcttgtgctgatgtggaggcttatatggaaggagtagacagcaggagagcctgccgagcacagagattccaagctgaagttccagagttccagtattgcgttcaaactccagctccgtttc

SEQ ID NO: 385647 - DNA, 489 bp, Homo sapiens
actgaataccaaagactgggtaatttataaagaacagaaggttatttggctcaccattctgcaggctgggagattcatgagcatggtaccagcatctagcaagggctatcccatggcacaaggtatcacatggtgagacagagaaagaaaatgcgggccaaacttatccttttatctggagctcactctggagataatggcattaatccwttcattaagatggagctctcatgattctcatgaatcacctcttaaatgtccctcttcttgatactatcacaatgtcgattaaatttcaacatgtgttttggaggcgacattcaaatcatgacagaggatattttagtatggaggatatagacactgaacaacttaaaaagcaaataataacaatagtgtgaaacaaaacaacataaaagaatagtgagagcaatggatgttatattggcaatcatgcctggctgtaatgcagagtaatttttaagccaa

SEQ ID NO: 385648 - DNA, 489 bp, Homo sapiens
actgaataccaaagactgggtaatttataaagaacagaaggttatttggctcaccattctgcaggctgggagattcatgagcatggtaccagcatctagcaagggctatcccatggcacaaggtatcacatggtgagacagagaaagaaaatgcgggccaaacttatccttttatctggagctcactctggagataatggcattaatccattcattaagatggagctctcatgattctcatgaatcacctcttaaatgtccctcttcttgatactatcacaatgtcgattaaatttcaacatgtgttttggaggcgacattcaaatcaygacagaggatattttagtatggaggatatagacactgaacaacttaaaaagcaaataataacaatagtgtgaaacaaaacaacataaaagaatagtgagagcaatggatgttatattggcaatcatgcctggctgtaatgcagagtaatttttaagccaa

SEQ ID NO: 385649 - DNA, 646 bp, Homo sapiens
agtagtttatggccatcctgtcaccagaaatagcagattttgaatagttgcaagagagatcttatggctcatgaacactaaaatatttattatttggtcctttacagaacacaatttgccaaactctgacctagaacttcttttataagcaattagtggtatgaatttctggctaaaatattattttttatgagtatttataatattttgacttcctaattctcctcttccttctccttccttccttctctattttctgttatttcaatcatatatttctttacttgaggaatttcttggtaacttgataatgaatagaagaacttggacttacattcataaatacttttatcrtttttagccaccaagacattacagtaaaaatacagtaatgtttctaataaatgtcagagaacatcattattctgacatgtgatactgggatatggaaaggaagcaatcattctgttttatggacttgaataaagaggaaagtcctccaggaatgcagtcttatacatacttcctcttttttttttttcaagagaaagttcatatttctagtattagtggatatgactacttttcactttaggttaatttattttaaaaaactctctaaagataggattaaaaactgttaagt

SEQ ID NO: 385650 - DNA, 646 bp, Homo sapiens
agtagtttatggccatcctgtcaccagaaatagcagattttgaatagttgcaagagagatcttatggctcatgaacactaaaatatttattatttggtcctttacagaacacaatttgccaaactctgacctagaacttcttttataagcaattagtggtatgaatttctggctaaaatattattttttatgagtatttataatattttgacttcctaattctcctcttccttctccttccttccttctctattttctgttatttcaatcatatatttctttacttgaggaatttcttggtaacttgataatgaatagaagaacttggacttacattcataaatacttttatcgtttttagccaccaagacattacagtaaaaatacagtartgtttctaataaatgtcagagaacatcattattctgacatgtgatactgggatatggaaaggaagcaatcattctgttttatggacttgaataaagaggaaagtcctccaggaatgcagtcttatacatacttcctcttttttttttttcaagagaaagttcatatttctagtattagtggatatgactacttttcactttaggttaatttattttaaaaaactctctaaagataggattaaaaactgttaagt

SEQ ID NO: 385651 - DNA, 576 bp, Homo sapiens
ctgcaaatgcatatatccaactatattttggttatcaccacttaaatgtttaaattaaggatcttagacagaacttcacctgtcttcacagaactgcttttcctccgcatttcttacctcataatagcatcatgtgctagttgctcaaaccagacaccagctaatttccttctttcctgtcctgcccactaataaatcaccacatcttacaaattttatttctgcggtgtctaaaatatatctccctccctttccttaacttctattcactgccaaacccagggctgtatcccaytttgcctgaaatactccaaacttttgatgattgctttcctgtcaagcccattctctaaccaagttgatctttctatatgaaaatggaaacaatcactactcagtttaaaactgtgtgcattttctggtgacttcgggatatagtacttaatcagggaaataaaggcccaccaaaatcctccacacctgtccaatttcagcttagcactttcaacccttctccaaatttcattaacattctctcttgctttcgtagatatgtacactctcggatataaacct

SEQ ID NO: 385652 - DNA, 576 bp, Homo sapiens
ctgcaaatgcatatatccaactatattttggttatcaccacttaaatgtttaaattaaggatcttagacagaacttcacctgtcttcacagaactgcttttcctccgcatttcttacctcataatagcatcatgtgctagttgctcaaaccagacaccagctaatttccttctttcctgtcctgcccactaataaatcaccacatcttacaaattttatttctgcggtgtctaaaatatatctccctccctttccttaacttctattcactgccaaacccagggctgtatcccattttgcctgaaatactccaaacttttgatgattgctttcctgtcaagcccattctctarccaagttgatctttctatatgaaaatggaaacaatcactactcagtttaaaactgtgtgcattttctggtgacttcgggatatagtacttaatcagggaaataaaggcccaccaaaatcctccacacctgtccaatttcagcttagcactttcaacccttctccaaatttcattaacattctctcttgctttcgtagatatgtacactctcggatataaacct

SEQ ID NO: 385653 - DNA, 576 bp, Homo sapiens
ctgcaaatgcatatatccaactatattttggttatcaccacttaaatgtttaaattaaggatcttagacagaacttcacctgtcttcacagaactgcttttcctccgcatttcttacctcataatagcatcatgtgctagttgctcaaaccagacaccagctaatttccttctttcctgtcctgcccactaataaatcaccacatcttacaaattttatttctgcggtgtctaaaatatatctccctccctttccttaacttctattcactgccaaacccagggctgtatcccattttgcctgaaatactccaaacttttgatgattgctttcctgtcaagcccattctctaaccaagttgatctttctatatgaaaatggaaacaatcactactcagtttaaaactgtgtgcattttctggtgacttcrggatatagtacttaatcagggaaataaaggcccaccaaaatcctccacacctgtccaatttcagcttagcactttcaacccttctccaaatttcattaacattctctcttgctttcgtagatatgtacactctcggatataaacct

SEQ ID NO: 385654 - DNA, 572 bp, Homo sapiens
tgcaacatgatgtaccctctgcttggctctcacttctgacttcacaagcacacactagcacccctccttccctctcactatgcctggttaacttccactcacctttcatgtctcaacttggatgtgacttccctcgcgagaaatctttcactcaatagaggcctctcctgtgtgctaacaagcacccagtaatgtctcctttcatagaatttacgttaagtaattgtggcttcttgtaaatgagcgtcttccaaccagtatgtcaactcagtgagggaaggtacaatgtctcattttttcactgttgggtttctggtttttagcacaattatggatactacagacatgttaacagacttaacattttttttcaataaatggaagaattgatatacctccctaataaagatgtatatgaaaactcgcaaaagagagttccaaagtcttcacttcttactaagaaaacaaacaaaaagaagccaaaggcttcaaattatattatcctacaaagctctacatgatctgatcctcccattctttacytattttttattattttcctatgattattt

SEQ ID NO: 385655 - DNA, 614 bp, Homo sapiens
cttttacgattttttcctggcagcatgtactggtttcatactggttttaaaattagaatttagcaacttcttttttaaaatgccataaacatataaactgagtagaaaatgagaacaaagccaaaatattagtgattcaactcgtttttttcagtgtttagaagggttgcttggtatcatcatatcctcagacttttctagttatctaattttccatctgaataaatgctttttaattgctatattggaaccacacactgccaaatctttcacttctgattcctaccacatccacactcttcttcttcctaaaagagacctgaaatgccctgtgcatgatctgttgttcytctcccactaacatggagaccggagtaagaaaaacacaattctgaaaaagtataaaagagtaagaaacattcattacagggatttttttgtaaacttgtttaaacgaagttcttactccaaggtcctcaaattaaatgaagtaaaagagtcatgttaatttgcctaatgaatgagtactgagagttaaatgctaagtaaaaaatataaataatcttagcaacttgaatggccactaagttgaaactatacaattactttttttt

SEQ ID NO: 385656 - DNA, 614 bp, Homo sapiens
cttttacgattttttcctggcagcatgtactggtttcatactggttttaaaattagaatttagcaacttcttttttaaaatgccataaacatataaactgagtagaaaatgagaacaaagccaaaatattagtgattcaactcgtttttttcagtgtttagaagggttgcttggtatcatcatatcctcagacttttctagttatctaattttccatctgaataaatgctttttaattgctatattggaaccacacactgccaaatctttcacttctgattcctaccacatccacactcttcttcttcctaaaagagacctgaaatgccctgtgcatgatctgttgttcctctcccactaacatggagaccggagtaagaaaaacacaattctgaaaaagtataaaagagtaagaarcattcattacagggatttttttgtaaacttgtttaaacgaagttcttactccaaggtcctcaaattaaatgaagtaaaagagtcatgttaatttgcctaatgaatgagtactgagagttaaatgctaagtaaaaaatataaataatcttagcaacttgaatggccactaagttgaaactatacaattactttttttt

SEQ ID NO: 385657 - DNA, 573 bp, Homo sapiens
aatggcagtcaaaataccatcactagtttataactattctgagattctactaagtgttcactatataggtctcttacmctggaggtcaggaggttcctgaggacatgattctgatgcaggatttttctcactttgcaagcgggtaacctctggccagcaacgcccccacccaggccttgcttgggtatgctatctgctacaggaggtggtccacccattcagcctgcctgggccacacctggcttgtgcaccagttcaggccacacctgggctgggcatgctccagctcacctttattatagctcgtatccacatttgacggtttccaagtccttgtcccacatccgggaagaatggggatatgctgacaattgaagggtgaggagggcgaagaattttattgagcgacgaaacagctccttgtggagaggggaagcaggggtggttcccccagctgaagtcaggtgatttctctcccagtgtggctgagtccggggctttgatgggcttagaatagtgaaatgcatgctgattcatttttgtgtatgcgaaaaaggttaaaacaaaggcacc

SEQ ID NO: 385658 - DNA, 573 bp, Homo sapiens
aatggcagtcaaaataccatcactagtttataactattctgagattctactaagtgttcactatataggtctcttacacyggaggtcaggaggttcctgaggacatgattctgatgcaggatttttctcactttgcaagcgggtaacctctggccagcaacgcccccacccaggccttgcttgggtatgctatctgctacaggaggtggtccacccattcagcctgcctgggccacacctggcttgtgcaccagttcaggccacacctgggctgggcatgctccagctcacctttattatagctcgtatccacatttgacggtttccaagtccttgtcccacatccgggaagaatggggatatgctgacaattgaagggtgaggagggcgaagaattttattgagcgacgaaacagctccttgtggagaggggaagcaggggtggttcccccagctgaagtcaggtgatttctctcccagtgtggctgagtccggggctttgatgggcttagaatagtgaaatgcatgctgattcatttttgtgtatgcgaaaaaggttaaaacaaaggcacc

SEQ ID NO: 385659 - DNA, 550 bp, Homo sapiens
tttgtatgatctctgtatacttggcagagtctatatcaaaatttagatttctgtgctctaatcccttgtactgaagaaaaatatgaaattccaattgcagtgctgtattatttatctaaaagtgcgatccatgggccagctgcattaaaataatgcagaatatgtcataaaaatttagatttctggaatctactcatgacttattgaatctctagtggtagattacaagaatcaacatttctacctttgctggattatttttcagtatacataagtctgagaaatcttggcttagaaatgcttactatagactatacataagatttttccactaggtaaataaattcacaattctaatttttatttttttgcaataatttcaaggtacaacaaaaaatgattgaattgctttttatttccataagaaactayacaaatatcttgaagattcaagagaacattgtaccaatgaataaaaactacattatggatcataccatgtggaaaatatgctttatgtttttgtctcatagtgtcccttaagtgttca

SEQ ID NO: 385660 - DNA, 579 bp, Homo sapiens
ttattttgttgttacatatcttagaggaaaagctttcacttttccttgttcagtgtgatgttagctgtgggtttgtcatatacagactttattgtgttcaggtatgttccttccaatacaaatttgttgggagtttttgtcatgaagaaatgttgaattttattgaatgcttttttggcatctattgaaatgttcacatattttgtccttgattctgttaatgtaatatgtatgtttattaatttgcatatgttgaaccatccttgcatccctgagagtatcccacttgattatggtgaataatctttttaatgtgttgttgaatttggtttgttagtgtttttctgaggatttttgaagcagacacaaataaaaggaaagctattccatgttcatggattggaagatgtattagtccattttcatgctgctgatagacatacctgaggctgggtaatttatacaggagaaagggtttaatgcgcttacagttgcttgcagctggggaggcctcacaatcatggtgaaggcaargaggaggaagtcacatcatatatggatgacagcaggcaaagagag

SEQ ID NO: 385661 - DNA, 594 bp, Homo sapiens
atactacaaggctataataacaaaaataacatggtactggataaaaaagatgcatagacaaatgaaacctgaatggagaacccagaaataaatctatgcatttacagtcaacagatatttaacaaaggcatgaagtacagatattgggggggcggggactttctttaataaatagtgctaggaaaactggatatccmcatgcagaagaatgagactagattcctatctctcactatatacaaaaatgaattgtaaatgacttaaagacttagatgtaagatcccaaactattaacctactatgggaaaacacaggggatatggttcatgaaattggactcgtcaaaagattttttaaaataagacctcaaaagcataggaaacagaagcaaaaattagtaatattggattacgtcaaactaaaaagctcttgcaaagcaaaggaaacaatcgatagagtgaagagacaacttacaggttaggagaaagtatttgcaaactactcatccagaaggagattcatatccagaatatataagaaactcaaacaactcagtagcaaaaaatgataataatcgatttttaaaatgggcaa

SEQ ID NO: 385662 - DNA, 594 bp, Homo sapiens
atactacaaggctataataacaaaaataacatggtactggataaaaaagatgcatagacaaatgaaacctgaatggagaacccagaaataaatctatgcatttacagtcaacagatatttaacaaaggcatgaagtacagatattgggggggcggggactttctttaataaatagtgctaggaaaactggatatccacatgcagaagaatgagactagattcctatctctcactatatacaaaaatgaattgtaaatgacttaaagacttagatgtaagatcccaaactattaacctactatgggaaaacacaggggatatggttcatgaaattggactcgtcaaaagattttttaaaataagacctcaaaagcataggaaacagaagcaaaaattagtaatattggattacgtcaaactaaaaagctcttgcaaagcaaaggaaacaatcgatagagtgaagagacaacttacakgttaggagaaagtatttgcaaactactcatccagaaggagattcatatccagaatatataagaaactcaaacaactcagtagcaaaaaatgataataatcgatttttaaaatgggcaa

SEQ ID NO: 385663 - DNA, 572 bp, Homo sapiens
aaagcattctaggctggaagttttattctttcagccctttaaatatgttttttccatcttattctggtttggatagtttatgaagaaaagtctaccttaaatgttatcgttattccttcataccaaaggttgatgatatttttctgtaaaggtcaagatagtaaagattttcaggttttgcaggggtcacataatgacactgttacatattytttttttttaaagaaatataaaaatatttttagcttttgagtactgtaagaacaggacacaggccaaatttggcacatggaccacagtttgtttacccccacctgaaggttttttttttttttttttctcttgctgcttttaaggatttctctcattctctttctctctatatatttaatttaactataatgtgccttggtgtagttacctgcatgtttcatctgtgtgattgtcatttaacttcttgggtccatgggcttaaattcaccaaatttggaaaaatcttggctataatttctttaatttttttttcttaccataactccttccagctgttaatcttgtctcataagtcattt

SEQ ID NO: 385664 - DNA, 572 bp, Homo sapiens
aaagcattctaggctggaagttttattctttcagccctttaaatatgttttttccatcttattctggtttggatagtttatgaagaaaagtctaccttaaatgttatcgttattccttcataccaaaggttgatgatatttttctgtaaaggtcaagatagtaaagattttcaggttttgcaggggtcacataatgacactgttacatatttttyttttttaaagaaatataaaaatatttttagcttttgagtactgtaagaacaggacacaggccaaatttggcacatggaccacagtttgtttacccccacctgaaggttttttttttttttttttctcttgctgcttttaaggatttctctcattctctttctctctatatatttaatttaactataatgtgccttggtgtagttacctgcatgtttcatctgtgtgattgtcatttaacttcttgggtccatgggcttaaattcaccaaatttggaaaaatcttggctataatttctttaatttttttttcttaccataactccttccagctgttaatcttgtctcataagtcattt

SEQ ID NO: 385665 - DNA, 572 bp, Homo sapiens
aaagcattctaggctggaagttttattctttcagccctttaaatatgttttttccatcttattctggtttggatagtttatgaagaaaagtctaccttaaatgttatcgttattccttcataccaaaggttgatgatatttttctgtaaaggtcaagatagtaaagattttcaggttttgcaggggtcacataatgacactgttacatattttttttttttaaagaaatataaaaatattyttagcttttgagtactgtaagaacaggacacaggccaaatttggcacatggaccacagtttgtttacccccacctgaaggttttttttttttttttttctcttgctgcttttaaggatttctctcattctctttctctctatatatttaatttaactataatgtgccttggtgtagttacctgcatgtttcatctgtgtgattgtcatttaacttcttgggtccatgggcttaaattcaccaaatttggaaaaatcttggctataatttctttaatttttttttcttaccataactccttccagctgttaatcttgtctcataagtcattt

SEQ ID NO: 385666 - DNA, 572 bp, Homo sapiens
aaagcattctaggctggaagttttattctttcagccctttaaatatgttttttccatcttattctggtttggatagtttatgaagaaaagtctaccttaaatgttatcgttattccttcataccaaaggttgatgatatttttctgtaaaggtcaagatagtaaagattttcaggttttgcaggggtcacataatgacactgttacatattttttttttttaaagaaatataaaaatatttttagcttttgagtactgtaagaacaggacacaggccaaatttggcacatggaccacagtttgtttacccccacctgaagkttttttttttttttttttctcttgctgcttttaaggatttctctcattctctttctctctatatatttaatttaactataatgtgccttggtgtagttacctgcatgtttcatctgtgtgattgtcatttaacttcttgggtccatgggcttaaattcaccaaatttggaaaaatcttggctataatttctttaatttttttttcttaccataactccttccagctgttaatcttgtctcataagtcattt

SEQ ID NO: 385667 - DNA, 548 bp, Homo sapiens
ttataacacataacaagacaagtggacaatatggtttaaataaaaggtattaatgtttatagtatgtggttcttgtaaatatttgctctattggtacatatttctaactaacatwcagtttaccattatgtattagattaatttgttaatatgtacatcttcaataatagattttgatatcaacagtaagaaatatgttttaattattgtcataactaaaacagaactcagagtaaagttgctactaaggagtgcttgctgaataaatgagtaactaatttaatgggaaaatagtatttgctgacataaatgattgttgtcacagatttaactatctgtgaaactttggcagaggttttatttcttatctcttagtataattcactttttaatactagtaggtctgtatctcctttagaaatgactcagttaaaagtaggagagtaaatggaaatagggataagcagtgtgctaactaaagtaagtgtgagcttaaaatccgaatactcttggtaaaaaatgaaggtattccacaatatccccactgt

SEQ ID NO: 385668 - DNA, 449 bp, Homo sapiens
tggtaaatattagatgtaaattaatgaaataacaacagaaaacaatagaaaaataaatgaaactgaaagtcagctgtttaaaaatatttaaaatatagacaaatgtttagatagattgacaaagataataagacaaaaattcccaaaattaggaacgaaaaagggaacaccgccctgactataagtaactaaaagtattttaaggtaatattgagaataaatttatrtctacatattataatacttatataaactgaagaatgcctagaataacaaaacaattaccaaaactgatttaaaaagtgataataggtcaagcgtgttggctcatgcctataatcccaacattttgggaggccaaggagcgctgatcacttgaagccaggaattcaaaccaccctggccaatatggagaaaccccattggcctactaaaaatacaaaaattag

SEQ ID NO: 385669 - DNA, 561 bp, Homo sapiens
agtatagttagctatactctttagtrtaaggattatagctaactatacttagcttatattgaggattatagctaaatatacttagattatagttaagaatgcagacttaagagagaagtgaaggaaagggaaaatgaggcaggaaagaaaggagaggtgatttgagggagtatgttactcagataccacagctttgacttgattgctcagtctcgtggtatttcttttgttaaaagaaaacttcagacaaattaaatttgatgcagtttaattgggccaaaagaaacaattcatgaatcgggcagtctccagaatcacagcagattcagagagactccaggggtgcctcatggtcagaacaaatttatagacaaaaaaagtaaattgacatacagcgtcggaagtgaggtacagaaacagttggattggttacaggtgggcgtttgccttgtttgaacacagtttgaaccctctgcagtctatcagtggttaaagtatggccactgggattggccaacattcagctattgttacaggcacatactcctaagttaggttttt

SEQ ID NO: 385670 - DNA, 561 bp, Homo sapiens
agtatagttagctatactctttagtataaggattatagctaactatacttagcttatattgaggattatagctaaatatacttagattatagttaagaatgcagacttaagagagaagtgaaggaaagggaaaatgaggcaggaaagaaaggagaggtgatttgagggagtatgttactcagataccacagctttgacttgattgctcagtctcgtggtatttcttttgttaaaagaaaacttcagacaaattaaatttgatgcagtttaattgggccaaaagaaacaattcatgaatcgggcagtctccagaatcacagcagattcagagagactccaggggtgcctcatggtcagaacaaatttatagacaaaaaaagtaaattgayatacagcgtcggaagtgaggtacagaaacagttggattggttacaggtgggcgtttgccttgtttgaacacagtttgaaccctctgcagtctatcagtggttaaagtatggccactgggattggccaacattcagctattgttacaggcacatactcctaagttaggttttt

SEQ ID NO: 385671 - DNA, 526 bp, Homo sapiens
gtaatgctggcttcaaagaatgagttacgagaaattccattctcttcaattttctagaagtatttgtatagaatgagtatcatttcttctttggtggaactcaccagggaagctctatggaactggagttgtgtttttttttttgttgtttgtttgtttttgtgggaaggttttttgtaatcataaattcaatgtattcattagatcccaggttctttggatcacccacctgtttctgagggagctgtacagttatgcactatgatgctctatgacaaaaatggatgaaggaacagaggaatggacaatggctcactgtttggagactgatgtttatgtctgcgccaaaatgatgaagagtcctaggatgggaaaagaaacctcctggctgcaggtgttctcagaactagagaagctggtgccccakattgccacccctttccttatgaaccctgcacccaccagccaacaaggccacggtggccttaatcaaaggggacactaatctgttgcccaggccatggag

SEQ ID NO: 385672 - DNA, 538 bp, Homo sapiens
  misc_feature (1)...(538): n = A,T,C or G
tcaagagcccacctggacactggcctgaggtgcacaatgatcacaattgtcattgccggaaaaaaacaacttcataatgggtttctggaayggttaccgccagatttttattaaagaaatcaaagccaaaagtttccctttaaaacatgcatggtgaagggaaaattttaaaaacagctgcctactgagctatcacttcaatataaagcaaatggtgcttcaggcacaaaacaccaggtctattttgcacctcctccccaggagagctggaagagtctcaacaaggtgctgtccactactggacagctctgctctgcgtgtgtgccccagccactgcccacccaactgcattggaccaaagggcctctgggctctgacattctcattaaaaaacaaaagccacagacctggagccagtgtttgaaataggaaaccaaaataatcattggtcgaggttgtaggatctccagctggacttgcagatgctttcctgtcttgcaacacacacccctagtttggcnnnnnnnnnnnnnnnnnn

SEQ ID NO: 385673 - DNA, 538 bp, Homo sapiens
  misc_feature (1)...(538): n = A,T,C or G
tcaagagcccacctggacactggcctgaggtgcacaatgatcacaattgtcattgccggaaaaaaacaacttcataatgggtttctggaatggttaccgccagatttttattaaagaaatcaaagccaaaagtttccctttaaaacatgcatggtgaagggaaaattttaaaaacagctgcctactgagctatcacttcaatataaagcaaatggtgcttcaggcacaaaacrccaggtctattttgcacctcctccccaggagagctggaagagtctcaacaaggtgctgtccactactggacagctctgctctgcgtgtgtgccccagccactgcccacccaactgcattggaccaaagggcctctgggctctgacattctcattaaaaaacaaaagccacagacctggagccagtgtttgaaataggaaaccaaaataatcattggtcgaggttgtaggatctccagctggacttgcagatgctttcctgtcttgcaacacacacccctagtttggcnnnnnnnnnnnnnnnnnn

SEQ ID NO: 385674 - DNA, 562 bp, Homo sapiens
cctctaaatattccagggacatttttctctattctgagatcactaagagtttctttaaaaaaaaagaaaagaaaagaacttccagtcccagctaccgtctgactatagatgcatgaatgactccaaaccagaccagctacacggtccaactgagattatccaacacaaaaactatgataaataataaatkattgttgttttaagaccaaaaatgggaattggttttgaaaatgtttgaaatatcatagaagttgtgaaatttcacagtgttgaactcagctccttgcattcctaggctaacctctaaatgcatcaggaactaaattttgtttaatacatgcaggaatacaacttgtgaatatttgatctagggttaatccagcttgggactttaatttttatttatggacggactctttcacttatctatttccagtttagcacttgtatcagttatacaaccatttcatggttcctgtgtataccacattgttttcaatgagttgagtcaaattggattgtataagcataaattgtgtcaaatgttagggaattacaaact

SEQ ID NO: 385675 - DNA, 572 bp, Homo sapiens
ttggcactgactataaacttatctaattaaaatagaagctctattaaaagagtcttcccataagctgaatattacaaagtgcaaatacaggctttcacaatttaatagtattatgcaccatttaattctcacttkaatttgtttttatatacatttgaggttctctttaaaagcacttttcaaaaattgcaattcactgaaattttgaataattgagtaacatatttgatgtgtactttctttgaagagttctgctgtaggcaatatcctacagttgtattaaatttagattgttaatgagttctcttaattttccttttaattttgaccaaaatgcaaccaaattttagagaacttaatttaattaaaaaattaaatactatctaataatatattggtttgaaagccaggaagagaaagtctctagcatggaccagatgctctcttttctaagaagggaaggacagatcgggttttatgcctcacagagttcttattacacaacagagtcatatgtattcagcaggttttggagaaaagctataaatatgagggtagcaaagcacatgtgc

SEQ ID NO: 385676 - DNA, 572 bp, Homo sapiens
ttggcactgactataaacttatctaattaaaatagaagctctattaaaagagtcttcccataagctgaatattacaaagtgcaaatacaggctttcacaatttaatagtattatgcaccatttaattctcacttgaatttgtttttatatacatttgaggttctctttaraagcacttttcaaaaattgcaattcactgaaattttgaataattgagtaacatatttgatgtgtactttctttgaagagttctgctgtaggcaatatcctacagttgtattaaatttagattgttaatgagttctcttaattttccttttaattttgaccaaaatgcaaccaaattttagagaacttaatttaattaaaaaattaaatactatctaataatatattggtttgaaagccaggaagagaaagtctctagcatggaccagatgctctcttttctaagaagggaaggacagatcgggttttatgcctcacagagttcttattacacaacagagtcatatgtattcagcaggttttggagaaaagctataaatatgagggtagcaaagcacatgtgc

SEQ ID NO: 385677 - DNA, 595 bp, Homo sapiens
  misc_feature (1)...(595): n = A,T,C or G
atttctaggtgtgaatttatttttattttgttcctcagaacttgtcatgcttcctgaatccaaggacattatttcttaacattcacatcttttccatctctttatttctctagactgccttataaaatggttttcaacatctatctttcagtggatatagtcttcctctgggtctaatatatcattttatgtttttcttttcaatattttaaaaaacatttctagaatgwgtatactgttacttcccaatctgcttgtccttttaaagattgtttttcttttcttataaatggtttaattatttaactaatttatataattattataaacataatcattttatattctactcacatatacattattgagatccaattacctctactatttactttgtctgataaatagacttcaagaaatgaatattgattatttttgtgtcttataatgtttagttacaagatcatgtttgattgggattattttcctttatttctccctatgaaaatcccttgtgtttgggttgtaagtgtatctttttagcatgattttgtatttgattcannnnnnnnnnnnnnnnnnnnnnnnnnnnnnn

SEQ ID NO: 385678 - DNA, 595 bp, Homo sapiens
  misc_feature (1)...(595): n = A,T,C or G
atttctaggtgtgaatttatttttattttgttcctcagaacttgtcatgcttcctgaatccaaggacattatttcttaacattcacatcttttccatctctttatttctctagactgccttataaaatggttttcaacatctatctttcagtggatatagtcttcctctgggtctaatatatcattttatgtttttcttttcaatattttaaaaaacatttctagaatgagtatactgttacttcccaatctgcttgtccttttaaagattgtttttcttttcttataaatggtttaattatttaactaatttatataattattataaacataatcattttatattctactcacatatacattattgagatccaattaccyctactatttactttgtctgataaatagacttcaagaaatgaatattgattatttttgtgtcttataatgtttagttacaagatcatgtttgattgggattattttcctttatttctccctatgaaaatcccttgtgtttgggttgtaagtgtatctttttagcatgattttgtatttgattcannnnnnnnnnnnnnnnnnnnnnnnnnnnnnn

SEQ ID NO: 385679 - DNA, 560 bp, Homo sapiens
tttggtcacaagaaggccttctaatccagaggatattaggatctagaaatactaattacaggcatattgcctaacaaccagttgtgactacaggtgggaaaaacggaggtgtactctgcatcatacacatttaggtctgatccctttagtttgrctctattgcatttacaatcataagcctattacaaggaatcatgatccaaaaacctcaagactattccataagagttacatttaaacacatcattgtattataatagtaaggactaattgattgcaagtgactagaagccacttgtaccttaagaaaaatggctgtttattaattaacatgtctgaatagttcagcacagtttgttaaccttaaataatgaaattcagaaagtgtgattaactatagaacttctatagaactatagaaatcatttgaatacaaatcttgaagacagccactgaggtaagacagactccaaatgagtagagtcagtgttccaaagtggtgaagttaaggtttcatttatacaggaagagacagaaaagtttaacagggttgcaccatt

SEQ ID NO: 385680 - DNA, 566 bp, Homo sapiens
actcccaatgtaatggcatctggagatggtctttgggagataattggattaatatgaggtcatgggtgttggccttcatgatgggagaaatgcccttgtaagaagaaactctgaaaagtttctctctctcactgcaaccccctctgtctgccatgtaagacactgtaaaaaggctatctacaagtcaggaagagacttctccagaatcccacyatgctggcatcctgaccccagactttcagccttcaaaactgtgcatgttgtgtaagccacccagtctacagtattttatcatggcaacctgagctcattaatacaggtctgaaagaatagagggatgacaaacatgaaatggagtaaactcagtatgttttgaaaggtgttcattgttagacgggagtaaaaacatgtactctccagacagaggaaatatatcctcatcagtcaggacagagctcaggtaagttttccttctcataagaaaattttaagtactccttatcattacacccgcctttaggtttcatgtcctaacccctggaggaacataactatgccttattcat

SEQ ID NO: 385681 - DNA, 613 bp, Homo sapiens
aggcaacttcttcttcaagaagttttgcagatcagagtagagtccaaaacaatgaaacaagtggttggagaaaaatactatctctgttccaagcattgaggggagtctttttttcagttcaccttgtcattgttttcatttgtcctggaaataataagagtgagaaagataagatcaaatggtgagtctaaatgtccttgattgtggagaacatatggcttttcaatctcacattggatctatccaatttttatttgttaagactacagcatattctagagcaaaagctctaaccgggaatgtagacttggagtgtcctcaccccattatcctagttattctgcttgaggcaacttcaatgtacataagttgggagatgagactcaagcatcytaagatctttacctattctttccactctgtcacaagcaataaaaatttcacaagaaatgtgatttcaacatgggaaagaaaggaagacaatgaaatcttctatatgaattgaaacagaaaaaaaagccttgttttaagaatgtattacatttaaaattgtaaaagttttctatctcaaattacagtgactaaacattttatccacacttatgaattatta

SEQ ID NO: 385682 - DNA, 422 bp, Homo sapiens
  misc_feature (1)...(422): n = A,T,C or G
gtgtgcaaatgtatgtgtatgtgtatatggtttggttttgttggaatgaggttggtgttaatagtaaaattcagaaaactggggcatcaacaggttgattgatattttgagtctctggattttgtccccgctattyaaaggtgacatattttactgcaaattatttcaagtatttataacatggtgaaataatctaaataaaagtattgtaaaaatacattaaaatcacatgcctaatttttgaactttcaaaagcatggctcttgatgtttaacctgtttgctatacctataatgtaaaactaaacttacttatcttttaagaaagaccattagttaatttgatcagaagaatactatcaacaccgggtagcaaaaatttaaagcattntacaaagaccctcacaaaaacattgtgtagtg

SEQ ID NO: 385683 - DNA, 560 bp, Homo sapiens
tttctggttattttgtagatcttttgtttctttcttcctctcttgttgtttacctttgtggtttggtttgtttctatagtgataaactttgattcctttctctttctcatttgtgtatccactgtaaattttttccttgtgggtactctgggtttacaaaaaaatcttatagtaataaaagactactttaagctgataacaattgaactttggtcacatacaaatattctagacttttactctcttccccacaattcgtaattttgttatcttagtttatatcttctcatattgtatattccttaayaatttgttgtagctatggttatcaatgaccactttaacacttaaccttcactctagagatttgaaagattatatactatcattaaagtaatggattattctgaacttgattatgagtttacctctaccactgagttttatacttttatatgattttatagtgattaacatctcttcacttctgtttgacgctcttctacaatactcagtcttccattattcccaactcggcccccactccccaccgcttgctg

SEQ ID NO: 385684 - DNA, 560 bp, Homo sapiens
tttctggttattttgtagatcttttgtttctttcttcctctcttgttgtttacctttgtggtttggtttgtttctatagtgataaactttgattcctttctctttctcatttgtgtatccactgtaaattttttccttgtgggtactctgggtttacaaaaaaatcttatagtaataaaagactactttaagctgataacaattgaactttggtcacatacaaatattctagacttttactctcttccccacaattcgtaattttgttatcttagtttatatcttctcatattgtatattccttaacaatttgttgtagctatggttatcaaygaccactttaacacttaaccttcactctagagatttgaaagattatatactatcattaaagtaatggattattctgaacttgattatgagtttacctctaccactgagttttatacttttatatgattttatagtgattaacatctcttcacttctgtttgacgctcttctacaatactcagtcttccattattcccaactcggcccccactccccaccgcttgctg

SEQ ID NO: 385685 - DNA, 656 bp, Homo sapiens
tgcgttgtgctggattttgaggggtgagagaacaagcatggatatctatcctttgaaagcttctgggaagttgggggtagggacagagaaacattacaatttaaaacctatttataatgatataattataatcactaaaggataagtgctatgaaggaaaggttcaggttacaaagagaaagtaaaactagggaatctaatttaaaatgagatgtctctgaaggcctcttggtaagtgacatttaaactgaagcctgaagtataaagaataattattgtgaagggtgaggagaagtcttgactaaaccaacaaagtgaggagacactaaagcttgggagggcctgaaagtagcctaatgtgactctaggacagtgagcaaaatggagaaaggcatgcatgaaagtgaaaagataggccaggtgcttggtgactcacatctgtaatcccaacactttgtgaggctgagtggggggtgaatcacttaaggtcaggagttcgagaccagcctgatcaacatggtgaaaccccgtaactactaaaaatacaaaaaaattagccgggcatgctggcgggcacctgtaatcccagctactcaggaggytgaggcaggagaatcacttgaaactgggaggtggaagctacagtgagttgagat

SEQ ID NO: 385686 - DNA, 609 bp, Homo sapiens
tagcttatttctcacttgtaagtgagaacatgtggtatttggttttccattcctgagttattttacttagaataatgagctccagttccatctaagtttctgcaaaatacattattttattcttttttatggctgagtagtgtgtgtatgtaaatgtggtgtatatatatctatatatctctmtatatatactaatacaaatacataaaatgtaatgtgtgtatatatatgtgtgtgtatattttatatatatatataactttttaaaaatccactcaatagttgatgggcactaaggttgattcctcatctttgcaactgggacttgtgttgcagtgaacacatgtgagtaggtgtctttttgatataattatttctttttctttgggtagatacccaacagtgggattgctggatcaagtggtagatccacttttagttctttgagaaatcttcatactgttttccatagaggttgtactaatttatgttcccaccaaaagtgtataaatgtaccattttcaccacatctgtgccaacgtctattggtttttgactttttactaatagccaatctggctggggtgaggtggtatctcattgtggttt

SEQ ID NO: 385687 - DNA, 609 bp, Homo sapiens
tagcttatttctcacttgtaagtgagaacatgtggtatttggttttccattcctgagttattttacttagaataatgagctccagttccatctaagtttctgcaaaatacattattttattcttttttatggctgagtagtgtgtgtatgtaaatgtggtgtatatatatctatatatctctctatatatactaatacaaatacataaaatgtaatgtgtgtatatatatgtgtgtgtatattttatatatatatayaactttttaaaaatccactcaatagttgatgggcactaaggttgattcctcatctttgcaactgggacttgtgttgcagtgaacacatgtgagtaggtgtctttttgatataattatttctttttctttgggtagatacccaacagtgggattgctggatcaagtggtagatccacttttagttctttgagaaatcttcatactgttttccatagaggttgtactaatttatgttcccaccaaaagtgtataaatgtaccattttcaccacatctgtgccaacgtctattggtttttgactttttactaatagccaatctggctggggtgaggtggtatctcattgtggttt

SEQ ID NO: 385688 - DNA, 564 bp, Homo sapiens
tgaattaattatatcaaacattaaataataagaatttcaacgtattttcaaagtaaaagtatcaaatctgcatattaacaccattgacacaatttagcaccaatctttgttgtatttgctatcattattttcccttcaattaaaacgttttcctattttatgattaattgatttagatttatctactataagaacattaattttagttatatgatcttatatagagctcaagttacatgaatgtcttataccagaaaggataaaaattgatcttttacaaattgyatcttttgcaattggtgtgtttctaatttctttatacataggcttatttgtttttaataaacctcaaaaatatcaatataaacgttagagccaacaccaaaactatgacaacagagtatgtttttcaaagaatgaatgacttttgagtaatagaatagaagcaacagaatagaatcaacaattttgaggtacctagaactgcattagatattttaatgtatcatcttatttccatgattctcaaagtgtggctactagtgcacttacataatcagcagg

SEQ ID NO: 385689 - DNA, 480 bp, Homo sapiens
caggctatgctatagtacaagccactagcccgcctcttagaacctctcatttcctttccatcstggaaatctatcctcaaggaaataacttctcagtgttccatctgctattctactactcctcagggattattcaggccccctcccttccctacacatcaagctcaaggatttgccccacccaggactggcaaattagctttactcaacatgccctgagtcacataactaaaatacctcttagtctaggtagatactttcactggataggtagaggcctttcctacagggtctgagaaggccaccacagtcatttctcccgttctgtcagacataattcctcagtttagccttcccacctcaatacagtctgataacagatgagcctttattagtcaaatcagccaagcagtttttcaggctcttagtattcagtgaaacctttatatcccttacggtcccctgtcttcaagaaaagta

SEQ ID NO: 385690 - DNA, 480 bp, Homo sapiens
caggctatgctatagtacaagccactagcccgcctcttagaacctctcatttcctttccatcctggaaatctatcctcaaggaaataacttctcagtgttccatctgctattctactactcctcagggattattcaggccccctcccttccctacacatcaagctcaaggatttgccccacccaggactggcaaattagctttactcaacatgccctgagtcacataactaaaatacctcttagtctaggtagatactttcactggataggtagaggcctttcctacagggtctgagaaggccaccacagtcatttctyccgttctgtcagacataattcctcagtttagccttcccacctcaatacagtctgataacagatgagcctttattagtcaaatcagccaagcagtttttcaggctcttagtattcagtgaaacctttatatcccttacggtcccctgtcttcaagaaaagta

SEQ ID NO: 385691 - DNA, 480 bp, Homo sapiens
caggctatgctatagtacaagccactagcccgcctcttagaacctctcatttcctttccatcctggaaatctatcctcaaggaaataacttctcagtgttccatctgctattctactactcctcagggattattcaggccccctcccttccctacacatcaagctcaaggatttgccccacccaggactggcaaattagctttactcaacatgccctgagtcacataactaaaatacctcttagtctaggtagatactttcactggataggtagaggcctttcctacagggtctgagaaggccaccacagtcatttctcccsttctgtcagacataattcctcagtttagccttcccacctcaatacagtctgataacagatgagcctttattagtcaaatcagccaagcagtttttcaggctcttagtattcagtgaaacctttatatcccttacggtcccctgtcttcaagaaaagta

SEQ ID NO: 385692 - DNA, 517 bp, Homo sapiens
tgcccccaaaaaacttgtcatccctactatcttctgtctagtcatactcctattcaccgttctcaactaytcttacatgccctgctcttgtttacactgctggtttacactgtttttccaagccatcacagctgatatctcctggtgctatccccaaactgccactcttaactcttgaagtaaataaataatctttgctggcaggactatgctgaacctccttaggcactctctaatcagatatcctgagttatctcaattcttagaccttttatacctgtttttctccttctgttattccatttagtttctcaattcatccaaaaccgtatccaggccatcaccaatcattctatacgacaaatgtttcttctaacatccccacaatatcaccccttaccacaagacctcccttcagcttaatctctcccactctaggttcccacaccgccccaatcctgcttgaagcagccctgagaaacatcgcccattctctctccataccactccccaaaaa

SEQ ID NO: 385693 - DNA, 660 bp, Homo sapiens
tatctcaattcttagaccttttatacctgtttttctccttctgttattccatttagtttctcaattcatccaaaaccgtatccaggccatcaccaatcattctatacgacaaatgtttcttctaacatccccacaatatcaccccttaccacaagacctcccttcagcttaatctytcccactctaggttcccacaccgccccaatcctgcttgaagcagccctgagaaacatcgcccattctctctccataccactccccaaaaattttcgccgccccaacacttcaacactattttgttttatttttcttattaatgtaagaaggcaggaatgtcaggcctctgagcccaagccaagccatcgcatcccctgtgacttgcatgtatatgcccagatggcctgaagtaactgaagaatcacaaaagaagtgaatatgccctgcctcatcttaactgatgaccttccaccacaaaagaagtgtaaatggccagttcttgccttaagtgatgacattaccttgtgaaagtccttttcctagctcatcctggctcaaaaagcacccccactgagcaccttgagacccctactcctgcccgccagagaacaaaccccctttgactgtaattttcctttacctacgcaaatcctataaaacggc

SEQ ID NO: 385694 - DNA, 660 bp, Homo sapiens
tatctcaattcttagaccttttatacctgtttttctccttctgttattccatttagtttctcaattcatccaaaaccgtatccaggccatcaccaatcattctatacgacaaatgtttcttctaacatccccacaatatcaccccttaccacaagacctcccttcagcttaatctctcccactctaggttcccacaccgccccaatcctgcttgaagcagccctgagaaacatcgcccattctctctccataccacyccccaaaaattttcgccgccccaacacttcaacactattttgttttatttttcttattaatgtaagaaggcaggaatgtcaggcctctgagcccaagccaagccatcgcatcccctgtgacttgcatgtatatgcccagatggcctgaagtaactgaagaatcacaaaagaagtgaatatgccctgcctcatcttaactgatgaccttccaccacaaaagaagtgtaaatggccagttcttgccttaagtgatgacattaccttgtgaaagtccttttcctagctcatcctggctcaaaaagcacccccactgagcaccttgagacccctactcctgcccgccagagaacaaaccccctttgactgtaattttcctttacctacgcaaatcctataaaacggc

SEQ ID NO: 385695 - DNA, 660 bp, Homo sapiens
tatctcaattcttagaccttttatacctgtttttctccttctgttattccatttagtttctcaattcatccaaaaccgtatccaggccatcaccaatcattctatacgacaaatgtttcttctaacatccccacaatatcaccccttaccacaagacctcccttcagcttaatctctcccactctaggttcccacaccgccccaatcctgcttgaagcagccctgagaaacatcgcccattctctctccataccactccccaaaaattttcgccgccccaacacttcaacactattttgttttatttttcttattaatgtaagaaggcaggaatgtcaggcctctgagcccaagccaagccatcgcatcccctgtgacttgcatgtatatgcccagatggcctgaagtaactgaagaatcacaaaagaagtgaatatgccctgcctcaycttaactgatgaccttccaccacaaaagaagtgtaaatggccagttcttgccttaagtgatgacattaccttgtgaaagtccttttcctagctcatcctggctcaaaaagcacccccactgagcaccttgagacccctactcctgcccgccagagaacaaaccccctttgactgtaattttcctttacctacgcaaatcctataaaacggc

SEQ ID NO: 385696 - DNA, 564 bp, Homo sapiens
tgaattaattatatcaaacattaaataataagaatttcaacgtattttcaaagtaaaagtatcaaatctgcatattaacaccattgacacaatttagcaccaatctttgttgtatttgctatcattattttcccttcaattaaaacgttttcctattttatgattaattgatttagatttatctactataagaacattaattttagttatatgatcttatatagagctcaagttacatgaatgtcttataccagaaaggataaaaattgatcttttacaaattgtatcttttgcaattggtgtgtttctaatttctttatacataggcttatttgtttttaataaacctcaaaaatatcaatataaacgttagagccaacaccaaaactatgacaacagagtatgtttttcaaagaatgaatgacttttgagtaatagaatagaagcaacagaatagaatcaacaattwtgaggtacctagaactgcattagatattttaatgtatcatcttatttccatgattctcaaagtgtggctactagtgcacttacataatcagcagg

SEQ ID NO: 385697 - DNA, 660 bp, Homo sapiens
tatctcaattcttagaccttttatacctgtttttctccttctgttattccatttagtttctcaattcatccaaaaccgtatccaggccatcaccaatcattctatacgacaaatgtttcttctaacatccccacaatatcaccccttaccacaagacctcccttcagcttaatctctcccactctaggttcccacaccgccccaatcctgcttgaagcagccctgagaaacatcgcccattctctctccataccactccccaaaaattttcgccgccccaacacttcaacactattttgttttatttttcttattaatgtaagaaggcaggaatgtcaggcctctgagcccaagccaagccatcgcatcccctgtgacttgcatgtatatgcccagatggcctgaagtaactgaagaatcacaaaagaagtgaatatgccctgcctcatcttaactgatgaccttccaccacaaaagaagtgtaaatggccagttcttgccttaagtgatgacattaccttgtgaaagtccttttcctagctcatcctggctsaaaaagcacccccactgagcaccttgagacccctactcctgcccgccagagaacaaaccccctttgactgtaattttcctttacctacgcaaatcctataaaacggc

SEQ ID NO: 385698 - DNA, 594 bp, Homo sapiens
agctgaatgttcatcccccagacaatggggaaaatgtctccagggcatgtcagaggttttcacggcagcccctcccatcacagacccagaggcctaggagaaaatggttttgtgggcagggcccagagtccccatgttgtgtgtagtctagggacttgtgccctgcatcccagccactccagtcgtgactaaaaggggccaaggtacagctcagtctgttgcttcagagggtgcaatcctcaagcctttgcagctttcatgtggtgttgagccggcaggtgcacagaagtcaagaattggggtttgggaacctctgcctagatttcagaagttgtatgaaaacacctggatgcctagaaaaaagtttgctgcaggggtggggtcctcatggagaacctctgctagggcagcgtggaaggaaaatgtgggctcagagcccctacacagagtccttactggggcaycacctagtggagctgtgagaagagggccaccatccttcagactccagaatggtagatccactgacagtttgcaccattcatctggaaaaaccacaggcactcaatgccaggctgtgaaagcagccaggat

SEQ ID NO: 385699 - DNA, 594 bp, Homo sapiens
agctgaatgttcatcccccagacaatggggaaaatgtctccagggcatgtcagaggttttcacggcagcccctcccatcacagacccagaggcctaggagaaaatggttttgtgggcagggcccagagtccccatgttgtgtgtagtctagggacttgtgccctgcatcccagccactccagtcgtgactaaaaggggccaaggtacagctcagtctgttgcttcagagggtgcaatcctcaagcctttgcagctttcatgtggtgttgagccggcaggtgcacagaagtcaagaattggggtttgggaacctctgcctagatttcagaagttgtatgaaaacacctggatgcctagaaaaaagtttgctgcaggggtggggtcctcatggagaacctctgctagggcagcgtggaaggaaaatgtgggctcagagcccctacacagagtccttactggggcatcacctagtggagctgtgagaagagggccaccatccttcagactccagaatggtagatccactgacagwttgcaccattcatctggaaaaaccacaggcactcaatgccaggctgtgaaagcagccaggat

SEQ ID NO: 385700 - DNA, 523 bp, Homo sapiens
taggttgaatgattcttagaacttgaaaaaagttgtgttctagtgggctctgttgcaaactctttagagttattccaagttttataaagttattatacttctatttgttgcttaaamattttttgttttcatgttccttgtgatttctgtaaaactgtctgtcctccaatgatgtaagaataatcaaataattttaaaagttaattttttaactgatataaactaaaaatacaatttttagtgtgcttaggaaaaattatgtaatagtattagatagtatctgttaggcctgtttcctttaaatcttgtctttttggtcattgattcatgattattttaagttttcaacaaatattgacacacagtcctattctaacacattcctgtttgaaattgatgtagtcatcgtcgtcatcttggaaatagacatttgcagcacacctgttaagactgattcccaaagactgttgagcatcataaaagtagttgttctgtgttgctataaattgtaagctagaagaca

SEQ ID NO: 385701 - DNA, 615 bp, Homo sapiens
tatttaatttttctcagcaatgttttaacattttgtgtgtacaagtcttgcatatcttttgttaaatgtattctttttttgtttgtttttgagacagagcctcactctgtcacccaggctgtagtgcagtagcacaatctcagctcactgccacaatctcagctcactgcaacctctgcctcttgggttcaagcaattctcctgcctcagcctcctgagttgctgggattccaggtgggcaccaccacgcccggctaatttttgtatttttagtagggacagggtttcaccatgttggtcaggctggcctcgaactcctggcctcccgctttggcctcccaaagtgctgggattacaggcatgagccaccatgcctggccaaatgtattcttaagtatttttttttatgtcactgtgaatggaattttttwaaaaaatttatttttgggtttataactaatatttagaagtacaattaatttttgtatattgaaattttgtcctgcaactttgctgaacttactggttttgttaaataaagatttaacccaatctttatgtattttatttattcattcattcatttatttatttttttcttgccagattaccctg

SEQ ID NO: 385702 - DNA, 631 bp, Homo sapiens
ggaaaatctatttgaggatataattgtggaaaacttccctagtccagcaagagatctagacatggagctgtaaaagcctcagaaaactccaggaaaatacattgcaagaaggacttcaccatgacatttagtcatcagactgtctaagttcaacgtgaaggaaaaatktttcatatcagcaaaagaaaagcatgtaatcacctataaaggaaaccctatcagactaatagcagatttcccagcagaaaccctacaagccagaaaagattgagattctattttcaaaatacttaaagaaaaaaactgtcaagcagaaattttatatcctgctagaataagcttcattaagagacggagaaatagtcttttccaaacaagcaaatactgagggaatttgtcaccactacaccagtcctacaagaaaggttcaaaatgttctaaacatggaaacaaaaggtcaataatcaccatcataaaaacacatgaaagtataaaactcatatgtcttatagagcaattacacaaatgaagaaaagaaagaaatcaaatggcaacatgacagaacaccagaccacaaagacaaaacaaacagaggaaaagtaaataaagaatctgcaaagcaactagataa

SEQ ID NO: 385703 - DNA, 620 bp, Homo sapiens
gaatatttctgaaagttacatgtttgatacttaaaatttacaaaataataacagcagtgatgcaggaaatagaaactgtaaatagcttacaaacaaaaaygttgggccctgatattgtgtcaaaaattgcatgcatgtgcaaattaaacacatatttagacattctctttgttttgtgatcattcttcattcatttcactacagtctcaaactcagagggaattgcggtattccagtttaagcagagaatacaggcattcctgactcagcatggttcccatacacatgaacttcagttaccatggattagttaaataacaactgtcccccaacaacatgattcaaatttcagttaccacggtatattaaatgtgagtaattgcataaagtataaacttcgctgccagctcttcagtccacaaatcactacataaataacagatgtgtaccatgatcagtgaacaatcacatcacttctttcaaagtccgttggtgatcgatcactgagcatttgttattcaggtcacacacagtcatgtcgtgtccttgtctcacggcaacaaacaggtgactttttacaaaaatggataatcaaaagaaggaattagccaacaaagatg

SEQ ID NO: 385704 - DNA, 583 bp, Homo sapiens
gccaaattttgagtattacagaagtaccaattataaaatataagcttcctaaaaagccaaagagctgctaatactggttttaataaaagtataggctgggtgcagtggctcatgcctgtaatcccagcattctgggagcccgaagtgggcagatcacctgaggtcaggagctcaagaccagcctggccaacatggtgaaaccccatctctactaaaaacacaaaaattagccgggcatggtggcacacacctgtattcccagctacatgggaagctgaggcaggagaatcgcttgaatccaagagacagagatagcgccactgctctccagcctgggagatagaatgagactccatctcaaaaamaaacaaacaaaaaaaaacaaataaaaattaaaaagaaaataaaaaataaaagtatagatggcctctctctcttttgttgagggtgtgacagtcatctgtgtaactcaaaggaccatccatttaacttaaaattgattccaaatttgctctttatatattggtcccaatataattttaatggctcttaatatctaattataatagctgtaaatgccata

SEQ ID NO: 385705 - DNA, 546 bp, Homo sapiens
ataattttaatggctcttaatatctaattataatagctgtaaatgccataacagcacttgaggtggtgttatgacttttcctcttatttgttcattttccatctgagggaaagattgtgtgacccaggaatttaaaagctgaagatatcactgtccttccaactctgccttttataagtcactggtgactaaaaaagaacaactgatttccctacattcatcaggggatgaaatcagaaagactagattaagagaataaatataatttaaaaattaattgttttttaaagattaattttattaaaatgaaaaataacttttctgcttatatatttaaccaaaccattattgataatttcattggtaaattaatacattaatacatttatattgggagtgaatttgtagacagaagacagatacatatacagaggcagatgctgtttatttatttgatttatacattttgatattgaggtgtgtatacagrgacagatatatacagatatataggtatttatcttagagtttctcgaactcagtacc

SEQ ID NO: 385706 - DNA, 581 bp, Homo sapiens
acaaaacaaagctaaataatcaaaccaaaccgaatgaaaagaaataaaattagaaagaacagaaaattatcaagtataggtttacctaagtcttttcttagggaagttaaataatattagtgtatcaatgagcttctgtttctgtgtttctccatattcccttcattaataagttggtggtctataaaaatrgctgtttttcaaaacatgtaactgtttatttttttacggcacatgattttttaaaaataaattcaaatagactgaaggcagcaaaataaaaataaagagctcactctacttcaacctccagtctcattctctgaatattaatagtttcttgggtctcattacagaaatgttgggtacatatacaaattacaaatacgcagactcacaaacacacatatacttattttatacatgtggaaatataatgtgcttgttgttctgcatcatcttttctcccttaaaaatacatgttggaaagcctttcatgttggcacataaaactagacttcattctttgtaatagtgaaatgttattgcacatatgattttaccataatttactcaacagt

SEQ ID NO: 385707 - DNA, 560 bp, Homo sapiens
gcagcctagcagacttccaaggtggggtagaaggtgaaggtgctttgttcatggtgatgaaatgttaccagaggaggaagtaagtgaatctttgggtgatggaggaaagaaagaggactggggagggtggggaggagcaaagcatacttgccagctgacttccagcccaaccagtctccccactgatgagcatgtataagatacctaggaaagcaggcagggtttctttctgtaaatctttctgtggaaagtgaggaaaaatctgaatatgagtgtacatgaaccctccctttcttttccttttcttttacttctcagttgatcagtgtgcaaagggtgaagggactcagagatarttcatttcagtcttttcctatgagcaaaatcagagatcctgggtaccccaaacctgctctgtggatatattcattattttcattttctcctaattgggagtttctctcatctgataggtgtactaaccccacttttgggtgtaagaggttgatgccagcttgagtgccatccattccatgtagaggcttgcttttgaatgggcg

SEQ ID NO: 385708 - DNA, 537 bp, Homo sapiens
atgccatcatgttgctttttaagcccaacctacttcttctcaagtgctgtgcacaccatacatgttcactgttaccatttgtttttttaaagtgggacttaatagaaataactgctattctaactacttgatattatatttggtagtttaactcatgagattttagcattgaaggaatatagattcatcaaatttagagcataaaaggatcctagtgattgcttggcctaggagtctcagactcagatgagtacaaagttgaggcagataagataaatgagagaggcaggctgtacacaagtcaactgggaatgatggacactctggcatgccagaagtttggaatcttacactagctgcaatgtgttagtttatttacttattttccttccacctcaggatttaaggtaatacaaataaatgcaataaaaagtaaacaaatagggaatagrgttggggggaaataaagattggaaaaataaactaaggataaggttgttgaacataatgattataaagttctgtgcagttgctaga

SEQ ID NO: 385709 - DNA, 628 bp, Homo sapiens
cactactaatctggtaatcccagaggctataaaccaagcccaggctacgccaatcagaactgttgtgaagcttgaggaaagcattgctttgcaccagtccaatgtacaacttaagtcaygtgtcattggcacaaataatctggacaggaggagataagagctctatgatctaattttgtagaagcagcagcacaagcagcagcactggcccaagcagtgggtgctcaggttccctttagatatttcgtgtgcctctctaccaggtgtccatcactacaccaaaccccagggatataatggtgcctaaaattaggcctggttcccaccccatggaattagcattgtgcatcacacaaatacatgactatgaacaatgacagtgtttgatcccaatgaaagaaaatgacaaaggacccagttgaatctaggaggttgaggaagacttctctaagcagagatctgaaggatgtgcaaggattgggggaaggtcagtggagacagcattccagggagaaagaacaggtgttgaaaggtgccaaggtggagggaagcaaagttcatttgaagaatggagaaagtccatggttggtggaaacttctgaggccatctccatgtctagtgcactgg

SEQ ID NO: 385710 - DNA, 554 bp, Homo sapiens
ggcctatatggcctggatttaaatcctgaggtcctgggttcaaacccaaatcctgacactacctggctatatgtacttaaacatctaggtagtcaaaagttctggccagacgcgatggctcatgactgtaatcctagccctttgagaggctgaggcaggcagatcatgaggtcaagagatcgagaccatcctggccaacatggtgaaaccctgtctctactaaaaacacaaaaattagctgggtgtggtggcacgcacctgtagtctcagctactcgggaggctgaggcaggagaattgcttgaacctgggaggtggaggttgcagtgagccaagatcaygccactgcactccagcctggcaacagagtgagaccccatctcaaaaaaaaaaaggaaaaaaaataacaaaaaaaaacttccataacttctgtgtgcctctatttcctcatatataaagtggacagaatgattatagagttattttaaggattaaatataataatatatgtaaaacccatagcatattgtcagtatataataactattcagtaat

SEQ ID NO: 385711 - DNA, 530 bp, Homo sapiens
aagtattgatcctgggcgtgtctgtgagggtgttgccaaaggagattaacatttgagtcagtgggctgggaaaggcagacccacccttaatctgggtgggcacagtctaatcagctgccagcrcagctaaaatataagcaggcagaaaaatgtgaaaagagagactggcctagtctcccaacatacatctttctcccatgctggatgcttcctgccctagaacatcagactcagctttggaactcagactggctatccttgctcctcagcctgcagacagcctattgtgggaccttgtgattgtgtgagataatacttaataaactcccctttatatatttatctattccattagttctgtcctctagagaaccctgactaataacagacagcttgtccaaattccctgggatttgaaggccactgctctaacttagaggctcagcccacattatgctgagccaggggctgtggataagcaggtaggtgaaccagagggtaacttctctcacttccaaatgcccagacta

SEQ ID NO: 385712 - DNA, 617 bp, Homo sapiens
tatccattcagcaaatatttattaagcacctactatatgctaggtattatgctagatgcttggaatgcatcagtgaacaaaactccctgtcttcatggagctcacatcctgaaaattcttatgaatttagttccaggaaccaaaaaagggaactaagtttgtagtgtcttcctctatcttcagccagaatcacatttaaaccacccacactcaggtatgaatctctcctaaggccatcagagaaagaataccaaacttgttttagtaactcattccagtgtttaatacgctcacaagacattcttcagagatagaatacaccttattttagtargcattttgttttgttttttcctcaggaaacctgatagaagttagtcacaatgttctgggtaagaaccagtcacaggctggaatagagccctcaaacttctctgtttaacgtggatagaatctcagtttctatagcctgtccccaggattttaatgttttgagcctttcatcatccacatcaactctctgatgaatttcctccacacttcccagtggttgtaaagcccagtaagccactttaggtgccactctaccctttccaagtccctttcactcacattac

SEQ ID NO: 385713 - DNA, 523 bp, Homo sapiens
actggtagcataaagtaaaatgataaccaccatcaaccagccagttcctggccttctaggtcaycagaggcaggttggggccccaccagccctaggtccatccccattagtactcatttgtcccatttctgtgaggttggcactgactcagtgattgccaccctctgggttatcagcctgtggtgcaaccagaagagattctcatctgtgtgaggtggctcgagtgtggttgggtcttgactggggtgaccagcctgaccaggtggaggagataagattcatccacatcatcaacagaaggctttgatggctttgtttttttccaaacttaggtaacctgtgccacagtatgctcaaaaatgatcaccacattattttcagatgaagccatttgtgtttgtggctaaaatttggcctcatcataattcacgtaatgggtaacactacactgccctttcagtcttgcccagagggttgcaagagggtccttaatataatgaaaggaattggtgtatagttacag

SEQ ID NO: 385714 - DNA, 447 bp, Homo sapiens
atcatttttagttttctgagctaagattattgaagccaatcaagggaggaaaacccatgcatttgtacagcctaatcagaaatgaaggaggctgaatttagcagcaactaaactttctttttccatccaaatattctgagactcatgtcccagacatctcaccaacaagtggttgtgtggctctgtcaggggaagaagcaggccctgaattgtgctggtgtggttttacctaayaggtggatagaaaatagaagttcagctttgaaaagttcatagggctgtctgctatgatgtgcaggcccctaaagacagcatttccccagccaccctaaaccctgatcactgaaccctctacagctaatctcaccactgaacggccagctttgctctgcatacactgtgagatcccaggccccaccaggaacaagccatggggaacagccaatc

SEQ ID NO: 385715 - DNA, 608 bp, Homo sapiens
tgggatatttaacctagagaggagaaaacctaggcagcccatgatagccatcttgaaacaacacaaaaggctgacgtggagaaagaggaagcagatatattctctaaaccagcactaaaggtggacttgtcaggcagagagatttcaaccagtatgagctgaccacttgctaaccacttaggtcattcaacaatgaaatgagctgtctcatgaggtaatggggttcccacccctgaagaggttacagaagaggggtgtggacttttaaggatcttgcaaaggctcccatgaagggtaaggcatctccaggtgtcccataagcagggacagaaactatcttcctaaggacaaaggaatgagctcctggtctattttccatttattccagcacctcaacctgtaggaccttaaacaattgtttcctaacatcctgatccctggtgggaaaagagagccaagatgacagaatccaaggatgaagaaagctctgaaaaacggaagggaaagttacaaagaagaaaaaacaaataatactraaaacaagcattgtctttgctcagttctctcatctctctttcctctgcttcttctcaaccctcaggctcccc

SEQ ID NO: 385716 - DNA, 608 bp, Homo sapiens
tgggatatttaacctagagaggagaaaacctaggcagcccatgatagccatcttgaaacaacacaaaaggctgacgtggagaaagaggaagcagatatattctctaaaccagcactaaaggtggacttgtcaggcagagagatttcaaccagtatgagctgaccacttgctaaccacttaggtcattcaacaatgaaatgagctgtctcatgaggtaatggggttcccacccctgaagaggttacagaagaggggtgtggacttttaaggatcttgcaaaggctcccatgaagggtaaggcatctccaggtgtcccataagcagggacagaaactatcttcctaaggacaaaggaatgagctcctggtctattttccatttattccagcacctcaacctgtaggaccttaaacaattgtttcctaacatcctgatccctggtgggaaaagagagccaagatgacagaatccaaggatgaagaaagctctgaaaaacggaagggaaagttacaaagaagaaaaaacaaataatactgaaaacaagcattgtmtttgctcagttctctcatctctctttcctctgcttcttctcaaccctcaggctcccc

SEQ ID NO: 385717 - DNA, 542 bp, Homo sapiens
gtctcaaaaaacaaaacaaaacaaaacgaaaaaacacttagccaaatagattgcttagtatcataaagtaaaaacaaatatggagtcgaccttttccaagttttgactgttcaagggatagtctggggtgaccttagctatgacaaaaaagaaaaccagaacttttaggggcttttgagatcctgaaagatcaaatgaggaaatagctttttaacacacaggacaggaaacttgttgactaccaggctatttggggacagactttcggyagagataacacccagattttcctggctgcatcacttcctggttaatctcatggcatctaattctttgaccagattgttcttgccaaggcaaggctgagactttagacaactccctttgtcctagggaagaagcaattccaactgcagcaattcttttatgcctttattctctggggaagtgtagagactggttctctcagaaaaaccaactaaccaaccaactaaaaacaacaacaacaacaaaacccatcccttaggggtatctgatgatgt

SEQ ID NO: 385718 - DNA, 542 bp, Homo sapiens
gtctcaaaaaacaaaacaaaacaaaacgaaaaaacacttagccaaatagattgcttagtatcataaagtaaaaacaaatatggagtcgaccttttccaagttttgactgttcaagggatagtctggggtgaccttagctatgacaaaaaagaaaaccagaacttttaggggcttttgagatcctgaaagatcaaatgaggaaatagctttttaacacacaggacaggaaacttgttgactaccaggctatttggggacagactttcggtagagataacacccagattttcctggctgcatcacttcctggttaatctcatggcatctaattctytgaccagattgttcttgccaaggcaaggctgagactttagacaactccctttgtcctagggaagaagcaattccaactgcagcaattcttttatgcctttattctctggggaagtgtagagactggttctctcagaaaaaccaactaaccaaccaactaaaaacaacaacaacaacaaaacccatcccttaggggtatctgatgatgt

SEQ ID NO: 385719 - DNA, 595 bp, Homo sapiens
tgctatctttttgcgttttcaatgtaaggaaacagtcattatctgtcagatctggatcttccatgattcaatgatgaaatagcccataaaaggtgctcagaaaagcagtggtaattccatataacaccacagaacacaatcataacttcatatctttagactacatctctgagcaaggttccacggcatttgaacttacattttcatcagcacaaaccacaggtatagtgtaaaaaaaaaaaaaacaaaaacaaattttaactcactcygagacctcaaaagatttaacaagaattggataaaacctttgtgtctcagcactattacagcttcagctaaccacaaaaataaaaaagctgttcctatattagtgagttattttaatgagattcctggagataatgtaaaagttcttgaacttgatgtcctgccaggggcaacaagtggctattttactttctctactctgagtgcagcaccctggttgataagatgatcagcaggtcagctgataatattaacttcagagatggaaaatcctaccagtttaaagacttttttcaagaaattgatgactaacttcatcaaaacctga

SEQ ID NO: 385720 - DNA, 590 bp, Homo sapiens
gccattaagaatgttaaaagttctggagagtcttgcagtaaagaaaacttgttcaatattatttaaatgtagcatttctcaacattcttttgactaaggaggctccytttttccccaccacacagtatctattgataccaggtgaaattaggattccagggaacaaacacactttgggaattgctagagtagagacactggggtcagtcccagaactaacatactctgctaaaattcagttgcattaactttactaaagggccaggacaccttatcaccaaccaaatggtataaaattgagagtagttcaagtctgagagcattctctaaaaggaaactactcatgtcactctttgccaacttccttttgttggttctattttatgggtctgtcatttatcagcaattaatgagaacaagtggagtcaaagcctctaccttccttgcaggggcatctaagttggattggggatgggggatgggggagccagctgcagctttttatcttttggtgacaacaagtagttgtattccttcttgtgcagtcaccgggttcatgaatagtgccacagtcttttaaagccaggact

SEQ ID NO: 385721 - DNA, 590 bp, Homo sapiens
gccattaagaatgttaaaagttctggagagtcttgcagtaaagaaaacttgttcaatattatttaaatgtagcatttctcaacattcttttgactaaggaggctccctttttccccaccacacagtatctattgataccaggtgaaattaggattccagggaacaaacacactttgggaattgctagagtagagacactggggtcagtcccagaactaacatactctgctaaaattcagttgcattaactttactaaagggccaggacaccttatcaccaaccaaatggtataaaattgagagtagttcaagtctgagagcattctctaaaaggaaactactcatgtcactctttgccaacttccttttgttggttctattttatgggtctgtcatttatcagcaattaatgagaamaagtggagtcaaagcctctaccttccttgcaggggcatctaagttggattggggatgggggatgggggagccagctgcagctttttatcttttggtgacaacaagtagttgtattccttcttgtgcagtcaccgggttcatgaatagtgccacagtcttttaaagccaggact

SEQ ID NO: 385722 - DNA, 604 bp, Homo sapiens
tcctggttaattacacagtctctctcagttttctcgtctggattggatcagctgatctataagaaacctactagaaccaaggtcttctgtttctaagttgttctggtagtagctgagacacaaatcccaaactatgtaaaactcacttaaaatctgaactccattmtaagaacaagacttgaaatgctatcattttctttcttcatcaaagaaagaagaatgtggaataatacacttgtataatttttctatttactgggagtcactattatattgttttataaaagcttcttgatatttttcccttatcaaaaatgaaatagcaagaaggaagatttaggtatgctgttacatttctaatcttgctctttatttgtaagtgtgggaccctaaaaatggaaggctgtttgtgtaatagcattatagagaaaatggccaaagaatcatatttctttctttcactcacttgataaagccttcaaatgttagtctgaattaacttttagtggtgttagaagtgaaaactagctctctagggtagatagtttttatgctaatttcatgcacctaaatgtagacaattattctagggcatgtgaatgat

SEQ ID NO: 385723 - DNA, 604 bp, Homo sapiens
tcctggttaattacacagtctctctcagttttctcgtctggattggatcagctgatctataagaaacctactagaaccaaggtcttctgtttctaagttgttctggtagtagctgagacacaaatcccaaactatgtaaaactcacttaaaatctgaactccattataagaacaagacttgaaatgctatcattttctttcttcatcaaagaaagaagaatgtggaataatacacttgtataatttttctatttactgggagtcactattatattgttttataaaagcttcttgatatttttcccttatcaaaaatgaaatagcaagaaggaagatttaggtatgctgttacatttctaatcttgctctttatttgtaagtgtgggaccctaaaaatggaaggctgtttgtgtaatagcattatagagaaaatggccaaagaatcatatttctttctttcactcacttgataaagccttcaaatgttagtctgaattaacttttagtggtgttagaagtgaaaactagctctctagggtagatagtttttatgctaatttcatgcacctmaatgtagacaattattctagggcatgtgaatgat

SEQ ID NO: 385724 - DNA, 610 bp, Homo sapiens
ttaaaatataaattcaccaaaaattagttaatttagccacaaagtaaacagacgatgcctttgtgaagttatcatctttactgtaaaatctgggcctaaaaatcatttaagttcacccacttctggatccttacacaaatgtaacatgttgctgcagcgtccactgtttagctgacatctgaaaatccctttgactatttgcccttcagcactgttaagactccctcagactcaacctgtatttcagaataacagatgattacagctactctggaaaccaccttttgcccttaccagcactagaatttgagatccaatttgtggagggaatgaatgcctttcttctgtatctcttctccatccctatttcaaggatgtcgaatctctctactctattactacgaaacaagagttttcagaacttgtttcatatttttttagtgactggtgttttcccattagttcctatttcccagcttgttggcgtaatatcatccttgcttgtccaactttrgtaagtataagacaatgccacattttgataattacgtgattttaaagaatacttccctcctaccaagatttcattatattaaaatatacccaaatt

SEQ ID NO: 385725 - DNA, 605 bp, Homo sapiens
tattttcaaactaagtggcatgaagaactgcttcaaactgcccccaaaggcattttaaactacaccagaatgtggagctacaataaaacaattttagcaacaatgcaggaaatacttggtactatgcctgtgtcaggttttataataaagtggcatrtcctgtggaatatctttttgtgttttgttttggttttatttttaaatcactcaccaagtatttgcttttttatactatcttaaaaactgggaacaaatactccctcaccctgggtctctgtgtgcataaagaggcaaaggcacgtactgtttctctacatacggggtcaacattccactaataatagcaaatctccctttattatagatattagaactctattgccacttgggcaagtcaatcaagagggcttagacgacagctgggcaaattttaatgtgtttatttctacaatttctttttattaaaagtcttgtgaaaaaacggaatcctataaatagtaaaaagggagaaacagtgctccatggcctgaagcaaatggtgtcaatacatgtgtaaacaaggtaagactgctcggactattaaaagcacaaaaataaaactagtc

SEQ ID NO: 385726 - DNA, 644 bp, Homo sapiens
tgcttgttgtctagtccatctgtgatctgtggtgtattttggctccttcgctttaggaagaaattaagaaatgaagaagcaagtgacattcgatgggaaaaaaaaataaacacaaactattcttagagtttggtcatggcctgagggccatgatacagtaattacataagaaaagtcaatgagaaaaaaacccagcawgaaaaactgaaatcccatagcctgaatggaagcctagtgtggggaactgctaagggatttatgaaaataccctggaacccacttcagcatgtcggccatcagatcgccgtgtctctcctatgtttcagaaagttcctttttatggagcactacttcagtgattagaaaggtgtgtttcctagtgaggggtgctgaaaggtccaggaaacaaaccatcttctaggtccaaaattgccagtcactaatgtgttaggaaacaagggaggaaaagcaggcaccacacctctcaggcctccccgttagcacagatgatagacttagatacctgtccttctctagacttttatattttatttacagtaactatccaaaattaacttgggacacccaacatgaagtggcaaagaaagtgcaatagacaacaactactacaccatctatatagt

SEQ ID NO: 385727 - DNA, 644 bp, Homo sapiens
tgcttgttgtctagtccatctgtgatctgtggtgtattttggctccttcgctttaggaagaaattaagaaatgaagaagcaagtgacattcgatgggaaaaaaaaataaacacaaactattcttagagtttggtcatggcctgagggccatgatacagtaattacataagaaaagtcaatgagaaaaaaacccagcatgaaaaactgaaatcccatagcctgaatggaagcctagtgtggggaactgctaagggatttatgaaaataccctggaacccacttcagcatgtcrgccatcagatcgccgtgtctctcctatgtttcagaaagttcctttttatggagcactacttcagtgattagaaaggtgtgtttcctagtgaggggtgctgaaaggtccaggaaacaaaccatcttctaggtccaaaattgccagtcactaatgtgttaggaaacaagggaggaaaagcaggcaccacacctctcaggcctccccgttagcacagatgatagacttagatacctgtccttctctagacttttatattttatttacagtaactatccaaaattaacttgggacacccaacatgaagtggcaaagaaagtgcaatagacaacaactactacaccatctatatagt

SEQ ID NO: 385728 - DNA, 644 bp, Homo sapiens
tgcttgttgtctagtccatctgtgatctgtggtgtattttggctccttcgctttaggaagaaattaagaaatgaagaagcaagtgacattcgatgggaaaaaaaaataaacacaaactattcttagagtttggtcatggcctgagggccatgatacagtaattacataagaaaagtcaatgagaaaaaaacccagcatgaaaaactgaaatcccatagcctgaatggaagcctagtgtggggaactgctaagggatttatgaaaataccctggaacccacttcagcatgtcggccatcagatcgccgtgtctctcctatgtttcagaaagttcctttttatggagcactacttcagtgattagaaaggtgtgtttcctagtgaggggtgctgaaaggtccaggaaacaaaccatcttctaggtccaaaattgccagtcactaatgtgttaggaaacaagggaggaaaagcaggcaccacacctctcaggcctccccgttagcacagatgatagacttagatacctgtccttctctagacttttatattttatttacagtaactatccaaaattaacttgggacacccaacatgaagtggcaaagaaagtgcaatagacracaactactacaccatctatatagt

SEQ ID NO: 385729 - DNA, 446 bp, Homo sapiens
ggtttgaactgatgcatgtagatgagtttattgatgaactggtgcacagtgwgagagtctgtgatatcactctgccccggctacagaaacgctaggtattagaggaaactgagcaactggagccttgagttagtgctctggaagaggacatagatgatgtggagtccagtgaagaggaagaagaggaggatgagaagttggaaagagtgccatcacctgatcgcctccggagaagctacggagacttggacaagccccgtccatctcccacactgtgctacagaaggagtaggagtctgtctcccagaaggcggaatcgatctcccaaaagtagaagccccttctcccgccgagaaaggcatccgagcaagggtccaagacatcaccgcagcagatcccgagaccggcggcacagatcccgttccaagtccccagatcctcaccgt

SEQ ID NO: 385730 - DNA, 535 bp, Homo sapiens
cccaaatattttgtaattgttgggaagacattttcatcatggctgatggcttttggcacagtggatcactcctggacatgcttttactcttggcctcctgcatggtgtcctactctggctcttcttctaccccacctccctggcttcttcatgttgggatgccctaaggctcttctcttggccccttatgttctctctctctttttttttttttttgaggcggagtcttgctttgtcacccaggcttgggtgcaacagcacgacctcggctcaccgaaacctccacttcccaarttcaagtgattctcatgcctcagcctcccgagcagccggggttacaggcacccatcaccatgcctggctaatttttgtatttttagtagagacagagtttcaccatgttggccaggctggtctcgaactcctgacctcaagtgatctgcccacctcagtctcccaaagtgctgggattacaagtgtgagtcactgtgcctggccccttatgttctccatccatacttgtgccttagtgatt

SEQ ID NO: 385731 - DNA, 535 bp, Homo sapiens
cccaaatattttgtaattgttgggaagacattttcatcatggctgatggcttttggcacagtggatcactcctggacatgcttttactcttggcctcctgcatggtgtcctactctggctcttcttctaccccacctccctggcttcttcatgttgggatgccctaaggctcttctcttggccccttatgttctctctctctttttttttttttttgaggcggagtcttgctttgtcacccaggcttgggtgcaacagcacgacctcggctcaccgaaacctccacttcccaaattcaagygattctcatgcctcagcctcccgagcagccggggttacaggcacccatcaccatgcctggctaatttttgtatttttagtagagacagagtttcaccatgttggccaggctggtctcgaactcctgacctcaagtgatctgcccacctcagtctcccaaagtgctgggattacaagtgtgagtcactgtgcctggccccttatgttctccatccatacttgtgccttagtgatt

SEQ ID NO: 385732 - DNA, 535 bp, Homo sapiens
cccaaatattttgtaattgttgggaagacattttcatcatggctgatggcttttggcacagtggatcactcctggacatgcttttactcttggcctcctgcatggtgtcctactctggctcttcttctaccccacctccctggcttcttcatgttgggatgccctaaggctcttctcttggccccttatgttctctctctctttttttttttttttgaggcggagtcttgctttgtcacccaggcttgggtgcaacagcacgacctcggctcaccgaaacctccacttcccaaattcaagtgattctcatgcctcagcctcccgagcagccggggttacaggcacccatcaccatgcctggctaatttttgtatttttagtagagacagagtttcaccatgttggccaggctggtctcgaactcctgacctcaagtgatctgcccacctcagtctcccaaagtgctgggattacaagtgtgagycactgtgcctggccccttatgttctccatccatacttgtgccttagtgatt

SEQ ID NO: 385733 - DNA, 588 bp, Homo sapiens
atggtttacccagcctttgaatcaaattcatacaataatataccaacatgaagaaaaaatgatggacagaacttgagacctggaaagactaagaatccatagattaaggtccccttgagtcatttacattaaatatatatatatatatattattacacagaacatgcctaagattttgattaattcaaacttaacctaagcctaaagagcataatctgtcttgggattttacacctgagtggtggatcacttttgtgttgaactcacaaaacacatcattatcattcaacacatcattatcatttgaataaaagggtgacatttttattcaggggtgaamgtatatgaagacatggaaaagacctactgagtaatttgaaactatctaattaatttttgatttactagataatccatcatttttggctggtatactgcaaggggaattttctactaaaaacgtgtgtatatttctttgattctcacttgcttcctataatcttaagtagttatctaatgtagacagaacaaactgaggattctacataagactataaataacttgggtgaaatgatgtaccttgttac

SEQ ID NO: 385734 - DNA, 602 bp, Homo sapiens
tacagaggctctctaaccttttctcactggatttttctggtccgttttcaggttggagggtgagggtgacagaagctgggaaatgaaagatgggattgttttcttgtcatcctgtatccctgccacctggcgatggtgtttctggtgagtggagatacataatggctatctcaatgcaacatgctccttatttcctgggggtcaggcaccaggaggaccaggagggcagaagatctgytgaaatgtgaccctatgtggaatagggatgagagtccctgagcttgtagaggggtctgaggaaatgacttcaagggaaagttcacagaactctgaaatcaatagctaaaagtaaaaatgctcattttcaagaacaaagtatcatttaaatgctcccagggggtgaatgaagagaaggagctaatccttgtcaagtgatggatataaaataaaaacccaaagtggaaaaaaaatcaaatttcaatgctaaaatctactgccacatacagagagagctgtaagctcctaggacatttgtattgaattcttcatagcttttgcttttaaatgatatccttttcatctttagctaaatccttaacctt

SEQ ID NO: 385735 - DNA, 602 bp, Homo sapiens
tacagaggctctctaaccttttctcactggatttttctggtccgttttcaggttggagggtgagggtgacagaagctgggaaatgaaagatgggattgttttcttgtcatcctgtatccctgccacctggcgatggtgtttctggtgagtggagatacataatggctatctcaatgcaacatgctccttatttcctgggggtcaggcaccaggaggaccaggagggcagaagatctgctgaaatgtgaycctatgtggaatagggatgagagtccctgagcttgtagaggggtctgaggaaatgacttcaagggaaagttcacagaactctgaaatcaatagctaaaagtaaaaatgctcattttcaagaacaaagtatcatttaaatgctcccagggggtgaatgaagagaaggagctaatccttgtcaagtgatggatataaaataaaaacccaaagtggaaaaaaaatcaaatttcaatgctaaaatctactgccacatacagagagagctgtaagctcctaggacatttgtattgaattcttcatagcttttgcttttaaatgatatccttttcatctttagctaaatccttaacctt

SEQ ID NO: 385736 - DNA, 602 bp, Homo sapiens
tacagaggctctctaaccttttctcactggatttttctggtccgttttcaggttggagggtgagggtgacagaagctgggaaatgaaagatgggattgttttcttgtcatcctgtatccctgccacctggcgatggtgtttctggtgagtggagatacataatggctatctcaatgcaacatgctccttatttcctgggggtcaggcaccaggaggaccaggagggcagaagatctgctgaaatgtgaccctatgtggaatagggatgagagtccctgagcttgtagaggggtctgaggaaatgacttcaagggaaagttcacagaactctgaaatcaatagctaaaagtaaaaatgctcattttcaagaacaaagtatcatttaaatgctcccagggggtgaatgaagagaaggagctaatccttgtcaagtgatrgatataaaataaaaacccaaagtggaaaaaaaatcaaatttcaatgctaaaatctactgccacatacagagagagctgtaagctcctaggacatttgtattgaattcttcatagcttttgcttttaaatgatatccttttcatctttagctaaatccttaacctt

SEQ ID NO: 385737 - DNA, 602 bp, Homo sapiens
tacagaggctctctaaccttttctcactggatttttctggtccgttttcaggttggagggtgagggtgacagaagctgggaaatgaaagatgggattgttttcttgtcatcctgtatccctgccacctggcgatggtgtttctggtgagtggagatacataatggctatctcaatgcaacatgctccttatttcctgggggtcaggcaccaggaggaccaggagggcagaagatctgctgaaatgtgaccctatgtggaatagggatgagagtccctgagcttgtagaggggtctgaggaaatgacttcaagggaaagttcacagaactctgaaatcaatagctaaaagtaaaaatgctcattttcaagaacaaagtatcatttaaatgctcccagggggtgaatgaagagaaggagctaatccttgtcaagtgatggatataaaataaaaacccaaagtggaaaaaaaatcaaatttcaatgctaaaatctacygccacatacagagagagctgtaagctcctaggacatttgtattgaattcttcatagcttttgcttttaaatgatatccttttcatctttagctaaatccttaacctt

SEQ ID NO: 385738 - DNA, 613 bp, Homo sapiens
atgtcttttaaacagtatggcattttaaaaactcattgagacaactttacatgaacccaaggagaagagagtaccgctggtgaacagacaggctcgggggatagtgctgatgggttcgtgcagcaggaaaagcttaagctggggtgcaggattgagagaggacttgtgggggggctcctatctggcaggagcagggtgtgggggagctgacccggtgccttcaccccatcccctctgccttccctatctgccatcagtgggygattgaaggaagaggagactgtgctcaccactgcaaggacaggtgcaacaggagtccactaaagcccaggaagacgatggtgatgggctcaaaagcagctgtggaccctgggacatcgtgatgtgacactggtgcttccagcctgtctcggccccttaactatcaaccatggggcctttaacctgaacgaggggagacttagtggcagcactcacctttcctgttgaagatctgaaaacagaagggaaaatgagagaaaatcaggcaaaatgcaaggaacaaacaaaacacccacgtaggtttttctggtggggctggcagcttggtgaaaagttcaggggaatgggaatg

SEQ ID NO: 385739 - DNA, 610 bp, Homo sapiens
agaatttctgttctgttagtctctttccccaactatcacagatatttctgagaggactgggaggctcttgcaggtgtctcagggtcggctgacgcctccagagagaaggatgatggctggtggtgtggaacccactcagggagctctgtctgtctttttgtttgttgagtcactgaaaatccccaagctgtcagcatgagttgggaactaaaagaagaaaacagactttaggtagctcactctttccctagtccttggctggcatttgacactgattggcacagttgctcacaagtgtttcagggtagaaaggggcttattccgagttctcaacttctggaccaaaaaaaaaaaaaaaaatcccgtattagccaactgacacacatgcactcyaaagaatatcagatgtcggacgtgataagccacatggggtgaggtgcatacatggagcatcaaacaccagcacagaagtcacctgggctctgggctgtcctaaccagtgcagagccaaagggctctcttcaaatctagttgacccagttttccccaagcgggaaggccacagcacttcacagcacttggggaggtcaggaaggtcaggcaggacaaa

SEQ ID NO: 385740 - DNA, 402 bp, Homo sapiens
attaccgtatatttataccttatgtctcacaactttttgcaagyacacttgtactattttatactcttctctgggtataattttttgtatccaaatctttctacatttttattatatgcaaataacattttcccgccatcgttatggaaaattctatattttgtcaacgttcattttcttctcaaaagccttttgttattatttccaaatgaatattatgtgtgtctcagacaaccacagaaagttttgtttttgtcacattctactgctactgtgtcaatggcagcattttgatataggtggagggacgctcacatcaaccccataatttgtgtcagcttctcctgaagttatcagaagcatacaatttaagtaaaaacagtatcttcgctatccaaatga

SEQ ID NO: 385741 - DNA, 402 bp, Homo sapiens
attaccgtatatttataccttatgtctcacaactttttgcaagtacacttgtactattttakactcttctctgggtataattttttgtatccaaatctttctacatttttattatatgcaaataacattttcccgccatcgttatggaaaattctatattttgtcaacgttcattttcttctcaaaagccttttgttattatttccaaatgaatattatgtgtgtctcagacaaccacagaaagttttgtttttgtcacattctactgctactgtgtcaatggcagcattttgatataggtggagggacgctcacatcaaccccataatttgtgtcagcttctcctgaagttatcagaagcatacaatttaagtaaaaacagtatcttcgctatccaaatga

SEQ ID NO: 385742 - DNA, 415 bp, Homo sapiens
cttcaattatttcattcttctacttaatacatcttgtttttccttgactagcaaattaagcttgaactagttagactggctggcagcaagtcctctgccatgtgattaccgtatatttataccttatgtctcacaactttttgcaagtacacttgtactattttatactcttctctgggtataattttttgtatccaaatctttctacatttttattrtatgcaaataacattttcccgccatcgttatggaaaattctatattttgtcaacgttcattttcttctcaaaagccttttgttattatttccaaatgaatattatgtgtgtctcagacaaccacagaaagttttgtttttgtcacattctactgctactgtgtcaatggcagcattttgatataggtggagggacgc

SEQ ID NO: 385743 - DNA, 573 bp, Homo sapiens
tataccttatgtctcacaactttttgcaagtacacttgtactattttatactcttctctgggtataattttttgtatccaaatctttctacatttttattatatgcaaataayattttcccgccatcgttatggaaaattctatattttgtcaacgttcattttcttctcaaaagccttttgttattatttccaaatgaatattatgtgtgtctcagacaaccacagaaagttttgtttttgtcacattctactgctactgtgtcaatggcagcattttgatataggtggagggacgctcacatcaaccccataatttgtgtcagcttctcctgaagttatcagaagcatacaatttaagtaaaaacagtatcttcgctatccaaatgatgttccaaggtaaatctcctcagatcccttccagtacatgtatgctccaaggcctgccctatgtagaacttttggagccatcaacgtactgcttgaggttgctttgaacaaaaggtatttgacataagctctataagatcagggactcttttttattttattcattgttctttatcttctagag

SEQ ID NO: 385744 - DNA, 580 bp, Homo sapiens
ttaatgtgaagcatttttctacttttattataatctgctgagcctagagttgggcaatttgtatatttattatgacartcttttggtaaatggtagcagagcatcttgttctaacaaaattactgttatcaagacaattgaccagcaggtagagaacacatcttgttccaacaaagtaaatgtatctctttccaacttcaaatgaggaggaatgaagtcagtaagagtgagaccttgttgggacaaggatatgtaacatgacttgtgctttggcgttcttttgtgatcaaaaattccttacttttatttttttatctatggtaggaccacccagagcaggggtccacaactcccaggtcacagactggtaccagtccatggactattatgaaccacaccacacaggaggaggtgagcagcaggcaaaccagggaagcttcacctgtacttacagccacaccccatggctcatattaccgcctgaactctgcctccagtcagatcagtgatagcactagatactcattggagcatgaaccctattgtgaactgctcatctgagggatctaggttgtgtgct

SEQ ID NO: 385745 - DNA, 580 bp, Homo sapiens
ttaatgtgaagcatttttctacttttattataatctgctgagcctagagttgggcaatttgtatatttattatgacaatcttttggtaaatggtagcagagcatcttgttctaacaaaattactgttatcaagacaattgaccagcaggtagagaacacatcttgttccaacaaagtaaatgtatctctttccaacttcaaatgaggaggaatgaagtcagtaagagtgagaccttgttgggacaaggatatgtaacatgacttgtgctttggcgttcttttgtgatcaaaaattccttacttttatttttttatctayggtaggaccacccagagcaggggtccacaactcccaggtcacagactggtaccagtccatggactattatgaaccacaccacacaggaggaggtgagcagcaggcaaaccagggaagcttcacctgtacttacagccacaccccatggctcatattaccgcctgaactctgcctccagtcagatcagtgatagcactagatactcattggagcatgaaccctattgtgaactgctcatctgagggatctaggttgtgtgct

SEQ ID NO: 385746 - DNA, 580 bp, Homo sapiens
ttaatgtgaagcatttttctacttttattataatctgctgagcctagagttgggcaatttgtatatttattatgacaatcttttggtaaatggtagcagagcatcttgttctaacaaaattactgttatcaagacaattgaccagcaggtagagaacacatcttgttccaacaaagtaaatgtatctctttccaacttcaaatgaggaggaatgaagtcagtaagagtgagaccttgttgggacaaggatatgtaacatgacttgtgctttggcgttcttttgtgatcaaaaattccttacttttatttttttatctatggtaggaccacccagagcaggggtccacaactcccaggtcacagactggtaccagtccatggactattatgaaccacaccacacaggaggaggtgagcagcaggcaaaccagggaagcttcacctgtacttacagccacaccccatggctcatattaccrcctgaactctgcctccagtcagatcagtgatagcactagatactcattggagcatgaaccctattgtgaactgctcatctgagggatctaggttgtgtgct

SEQ ID NO: 385747 - DNA, 585 bp, Homo sapiens
cttgtgctttggcgttcttttgtgatcaaaaattccttacttttatttttttatctatggtaggaccacccagagcaggggtccacaactcccaggtcacagactggtaccagtccatggactattatgaaccacaccacacaggaggaggtgagcagcaggcaaaccagggaagcttcacctgtacttacagccacaccccatggctcatattaccgcctgaactctgcctccagtcagatcagtgatagcactagatactcattggagcatgaaccctattgtgaactgctcatctgagggatctaggttgtgtgcttcatatgacaaactaatgcctgatgatctgtcactgtctcactttgcccccagatgagaccatctagttgcagaaaaataagctcagagtttccacggattctacattatggtaagttgtataattatttcattatatattacaatgtaataataatataaagtagcacaataaatgaaacatggctgaataatcctgaaacsatccccaccttcccccagcccatggaaagactgtcttccacaaaaccggtccctgatgccaaa

SEQ ID NO: 385748 - DNA, 585 bp, Homo sapiens
tacacttacgagtacattctacaaacttttctttaagcttctaattaaagaagaaaaaaaattaggtgaaatgctcataaatcaagggcactgtgacccagtaaatcagcatgcattagcatgacataatagaaagtgtcccaactctgcataagtcctagctccataatgaacagctatttgttcttggacaactttcttctcttaggctcaatgtcttcttctacaaagtgaggactttgctgccttatttcactaggttgttataaagatttaacaaggtaacattttttaaatgctcagagaaatagtaaagcaatggaataatctgttcctaaactttatgactaaaattatcttggaatcccaaataaaaccccatgtgtattttgttcataggttctaatatgcaaatgctgtagttttcagraaatgttattaagtcctaattttgcttcttagttgtcctactccttatggcttatcattcagggcatctcaactgtgtcatagtttgtaactaaattttttcataaatctctcattaaagtagataatgtgattgtccactattacggagttgac

SEQ ID NO: 385749 - DNA, 404 bp, Homo sapiens
actttatgactaaaattatcttggaatcccaaataaaaccccatgtgtattttgttcataggttctaatatgcaaatgctgtagttttcagaaaatgttattaagtcctaattttgcttcttagttgtcctactccttatggcttatmattcagggcatctcaactgtgtcatagtttgtaactaaattttttcataaatctctcattaaagtagataatgtgattgtccactattacggagttgaccaatttgttgtgctaagggcagaaaaaccaatggatgttaagacctggcttggagcaatgatccttctctacagactcaaactctgagccagcagatgtttgttaagataatgctttatgttgatgttcaattccagctgacatgggagaccaaaac

SEQ ID NO: 385750 - DNA, 404 bp, Homo sapiens
actttatgactaaaattatcttggaatcccaaataaaaccccatgtgtattttgttcataggttctaatatgcaaatgctgtagttttcagaaaatgttattaagtcctaattttgcttcttagttgtcctactccttatggcttatcattcagggcatctcaactgtgtcatagtttgtaactaaattttttcataaatctctcattaaagtagataatgtgattgtccactattacggagttgaccaatttgttgtgctaagggcagaaaaaccaatggatgttaagacctggcttggagcaatgatccttctctacagactcaaactctgagccagcagatgtttgttaagataatgctttatrttgatgttcaattccagctgacatgggagaccaaaac

SEQ ID NO: 385751 - DNA, 558 bp, Homo sapiens
gctttttaaattacttaatcattgttgatggactgacaacatccaacttacatctcctgaattaaacctgatattttcttggagagtagtgaggagtagttgagggtagataggaaagagagtgtattttgagaaatgtaaaatttagagaagcttaatttaaacactccctgtgtgtcaaagagctattaaataaaattttcatgattttaatataagtgaatctgaactagcatatggtctaagtttcttttaagttgcayatggatttaaaatataggggaaaaagatcacttggcaaatatgtttttggttttgaaaaacttccaaatgtttaaaaagtacttttcaaatcaaccatacccatatgcatccaggttttctcatcctcaccagtgaaggataaaaagaaatagaattaaggcaaaatggatggagaggtgatacatatgctgtaaaactatgtcagaaatatcagttgattctttagggaattggttaaaaaaataaatttagtccttatggcaatttaacccaaagaatctaacacttattctt

SEQ ID NO: 385752 - DNA, 600 bp, Homo sapiens
gaggcaaagtgtgaaaaaggatagatcacgttcctctaaggacccatgtcaggtatctgtggaatgcaggcggtgcaggagggtgggaatgggtgggtgcccagcgttgctaaagctatggagtgtcttcccatttttaaagaaatccagaagtgcagatctattcattcaaccattcattgatgtaaaatctggtttctaaggtgttcagtttgatgactaatatatgtatactttgccatcaaaatcaaactcattcacattcccatcayctcgcagagctgccctctttcatgtgtgtggtgagaacaataagatctacctcctcagcaaatgtcaagtatacatcgcagtgttgttagctatattcacaatgttgaacagtagatctccagaacttattcatcttgcataactgaaattttataccctttgaccaacatctgcccatctctccttcccccagcccctggcaaccactctatacccagcaatcccatttctttggggatatagccaaaggaaataaaatcaatatctggaaaacatacctgcactgttatgtccatttgggcatttttaacaatagccaagtaatag

SEQ ID NO: 385753 - DNA, 472 bp, Homo sapiens
ttctaaggtgttcagtttgatgactaatatatgtatactttgccatcaaaatcaaactcattcacattcccatcacctcgcagagctgccctctttcatgtgtgtggtgagaacaataagatctacctcctcagcaaatgtcaagtatacatcgcagtgttgttagctatattcacaatgttgaacagtagatctccagaacttattcatcttgcataactgaaattttataccctttgaccaacatctgcccatctctccttcccccagcccctggcaaccactctatacccagcaatcccatttctttggggatatagccaaaggaaataaaatcaatatctggaaaasatacctgcactgttatgtccatttgggcatttttaacaatagccaagtaatagaaacaacctaaatgtctgtcaatggataaatggataaagaaatgaaaaaaaatacacacacacacaca

SEQ ID NO: 385754 - DNA, 493 bp, Homo sapiens
aggctctgacactgaaaatgaaattcttaccaagatgatatgtgttgtgttgacataaaactgatagaaagtgtaccaaaaaacatggaagttttaaacataatccaccaaaagaacatactcacagtcgacatttctttcattattaagaatgaatgtccataaccctcactaagacaaaagtcatcccatttgtctacattttttttctttgcaaacacacactgaatgactttgtgtgacaagctgtgaagttttaccaattcttcaaactctttgatttgcattatgctgtttaatcctgagaggcgagcagctgtcgctggtaattctaagcctagaattccaccacctaataggtgaaaattatagtaggctgatcataaaaccatgttgttaactttttaaaatttaatgactaccaaggaatttcaccttartgatacatcttttgagagattagaaaatgaagaaatgcacgtgttcaatgatc

SEQ ID NO: 385755 - DNA, 511 bp, Homo sapiens
gagttaagaatttgccttttcttaccatgactctgttaaaagagaatataaacaatgcagtttcacaaaaggaaggggacagtggtgtaaataaacctccccatcatgttctggtggctttcctgtaagtcttgaacgttttccactgggtgttacagtcgagaggcccccacctcctgaggaagcaagaccccgaaaccccgagacgatgggctgtgctgctttggccccatcttgcttgtgttgtttgaaggggccctgctgccacccagctgtcattaacgccaccctcacctcccaggaactgcatcactcggacggacaagacacctatgtaatgaccatagtaagaccccatgtgcgtggctaatgaggcagtgcccaacgtggcgtggaagccctgctagggaaatcccgcccygccaccccagatgcgccaccccagacctgctctcggacctgcggcccctggcccctggccctttcccgttgtcaccgaggcttcttgcta

SEQ ID NO: 385756 - DNA, 591 bp, Homo sapiens
tgtggggtggatgaagtgtcagtgcatcacctcttgcccaactgtagcacattcatggagtttgcctctgtcagcaatgtgatgtcaacaggtaaatgtgaatagtggtttttttactcaacctgcctgaagcacgtggcatctaattgtgagaatgtatttaaggttactactttgtaagtttacaggggagattcaagtagcttacttgaaatccttttctgaacaaagaaatgaaacaaagatgaaaagaaaaagcatttgaaatagtctcccagtgagtttttaatatgctatatgttttaaaaataactggcagtatatgttactatcagttgtgatcatataatttaccccacctaagttgtagatagtgaagttttaygcacattggcatatgttttgagtaaattataggtgggaatagctattttgtgctgtggacattgtagagtttaagataagtacctttcctgtgaggttagtgaaaggaagtttttggctttatcatttgaggcatttgctctgctcctcctactctgccttttgggtagggcttatgaggttctccatgggcaggcagggctctaa

SEQ ID NO: 385757 - DNA, 593 bp, Homo sapiens
tagtgtttcgtaacacaataggacaactatagttaaccgtaatttattgtataaaagatagaattgttgagtaaggtgtgagcaccagtttagggttttggcacattctttacacttgaagagtttctatctggtatgaattatttgatgttgagtatgggttgagtgtctgttaaaagctttgccacattcttcacatttgaaaggtttctttccagtatgaattctctgatattgagaaaggtgtgagctcctggtaaaagctttgccacattctttacattygaagaatttctctccagtgtagattctctgatgttgagtaaggtgtgagccctagataaaagctttgctgcattctttacatttgaaagacttctctccagtgtggattctctgatgtcgagtaaggtgtgagcccctgttaaaggctttgccacattctttatgtgtgaagtgtttctctccagtatgtattctctgatgttgagtaaggtgtgaagctctgttaaaagctttgccacattttttgacacttgaaaggtttccctccagtgtgaattctctgatgctgagtaatgtatgagcttcta

SEQ ID NO: 385758 - DNA, 610 bp, Homo sapiens
gtcactctataataataatgagtttaattcagcatgaggatgtaagaatgttacatacatatgcatccaacactgaagtactcagatatattaagccagtattattagagctaaagagagagacaggctccaatataataatacctggagaatgcaacatcacactttcagcattggataaatcttccagacagaaaaccaacaaagaaatctcaggcctaatctgcactataaaccaaatggacacaatggatatttacagaacattttatccaatggcttcagaatacacattttgctctgcagtgcatgaatcattctcatggatagaccrtatgttaggtcacaaaacaagtcttaacacattttaaaaattaaaataatatcaagcatcttttgtgactacaataaaaaaacctagaaatcaataacaagacaaatttttgaaactatacaaacacatagaatttaaacaatatgctcctgaaaggccagtgggtcaatggggatattaataaataaattgaaatatttctgtaatatgtcacaatggaaatacttaggatttacagtaaaagcagtactaaaagtttataactaaaagtgtcta

SEQ ID NO: 385759 - DNA, 625 bp, Homo sapiens
atcttgagtttccaacacttaagtaaaatgtggagtaattgaactacttaataaaaagtaataattatttattccaaccatagatactttgcttctttggccatagttgaattattatcttttaaaaatggttctgtttttattaagatgactagtagtatatacttttgatagataaatggcttatgttctttaaaagagatgagtgcccagtttgctcataataaaaactcrgaagagataaacgtttaaaatatgttcttataataaacacagataaataaaacgtaggtatccatggtgtacatgtgccacattttcttaatccagtctatcattattggccatttgggttggttccaagtctttgctattgtgaatagtgctgcagtaaacatacatgtgcatgtgtctttatagcagcatgatttataatcctttgagtatataaccagtaatgcgatggctgggtcaaatggtaattctagttctagatccctgaggaatcgccacactgacttccacaatgattcaactagtttacagtcccaccaacagtgtaaaagtgttcccatttctccacatcctctccagcacctgttgtttcctgactttttaatgatcg

SEQ ID NO: 385760 - DNA, 625 bp, Homo sapiens
atcttgagtttccaacacttaagtaaaatgtggagtaattgaactacttaataaaaagtaataattatttattccaaccatagatactttgcttctttggccatagttgaattattatcttttaaaaatggttctgtttttattaagatgactagtagtatatacttttgatagataaatggcttatgttctttaaaagagatgagtgcccagtttgctcataataaaaactcggaagagataaacgtttaaaatatgttcttataataaacacagataaataaaasgtaggtatccatggtgtacatgtgccacattttcttaatccagtctatcattattggccatttgggttggttccaagtctttgctattgtgaatagtgctgcagtaaacatacatgtgcatgtgtctttatagcagcatgatttataatcctttgagtatataaccagtaatgcgatggctgggtcaaatggtaattctagttctagatccctgaggaatcgccacactgacttccacaatgattcaactagtttacagtcccaccaacagtgtaaaagtgttcccatttctccacatcctctccagcacctgttgtttcctgactttttaatgatcg

SEQ ID NO: 385761 - DNA, 625 bp, Homo sapiens
atcttgagtttccaacacttaagtaaaatgtggagtaattgaactacttaataaaaagtaataattatttattccaaccatagatactttgcttctttggccatagttgaattattatcttttaaaaatggttctgtttttattaagatgactagtagtatatacttttgatagataaatggcttatgttctttaaaagagatgagtgcccagtttgctcataataaaaactcggaagagataaacgtttaaaatatgttcttataataaacacagataaataaaacgtaggtatccatggtgtacatgtgccacattttcttaatccagtctatcattattggccatttgggttggttccaagtctttgctattgtgaatagtgctgcagtaaacatacatgtgcatgtgtctttatagcagcatgatttataatcctttgagtatatamccagtaatgcgatggctgggtcaaatggtaattctagttctagatccctgaggaatcgccacactgacttccacaatgattcaactagtttacagtcccaccaacagtgtaaaagtgttcccatttctccacatcctctccagcacctgttgtttcctgactttttaatgatcg

SEQ ID NO: 385762 - DNA, 625 bp, Homo sapiens
atcttgagtttccaacacttaagtaaaatgtggagtaattgaactacttaataaaaagtaataattatttattccaaccatagatactttgcttctttggccatagttgaattattatcttttaaaaatggttctgtttttattaagatgactagtagtatatacttttgatagataaatggcttatgttctttaaaagagatgagtgcccagtttgctcataataaaaactcggaagagataaacgtttaaaatatgttcttataataaacacagataaataaaacgtaggtatccatggtgtacatgtgccacattttcttaatccagtctatcattattggccatttgggttggttccaagtctttgctattgtgaatagtgctgcagtaaacatacatgtgcatgtgtctttatagcagcatgatttataatcctttgagtatataaccagtaatgcgatggctgggtcaaatggtaattctagttctagatccctgaggaatcgccacactgacttcyacaatgattcaactagtttacagtcccaccaacagtgtaaaagtgttcccatttctccacatcctctccagcacctgttgtttcctgactttttaatgatcg

SEQ ID NO: 385763 - DNA, 569 bp, Homo sapiens
aggaataaaacagctcaactttgtctacacctgcagaaccttgtttaggagctctgtcccaggagagagggggcaatggaattcagtcataaaatatgatccttaattagtcctaaaaatcctaacttcagtaacagcagawtgtggacaaattgaaagcctgccagtgctctcaaaaacagtggatggtgtggtggaaagcccttggaaggagacgggtggatgcatgggagatgcaggctacactgcagggctgctggcttgcaggagagaaccgaggacaagggagagctggggaaagttctcttgtggttgaaataaatgccagacactcttcaatggagcccatgtttgtttggttcagtctgtgaagtaattcaaacctcagtgcatgattgaaaatagtacaattttccatctgcaagtggcagagctcaacatctgggtctggtcaggagagagacagagagagcccagcccaaaccactgacacctggggttgacagtgctgcttacagatgtgttcctttgatctttgagactggtttctctcacttagcataatgcct

SEQ ID NO: 385764 - DNA, 569 bp, Homo sapiens
aggaataaaacagctcaactttgtctacacctgcagaaccttgtttaggagctctgtcccaggagagagggggcaatggaattcagtcataaaatatgatccttaattagtcctaaaaatcctaacttcagtaacagcagattgtggacaaattgaaagcctgccagtgctctcaaaaacagtggatggtgtggtggaaagcccttggaaggagacgggtggatgcatgggagatgcaggctacactgcagggctgctggcttgcaggagagaaccgaggacragggagagctggggaaagttctcttgtggttgaaataaatgccagacactcttcaatggagcccatgtttgtttggttcagtctgtgaagtaattcaaacctcagtgcatgattgaaaatagtacaattttccatctgcaagtggcagagctcaacatctgggtctggtcaggagagagacagagagagcccagcccaaaccactgacacctggggttgacagtgctgcttacagatgtgttcctttgatctttgagactggtttctctcacttagcataatgcct

SEQ ID NO: 385765 - DNA, 569 bp, Homo sapiens
aggaataaaacagctcaactttgtctacacctgcagaaccttgtttaggagctctgtcccaggagagagggggcaatggaattcagtcataaaatatgatccttaattagtcctaaaaatcctaacttcagtaacagcagattgtggacaaattgaaagcctgccagtgctctcaaaaacagtggatggtgtggtggaaagcccttggaaggagacgggtggatgcatgggagatgcaggctacactgcagggctgctggcttgcaggagagaaccgaggacaagggagagctggggaaagttctcttgtggttgaaayaaatgccagacactcttcaatggagcccatgtttgtttggttcagtctgtgaagtaattcaaacctcagtgcatgattgaaaatagtacaattttccatctgcaagtggcagagctcaacatctgggtctggtcaggagagagacagagagagcccagcccaaaccactgacacctggggttgacagtgctgcttacagatgtgttcctttgatctttgagactggtttctctcacttagcataatgcct

SEQ ID NO: 385766 - DNA, 604 bp, Homo sapiens
  misc_feature (1)...(604): n = A,T,C or G
nnnnnnnnnnnnnnnnnnnnnnnnnnnnnnnnnnnnnnnnnnnagcattacaataaactgatttggaagttaactgacttcctggtgaggttaaaatgagtgtcaggtgcatagtgagacagaccggagacatgggtgcatagcaaacttgtgctcaccatggyttctatcttagttagggaaacttctgtaccttccttagatgttcaggcactccattgaggaccctgacataacattatttattgacagaccatagcccaaagtatagaactggatattaccaaggaggatatactattactattttatctttatcttaaaatacactcttccaactgaggtgaaaattaatccagatggtagaacttattgcagttactacagcattttaggaaatcaaaagctgcagaacaaacatatggacagatggcaggtatgtttttggaatcataaacaacttcgtggtgattgtaaaaccaaggggtgtctcacaagggctggaaacctctcaaaatgaaacaacacactgaggatctttgagaagtactctgacctccaagtgagctggctgatatggaggctgagctacatgtagaaagcc

SEQ ID NO: 385767 - DNA, 634 bp, Homo sapiens
aaggaccagcatcatacccagtgcctgatgtgtatcatctcaattagtccttgcctcaaatgcaaaaggaagccattgccatcttcatcaccaccatcatcatcatcctcctgtgcagatggaaaagctgaggcatagagaggtgacggagtctgcccaagactgcaagcctgctggtggcagagccagattccaatggaatgaaggttgtcatcctcagatggcagggtaggcaggtggctagagctcacttgggagaaggggaaaggacactgacattggctagggatggagcagggcttgggctggctttccatgcacgggcagygggcctggctcatggctgtgctccagccccgggtgtggacattgaatcttccaggtctaccctaggctatgggtttggacagcactgtgatggaaagaagacgctctatgtcctgcagtctgtgaccaatgatgtgactgtgggaatggcgctggcatctggctgccactctgggacgggtggccagctgccatcaggccctgggatgggaccaccatacgacttcttccctcgctcctccaggtcatgtccacagcccaggaggaccagcaaagcctctcaagccgatggcagctcacgttctgc

SEQ ID NO: 385768 - DNA, 439 bp, Homo sapiens
tggattgtaggcacgctttaaattattaggagctgaaatcaacaccaaacaggaagaaatgcaaattcttamattttaattgaaattatatgctgtaatatgatagtgttatgtatctagatgatctgcttaagtccagttctaatatattctaaggtgtactaattacagtggataaaaattttttaataatctgtactgattttctgcaactaaaataaggtagaaggttattgtgtttgtgcactaacaccaaatgtcccattctgcaagatatgattcttgtaataggcagttgggttgcttttatgacctggttccctccctgaacagaaatgctgaggtcagtgagagaccacaaggcagaatatgtctttaaccttggtatctgtgactgacaatataaaactgcagattttcaatcactggccgggattat

SEQ ID NO: 385769 - DNA, 439 bp, Homo sapiens
tggattgtaggcacgctttaaattattaggagctgaaatcaacaccaaacaggaagaaatgcaaattcttaaattttaattgaaattatatgctgtaatatgatagtgttatgtatctagatgatctgcttaagtccagttctaatatattctaaggtgtactaattayagtggataaaaattttttaataatctgtactgattttctgcaactaaaataaggtagaaggttattgtgtttgtgcactaacaccaaatgtcccattctgcaagatatgattcttgtaataggcagttgggttgcttttatgacctggttccctccctgaacagaaatgctgaggtcagtgagagaccacaaggcagaatatgtctttaaccttggtatctgtgactgacaatataaaactgcagattttcaatcactggccgggattat

SEQ ID NO: 385770 - DNA, 439 bp, Homo sapiens
tggattgtaggcacgctttaaattattaggagctgaaatcaacaccaaacaggaagaaatgcaaattcttaaattttaattgaaattatatgctgtaatatgatagtgttatgtatctagatgatctgcttaagtccagttctaatatattctaaggtgtactaattacagtggataaaaattttttaataatctgtactgattttctgcaactaaaataaggtagaaggttattgtgtttgtgcactaacaccaaatgtcccattctgcaagatatgattcttgtaataggcagttgggttgcttttatgacctggttccctccctgaacagaaatgctgargtcagtgagagaccacaaggcagaatatgtctttaaccttggtatctgtgactgacaatataaaactgcagattttcaatcactggccgggattat

SEQ ID NO: 385771 - DNA, 439 bp, Homo sapiens
tggattgtaggcacgctttaaattattaggagctgaaatcaacaccaaacaggaagaaatgcaaattcttaaattttaattgaaattatatgctgtaatatgatagtgttatgtatctagatgatctgcttaagtccagttctaatatattctaaggtgtactaattacagtggataaaaattttttaataatctgtactgattttctgcaactaaaataaggtagaaggttattgtgtttgtgcactaacaccaaatgtcccattctgcaagatatgattcttgtaataggcagttgggttgcttttatgacctggttccctccctgaacagaaatgctgaggtcagtgagagaycacaaggcagaatatgtctttaaccttggtatctgtgactgacaatataaaactgcagattttcaatcactggccgggattat

SEQ ID NO: 385772 - DNA, 461 bp, Homo sapiens
aagctaatcaaaaaggcagataagaatattttaaataagaataccataaaataagagtattttaaattttatagtggttacgtttttaagctaaatatcaaatgtyaagttagaatttattaattcttctgttaatgagattgctgaatttattaaaataaattttaagaatctattaaaaaattcttaaaaaaagaatctattgattcttaaaacctagtctgaaaggtaatttcatttggactatctaatattattcaagcaaagaaaacaacgttaaatcaaaaatttaaacttaaaattttccatgcctctggctggctattttcactgactttaagcctttgtgactcttcctctgatgtcagctttaagtcttgttctgttgagaaatccatatattcagttaaaatgaaccacttagaacagttaaaaactattgcctttataaaaatagattg

SEQ ID NO: 385773 - DNA, 571 bp, Homo sapiens
ttattcaagcaaagaaaacaacgttaaatcaaaaatttaaacttaaaattttccatgcctctggctggctattttcactgactttaagcctttgtgactcttcctctgatgtcagctttaagtcttgttctgttgagaaatccatatattcagttaaaatgaaccacttagaacagttaaaaactattgcctttataaaaatagattgaagacaacattttattttatttcataaactgagtgtttagtctttcatgaaatagttacttaggaaataattctccaaaacttcaacaaaccacttggggagacacctgatgtgattcactcacaaattcatccacccaacataaatgaacaaaaccaccagaaacacaacttcaaaatacagtagaaacatataasgtaactcagtatgttgttcacttcctaatagtgaagcagtaaatgtaaagaaaaggaaatttagttttaaagagaaacaagttttcctgcacttagctagtctgactctaaggatagtaacaagcaggcccaggaaaggtcatggtgaccctgtctgagaagccag

SEQ ID NO: 385774 - DNA, 571 bp, Homo sapiens
ttattcaagcaaagaaaacaacgttaaatcaaaaatttaaacttaaaattttccatgcctctggctggctattttcactgactttaagcctttgtgactcttcctctgatgtcagctttaagtcttgttctgttgagaaatccatatattcagttaaaatgaaccacttagaacagttaaaaactattgcctttataaaaatagattgaagacaacattttattttatttcataaactgagtgtttagtctttcatgaaatagttacttaggaaataattctccaaaacttcaacaaaccacttggggagacacctgatgtgattcactcacaaattcatccacccaacataaatgaacaaaaccaccagaaacacaacttcaaaatacagtagaaacatataagrtaactcagtatgttgttcacttcctaatagtgaagcagtaaatgtaaagaaaaggaaatttagttttaaagagaaacaagttttcctgcacttagctagtctgactctaaggatagtaacaagcaggcccaggaaaggtcatggtgaccctgtctgagaagccag

SEQ ID NO: 385775 - DNA, 546 bp, Homo sapiens
gttttaaagagaaacaagttttcctgcacttagctagtctgactctaaggatagtaacaagcaggcccaggaaaggtcatggtgaccctgtctgagaagcyagagcccacaggtatgggctccagacatcccagagcaaggttaagaaaacaaattcctttaccatctcccctccccctcagcatttattcatagctatttttacaaatgcatatattttgcaaattcttgttttccttcaatgcagctgcaaggtcacaagctatgcagtggttgcaaaactgtcactatatgattaactgcctttgttctgcttctataagtttgcctatataagccaagccctgtctttgttcagggctcagctttttgatgcaaatccgctgagctggtgtgcacctaaacaaaatcctcttgtttgacccactgggtctctcctgcctcctcttttctgcaaaaatagtaccttacaaacgatttccaaaattactactgacacctttattagtgtacaatgtcttcttaacatctaaaatgtttccatcc

SEQ ID NO: 385776 - DNA, 605 bp, Homo sapiens
acactgtgtttgagtcagcaatctttagatttctatctagtcttcctacccagtccataaattctaagtataatcctagtactcgctctcaagtttaagttaaatgctagcctatacaaaaaatactctttctcttacttcttttttgttatttatatgttgctttktttaaaggaagaacacaaaaatgccctgctaaagggattctgtttggctgcaggctgcaagaggggaaaaacacaaagcacattttgcagaaaatgattttttagaagtcagaactatgacatgaagtcaagcagggcactctaggactgactttgctgtgcttccttaatatgctccttgctctctttcttttctggaagctgtgactcacacaggtcatggagaaaatttcgtactccttcctcattcccagcttaaatactagtgtacaacgtggaaacctgtaaattatctgacatttctctctgtcctccaaacctttctcattcaattatcactaaatcatattgactatacctctcttctgcctctgctttatattaccacttccactgagaacataaacatttacaaaatggcttttattacaaaaaagc

SEQ ID NO: 385777 - DNA, 571 bp, Homo sapiens
ctatctagtcttcctacccagtccataaattctaagtataatcctagtactcgctctcaagtttaagttaaatgctagcctatacaaaaaatactctttctcttacttcttttttgttatttatatgttgctttgtttaaaggaagaacacaaaaatgccctgctaaagggattctgtttggctgcaggctgcaagaggggaaaaacacaaagcacattttrcagaaaatgattttttagaagtcagaactatgacatgaagtcaagcagggcactctaggactgactttgctgtgcttccttaatatgctccttgctctctttcttttctggaagctgtgactcacacaggtcatggagaaaatttcgtactccttcctcattcccagcttaaatactagtgtacaacgtggaaacctgtaaattatctgacatttctctctgtcctccaaacctttctcattcaattatcactaaatcatattgactatacctctcttctgcctctgctttatattaccacttccactgagaacataaacatttacaaaatggcttttattacaaaaaa

SEQ ID NO: 385778 - DNA, 571 bp, Homo sapiens
ctatctagtcttcctacccagtccataaattctaagtataatcctagtactcgctctcaagtttaagttaaatgctagcctatacaaaaaatactctttctcttacttcttttttgttatttatatgttgctttgtttaaaggaagaacacaaaaatgccctgctaaagggattctgtttggctgcaggctgcaagaggggaaaaacacaaagcacattttgcagaaaatgattttttagaagtcagaactatgacatgaagtcaagcagggcactctaggactgactttgctgtgcttccttaatatgctccttgctctctttcttttctggaagctgtgactcacacaggtcatggagaaaatttcgtactccttcctcatkcccagcttaaatactagtgtacaacgtggaaacctgtaaattatctgacatttctctctgtcctccaaacctttctcattcaattatcactaaatcatattgactatacctctcttctgcctctgctttatattaccacttccactgagaacataaacatttacaaaatggcttttattacaaaaaa

SEQ ID NO: 385779 - DNA, 574 bp, Homo sapiens
tctcttctgcctctgctttatattaccacttccactgagaacataaacatttacaaaatggcttttattacaaaaaagccttccaactattaatgttatttctyacatgaaaaaaattaagcaaaacaaatgaaaaaagcataacaccaaaaaaaggccaacacattaaaatgagtaacggggattccaaactttatttcaccatgggcaggtgaaaaccttagaatacattgatagtagtccaaggatgtgtgacatggaaactatagctgactactgcaaaagcttcctttgtctcctggtttctttacatggttatcttccatcaatcccagcaaactataggccacaggacaaatccaatctgccttttggctttgtaaataaagttttataggagctcagtcatgcctgtttgcttacatataatcatggtggctttcacactacaacaacagacaacagcctggttaagtagatatgacagagaccacatagtctaaaatatttcccacctggtcctttacagaaaaagcttgctaacccattttacaccataagcagaatatgcctt

SEQ ID NO: 385780 - DNA, 574 bp, Homo sapiens
tctcttctgcctctgctttatattaccacttccactgagaacataaacatttacaaaatggcttttattacaaaaaagccttccaactattaatgttatttcttacatgaaaaaaattaagcaaaacaaatgaaaaaagcataacaccaaaaaaaggccaacacattaaaatgagtaayggggattccaaactttatttcaccatgggcaggtgaaaaccttagaatacattgatagtagtccaaggatgtgtgacatggaaactatagctgactactgcaaaagcttcctttgtctcctggtttctttacatggttatcttccatcaatcccagcaaactataggccacaggacaaatccaatctgccttttggctttgtaaataaagttttataggagctcagtcatgcctgtttgcttacatataatcatggtggctttcacactacaacaacagacaacagcctggttaagtagatatgacagagaccacatagtctaaaatatttcccacctggtcctttacagaaaaagcttgctaacccattttacaccataagcagaatatgcctt

SEQ ID NO: 385781 - DNA, 574 bp, Homo sapiens
tctcttctgcctctgctttatattaccacttccactgagaacataaacatttacaaaatggcttttattacaaaaaagccttccaactattaatgttatttcttacatgaaaaaaattaagcaaaacaaatgaaaaaagcataacaccaaaaaaaggccaacacattaaaatgagtaacggggattccaaactttatttcaccatgggcaggtgaaaaccttagaatacattgatastagtccaaggatgtgtgacatggaaactatagctgactactgcaaaagcttcctttgtctcctggtttctttacatggttatcttccatcaatcccagcaaactataggccacaggacaaatccaatctgccttttggctttgtaaataaagttttataggagctcagtcatgcctgtttgcttacatataatcatggtggctttcacactacaacaacagacaacagcctggttaagtagatatgacagagaccacatagtctaaaatatttcccacctggtcctttacagaaaaagcttgctaacccattttacaccataagcagaatatgcctt

SEQ ID NO: 385782 - DNA, 574 bp, Homo sapiens
tctcttctgcctctgctttatattaccacttccactgagaacataaacatttacaaaatggcttttattacaaaaaagccttccaactattaatgttatttcttacatgaaaaaaattaagcaaaacaaatgaaaaaagcataacaccaaaaaaaggccaacacattaaaatgagtaacggggattccaaactttatttcaccatgggcaggtgaaaaccttagaatacattgatagtagtccaaggatgtgtgacatggaaactatagmtgactactgcaaaagcttcctttgtctcctggtttctttacatggttatcttccatcaatcccagcaaactataggccacaggacaaatccaatctgccttttggctttgtaaataaagttttataggagctcagtcatgcctgtttgcttacatataatcatggtggctttcacactacaacaacagacaacagcctggttaagtagatatgacagagaccacatagtctaaaatatttcccacctggtcctttacagaaaaagcttgctaacccattttacaccataagcagaatatgcctt

SEQ ID NO: 385783 - DNA, 447 bp, Homo sapiens
ccacatagtctaaaatatttcccacctggtcctttacagaaaaagcttgctaacccattttacaccataagcagaatatgccttaataytcaaatttaatcttgtaactcccctgctcaaatttctccaatgagcccctgcagcacacattgttggctcctatcaatagccattccttattctttcttgcagaagaaacacaagtctattgggatatttattatcccaatccccctcctcagcctcagaaagagaaatgtttattctaagctaatcatgtatttgccatcccattgcctggtttgggaatgagcatgtggtgtgacccagccaatgaaatgttacaggaagccccttgcatgcttctaagttttctccctgtttaaaagacacatgtgaagaaaagcagcccttgaaatgttgtgttgtgagaacaagatgtttgga

SEQ ID NO: 385784 - DNA, 447 bp, Homo sapiens
ccacatagtctaaaatatttcccacctggtcctttacagaaaaagcttgctaacccattttacaccataagcagaatatgccttaatattcaaatttaatcttgtaactyccctgctcaaatttctccaatgagcccctgcagcacacattgttggctcctatcaatagccattccttattctttcttgcagaagaaacacaagtctattgggatatttattatcccaatccccctcctcagcctcagaaagagaaatgtttattctaagctaatcatgtatttgccatcccattgcctggtttgggaatgagcatgtggtgtgacccagccaatgaaatgttacaggaagccccttgcatgcttctaagttttctccctgtttaaaagacacatgtgaagaaaagcagcccttgaaatgttgtgttgtgagaacaagatgtttgga

SEQ ID NO: 385785 - DNA, 447 bp, Homo sapiens
ccacatagtctaaaatatttcccacctggtcctttacagaaaaagcttgctaacccattttacaccataagcagaatatgccttaatattcaaatttaatcttgtaactcccctgctcaaatttctccaatgagcccctgcagcacacattgttggctcctatcaatagccattccttattctttcttgcagaagaaacacaagtctattgggatatttattatcccaatccccctcctcagcctcagaaagagaaatgtttattctaagytaatcatgtatttgccatcccattgcctggtttgggaatgagcatgtggtgtgacccagccaatgaaatgttacaggaagccccttgcatgcttctaagttttctccctgtttaaaagacacatgtgaagaaaagcagcccttgaaatgttgtgttgtgagaacaagatgtttgga

SEQ ID NO: 385786 - DNA, 447 bp, Homo sapiens
ccacatagtctaaaatatttcccacctggtcctttacagaaaaagcttgctaacccattttacaccataagcagaatatgccttaatattcaaatttaatcttgtaactcccctgctcaaatttctccaatgagcccctgcagcacacattgttggctcctatcaatagccattccttattctttcttgcagaagaaacacaagtctattgggatatttattatcccaatccccctcctcagcctcagaaagagaaatgtttattctaagctaatcatgtatttgccwtcccattgcctggtttgggaatgagcatgtggtgtgacccagccaatgaaatgttacaggaagccccttgcatgcttctaagttttctccctgtttaaaagacacatgtgaagaaaagcagcccttgaaatgttgtgttgtgagaacaagatgtttgga

SEQ ID NO: 385787 - DNA, 484 bp, Homo sapiens
ttccttattctttcttgcagaagaaacacaagtctattgggatatttattatcccaatccccctcctcagcctcagaaagagaaatgtttattctaagctaatcatgtatttgccatcccattgcctggtttgggaatgagcatgtggtgtgacccagccaatgaaatgttacaggaagccccttkcatgcttctaagttttctccctgtttaaaagacacatgtgaagaaaagcagcccttgaaatgttgtgttgtgagaacaagatgtttggagctgctgcggattagccaaccacgaaaggaaacatgaagaaaacactgccaacagcacagctgaaagagggaaaaatgggatcctaggatatcactgaacaaccaaaacaactctggttcctactgttttagccactgctcatctagtatttacagtccaaagcattctacctggtaaatttcccatggcccacagggtaagacctact

SEQ ID NO: 385788 - DNA, 529 bp, Homo sapiens
tgggaatgagcatgtggtgtgacccagccaatgaaatgttacaggaagccccttgcatgcttctaagttttctccctgtttaaaagacacatgtgaagaaaagcagcccttgaaatgttgtgttgtgagaacaagatgtttggagctgctgcggattagccaaccaygaaaggaaacatgaagaaaacactgccaacagcacagctgaaagagggaaaaatgggatcctaggatatcactgaacaaccaaaacaactctggttcctactgttttagccactgctcatctagtatttacagtccaaagcattctacctggtaaatttcccatggcccacagggtaagacctactcatttctatagtattaaaaaagtctatcataaacttgccttagctaagtattcacctcattcccaaactctggtgtctcacacttttggtactagcaaaagtgaactgctcagaaaccctgcaaagttcactcggcatcttgtcttttgcagttgttgctcttcctgccaaacagg

SEQ ID NO: 385789 - DNA, 529 bp, Homo sapiens
tgggaatgagcatgtggtgtgacccagccaatgaaatgttacaggaagccccttgcatgcttctaagttttctccctgtttaaaagacacatgtgaagaaaagcagcccttgaaatgttgtgttgtgagaacaagatgtttggagctgctgcggattagccaaccacgaaaggaaacatgaagaaaacactgccaacagcacagctgaaagagggamaaatgggatcctaggatatcactgaacaaccaaaacaactctggttcctactgttttagccactgctcatctagtatttacagtccaaagcattctacctggtaaatttcccatggcccacagggtaagacctactcatttctatagtattaaaaaagtctatcataaacttgccttagctaagtattcacctcattcccaaactctggtgtctcacacttttggtactagcaaaagtgaactgctcagaaaccctgcaaagttcactcggcatcttgtcttttgcagttgttgctcttcctgccaaacagg

SEQ ID NO: 385790 - DNA, 411 bp, Homo sapiens
actgttttagccactgctcatctagtatttacagtccaaagcattctacctggtaaatttcccatggcccacagggtaagacctactcatttctatagtattaaaaaagtctatcataaacttgccttagctaagtattcacctcattcccaaactctggtgtctcacacttttggtactagcaaaagtgaactgctcagaaaccctgcaaagttcactcggcatcytgtcttttgcagttgttgctcttcctgccaaacaggcaatctcatcagatgttcttctggcaaacacacaaacttgttgcaatttcctcctgccaaaaattattcttctgcttctttacctagaaaaattcttctcactctgcatgcttactttgaatcatacctactttttttcaaaactttc

SEQ ID NO: 385791 - DNA, 411 bp, Homo sapiens
actgttttagccactgctcatctagtatttacagtccaaagcattctacctggtaaatttcccatggcccacagggtaagacctactcatttctatagtattaaaaaagtctatcataaacttgccttagctaagtattcacctcattcccaaactctggtgtctcacacttttggtactagcaaaagtgaactgctcagaaaccctgcaaagttcactcggcatcttgtcttttgcagttgttgctcttcctgccaaacaggcaatctcatcagatgttcttctggcaaacacacaaacttgttgcawtttcctcctgccaaaaattattcttctgcttctttacctagaaaaattcttctcactctgcatgcttactttgaatcatacctactttttttcaaaactttc

SEQ ID NO: 385792 - DNA, 411 bp, Homo sapiens
actgttttagccactgctcatctagtatttacagtccaaagcattctacctggtaaatttcccatggcccacagggtaagacctactcatttctatagtattaaaaaagtctatcataaacttgccttagctaagtattcacctcattcccaaactctggtgtctcacacttttggtactagcaaaagtgaactgctcagaaaccctgcaaagttcactcggcatcttgtcttttgcagttgttgctcttcctgccaaacaggcaatctcatcagatgttcttctggcaaacacacaaacttgttgcaakttcctcctgccaaaaattattcttctgcttctttacctagaaaaattcttctcactctgcatgcttactttgaatcatacctactttttttcaaaactttc

SEQ ID NO: 385793 - DNA, 547 bp, Homo sapiens
cttaaattactttggctaagataaacacaaagttactcataacaagacagattataagcaaaattttaaaagtcgtargcaaaaggaatcttggaagcaagcagtaagataaacctgttgtgtcatctatagcatgcttcattgagatttgcagtggatttatcaacacagtccttgcaggccagaaaaaaagttaagtgatatagtcaaagtgctgaaacaaaaactttcaaagcaagaatactataactaggaaaattcttcaaaaaaaattccaaagtaacaaaatgcagtaaaagtacatcactagtatatctgccttactgaaaatgcttaggggtgtctcttccactgaaaataaaattctagaaaaaacctacattatataaaaaacatataactctctaataaagacatgcacataacaggaaattgtattaaaattataatatagaaaacaattctattttcaaaatttgatagacaaaaacatgaaagtagttataaacacaatatgacaatataatttgtgacttacaaagttgag

SEQ ID NO: 385794 - DNA, 547 bp, Homo sapiens
cttaaattactttggctaagataaacacaaagttactcataacaagacagattataagcaaaattttaaaagtcgtaggcaaaaggaatcttggaagcaagcagtaagataaacctgttgtgtcatctatagcatgcttcattgagatttgcagtggatttatcaacacagtccttgcaggccagaaaaaaagttaagtgatatagtcaaagtgctgaaacaaaaactttcaaagcaagaatactataactaggaaaattcttcaaaaaaaattccaaagtaacaaaatgcagtaaaagtacatcactagtatatctgccttactgaaaatgcttaggggtgtctcttccactgaaaataaaattctagaaaaaacctacattatataaaaaacatataactctctaataaagacatgcacataacaggaaattgtattaaaattataatayagaaaacaattctattttcaaaatttgatagacaaaaacatgaaagtagttataaacacaatatgacaatataatttgtgacttacaaagttgag

SEQ ID NO: 385795 - DNA, 524 bp, Homo sapiens
cagctacaatacttttgcagccatccatggacaaaagtgcctttatgggagctttgggattagagagggcattatgataccctgtgaaaaacaaagactgaggagggctgttttgggaaggcaggccytcattcagggggcaaatctgagaacccctgatcttgtctacagactaggaattgacccatcctactcagtcacactgagaatcctgaagtgactctgtaaccatctccaatgcctcccagttatggtctggaattagtccttcccatacagagaactggggagagacattcatgataatggaggcagacctacagaatttaacctttcacctttactgtggcctctgaagcaggtctgtgactcagtttcagccctcttcaccatagtttatagacagttctgcccacctagagacccacaaagggagagaaaaccctctcaggtactcagcagaagtcacacttcatccacacacctactatcagggccgccatatgcaaacccagcttcagaac

SEQ ID NO: 385796 - DNA, 566 bp, Homo sapiens
agggcattatgataccctgtgaaaaacaaagactgaggagggctgttttgggaaggcaggccctcattcagggggcaaatctgagaacccctgatcttgtctacagactaggaattgacccatcctactcagtcacactgagaatcctgaagtgactctgtaaccatctccaatgcctcccagttatggtctggaattagtccttcccatacagagaactggggagagacattcatgataatggaggcagacctacagaatttaacctttcacctttactgtggcctctgaagcaggtctgtgactcagtttcagccctcttcaccatagtttatagacagttctgcccacctagagacccacaaagggagagaaaaccctctcaggtactcagcagaagtcacacttcatccacacacctactatcagggccgccatatgcaaacccagcttcagaaccctggccctggcatctgccctacagatcaaagttctgaaagcagttgagtctgctcraaataagaggagtcacaatgaagccaccttgtgcccaattttaatgcttc

SEQ ID NO: 385797 - DNA, 540 bp, Homo sapiens
tctgtgaacttttaccctcttcagaagtagagggcttctgtttacctcttgtggtagattttattgtgtatacatcttattatatatagattgatgtgtaaatagtatggattaattattttagtttagttatatatttatgaaaactaaaatagcaaatataaatgatygttactatcgcaaatgtattgctctactcaacaggagttttcttttaaaaatattgaacttccaacctatgtttatccattctttcaatccgtttagtcatcaaacataagccagacacctattatatggcaagcatattctgctatctctcaggatccttccacctttgaaaacttcatgtttacctgctgcgcctgagcaagctgagagaatcaaaattggggcattaggacttaatctcaattgaagcttttcctccctcctttcaaacaaaagcacttctgaaggtggaaaatagtaaaagataacccttaactgcccttttgaaaatgtataagacttgggtaaacactgttttagctgttttaa

SEQ ID NO: 385798 - DNA, 540 bp, Homo sapiens
tctgtgaacttttaccctcttcagaagtagagggcttctgtttacctcttgtggtagattttattgtgtatacatcttattatatatagattgatgtgtaaatagtatggattaattattttagtttagttatatatttatgaaaactaaaatagcaaatataaatgattgttactatcgcaaatgtattgctctactcaacaggagttttctttwaaaaatattgaacttccaacctatgtttatccattctttcaatccgtttagtcatcaaacataagccagacacctattatatggcaagcatattctgctatctctcaggatccttccacctttgaaaacttcatgtttacctgctgcgcctgagcaagctgagagaatcaaaattggggcattaggacttaatctcaattgaagcttttcctccctcctttcaaacaaaagcacttctgaaggtggaaaatagtaaaagataacccttaactgcccttttgaaaatgtataagacttgggtaaacactgttttagctgttttaa

SEQ ID NO: 385799 - DNA, 540 bp, Homo sapiens
tctgtgaacttttaccctcttcagaagtagagggcttctgtttacctcttgtggtagattttattgtgtatacatcttattatatatagattgatgtgtaaatagtatggattaattattttagtttagttatatatttatgaaaactaaaatagcaaatataaatgattgttactatcgcaaatgtattgctctactcaacaggagttttcttttaaaaatattgaacttccaacctatgtttatccattctttcaatccgtttagtcatcaaacataagccagacacctattatatggcargcatattctgctatctctcaggatccttccacctttgaaaacttcatgtttacctgctgcgcctgagcaagctgagagaatcaaaattggggcattaggacttaatctcaattgaagcttttcctccctcctttcaaacaaaagcacttctgaaggtggaaaatagtaaaagataacccttaactgcccttttgaaaatgtataagacttgggtaaacactgttttagctgttttaa

SEQ ID NO: 385800 - DNA, 540 bp, Homo sapiens
tctgtgaacttttaccctcttcagaagtagagggcttctgtttacctcttgtggtagattttattgtgtatacatcttattatatatagattgatgtgtaaatagtatggattaattattttagtttagttatatatttatgaaaactaaaatagcaaatataaatgattgttactatcgcaaatgtattgctctactcaacaggagttttcttttaaaaatattgaacttccaacctatgtttatccattctttcaatccgtttagtcatcaaacataagccagacacctattatatggcaagcatattctgctatctctcaggatccttccacctttgaaaacttcatgtttacctgctgcrcctgagcaagctgagagaatcaaaattggggcattaggacttaatctcaattgaagcttttcctccctcctttcaaacaaaagcacttctgaaggtggaaaatagtaaaagataacccttaactgcccttttgaaaatgtataagacttgggtaaacactgttttagctgttttaa

SEQ ID NO: 385801 - DNA, 555 bp, Homo sapiens
aggacttaatctcaattgaagcttttcctccctcctttcaaacaaaagcacttctgaaggtggaaaatagtaaaagataacccttaactgcccttttgaaaatgtataagacttgggtaaacactgttttagctgttttaagaacttaaatgtggtacataaacagcatggaatactatgtagccayaaaagaaagaacaagagcctgtcctttgcagggacatggatggtgttgaaggccattatccttagcaaactaacataggaagagaaaaccaaatactgcatggtctcacttataggtgggagctaaatgaggagaacacacagacacctagagggaagcaacacacactggggcctatcagagggtggagggtgggaggaaggaaagaagcaggaaatagaactaacgggtactaggcttaacacctgagtaatgaaataatctgtacagccaacccccttggaacacgtttacctatgttaaccaacctgcacatcctgcacctgtatccccgaatgtaaaagttgaaaaaagctccacaaatagtt

SEQ ID NO: 385802 - DNA, 555 bp, Homo sapiens
aggacttaatctcaattgaagcttttcctccctcctttcaaacaaaagcacttctgaaggtggaaaatagtaaaagataacccttaactgcccttttgaaaatgtataagacttgggtaaacactgttttagctgttttaagaacttaaatgtggtacataaacagcatggaatactatgtagccacaaaagaaagaacaagagcctgtcctttgcagggacatggatggtgttgaaggccattatccttagcaaactaacataggaagagaaaaccaaatactgcatggtctcacttataggtgggagctaaatgaggagaacacacagacacctagagggaagcaacacacactggggcctatcagagggtggagggtgggaggaaggaaagaagcaggaaatagaactaacgggtactaggcttaacacctgagtaatgaaataatctgtacarccaacccccttggaacacgtttacctatgttaaccaacctgcacatcctgcacctgtatccccgaatgtaaaagttgaaaaaagctccacaaatagtt

SEQ ID NO: 385803 - DNA, 555 bp, Homo sapiens
aggacttaatctcaattgaagcttttcctccctcctttcaaacaaaagcacttctgaaggtggaaaatagtaaaagataacccttaactgcccttttgaaaatgtataagacttgggtaaacactgttttagctgttttaagaacttaaatgtggtacataaacagcatggaatactatgtagccacaaaagaaagaacaagagcctgtcctttgcagggacatggatggtgttgaaggccattatccttagcaaactaacataggaagagaaaaccaaatactgcatggtctcacttataggtgggagctaaatgaggagaacacacagacacctagagggaagcaacacacactggggcctatcagagggtggagggtgggaggaaggaaagaagcaggaaatagaactaacgggtactaggcttaacacctgagtaatgaaataatctgtacagccaacccccttggmacacgtttacctatgttaaccaacctgcacatcctgcacctgtatccccgaatgtaaaagttgaaaaaagctccacaaatagtt

SEQ ID NO: 385804 - DNA, 561 bp, Homo sapiens
agagtaataggctattcagtgtttgcaactacatgaatcattaatgtggcattagctagtgcactacaatttcctgaagtcttctcactctcataggactgctctacatttggcctctgccaatggaaattcagaagtagtacaactcctgctggacagacgatgtcaacttaacgtccttgacaacaaaaaaaggacagctctgataaaggtatgcagtagtcaactatatcagcgtgagatgggtttgatttcaatagatagcataaaaatgagttttctcatttaaatataactagttggtgaaagctgtggaatgttattttgaattcctaggacttataatttgtttttggtctaatactgacaggccgtacaatgccaggaagatgaatgtgtgttaatgttgctggaacatggcgcygatggaaatattcaagatgagtatggaaataccgctctacactatgctatctacaatgaagataaattaatggccaaagcactgctcttatatggtgctgatattgaatcaaaaaacaaggtatagatctaccaatt

SEQ ID NO: 385805 - DNA, 520 bp, Homo sapiens
aaataccaaggccaacttggaaattaggtaatgggggaaaagaccatgaagaggtttttttttgtttttgtttttgtttttgtttgtgtgtgtgtgtgtgtgtgtgtgtgtgtgtgtgtgttgttattgttgttcattcatttgtttcctttatatggtgagacagggttcttttccattttagagaatgacagttttcagtttgggagagggagttagtgggttgtaaactgcctagagatcaattttaggaggcctctgaggaaccagaytggcagtgaatatgtggtaatgtagtgggaaacccttgagtagaaggaataacaagtaattaaccaaattagtatcctattctggtagaaatggccaattagagtctcaactctgctttcaattctagaatgtcttgatgggaaggtgggagataaggggcttataagtaaaaagatcaggttggattttgagtttactagaccttgttctactcttaccggggaaaattttgtggtgttttcagcaa

SEQ ID NO: 385806 - DNA, 607 bp, Homo sapiens
gttcttttccattttagagaatgacagttttcagtttgggagagggagttagtgggttgtaaactgcctagagatcaattttaggaggcctctgaggaaccagactggcagtgaatatgtggtaatgtagtgggaaacccttgagtagaaggaataacaagtaattaaccaamttagtatcctattctggtagaaatggccaattagagtctcaactctgctttcaattctagaatgtcttgatgggaaggtgggagataaggggcttataagtaaaaagatcaggttggattttgagtttactagaccttgttctactcttaccggggaaaattttgtggtgttttcagcaaatgagtctctctcctactctttcctctttttggccaaatcctcaaatgataaagggaattgtttatgtgatgagagatgagactgaaataattgtctattgcactagcttccagctagagttgtgcattccagttacttcaggaaaatttttaaataatcttcaagtctaggttttcccctgaagattttgatagagtaagtctaataaagcctggatatgtatgtttaaaaatgtttccttgaagccaggcat

SEQ ID NO: 385807 - DNA, 575 bp, Homo sapiens
cctttaaatctttcctttccaataacattaatctaaatttttgtttgtttgtttttgagatggggtctcactctgttccccaggctggagtgcagtggtgcggtcacagatcaccacagccttgacgtccctaagctctggtggtcctccaatctgtttttgtatttttttttttttagtagagatgaggtttttgccatgtttctcaggctgatcttgaactcctgggctcaagtgaatcacccacctcaggctcccaaaatgctaagattacaggtgtgagccaccattcctggcctagtctgacttatctctgtcgttgrgacattaaaataaatattattggcactatctatcagcttacagaataataccttttcctttctaccatcagttattcactgccattcagaaggtctttagaaatttgcagtgagtagtcttccaataagtagaggatggctctctcaggactttgtgtccctttgttcaatcattcaagtgcttaggtcagtaagtcgtttttaagagcagagttttctcagaattgtagcaaattctaaaccttttttgtc

SEQ ID NO: 385808 - DNA, 575 bp, Homo sapiens
cctttaaatctttcctttccaataacattaatctaaatttttgtttgtttgtttttgagatggggtctcactctgttccccaggctggagtgcagtggtgcggtcacagatcaccacagccttgacgtccctaagctctggtggtcctccaatctgtttttgtatttttttttttttagtagagatgaggtttttgccatgtttctcaggctgatcttgaactcctgggctcaagtgaatcacccacctcaggctcccaaaatgctaagattacaggtgtgagccaccattcctggcctagtctgacttatctctgtcgttgggacattaaaatraatattattggcactatctatcagcttacagaataataccttttcctttctaccatcagttattcactgccattcagaaggtctttagaaatttgcagtgagtagtcttccaataagtagaggatggctctctcaggactttgtgtccctttgttcaatcattcaagtgcttaggtcagtaagtcgtttttaagagcagagttttctcagaattgtagcaaattctaaaccttttttgtc

SEQ ID NO: 385809 - DNA, 575 bp, Homo sapiens
cctttaaatctttcctttccaataacattaatctaaatttttgtttgtttgtttttgagatggggtctcactctgttccccaggctggagtgcagtggtgcggtcacagatcaccacagccttgacgtccctaagctctggtggtcctccaatctgtttttgtatttttttttttttagtagagatgaggtttttgccatgtttctcaggctgatcttgaactcctgggctcaagtgaatcacccacctcaggctcccaaaatgctaagattacaggtgtgagccaccattcctggcctagtctgacttatctctgtcgttgggacattaaaataaatattattggcactatctatcagcttacagaataataccttttcctttctaccatcagttattcactgccattcagaaggtctttagaaatttgcagtgagtagtcttccaataagtagaggatggctctctcaggactttgtgtccctttgttcamtcattcaagtgcttaggtcagtaagtcgtttttaagagcagagttttctcagaattgtagcaaattctaaaccttttttgtc

SEQ ID NO: 385810 - DNA, 602 bp, Homo sapiens
tgctcatttagaaacaaagagtcttggaaacagtaaatgtttaaagtgagtttttgagatgatcagatttaatgtggtgaggcagagaagggatgtttccaagggaaggagtggcatgtgggaaagtacagaagagtgagaaggaagcgaccaaattttatttactttctgtgagtgtaagtccataagcttcyagttcagttgagagatacataattttttgaattacatattgtttttgttttatattgttttacagtgtggcctcacaccacttttgcttggcgtacatgaacaaaaacaggaagtggtgaaatttttaatcaagaaaaaagctaatttaaatgcacttgatagatatggaaggtatggttatttcttttaatctgtgtgttgttctagattgatagcagtcactcaagtcataaataataaattaataagatcaaattatacttattgggacatagtgatcagtatcaacacaaatcagttaagtagaaaagcaattatttggactgggcaacataaagaactgttttagtaggattcatcttctcttattatattgactgatgttatttgttgtatgatgtttttgg

SEQ ID NO: 385811 - DNA, 602 bp, Homo sapiens
tgctcatttagaaacaaagagtcttggaaacagtaaatgtttaaagtgagtttttgagatgatcagatttaatgtggtgaggcagagaagggatgtttccaagggaaggagtggcatgtgggaaagtacagaagagtgagaaggaagcgaccaaattttatttactttctgtgagtgtaagtccataagcttctagttcagttgagagatacataattttttgaattacatattgtttttgttttatattgttttacagtgtggsctcacaccacttttgcttggcgtacatgaacaaaaacaggaagtggtgaaatttttaatcaagaaaaaagctaatttaaatgcacttgatagatatggaaggtatggttatttcttttaatctgtgtgttgttctagattgatagcagtcactcaagtcataaataataaattaataagatcaaattatacttattgggacatagtgatcagtatcaacacaaatcagttaagtagaaaagcaattatttggactgggcaacataaagaactgttttagtaggattcatcttctcttattatattgactgatgttatttgttgtatgatgtttttgg

SEQ ID NO: 385812 - DNA, 602 bp, Homo sapiens
tgctcatttagaaacaaagagtcttggaaacagtaaatgtttaaagtgagtttttgagatgatcagatttaatgtggtgaggcagagaagggatgtttccaagggaaggagtggcatgtgggaaagtacagaagagtgagaaggaagcgaccaaattttatttactttctgtgagtgtaagtccataagcttctagttcagttgagagatacataattttttgaattacatattgtttttgttttatattgttttacagtgtggcctcacaccacttttgcttggcgtacatgaacaaaaacagsaagtggtgaaatttttaatcaagaaaaaagctaatttaaatgcacttgatagatatggaaggtatggttatttcttttaatctgtgtgttgttctagattgatagcagtcactcaagtcataaataataaattaataagatcaaattatacttattgggacatagtgatcagtatcaacacaaatcagttaagtagaaaagcaattatttggactgggcaacataaagaactgttttagtaggattcatcttctcttattatattgactgatgttatttgttgtatgatgtttttgg

SEQ ID NO: 385813 - DNA, 602 bp, Homo sapiens
tgctcatttagaaacaaagagtcttggaaacagtaaatgtttaaagtgagtttttgagatgatcagatttaatgtggtgaggcagagaagggatgtttccaagggaaggagtggcatgtgggaaagtacagaagagtgagaaggaagcgaccaaattttatttactttctgtgagtgtaagtccataagcttctagttcagttgagagatacataattttttgaattacatattgtttttgttttatattgttttacagtgtggcctcacaccacttttgcttggcgtacatgaacaaaaacaggaagtggtgaaatttttaatcaagaaaaaagctaatttaaatgcacttgatagatatggaaggtatggttatttcktttaatctgtgtgttgttctagattgatagcagtcactcaagtcataaataataaattaataagatcaaattatacttattgggacatagtgatcagtatcaacacaaatcagttaagtagaaaagcaattatttggactgggcaacataaagaactgttttagtaggattcatcttctcttattatattgactgatgttatttgttgtatgatgtttttgg

SEQ ID NO: 385814 - DNA, 532 bp, Homo sapiens
atagatatggaaggtatggttatttcttttaatctgtgtgttgttctagattgatagcagtcactcaagtcataaataataaattaataagatcaaattatacttattgggacatagtgatcagtatcaacacaaatcagttaagtagaaaagcaattatttggactgggcaacataaagaactgttttagtaggattcatcttctcttattatattgactgatgttatttgttgtatgatgtttttggttacatgatcttatgttagctaaagggatttcatattaattttatgaagtttgaactttaactttcagtttactttatgactcagtattgaactttttaaccctttctagtaggttttaacctctgtatcttatatgcttttccactaaatatgctgtattaaacataaataggagtygaaaatccttttgtcttttcaatgactctgctttaagttgctttctttgaagaatattaatgttagcttatccctacatgacaattaattgctattcccacatac

SEQ ID NO: 385815 - DNA, 567 bp, Homo sapiens
gcagtcactcaagtcataaataataaattaataagatcaaattatacttattgggacatagtgatcagtatcaacacaaatcagttaagtagaaaagcaattatttggactgggcaacataaagaactgttttagtaggattcatcttctcttattatattgactgatgttatttgttgtatgatgtttttggttacatgatcttatgttagctaaagggatttcatattaattttatgaagtttgaactttaactttcagtttactttatgactcagtattgaactttttaaccctttctagtaggttttaacctctgtatcttatatgcttttccactaaatatgctgtattaaacataaataggagttgaaaatccttttgtcttttcaatgactctgctttaagttgctttctttgaagaatattaatgttagcttatccctacatgacaattaattgctattcccacatactgtgggttcaacagcttttttccttttttakttccagtgtattttgatgtttttatttttagttggtatggagagagggagtgaagatagt

SEQ ID NO: 385816 - DNA, 606 bp, Homo sapiens
atattgactgatgttatttgttgtatgatgtttttggttacatgatcttatgttagctaaagggatttcatattaattttatgaagtttgaactttaactttcagtttactttatgactcagtattgaactttttaaccctttctagtaggttttaacctctgtatcttatatgcttttccactaaatatgctgtattaaacataaataggagttgaaaatccttttgtcttttcaatgactctgctttaagttgctttctttgaagaatattaatgttagcttatccctacatgacaattaattgctattcccacatactgtgggttcaacagcttttttccttttttatttccagtgtattttgatgtttttatttttagttggtatggagagagggagtgaagatagttttaagtggatacacttttcctttaatgaaggcaagctgtaggtgggtgayaaagagaaaagagctacgctttggattcacacaagactgggtttaattcctaactttcttacttgctacgtgtgtgacattgggaacgtgatttaccacccaatatgttgtcatatgtgaaaagtaggagaatatatccttcaa

SEQ ID NO: 385817 - DNA, 635 bp, Homo sapiens
tttatttttagttggtatggagagagggagtgaagatagttttaagtggatacacttttcctttaatgaaggcaagctgtaggtgggtgataaagagaaaagagctacgctttggattcacacaagactgggtttaattcctaactttcttacttgctacgtgtgtgacattgggaacgtgatttaccacccaatatgttgtcatatgtgaaaagtaggagaatatatccttcaaagttggctgtgcataagcaagaaagrtacatgtggcatttaattcagtgcatagcacatgcttattggcatcattaactgaaactcctgtgactactattcttaccattattattaatattactgctttcagcatgcagagagctcttatttatcttagcccctagctaattttctattacagcatatcagtctagggaagctgtgacaaaatcttcacttaaatctttgtccacttcagataagtggccctagcattgtttcttgcccatcaaaggactttaaattagtagcttctgctatgcaataccccactgagataagaggtttcctttttgtcccttccttttaaccttggtggtattttacaaagatgaactcttgagcacccaagatgctta

SEQ ID NO: 385818 - DNA, 635 bp, Homo sapiens
tttatttttagttggtatggagagagggagtgaagatagttttaagtggatacacttttcctttaatgaaggcaagctgtaggtgggtgataaagagaaaagagctacgctttggattcacacaagactgggtttaattcctaactttcttacttgctacgtgtgtgacattgggaacgtgatttaccacccaatatgttgtcatatgtgaaaagtaggagaatatatccttcaaagttggctgtgcataagcaagaaaggtacatgtggcatttaattcagtgcrtagcacatgcttattggcatcattaactgaaactcctgtgactactattcttaccattattattaatattactgctttcagcatgcagagagctcttatttatcttagcccctagctaattttctattacagcatatcagtctagggaagctgtgacaaaatcttcacttaaatctttgtccacttcagataagtggccctagcattgtttcttgcccatcaaaggactttaaattagtagcttctgctatgcaataccccactgagataagaggtttcctttttgtcccttccttttaaccttggtggtattttacaaagatgaactcttgagcacccaagatgctta

SEQ ID NO: 385819 - DNA, 579 bp, Homo sapiens
cattaactgaaactcctgtgactactattcttaccattattattaatattactgctttcagcatgcagagagctcttatttatcttascccctagctaattttctattacagcatatcagtctagggaagctgtgacaaaatcttcacttaaatctttgtccacttcagataagtggccctagcattgtttcttgcccatcaaaggactttaaattagtagcttctgctatgcaataccccactgagataagaggtttcctttttgtcccttccttttaaccttggtggtattttacaaagatgaactcttgagcacccaagatgcttatgtcttttagcgcatgtaaatgtttgattctgcatggacaggcaagatgtcaaattggtaaagtatatcaaattagcttttaaaataactttattacagttcctaaaggagaaattatctctgtaattttagaactgccctcatacttgctgtatgttgtggatcagcaagtatagtcaatcttctacttgagcaaaatgttgatgtatcttctcaagatctatctggacagacagccagagagtatgct

SEQ ID NO: 385820 - DNA, 632 bp, Homo sapiens
atttaccacccaatatgttgtcatatgtgaaaagtaggagaatatatccttcaaagttggctgtgcataagcaagaaaggtacatgtggcatttaattcagtgcatagcacatgcttattggcatcattaactgaaactcctgtgactactattcttaccattattattaatattactgctttcagcatgcagagagctcttatttatcttagcccctagctaattttctatyacagcatatcagtctagggaagctgtgacaaaatcttcacttaaatctttgtccacttcagataagtggccctagcattgtttcttgcccatcaaaggactttaaattagtagcttctgctatgcaataccccactgagataagaggtttcctttttgtcccttccttttaaccttggtggtattttacaaagatgaactcttgagcacccaagatgcttatgtcttttagcgcatgtaaatgtttgattctgcatggacaggcaagatgtcaaattggtaaagtatatcaaattagcttttaaaataactttattacagttcctaaaggagaaattatctctgtaattttagaactgccctcatacttgctgtatgttgtggatcagcaagtatagtc

SEQ ID NO: 385821 - DNA, 579 bp, Homo sapiens
cattaactgaaactcctgtgactactattcttaccattattattaatattactgctttcagcatgcagagagctcttatttatcttagcccctagctaattttctattacagcatatcagtctagggaagctgtgacaaaatcttcacttaaatctttgtccacttcagataagtggccctagcattgtttcttgcccatcaaaggactttaaattagtagcttctgctatgcaataccccactgagataagaggtttcctttttgtcccttccttttaaccttggtggtattttacaaagatgaactcttgagcacccaagatgcttatgtcttttagygcatgtaaatgtttgattctgcatggacaggcaagatgtcaaattggtaaagtatatcaaattagcttttaaaataactttattacagttcctaaaggagaaattatctctgtaattttagaactgccctcatacttgctgtatgttgtggatcagcaagtatagtcaatcttctacttgagcaaaatgttgatgtatcttctcaagatctatctggacagacagccagagagtatgct

SEQ ID NO: 385822 - DNA, 568 bp, Homo sapiens
ctatgcaataccccactgagataagaggtttcctttttgtcccttccttttaaccttggtggtattttacaaagatgaactcttgagcacccaagatgcttatgtcttttagcgcawgtaaatgtttgattctgcatggacaggcaagatgtcaaattggtaaagtatatcaaattagcttttaaaataactttattacagttcctaaaggagaaattatctctgtaattttagaactgccctcatacttgctgtatgttgtggatcagcaagtatagtcaatcttctacttgagcaaaatgttgatgtatcttctcaagatctatctggacagacagccagagagtatgctgtttctagtcatcatcatgtgtaagtgtttacatgaaaaggctagttaatgctaaattgaggtttaaaataattataacaattgcatcttacatatcaggtgagatgtcatagtttggttcaggtagttttagagtggcagtgagttagtcccctgcatcagccagaaatcagacaaaaagcaagacaagttagaagtaccaatgggtgcaggatt

SEQ ID NO: 385823 - DNA, 579 bp, Homo sapiens
cattaactgaaactcctgtgactactattcttaccattattattaatattactgctttcagcatgcagagagctcttatttatcttagcccctagctaattttctattacagcatatcagtctagggaagctgtgacaaaatcttcacttaaatctttgtccacttcagataagtggccctagcattgtttcttgcccatcaaaggactttaaattagtagcttctgctatgcaataccccactgagataagaggtttcctttttgtcccttccttttaaccttggtggtattttacaaagatgaactcttgagcacccaagatgcttatgtcttttagcgcatgtaaatgtttgattctgcatggacaggcaagatgtyaaattggtaaagtatatcaaattagcttttaaaataactttattacagttcctaaaggagaaattatctctgtaattttagaactgccctcatacttgctgtatgttgtggatcagcaagtatagtcaatcttctacttgagcaaaatgttgatgtatcttctcaagatctatctggacagacagccagagagtatgct

SEQ ID NO: 385824 - DNA, 500 bp, Homo sapiens
tgtgacaaaatcttcacttaaatctttgtccacttcagataagtggccctagcattgtttcttgcccatcaaaggactttaaattagtagcttctgctatgcaataccccactgagataagaggtttcctttttgtcccttccttttaaccttggtggtattttacaaagatgaactcttgagcacccaagatgcttatgtcttttagcgcatgtaaatgtttgattctgcatggacaggcaagatgtcaaattggtaaagtatatcaaattagcttttaaaataactttattacagttyctaaaggagaaattatctctgtaattttagaactgccctcatacttgctgtatgttgtggatcagcaagtatagtcaatcttctacttgagcaaaatgttgatgtatcttctcaagatctatctggacagacagccagagagtatgctgtttctagtcatcatcatgtgtaagtgtttacatgaaaaggctagttaatgc

SEQ ID NO: 385825 - DNA, 602 bp, Homo sapiens
accttggtggtattttacaaagatgaactcttgagcacccaagatgcttatgtcttttagcgcatgtaaatgtttgattctgcatggacaggcaagatgtcaaattggtaaagtatatcaaattagcttttaaaataactttattacagttcctaaaggagaaattatctctgtaattttagaactgccctcatacttgctgtatgttgtggatcagcaagtatagtcaatcttctacttgagcaaaatgttgatgtatcttctcaagatctatctggacagacrgccagagagtatgctgtttctagtcatcatcatgtgtaagtgtttacatgaaaaggctagttaatgctaaattgaggtttaaaataattataacaattgcatcttacatatcaggtgagatgtcatagtttggttcaggtagttttagagtggcagtgagttagtcccctgcatcagccagaaatcagacaaaaagcaagacaagttagaagtaccaatgggtgcaggattctttacctcaggacttttaagacctttatccttagagatcccaatattgttcatttcatccaagtataacacctatgcatggcata

SEQ ID NO: 385826 - DNA, 602 bp, Homo sapiens
accttggtggtattttacaaagatgaactcttgagcacccaagatgcttatgtcttttagcgcatgtaaatgtttgattctgcatggacaggcaagatgtcaaattggtaaagtatatcaaattagcttttaaaataactttattacagttcctaaaggagaaattatctctgtaattttagaactgccctcatacttgctgtatgttgtggatcagcaagtatagtcaatcttctacttgagcaaaatgttgatgtatcttctcaagatctatctggacagacagccagagagtatgctgtttctagtcatcatcatgtgtaagtgtttacatgaaaaggctagttaatgctaaattgaggtttaaaataattataacaattgcatcttacatatcaggtgagatgtcatagtttggttcaggtagttttagagtggcagtgagttartcccctgcatcagccagaaatcagacaaaaagcaagacaagttagaagtaccaatgggtgcaggattctttacctcaggacttttaagacctttatccttagagatcccaatattgttcatttcatccaagtataacacctatgcatggcata

SEQ ID NO: 385827 - DNA, 509 bp, Homo sapiens
cctgggcaacatagcaagactccatctctacaaataataagatattaaccaggtgtggtggtgcgtacctgtggtcccagctacctgggaggctgaggtgggaggtttgctcaaggctgaagtgaactgtgaatgcaccactgcattccagcctaggctacagaatgagacttgtctataaataaagaaataagtaaaaatataaaytaaaagaagtaaaaaaaataagtaaatagaaatacatataaagatgagtacatcaaaacaaacaatttttaaatttaacatcactgagggcatcctggccatttttctatttttctaggaaaatgtttttattactcctttttttctaagatcctacctttccttacaaagcagtcttttgtgcttttgaagattatgtgatctaatatatatagtatacttaggacagtatctggtacttgtaaagtgtttaataaatgttagatcttatttttgttctaaattcccactgatgcttttgg

SEQ ID NO: 385828 - DNA, 543 bp, Homo sapiens
atgcacatgtatatgtttttctcctatcaaatgatatctaggttgtttccattaatatttttaaaatgctgacctggtaccagcagcatgatgggctgagttaatatagtctccttcccaaatcacaatactcatagatacactaagtgtaaaagaaaacatgtatacttaaaaaaaattaggaagagtgcagtagcttacgcctataatcccagcactttgggaggctgaggcaggtggatcacatgaggtttggagtttgagagaagcctggccaacatggcgaaaccccatctctactaaaaaaaaaataaaaataaaaattagccargcatgtgacaggtgcttgtaatcccagctacttgggaggctgaggcaggagaatcatttgaacctgggaggcagaggttgcagtgagctgagatcgtgccactgcactccagcctgggcgacaagagcaaaactccatctgttaattaattaattaattaagtttatagctgaaggtagtttctaagcaaattacctagcatacagtcatta

SEQ ID NO: 385829 - DNA, 543 bp, Homo sapiens
atgcacatgtatatgtttttctcctatcaaatgatatctaggttgtttccattaatatttttaaaatgctgacctggtaccagcagcatgatgggctgagttaatatagtctccttcccaaatcacaatactcatagatacactaagtgtaaaagaaaacatgtatacttaaaaaaaattaggaagagtgcagtagcttacgcctataatcccagcactttgggaggctgaggcaggtggatcacatgaggtttggagtttgagagaagcctggccaacatggcgaaaccccatctctactaaaaaaaaaataaaaataaaaattagccaggcatgtgacrggtgcttgtaatcccagctacttgggaggctgaggcaggagaatcatttgaacctgggaggcagaggttgcagtgagctgagatcgtgccactgcactccagcctgggcgacaagagcaaaactccatctgttaattaattaattaattaagtttatagctgaaggtagtttctaagcaaattacctagcatacagtcatta

SEQ ID NO: 385830 - DNA, 543 bp, Homo sapiens
atgcacatgtatatgtttttctcctatcaaatgatatctaggttgtttccattaatatttttaaaatgctgacctggtaccagcagcatgatgggctgagttaatatagtctccttcccaaatcacaatactcatagatacactaagtgtaaaagaaaacatgtatacttaaaaaaaattaggaagagtgcagtagcttacgcctataatcccagcactttgggaggctgaggcaggtggatcacatgaggtttggagtttgagagaagcctggccaacatggcgaaaccccatctctactaaaaaaaaaataaaaataaaaattagccaggcatgtgacaggtgcttgtaatcccagctacttgggaggctgaggcaggagaatcatttgaacctgggaggcagaggttgcagtgagctgagatcgtgccactgcactccagcctgggcgacaagagcaaaaytccatctgttaattaattaattaattaagtttatagctgaaggtagtttctaagcaaattacctagcatacagtcatta

SEQ ID NO: 385831 - DNA, 437 bp, Homo sapiens
agaccattctgcttgccagaaatggaatacaatgctttgcctaatagatggaaatttctcataaaataaagaaataccccaccgatgaaatgatgctggccctcaaaaaggaagtgaggactctgtgtcactcaattcccagcttttctgcttcattgttgtctctgcagatgaccttcctctgttgtcccaccatcattgccaaaaccaagcaaatacaaaaacaaacagtgctaaaatgtaattgttaaattcttgtcaccgaaatttgccttccttctttttcagatactgtttctgaaagaggatttggctagaamcagacttaatcaaatgagactcaagaatatgcccccattttacaaaaactgcaagtcatctgcttaatattctggaaaaccatttgaacactttatagtagatatagtagttgatat

SEQ ID NO: 385832 - DNA, 599 bp, Homo sapiens
gatagaattggatccatacacttggaaactcataaaaaggtgttgagagttgattttcagaatcaaggacgataaccagtattatcayatgaacaaaaaagaagcttctcaagatatttacaagatgggtttggggaacacttacagcaaatttaacgtatcagtgacccatatatttatattttttgcacattgattacaataagcacaaaggtagctgagctattgttcaagacaccatattgaagtagaaataatttcattttttaaaaagtgtaaaattatccaccctatcttgaacctcattatggctctgtggaccatcatattcaaaggagatgaattttcagaatttctctcagcctaagttagttaaaaatttacccaccccccaagtaagtaaacatagtattttcatatagaattattagatactaaaaaatttattttcatagaatttctgacaaataaaacattttaaatttctcaacattaaggcttttatttctaagaaatcaatcttcaaggttttcatttggataagaaagtaaagtggttactgacagtccatgatgttaaataaatcacgactacactag

SEQ ID NO: 385833 - DNA, 492 bp, Homo sapiens
tattttaaaaaaatccaaaagacaacaaatattggtgacatatgaagaaattggaacccttgtacaacattggtgggaatataaaattgtgyagccactataaaaaacagtatgatgagtcttcaaataattaaaaatcgaattatcatataaaccagcaattgcacttctgggcatatatccaaaagaatttaaatcaagctcttgaagagacataggtactcttatgttcattgcaccattatttacaatagtccagatatagaaacaactttaatgtccattgaaagatgaagaaaatgtagtacacacatgtaatggaatattattcatcattaagaaaaagaagaaatcctgtcatatgatgaacctggaggacattatgttaagtgaaataagccaggcacggaaggacaaatactgcatgattaaatttatatgaggaatccaaaatagtcaaactcatagaaacagagaatagaaggtggttgc

SEQ ID NO: 385834 - DNA, 659 bp, Homo sapiens
gatggcaatgctgtgtctgagctcacgcttgtaatcccagcatttggtgagaccgaggtgggtggatcacctgaggtcaggagttcgagaccagcckggccaacatagcgaaaccttatctctaccaaaagtaacaaaaaaaattagctgggcgtggtggtgggcacctttaatcccagctattcgggggctgaggcaggagaatcacttgaaccagggaggcaggggttgcagtgacccgagatggtgccgctgcattccagcctgggcaacaagagagaaacttcatctcaaaaaaaataaatacataaaagaaaaagaaaaataggtttgcattattttgttccaagagaatacatttttctgtcctttgccaacactgctatggatttatggagctttcacctgatgtgtcccacttggcagaatttttcagaaaatactctgcatggcttgaagttgtgttttttcctcctgcattgtacacagagctttaactcttccctgccctaagcatagtttggtttctttccaatagttccattatttaaaatagaataatttcatatatttaatgattattctctttattcttcccattttcttactcatctctctcctgacgtgacagaacaccactgaatgaaaagtgaaagctg

SEQ ID NO: 385835 - DNA, 659 bp, Homo sapiens
gatggcaatgctgtgtctgagctcacgcttgtaatcccagcatttggtgagaccgaggtgggtggatcacctgaggtcaggagttcgagaccagccgggccaacatagcgaaaccttatctctaccaaaagtaacaaaaaaaattagctgggcgtggtggtgggcacctttaatcccagctattcgggggctgaggcaggagaatcacttgaaccagggaggcaggggttgcagtgacccgagatggtgccgctgcattccagcctgggcaacaagagagaaacttcatctcaaaaaaaataaatacataaaagaaaaagaaaaataggtttgcattattttgttccaagagaatacatttttctgtcctttgccaacactgctatggatttatggagctttcacctgatgtgtmccacttggcagaatttttcagaaaatactctgcatggcttgaagttgtgttttttcctcctgcattgtacacagagctttaactcttccctgccctaagcatagtttggtttctttccaatagttccattatttaaaatagaataatttcatatatttaatgattattctctttattcttcccattttcttactcatctctctcctgacgtgacagaacaccactgaatgaaaagtgaaagctg

SEQ ID NO: 385836 - DNA, 601 bp, Homo sapiens
cttatttatttttacttttttttatgtttgggggcacctgtgaaggtttgttatataggtaagctagtgtcatggaggttgttatatagattatttcatcacccaggtattaagctcagtactcaatagttatcttttctattagaagaactctatgaaatgtgacagacagtgttgtaaacatgttttgttaaaaggagcctataaattacatcatatggaaacacatctggtccatcaactaatcgagtgagttattttaaccttatttttgaggtctaaacagcataaagcatcattgcytaggcttaagagtttgttaatgaaaaaaacagtgggaaagcaaggaatgtaattttactgaataaacgtattgtggactctagccactattatagagcaagatttctcctggtaattcatgaccccacccctctcaccaacatacacatacatatacaaatacacacataccacacacacacagagctaacaaacacatgagccatttcaggcaagaacagttctttctaaaaacagacaccttgcctgtaatgcaataattctgaaaatgtgtcaagatgagtatatagtgtaaaga

SEQ ID NO: 385837 - DNA, 551 bp, Homo sapiens
aagatttgctgcataaagttataaattttattctttttaattttaaagttataaattttattctttttaattttaaagtcataaattttattctttttaattttaaagttacaaattttataagatgatctataaacagatctacatttgaatcctaatggcaacaatttctataatagggaccttggaaaactcatttaaattgctttaattttatttcttatctattaaatgggataataatttcctcatatgatggtagaaaaataatgtgcttagtwtatcgtaactaatgatgttacagtgttgtaaagcaatggattgcttttttttttttttttttttgagacagagtctcgctctgttgcccagtctggagtgcagtggtgcgatctcggcagctcactgagacctctgcctcccaggctcaagtgactctcctgcatcagcctccccagtagctgggattacaggcatgtgccaccacactcggctactttttttgtatttttagtagagacaaggtttaaccatgatggccaggttggtct

SEQ ID NO: 385838 - DNA, 534 bp, Homo sapiens
agatttgctgcataaagttataaattttattctttttaattttaaagttataaattttattctttttaattttaaagtcataaattttattctttttaattttaaagttacaaattttataagatgatctataaacagatctacatttgaatcctaatggcaacaatttctataatagggaccttggaaaactcatttaaattgctttaattttatttcttatctattaaatgggataataatttcctcatatgatggtagaaaaataatgtgcttagtttatcgtaactaatgatgttacagtgttgtaaagcaatggattgcttttttttttttttttttttgagacagagtctcgctctgttgcccagtctggagtgcagtgrtgcgatctcggcagctcactgagacctctgcctcccaggctcaagtgactctcctgcatcagcctccccagtagctgggattacaggcatgtgccaccacactcggctactttttttgtatttttagtagagacaaggtttaaccatg

SEQ ID NO: 385839 - DNA, 471 bp, Homo sapiens
attacctacatcacaaatgtttctttgtagtaatcyctttattaaaccctgctcaaatgaaccaattttaatggccatctttacttgcaagatttgtgactaccactggtcctagaagtagtccaagaagataaatattcacaagggattgggttgtttacgtatttgaagattaggtggagaaatatgtgatggaagaaatgagacattaataatgtatgaaatcctgtgacatcaaatttacataaatgatcaccagtggcatcaaagtatgaagggcagatcaagggcaaggtattgagagataaatttactgtgacaaaggcatgaatatagtgattataaatcttatgtggtgagctggatttgctgaaattaaaatctgttaccatccaactgaaaaaacaaacaggaagtcaaaatgattcttatcttctgtagtccttgggaaaatatagtgaaaaacaagtg

SEQ ID NO: 385840 - DNA, 471 bp, Homo sapiens
attacctacatcacaaatgtttctttgtagtaatccctttattaaaccctgctcaaatgaaccaattttaatggccatctttacttgcaagatttgtgactaccactggtcctagaagtagtccaagaagataaatattcacaagggattgggttgtttacgtatttgaagattaggtggagaaatatgtgatggaagaaatgagacattaataatgtatgaaatcctgtgacatcaaatttacataaatgatcaccagtggcatcaaagtatgaagggcagatcaagggcaaggyattgagagataaatttactgtgacaaaggcatgaatatagtgattataaatcttatgtggtgagctggatttgctgaaattaaaatctgttaccatccaactgaaaaaacaaacaggaagtcaaaatgattcttatcttctgtagtccttgggaaaatatagtgaaaaacaagtg

SEQ ID NO: 385841 - DNA, 591 bp, Homo sapiens
tttatcgagactagagaatggcaatgacttttaccaggcatactgcctgtaaacattttgttaacaaggcacatcctgcacagccctagatctcttaaaccttgattccatacaacacatatttttgtgagctcaaggttggagcaaagaggttggggcaaagtggctggggcaaagttacagattaacagcatctcagggcaaagcaattgttcagggtacaggtcaaaatgaaatttcttatatcttccctttctatacagacacagtaacagtctgatctctccttcttttctctacasttatggaggtaaaaatgtttgatcaacctgacagactacagaagatgatgtctgaaagtatctgaagatagatatattgtaactgatgccatatgtgtaatccgctctgtcactgcctaactaaccatcactgcctgctcttcccccaccccacaatctctcatctggctcaccctagggctccagggatctcattttattaatgcattaaggaatacaccgttgacaaagtcattgtcattgttggaaagctctgcagggctcccagtgtaggctagggatgatgatg

SEQ ID NO: 385842 - DNA, 490 bp, Homo sapiens
taatggtctaccaattttttgtctttccaaaaaaccatttttttagtctgaatttcatttagttctgctctgatctttgttatttcttttcttctgctagctttgggtttggtttcttcttgtttctctacttccttgagatgtarcattaggttgtcaatttgtgatctttcagacagagtaacatatgcatttagcactataaactttcctcttagcactgtttttgctgcatcccagaggttttgataatttgcgtcactgttatcattaattttgaagaattttaaaatttcaatgttgattcctttattaaaccaaaaatcattcaggagctgattgtttaatttccatgtgtttatgtagttttgaggattcctattggaattgatttctagttttgttctcttgtgatctgagaagatacttgatatgattctgatatttttacatttgttaagacttgcttgtggcctatcatatagtctac

SEQ ID NO: 385843 - DNA, 490 bp, Homo sapiens
taatggtctaccaattttttgtctttccaaaaaaccatttttttagtctgaatttcatttagttctgctctgatctttgttatttcttttcttctgctagctttgggtttggtttcttcttgtttctctacttccttgagatgtaacattaggttgtcaatttgtgatctttcagacagagtaacatatgcatttagcactataaactttcctcttagcactgtttttgctgcatcccagaggttttgataatttgcgtcactgttatcattaattttgaagaattttaaaatttcaatgttgattcctttattaaaccaaaaatcattcaggagctgattgtttaatttccatgtgtttatgyagttttgaggattcctattggaattgatttctagttttgttctcttgtgatctgagaagatacttgatatgattctgatatttttacatttgttaagacttgcttgtggcctatcatatagtctac

SEQ ID NO: 385844 - DNA, 524 bp, Homo sapiens
tcacattcagtgttaatattgagatgtggggtactgttccagtaatcatgtttgttgctacctaagactttgttttcttcattgtgttcttattttaaaggacctgtgaattttatgctttcaaggtgtcctattctggtgcatatcaaccttttgtttcaagatttagaaatccttttagcatttctagtctggtagtgacaaatctcctcaacctttttttgtttgagaaatactttattcctccttcattcatgaaacttagttttgctggataaaaaattcttggctgaccattattyggtttaaggaggctaaagataggaccccaatctctcctagcttgtaaggtttctgctgagaagtctgctgttagtctgataggtttgttttataggttacttggtgcattttttcttattgctgttagaattctttcctttacgttgactttagatagcatgatgaccgtatgccttggtgatgacctttttgcagtgaattccccaggagtcctttaagct

SEQ ID NO: 385845 - DNA, 552 bp, Homo sapiens
atttcaaattcatttttgacctcagtagttaaatttccgtaggaatttgtattttactttcaaattaatatgaaagatttttctgaatacttcaaatcaataagttgcagatgaaacatttccaaaagtgaatgcaaaacttactgctaaatttacacttaaacatatttctaaattatgttataaaacatgctgcatgcttctattttatgttcttatttatttttatgttttcctaagattattattagctgtactttatctttttactarggtctctgtaatattacttagacataattctagagctaacttccaagtataaaataatatgaatatgcacttagcgagctatgtttacaatatatggatatatgggcatattcttattcttatttgaagaatgaattctggtaggctcccataaaaatattagaatagaagccgtcaagtagtttgagactctcttctatagttacatgtcagggtttatgataccacggtgttttaagattagatgtgtcacatcagttttactttctgcaattgatg

SEQ ID NO: 385846 - DNA, 559 bp, Homo sapiens
agtttaacttctgttattttcccttcattagaaaatgctctttttccatctgcatttgttggaaaacatgtatcattttaatgttaaatcattttgatttgtagtttcattctgtggccatatgggctgtttgtcttaaattgattacttcatacaaaattagarcaattttttggatgaggcaacatctttgaaaacatggaaccaagggaactccaaggggtttcttgaagaaaaaatttgaaaactgctggactcaacatcttctgattctaatattctctctaatgatgattcggggattggatcatttataaaagcaataactatcatttaagaacacttcactctaaatctagtactgtgcttagtgtttcacatgttatatttatttattcctcgcaacacccatcatagctatgtttcaagattaacagcaataattttacacaagaccaaattgaggtttaataagtagctagttattacacaattggtaagtggtgttgtctttctcagaggatgtaatacttaacagtaagccaccttctttcatact

SEQ ID NO: 385847 - DNA, 559 bp, Homo sapiens
agtttaacttctgttattttcccttcattagaaaatgctctttttccatctgcatttgttggaaaacatgtatcattttaatgttaaatcattttgatttgtagtttcattctgtggccatatgggctgtttgtcttaaattgattacttcatacaaaattagaacaattttttggatgaggcaacatctttgaaaacatggawccaagggaactccaaggggtttcttgaagaaaaaatttgaaaactgctggactcaacatcttctgattctaatattctctctaatgatgattcggggattggatcatttataaaagcaataactatcatttaagaacacttcactctaaatctagtactgtgcttagtgtttcacatgttatatttatttattcctcgcaacacccatcatagctatgtttcaagattaacagcaataattttacacaagaccaaattgaggtttaataagtagctagttattacacaattggtaagtggtgttgtctttctcagaggatgtaatacttaacagtaagccaccttctttcatact

SEQ ID NO: 385848 - DNA, 559 bp, Homo sapiens
agtttaacttctgttattttcccttcattagaaaatgctctttttccatctgcatttgttggaaaacatgtatcattttaatgttaaatcattttgatttgtagtttcattctgtggccatatgggctgtttgtcttaaattgattacttcatacaaaattagaacaattttttggatgaggcaacatctttgaaaacatggaaccaagggaactccaaggggtttcttgaagaaaaaatttgaaaactgctggactcaacatcttctgattctaatattctctctaatgatgattcrgggattggatcatttataaaagcaataactatcatttaagaacacttcactctaaatctagtactgtgcttagtgtttcacatgttatatttatttattcctcgcaacacccatcatagctatgtttcaagattaacagcaataattttacacaagaccaaattgaggtttaataagtagctagttattacacaattggtaagtggtgttgtctttctcagaggatgtaatacttaacagtaagccaccttctttcatact

SEQ ID NO: 385849 - DNA, 592 bp, Homo sapiens
tctgtagacttcaggaaggcacatgatacacaataactttgtatgtcaagtttatcccttttatagaaaaaagacatctgccccatgtggtaggaaggcattctggcaaaagaaaccacaactttcaaggtgcagaagcagtcagtggagtgtagggtggaggaatggttggaaatttgtcagagctgcctggtgtaccgagtgtattgaaggaaacaataggaatgaggttagatgagatcatgaataattttttaggctatactcagaatattgttggagatggtatkaatcatgttatttttaaaattttctgtattttatgatactttaacatcttgggggccttactaatcctcaagactgctcctcctggagccagctaattcttagatataaaaatcagcatgtcccagtgaatgcttctgatatgcaaaccagtcaatccaaagcccatgtgcccttcacctcctttatcttactcacacatacacaaagccaatatttcttctgccctaaatcactccagggccaggtacctcacaactagaaaccacccctatagtccagagcatgtggaaagtattcaaat

SEQ ID NO: 385850 - DNA, 631 bp, Homo sapiens
actctcagcagtttcagaagttgccatagaataatggtgaggtatgaaaacgaggctttgtggttcctgtaacataacagaatgtaaatggatgttgagttattgtgggactaaagactaaagcaayatttctatgtcactggcaataactgactcatacaattggccaaaatttgcagcaaacacctcattcccatattctaacattaaaatcagctagtttcagaatcttttataaagatgattagatcccaagtgtttatagtcatggacttcctcatggttttatagcttgagaaagtggcaaataaagcaattaaacagaacgaggcaatatcaattaaaagctaaacatttccagaggttgcatgatacactaaaaatatggatggagagaggaattgggactatatggaataaggacattaagcagccaaggggagagctaacaacaacaacaacaacaacaaatccttgcatgtagagagaatctctaacttcctcttcggcttcggaagaacccagcttacccttggacaaaagtctcccgaagactgcacttagagagttgcctcataagtgaataaattctctttagcacttaattgtatccctccaaattgtttttgta

SEQ ID NO: 385851 - DNA, 631 bp, Homo sapiens
actctcagcagtttcagaagttgccatagaataatggtgaggtatgaaaacgaggctttgtggttcctgtaacataacagaatgtaaatggatgttgagttattgtgggactaaagactaaagcaatatttctatgtcactggcaataactgactcatacaattggccaaaatttgcagcaaacacctcattcccatattcyaacattaaaatcagctagtttcagaatcttttataaagatgattagatcccaagtgtttatagtcatggacttcctcatggttttatagcttgagaaagtggcaaataaagcaattaaacagaacgaggcaatatcaattaaaagctaaacatttccagaggttgcatgatacactaaaaatatggatggagagaggaattgggactatatggaataaggacattaagcagccaaggggagagctaacaacaacaacaacaacaacaaatccttgcatgtagagagaatctctaacttcctcttcggcttcggaagaacccagcttacccttggacaaaagtctcccgaagactgcacttagagagttgcctcataagtgaataaattctctttagcacttaattgtatccctccaaattgtttttgta

SEQ ID NO: 385852 - DNA, 573 bp, Homo sapiens
tatttgtatatcatgcatatatatttaatcatgtcactatctgtcatttaaaatccaatcaacatgaaacaatctgttatatttatcctcttttgttttatcagtactttcttatattctttatggtacttttttgtttttgttgaatatccttgaatccttgtctttcattgtttcaatatactgcaattagaaatgcatattattttgttattatcatgatttctttggcactcagaatgtcacagcttcaccaggaaaaattccataagttgactcctttagtctctgcccttatcatttgtagaggctttgatgttttctagacacaacagaatgtgggargcacatgttatttattttcttacttggaaatgtagattcagctatcttctaagaattccctattcttttaggggggcaataatattgggggtacaaacctatgtccaaggcatgcacatgcataatattaagaagcacataggattgtcttcttttagcatggaaagattttggtctggtgtctccaccctgtttcatagcagtaaccagtgagttgtctcactgagc

SEQ ID NO: 385853 - DNA, 353 bp, Homo sapiens
aacctactggtgaactggatcagaatgggccaagggctgttaaacacagaaagtatttacattttgaaaacttgctctgcaggataaaaaaattcctggttgctgtcagtaagaaagcaagtaaaaaaatattacagatgaactcactgatctttgattttactaaggtcttccactggaacatgaaggtagagataagtgtacaggataatatactctgatatttttaaaataaattacttaataataagaaattagccatackacattcttccatttgctacaagaacaaattggcaatgaagactatttaaaagaaatgctcagctctgcagagggtggtggcaggcaac

SEQ ID NO: 385854 - DNA, 601 bp, Homo sapiens
tgtccactcattgattgatgggcatttgggctggttccatatttttgcaatcgtgaattgtgctgctataaacatatgtgtgcaartatctttttcatataatgacttcttttcctctggttagatacccagtagtgggattgctggatcaaatggtagttctacttttagttctttaaggaatctccacactgtttttcatagtgacggcactagtttatattcccaccagcagtgtagtcgtgttcccttttcacccattcatgtcgacatctattatttttttattatggctattcttgcaggagtaaggtggtagcacattgtggttttgattggcatttccatgatcattagtgatgttgggcattttttcatatttttgttggccatttgtacatctgacaaaggactaatatccagaatctacaaggaattcaaataaattagtaaagaaaaaataatctcatcaaaaagtgtgcaaaagacatgaatagacaatcctttgactgatcagagttttgtcatttttcctcatatagatcttatagatactttataggagtcatacctttttcatttattgtgagtattaatgtac

SEQ ID NO: 385855 - DNA, 539 bp, Homo sapiens
cttttataaacaaccagatctcataagaactcactcgctattatgagaacagcaagaggaaaatccgctcccagggttcaatcacctcccaccaggcccctcttccaacattgttatatcatcttcttgtactttaatattgatatctttctctaggtttagaaagttttctactcttatctctttgaatatactttttatcctgatctctatacatcctcctaaggcaaacaactcttagattttcccttttgaggttattttctagattctgcaggtgtgcttcactttttaaattctttgtgtcttttgtctcctttgtatattttcaaatagcttgtcttcaagctcactaactcttctgcttgatcagttctactgttgagagactctgactcattctttagtttgttgattaaattttttcagctccagaatttctgcttgatttaktaaagtgatttcaacctctttgttaagtttatctgatagaattctgaattccttctttgtattatcttgaatttcattcagcttca

SEQ ID NO: 385856 - DNA, 637 bp, Homo sapiens
tatttcattcttccgagcttcagcgttttcatctgtaccaaataaggagtaatatatatatcacaaagatactgcacatgttaaataaactttgtttttcattggcagtaaatgtggctatccatttgtaaatcctttgcacacctatggctgttatttaataaacattcagaagtgatagtagttttcagagtaagagttgcaacgtatgtgctgtgctatcagataaggtaaagaaaatgttaaaaaaaatttgcaggttttacaattctgtgtaaaattctatgtaattgctttgttctttcacaggagccccatccagctgarcagagatgtggtaaaacaagttttcaaaatatgttttctatagtgagtgtgctataaatctaactaattctgcttctccaacttgaatttaggaaagcccggagataatttaaaacaccaaaaacatgtgtatggaatacataatgttgaagattattttcacacataagtgtaaagtaattcatattcagtcaatttttgcacatttggtttggtcgttcactttcaaagttctataatgaacacaatttatctccttaagtgaagaaacataatttcttcaccaaatgttacaaaatgttacaaaaag

SEQ ID NO: 385857 - DNA, 637 bp, Homo sapiens
tatttcattcttccgagcttcagcgttttcatctgtaccaaataaggagtaatatatatatcacaaagatactgcacatgttaaataaactttgtttttcattggcagtaaatgtggctatccatttgtaaatcctttgcacacctatggctgttatttaataaacattcagaagtgatagtagttttcagagtaagagttgcaacgtatgtgctgtgctatcagataaggtaaagaaaatgttaaaaaaaatttgcaggttttacaattctgtgtaaaattctatgtaattgctttgttctttcacaggagccccatccagctgagcagagatgtggtaaaacaagttttcaaaatatgttttctatagtgagtgtgctataaatctaactaattctgcttctccaacttgaatttaggaaagcccggagataatttaaaacaccaaaaacatgtgtatggaatacataatgttgaagattattttcacacmtaagtgtaaagtaattcatattcagtcaatttttgcacatttggtttggtcgttcactttcaaagttctataatgaacacaatttatctccttaagtgaagaaacataatttcttcaccaaatgttacaaaatgttacaaaaag

SEQ ID NO: 385858 - DNA, 464 bp, Homo sapiens
ggaatgaagatttgtgtcactccaccaggtaaaaaaccgtgtcctgctaaggtgcttgctgaaggtaaagggaatacagaatgggttgtagaaggaggtagttatgaactgaccataaggggtcaagccctgccaattcctccattattccccacaagattagacagaactaggccccttgggaagtgccctggaacacagggaagttggatgtctgccrtgggctctcttttctccactagagaacacaggcccaagaaatccctttcagtgtgacactgtttggtcgggaaagaagcaacacagtcaaagtgaaactgctccccttacacttctaatatgacttttcccagtttctgtgctccaagagtgtgccccacctcacccttgggttatggaatttttacctaggcattcttatctgtgagaagttgctaactggtcattctgttctggaaaccaga

SEQ ID NO: 385859 - DNA, 464 bp, Homo sapiens
ggaatgaagatttgtgtcactccaccaggtaaaaaaccgtgtcctgctaaggtgcttgctgaaggtaaagggaatacagaatgggttgtagaaggaggtagttatgaactgaccataaggggtcaagccctgccaattcctccattattccccacaagattagacagaactaggccccttgggaagtgccctggaacacagggaagttggatgtctgccatgggctctcttttctccactagagaacrcaggcccaagaaatccctttcagtgtgacactgtttggtcgggaaagaagcaacacagtcaaagtgaaactgctccccttacacttctaatatgacttttcccagtttctgtgctccaagagtgtgccccacctcacccttgggttatggaatttttacctaggcattcttatctgtgagaagttgctaactggtcattctgttctggaaaccaga

SEQ ID NO: 385860 - DNA, 606 bp, Homo sapiens
ttgtgcatgtgagatcatctaatgtatctcctaatagagtagacactagttttaacattctttctcacatctgaacaggataaactatcattaacaaactcttagttaataacaccttcttacctaactagaagtttgttaatgaacagagcagtgggtaagaaaaaaattttactgcaaaaagtaaaataaatggtagtagctattgtagagcaaaaattattctcgttgtatgattgcacctccaccagcaccatacatgaacatacacaatacatacacaccaacaaacacacatacacctgctgtgcacttgagccatttcaggcaagaggagtcatttccaaaaacaagcagcagccttgtctgtactgagattgtcctgaaagtatgtaaggctgasgccaacatgtgaagagtctgtaagacacaatataagctaaaccaaattatgaaataggaattgagagaaaggcagtgatacagagagggcaacagagagaaagagacagagccaaggaaagacaactcccaacactgaaaatatgtccaaagaacaaggacaccttgctttaagaagaataaaacattatccaacagatcacc

SEQ ID NO: 385861 - DNA, 574 bp, Homo sapiens
ctcccttttgatcaagactttctccaaaggcatcactgaacaataatcatgtagctagattttgatatcccttcgtgctggaatggacctatgcctgggctggtctcatcccaccttagggggagagtttggtgactagcagtcagtgttaaaacctctttagccacactgagcaacaagggaagtttgaagggagtgggacacagrctgagtctacctggagtttattattaagttgaattttctctgttctgtagtcttttgcaaccataccaaagtgctgggccaacattatatccttaggagttgtacttccacacatatttaagaagtaacagctacaaagtttaaaaaaggaaaatacaaagtaaaattaatagtaatatcacaattccagtttatataatagttttcagtcataaacccaggcttaaaggcaaccaactgaataaagcaaatgacattagagaattaggtgagatctgttgtaatcagatggcctgttttcttattttgcatatgtgggtcccaacttccccggaggagtttatccaagtacataatgtaatattag

SEQ ID NO: 385862 - DNA, 574 bp, Homo sapiens
ctcccttttgatcaagactttctccaaaggcatcactgaacaataatcatgtagctagattttgatatcccttcgtgctggaatggacctatgcctgggctggtctcatcccaccttagggggagagtttggtgactagcagtcagtgttaaaacctctttagccacactgagcaacaagggaagtttgaagggagtgggacacagactgagtctacctggagtttattattaagttgaattttctctgttctgtagtcttttgcaaccataccaaagtgctgggccaacattatatccttaggagttgtacttccacacatatttaagaagtaacagctacaaagtttaaaaaaggaaaatacaaagtaaaattaatagtaatatcacaattccagtttatataatagttttcagtcataaacccaggcttaaaggcaaccaactgaataaagcaaatgacattagagaattaggtgagatctgttgtaatcagatggcctgtttycttattttgcatatgtgggtcccaacttccccggaggagtttatccaagtacataatgtaatattag

SEQ ID NO: 385863 - DNA, 602 bp, Homo sapiens
ttactcaggaggctgagacaggagaatcgcttaaacccaggaggcagaggttgcagtgagctgagatagtgccactgcagtccagtctgggtgacagagtaagactccatctcaaaaaataaaaataaaaataagaaattttttgccaactatgccagattttaccatgtagaaacaacgtgccacataatacatgttcatacacatatacgcacctaaacacatatatgcacacacaaagatgtgataactttcctcaatatgtaatctaatgaaggctgcagaccaaaatttgggtgaagcaatttatatagtagcttgggttttattgttgtttgttggtttgtttgtttttcttagcctctttaacatttatattttatttattcagtctcaaatgagtttagagttaaattttcaattgtttacattgtagctaggactggttgaattgtattakaaaaacaaaatctccagtgttgaactagtaacaaatctatctttttttattttattttaattttttttgcaggtctgttttgcttgattaacaaatggagacaagaaagaattttagcaggatttgttgtttttttcgcagg

SEQ ID NO: 385864 - DNA, 527 bp, Homo sapiens
aggtattagtggggttcaagggtttcgcacaacatttagtacacagtaggttgctcactaaggacttgtcatattttgctcaaatgccaacttttggtaccttagcttgtcaattagtcatttcttatatagatgattttttggataattgtcatactacatttttaccaattaaggatttcagtccattttttattatttttttcaatcataattcaaggtcaggaagtaggagccccatccccgctcccttccagacaacagaatagtattcttactaggagttcctaagacctagcaattccagcatgcgaattgtgagaggacatagccaggaagatgagaaactgtagccatcatccaggggtaatatattccatctctgttgctccttgcagcctgcaggtcctcttcagtgycctctccattaaacccattaacatgtaggatcctcatctgcttcacattggtgcctttaccagattctccagcacccaggagtagcaggcggtccatggcacggtcga

SEQ ID NO: 385865 - DNA, 551 bp, Homo sapiens
agaggacacccagaatatcaattctcttgacttgtttgtcttctgagtcggggttacccatttgtttattccataaatatttattgtacatctattatgtgccaggtactattctaagaagtggagatatgtaacatgcaacagaaacaaaaatccttgctctacactatgggcttctatctccgctttaccccagtgacccagtaaaaaaaagtaaatagagagctgtacgtactgccacaggtaatttgaccatttagcaacattttccagttattttgcatttctttacacaattcctggaaaagcctatgaagatgcataaagtmaaatgcaaagttttgaagtagtggagtctcaataaatgaaaacatcctttaaagagtggttctttctttattttatattcaatatgttttattcaattatggtcattatacttttaatatgaaattgtctaaaatgcacccagtggaaacttcttcaagctagcttctgggtcatttaaacatgtccctataatttttgaatattttcttagtttctgccac

SEQ ID NO: 385866 - DNA, 542 bp, Homo sapiens
aagtgaaaaggcccccatggagtgaggagggaaggttggccattctccaagaggctcagtcctgcctctcactgaccttaatgccatttctgccaaccacaacccctctttccgagataagtatgggagagaaatacttttagcttttcataaaattttctgaaagccaccatcccagggctctatcacattgtgtgaccttgtgttggggtgaatttctggtttagaaccttgtttttgcatgaggctgtaagctcaaggagtcctgatgttkttctctatatttctagtcctgagtacagtgtgtggcatagagtagctgcctgataaatgctagttgaatccaagagatgtgcaggctggttgtggggacaagaatggctggctagacaccatggagatgctagaagccaatctcagccatctgaaaaggagtactccagctcttagcagcagctcttgccttgaggcctgaactatatggagtttgctggtttcacgcagtcagtcacatttgacgcaggaatggcttactgagttac

SEQ ID NO: 385867 - DNA, 571 bp, Homo sapiens
gtcagatttctgggggtagtgttcggagacctgtattataaacaagttttctggagaattctggagcaggtcctccacaaacaagacacgtatatgggaaacactgcatccctgacagtcattgctggaagaatcccccaaacagggagtacacagatcacaaggaagcctgatctattgtaagtcatgtttaattgccacaaagttctttatgttgaataatatttgatcctctgccaattctgcccaaagttttaactcttatccactagatcagaaaggatgtatgcgtttaatcaccaattgtctatctcttcttcaaatgattactctgcagcatatcccagcagaaaaggtctacttccaccaagctgacaacccagtgggagaatctaggtgtaccctgagagagatgctgcattcatatacattcatttggatgacaagagttcatkcattcattgattctcactgagcacctattccctgcactgagaactggtggtacacagaggaatccgaggagagactctgccctcgaggagctgacggtagaagaaggaagccatgc

SEQ ID NO: 385868 - DNA, 533 bp, Homo sapiens
cactgcaacctctgtccccccggttcaagtgattccactgcctcagcctcctgagtagctgggattacaggcgcctgccaccatgactggctaatttttgtatttttagtagaaatggtgttcctccgtgttggtcaggctggtctcaaactcctgacctcaagtgatccacctgccttggcctcccaaagtgttgggattacaggcatgagccatcacgcccggctaaaacctaatttctaaaaatgtaaactacagaaattaatgcttgagaaaaatctttctgaatgatgggaaattgttgaagacagaarttcccagagaagatgcccttctcccccagggatcttataaaattctctggaggacacaggagaatgttaaagtatcaaaggagagatggatgaagaaaaggttgaaaaacataactattcccacaccttaatctcacactgcccttggagatggggcctctcccatggaggttgtcacagaaaccctttctagaagtaacaatattcttaataaacaca

SEQ ID NO: 385869 - DNA, 577 bp, Homo sapiens
tagttcaccatcaggaatagagctaatgtggccaaggcagtcaccgtcaggacagacaccccaatgacaggctactcaatgtctcaccagcacattcactctgcatgggatcctcagccctgtctcagtccctcccgctggagccctgtcccacaaaggcctgccccaggggctgggagccaggcagagcttcatccctcccactgagcaagacttgggctgtcactgtgctgttatttatgagtcccccttgcccaatgagtggcctcgaaggggcccagcctgggcctgctgtctggccagacttgtcacacatcattagatgtttggttgccactgacccctctgcyatctggctgagtggcctcggggtgaggagaggcaggcagcagctcctcatgcagcccccaagtctttgtggcattcaggacatggaagtgtttcagaactgttgtgctcatctactaaggggaagacagaactggaaaataatctcttcaagagattatttagggcttctctgtatttagggtttctcacccttggcactgctgccatttggggcgagataattctt

SEQ ID NO: 385870 - DNA, 593 bp, Homo sapiens
ggaaaccatggaaatgagtacaaggtcaatgtctggatactctcttattattcagaagagttataaatcttagcccttccaggaagtcttgcccaaatgagaagggaagagaagggaaaactaacatttacagaatgccttttgtgtgctaggcacagcccagatgctctccctgcttctcacaggcagccctaggaatgaagttttattatgctgcttttctagatgaggaaattgagacagaaagtttgcaaaagttgttgagagggccagccagtaggtaacagggcatgaattccatttcaactctgcctttctcccctaccccattagaaggaaaagtaatagacttcttcaaatagaatctgacaaaaaatcttctctctactaagtggatcatcttcccattttcctgcaacagataaaaaatgcctaccaactgaatttatttactaactgatgtgcatttaaaagagctttgaaatgtgcaatactaaaaatgagcaattaattttcacttatacaaagacacttaaaattaaatagagctagaccaatgtaggtatgattrtcactgctttgttgtaaattct

SEQ ID NO: 385871 - DNA, 570 bp, Homo sapiens
ctttctgccctggttgcacccttccttggggtgctgccctacccctcctcccacaagtttatgggaaaactactataaagaggggcaatgctggaggtcccatctgaatcattcmgggaacttgttaagaatacaggttccttgctgtcatttaagaattagaatgtcttgtggtggctatggagatctgtttttgtaatctgttcccaagggtctcagatgagagtaggtttggggagcttcagccctcaggacttccacaagaccccttgttagagaggagggtgatgctatggggagctatggtagatgggacaggagtgtggtaccaggtcttggaggccctgagtgctgagtgaagagtcaggattcagcaggggaatgaggatggcaagagggagcccatgcaggcttttgagcaggggagaccttagattctgtggtctagccataaacagctgatgtggcttccctgtggtcccttagccaactccagggcagcagtcagagtgcctatgtgagtagagtggggtgggtagtgctagtgtgcaagaggccagctgggcagcc

SEQ ID NO: 385872 - DNA, 488 bp, Homo sapiens
cagcaagaacactggacaaaatacaaaaagcaactactacctgataattctggaaacacaacatcaggaggcttgggmaaaggaggaaccaaatcttgataaatgacttgtaacaggggtgaataccatttattcccctgtcttatgaactggctttgatctgtgggtgtttccagtgctgctgtactgcagtgtaggcagcagaactctggaagaggtgctactgtctttctggtcagatgattaggaaaagggccccagagagctggagggcatgggagaattccctttgtttctttttttcctctcctggcccctcaccctaaggacagccgttgtctcagaactgtactgcaaggtggtggcagcttgagtatctaaaattccaaaagaaaatccttctggtaaggagaacagggagactatggtcctgtattctaaaaagcataaagaaaatcccattcctttatctcttcttgccccaaggg

SEQ ID NO: 385873 - DNA, 582 bp, Homo sapiens
cattcctttatctcttcttgccccaagggcatcttgtttcagagaactgtgtagtatcatggagcagatgaagctctgagacattctgtgtccctctagccagagggstgggaaaagtggccacttggaggaagcaggaggatatggtggaagctccacagcagagagagctgaataaaagaacgccaccaattatgtgtctaaactgataaaagtcttggacttcaccataagctgcacaggtacagaagaaaacaaaagcaagataacaaagaatgtcagaactgaatataggccaacaccaagtcccagactaacccccaagaagctcacacatgaggaagacctaaggcagatgtgagaaccaaactgacatcagcacttcctcccacagaaagtgagacagaacttatggaatgaacctaactggtttgattgactgccaagacaagaaaactcaaggttctccagaggatttttaacatgacccagagtcacaccataaaaacccaaaaccagaattacttaacatagggaaaaccaggacaatgtgatcaattctcaagggaaagatagttaaca

SEQ ID NO: 385874 - DNA, 621 bp, Homo sapiens
catgaggaagacctaaggcagatgtgagaaccaaactgacatcagcacttcctcccacagaaagtgagacagaacttatggaatgaacctaactggtttgattgactgccaagacaagaaaactcaaggttctccagaggatttttaacatgacccagagtcacaccataaaaacccaaaaccagaattacttaacatagggaaaaccaggacaatgtgatcaattctcaagggaaagatagttaacacacaccaatgacaagatacacaaatgttggaactatcmgacagaaacttgaaagtagctattataatcacgctcttgaaagaatagaaagagaaaagttatcaatacagaaaactatttttaaaagccaaatgaaaatcttaggactgtgtaacacaatatctgaaatgaacaacccactgtgtgggttcaattgcaaaatagagatgagagaggaaggaatcagagaacttgaagacaaatgaatagaaattatccaatctgaagaacagaaagaaaaataattgacaaaaaaatgaacaaagcctcaggaacctccagaacactatcaaattgttgacatttgtgttattagagtcctacaagaaaagaag

SEQ ID NO: 385875 - DNA, 621 bp, Homo sapiens
catgaggaagacctaaggcagatgtgagaaccaaactgacatcagcacttcctcccacagaaagtgagacagaacttatggaatgaacctaactggtttgattgactgccaagacaagaaaactcaaggttctccagaggatttttaacatgacccagagtcacaccataaaaacccaaaaccagaattacttaacatagggaaaaccaggacaatgtgatcaattctcaagggaaagatagttaacacacaccaatgacaagatacacaaatgttggaactatccgacagaaacttgaaagtagctattataatcacgctcttgaaagratagaaagagaaaagttatcaatacagaaaactatttttaaaagccaaatgaaaatcttaggactgtgtaacacaatatctgaaatgaacaacccactgtgtgggttcaattgcaaaatagagatgagagaggaaggaatcagagaacttgaagacaaatgaatagaaattatccaatctgaagaacagaaagaaaaataattgacaaaaaaatgaacaaagcctcaggaacctccagaacactatcaaattgttgacatttgtgttattagagtcctacaagaaaagaag

SEQ ID NO: 385876 - DNA, 571 bp, Homo sapiens
ttggagttttattggggaagtaaaaataacacagatacaacaatcacgtacccagataaggtgacaccgcatcrtgtgcttccctgcacatggcagatagacagacagtgcagatcacaaggtgggtgctagagccaggtggcctgagttcaagcctagcattgccacgagtgaactgtgcaagttgggtgagatcatctcacctgtgtgcctcagtcgccttcccagtaacaggggtgataacagcaagtccctcgcatctttttttgtgagcattaagttaggtaatgtatgaaaagcactgagaacagatcttggcacataacagctactcaatacatacatgatgatgatgtgcagtgaagggcaaatacggttagggttgtagttggttgattctgtgccgagtgaacttgccatgactgtctgtggggaggggagctgccatcagaagggagggacagagcccctgggtggctggggcagatgtgccaccctctccagagaagtggggatgccaggaacacctttccctgcaaaagggccatctggccgcagtagtccagttggg

SEQ ID NO: 385877 - DNA, 571 bp, Homo sapiens
ttggagttttattggggaagtaaaaataacacagatacaacaatcacgtacccagataaggtgacaccgcatcgtgtgcttccctgcacatggcagatagacagacagtgcagatcacaaggtgggtgctagagccaggtggcctgagttcaagcctagcattgccacragtgaactgtgcaagttgggtgagatcatctcacctgtgtgcctcagtcgccttcccagtaacaggggtgataacagcaagtccctcgcatctttttttgtgagcattaagttaggtaatgtatgaaaagcactgagaacagatcttggcacataacagctactcaatacatacatgatgatgatgtgcagtgaagggcaaatacggttagggttgtagttggttgattctgtgccgagtgaacttgccatgactgtctgtggggaggggagctgccatcagaagggagggacagagcccctgggtggctggggcagatgtgccaccctctccagagaagtggggatgccaggaacacctttccctgcaaaagggccatctggccgcagtagtccagttggg

SEQ ID NO: 385878 - DNA, 647 bp, Homo sapiens
tgggttcactatcggatgagggtcacctcctcatcacccatcaagcatttttccagtaaaacttgactctaccttttagtccatctctacctctgagaatgtttgttgaaaaattgtgaagttgactttacactggagtgcaggtctacatctgggatcagagtatttttggtgtatctattcctaaggggtcttagagattggctcagggaaggcagggtgggcttcgttctaracagtcacttctggctctggtccactcctcagctccacggtgaaatttccagttgtacctgggcatcttcccatagttctcagccagctcaagctcatatattccaacaagaaggcataatctttctcccaaactggcttttcctccaagactcccaataatcttgatgactgtcttggtctgttttgtgctgttataactgaataccatagactgggtaatttataatgaacaaaagtttattgtctcacaattatagaggctggaaagtccaagattgaggggtcagcatctgctgagggccttcatgctgtgtcatctcatggtggaaggcagaggagcaagggacagcaagaggggcccaaactcatccatttataaggaacctactcctgcaataacaaaccagctt

SEQ ID NO: 385879 - DNA, 625 bp, Homo sapiens
tctgtaggctcccattaaaccatttctacctcttgttctggcagacctaaaagtggtggcaatgatttcttgatattgcaagtcttttgttagccttggcattctttggtgattgctttaaccctgctcatattaatgtaaatagtctcttcattaaattcccctcaaaatcccagctgagagtcccctctgtttactgccaggaacctgactaagacagtttaagatctctggtgatggaagatgtaaagaaattgaagtgtttcaaatactgyactagattggttccctgagaacaggctctgagaaagagttttcctggggagtgcgctcaggagatacctctataatgaagtgaagaaggcaggattggggaggaaagtggacctgctgtgtagttgcaactgagacatggtgggctgagcaatcaacctctgaagttcttctactcttaggattcattctgtgcttgctcctctgttctgtctatgggagcttttggattccttaatgctgcccagaaggccctctagttttcacattttgcttgaggttggtgattgatcaccctgagcctgccattatctctcttcgataggtcaatggtgcttagcaatagccaccc

SEQ ID NO: 385880 - DNA, 626 bp, Homo sapiens
taagatctctggtgatggaagatgtaaagaaattgaagtgtttcaaatactgtactagattggttccctgagaacaggctctgagaaagagttttcctggggagtgcrctcaggagatacctctataatgaagtgaagaaggcaggattggggaggaaagtggacctgctgtgtagttgcaactgagacatggtgggctgagcaatcaacctctgaagttcttctactcttaggattcattctgtgcttgctcctctgttctgtctatgggagcttttggattccttaatgctgcccagaaggccctctagttttcacattttgcttgaggttggtgattgatcaccctgagcctgccattatctctcttcgataggtcaatggtgcttagcaatagccacccaattccatagtccttgtagttacgtttattctccctctcaagcatcagatgttactcttgcctatgtatccccttccaaggggatctcataccaattcatcactgccacatgctttagcaaaaattgtgctgttacctctatccagactctactgatcagcagtcacgggatccttgttgccagccagccagccagccaatgacacatccagctccaaaaccc

SEQ ID NO: 385881 - DNA, 451 bp, Homo sapiens
gttggtgattgatcaccctgagcctgccatyatctctcttcgataggtcaatggtgcttagcaatagccacccaattccatagtccttgtagttacgtttattctccctctcaagcatcagatgttactcttgcctatgtatccccttccaaggggatctcataccaattcatcactgccacatgctttagcaaaaattgtgctgttacctctatccagactctactgatcagcagtcacgggatccttgttgccagccagccagccagccaatgacacatccagctccaaaaccccattttagagtctaaatctgaggattatagctgctaccccatcttagagtggggaactatactctgagacagagagcaatgtgcagaagctgactggggagtactcttgggagaagtgggaaaggcaggatgggcagagggagaagctggccaca

SEQ ID NO: 385882 - DNA, 451 bp, Homo sapiens
gttggtgattgatcaccctgagcctgccattatctctcttcgataggtcaatggtgcttagcaatagccacccaattccatagtccttgtagttacgtttattctccctctcaagcatcagatgttactcttgcctatgtatccccttccaaggggatctcataccaattcatcactgccacatgctttagcaaaaattgtgctgttacctctatccagactctactgatcagcagtcacgggatccttgttgccagccagccagccagccaatgacacatccagctccaaraccccattttagagtctaaatctgaggattatagctgctaccccatcttagagtggggaactatactctgagacagagagcaatgtgcagaagctgactggggagtactcttgggagaagtgggaaaggcaggatgggcagagggagaagctggccaca

SEQ ID NO: 385883 - DNA, 638 bp, Homo sapiens
agtaaagagattcactgagtatcatctaaatgtcagttactttactaggcatttgatgttcattatttgatgtttatttattatttgggcttccttacaatgtggcagcctcagagcagtggaacttcttacacagaggctcagttctctgtgtaacataataatataatataaattattattatattttataatatatttaaattatatatttaaatttttaatatataaattgttattaaattattatgttattaaatmaaagaaggcatttttagccctgtttaatagatgggagaacacagacttagagtaagcaatctgaccaaggatattccgtagtcagtggtgaggctgctatttgaaaccaggtgggtctgtctccaaagtccaggctgtttcctgtgaaccatgtggtcccaggagccctctattgctaggttcacggcacgcacagacactttgattctttaaggtgactggaggatttcggctctgctgtcctatatagctatgatgcttgtgacctaccaacaggaaaacatgtctcatgtttggttgcatttcccctgaatgtgagcctcctgcagacagagactggtgtgcctaattctgtactaccaccaccctgtgcccct

SEQ ID NO: 385884 - DNA, 505 bp, Homo sapiens
tttttagatctaccattttacttctgacatcctacttactagaaatgaagagattttcttttaaaagttcctatgcaagggccgggcayggtggcttacacctgtaaccccagcattttgagaggccgaggtgggtgaagcacctgaggtcaggagttcgagaccagcctgaccaatatgttgaaatcccgcctctactaaaaataaaaaaattagccagccatggtggcatgtacctgtaatctcagctactcgcaaggctgagacaagagaattgcttgaacccgggaggcagaggttgcggtgagccaagattgcgccattgtactccagcttgggcaacaagagtaaaactctgtctcaaaaaaaaaaaaaaaaagttcctatgcaagaacttcgctatttcattaaattaatcaggtaaatgtaatggaataaatgcttgcaaacaaacttgacataatttaggatctaaggttattaattgatcttaagtatctgggca

SEQ ID NO: 385885 - DNA, 505 bp, Homo sapiens
tttttagatctaccattttacttctgacatcctacttactagaaatgaagagattttcttttaaaagttcctatgcaagggccgggcatggtggcttacacctgtaaccccagcattttgagaggccgaggtgggtgaagcacctgaggtcaggagttcgagaccagcctgaccaatatgttgaaatcccgcctctactaaaaataaaaaaattagccagccatggtggcatgyacctgtaatctcagctactcgcaaggctgagacaagagaattgcttgaacccgggaggcagaggttgcggtgagccaagattgcgccattgtactccagcttgggcaacaagagtaaaactctgtctcaaaaaaaaaaaaaaaaagttcctatgcaagaacttcgctatttcattaaattaatcaggtaaatgtaatggaataaatgcttgcaaacaaacttgacataatttaggatctaaggttattaattgatcttaagtatctgggca

SEQ ID NO: 385886 - DNA, 505 bp, Homo sapiens
tttttagatctaccattttacttctgacatcctacttactagaaatgaagagattttcttttaaaagttcctatgcaagggccgggcatggtggcttacacctgtaaccccagcattttgagaggccgaggtgggtgaagcacctgaggtcaggagttcgagaccagcctgaccaatatgttgaaatcccgcctctactaaaaataaaaaaattagccagccatggtggcatgtacctgtaatctcagctactcgcaaggctgagacaagagaattgcttgaaccygggaggcagaggttgcggtgagccaagattgcgccattgtactccagcttgggcaacaagagtaaaactctgtctcaaaaaaaaaaaaaaaaagttcctatgcaagaacttcgctatttcattaaattaatcaggtaaatgtaatggaataaatgcttgcaaacaaacttgacataatttaggatctaaggttattaattgatcttaagtatctgggca

SEQ ID NO: 385887 - DNA, 582 bp, Homo sapiens
aaagaaatcaggaaataagagatgtaaagaaagttaaagatgtaaagtagtatttctggtaaaaaagaaaaataattttatatacraaagaatcttgtgtggtaaatttttgtcctaagatagaaataatgaggttgttcaagaaagagggatatttaagacaaaacagtctaaacgtgctgtgaatgaactatgtcagctgtaataaggttagtaagaaggacttcttaaaggatgtaatgtaaaggaattgttccattttgtagattggtatcattcggcttctttaaaataaccactttaaggacaaaattcttaaccttaaatgctacagaatgtaagagcttgtttgaattaatgcaggatgcacagctcattactgaacaatctctgagtatatgctatccaaatgcacagggggttattcctgagaaagcaattggcctagtgaggcaggtaatgccattataagatctgttttccctgagaaggggactgcccaactctccctataaaataccaagtgaagtatccaagatgaagcagctaatatgtttcatacgtaagccatgttggactagc

SEQ ID NO: 385888 - DNA, 594 bp, Homo sapiens
atcttcttcaaatgccaaatactgtttttcatcaggtactaaagttctttttaaggggacaggctgaacgtcaaatggaaattctttattatatgtaaaaatattctttaggattagttacagtttcttcaggtcctcckatttcagttcttcttgaaactgtgtggaatgtaaagctgcacttcacaattccaagcgtgttgcaacattgcctgtgggtttcttttgttattctgtgaattctcgcgttgagcttgggcctctttttgtagaagtcttgctaatatcagatactcatctatcacttccaccagctagctccaagagtcaaagctggtgcctctcctaaaactggctccccagtgctgtagtagactctgggtcacgaaggtgaccactctttaccctgtccccttctgttcctactccagcgggctttcaggcaccatcctggctgggcctgacaccagtattgacagggccaggaggaaccactatagcaaactctgccaccttccaaggagccacgcaagcttatttgcaaccactcttctctttttttcctctctttatttctttttagtgtgattgtgg

SEQ ID NO: 385889 - DNA, 579 bp, Homo sapiens
tgcttaaatttgccttactataccttgaaaaaatgagtgagaagagaatgaaataatcccctactatcacatataattttggataagctcaagtatgcatattccttagatttaaatagtgcctctgtgtcaaccrcattgtctcacactttctgaaggaaagcagatgtcttcatttcaagcctgtcagagatcgtagcttgcacagtgctgttactactgccatggactctgtcgcagcacagtgatagagcagttacctaggcagcactgctcttgattgagaacatcagcattgtaaaatccctccactgcttttgccttgatttactctgccaacttattctgttttcactcttcatgctgggaggatatgggaaaatgtggcctttgaccacaacctgtgtagcccatgtcattgttatgtcagtccccagagaagctgcaaatatagttctttccccaggccaacgatattatccatgaaaacaaagctgtctccagattcccacctggtattaaaatgtatgtgacagactcttactgcttcaccacctgtcaacgaatgatttggcagtg

SEQ ID NO: 385890 - DNA, 579 bp, Homo sapiens
tgcttaaatttgccttactataccttgaaaaaatgagtgagaagagaatgaaataatcccctactatcacatataattttggataagctcaagtatgcatattccttagatttaaatagtgcctctgtgtcaaccacattgtctcacactttctgaaggaaagcagatgtcttcatttcaagcctgtcagagatcgtagcttgcacagtgctgttactactgccatggactctgtcgcagcacagtgatagagcagttacctaggcagcactgctcttgattgagaacatcagcattgtaaaatccctccactgcttttgccttgatttactctgccaacttattctgttttcactcttcatgctgggaggatatgggaaaatgtggcctttgaccacaacctgtgtagcccatgtcattgttatgtcagtccccagagaagctgcaaatatrgttctttccccaggccaacgatattatccatgaaaacaaagctgtctccagattcccacctggtattaaaatgtatgtgacagactcttactgcttcaccacctgtcaacgaatgatttggcagtg

SEQ ID NO: 385891 - DNA, 613 bp, Homo sapiens
aatttaatgtgcccatccacatcaccaagggtaaagcaaaacagatctgtattgagctaatatgtgctcaaaatattcattaaatgcactattgtatttgatcttgccagatatcccataaatttcctcttttttttttttcaaatgaaaaactagattcggagaggttaataagttgaccaatgttacagattagtaaggaacagaagtaaacccagggcaattctcttyatggacctgcgactacttcttataaatatgtgatgtatatcctaatgcattgctaaggtacaaaacaagtttaaaaatatgcaggctctgtatggcttccaaaatttgtgagctctcaaagcacgttcattcttagagtgcatctatttcagttccaattccatgcaatcaaagcttctacaatggtctaactggtgaatgtccaagtttgaatactcctgggggcacaacaagaaacacactatgttataaaacagcccattcgatgtttgaaaatcccttcaggtaagaaagtttgtacttacattaagcaaaaatgttcctcctttgatgtctatcttttctactttcacaacacagtgaataaagttagtacttagtt

SEQ ID NO: 385892 - DNA, 548 bp, Homo sapiens
gacaagaaacacttaaagcaaggaagaaggaattgaggcagcctgctgggctggatcaactgggagcctggaggggctcctcaatgtaggacagagtaagtgtgagatcccagcagtccacgttctcaccacaggctcctgcaatcctagccacagggaagcccctccatccagagactaagayagggcacagcctggaggtcgcaggacggcatgctggatacaaccccatccctaatagcacagtgcatacagagagtccagttcccaccaaagggcatcatgcctgggggctcaacagccctgcccccacacatcctccacacatccacattccctgcccgcagctcctgctgtgactggctggtgctattgcagccagggctgaagcgtgagccattccaaagaccctactgactccactgcccccagcagtgaagatgccatgcattttcacatgtcctgaggacaaattcccctgcccacatgagccgctacaagagccagggccaaagtgtgagttccccagctgcctgcttatggctgct

SEQ ID NO: 385893 - DNA, 543 bp, Homo sapiens
aaacacttaaagcaaggaagaaggaattgaggcagcctgctgggctggatcaactgggagcctggaggggctcctcaatgtaggacagagtaagtgtgagatcccagcagtccacgttctcaccacaggctcctgcaatcctagccacagggaagcccctccatccagagactaagacagggcacagcctggaggtcgcaggacggcatgctggatacaaccccatccctaatagcacagtgcatacagagagtccagttcccaccaaagggcatcatgcctgggggctcaacagccctgcccccacacatcctccacacatccacattccctgcccgcagcycctgctgtgactggctggtgctattgcagccagggctgaagcgtgagccattccaaagaccctactgactccactgcccccagcagtgaagatgccatgcattttcacatgtcctgaggacaaattcccctgcccacatgagccgctacaagagccagggccaaagtgtgagttccccagctgcctgcttatggctgctg

SEQ ID NO: 385894 - DNA, 543 bp, Homo sapiens
aaacacttaaagcaaggaagaaggaattgaggcagcctgctgggctggatcaactgggagcctggaggggctcctcaatgtaggacagagtaagtgtgagatcccagcagtccacgttctcaccacaggctcctgcaatcctagccacagggaagcccctccatccagagactaagacagggcacagcctggaggtcgcaggacggcatgctggatacaaccccatccctaatagcacagtgcatacagagagtccagttcccaccaaagggcatcatgcctgggggctcaacagccctgcccccacacatcctccacacatccacattccctgcccgcagctcctgctgtgmctggctggtgctattgcagccagggctgaagcgtgagccattccaaagaccctactgactccactgcccccagcagtgaagatgccatgcattttcacatgtcctgaggacaaattcccctgcccacatgagccgctacaagagccagggccaaagtgtgagttccccagctgcctgcttatggctgctg

SEQ ID NO: 385895 - DNA, 516 bp, Homo sapiens
ctgcttcagccaccccaaagagaagctgacctttctctcctcagttcaaggggtggcagctcactctgcttgggctccctgtccctgcgttcctgctggaaaatatctcaaggcaggaagctgggctatcattggctcaactagtttctttttctttccttagagaacacaatmttgcattgcctgtggtacattgtcaaaaaatagttgctccaaatatttatacttattatgtttgtattatctattcttttttttaaggttttcttattttttaatctaaaactgcatattctacttaatgtagaatttagatctctaaaataaaacaaaatatggcagacatgtacatcatgcattttaagtggaagctaaactccatttctttatttttatttatttttttattatactttaagttctagggtacatgtgcacaacgtgcaggtttgttacatatgtatacatgttccatgttggtgtgctgcacccattaacttgccatttacattaggt

SEQ ID NO: 385896 - DNA, 539 bp, Homo sapiens
  misc_feature (1)...(539): n = A,T,C or G
attcttgtaaggaggtgattgacatgagttactttctaccctcctgggtgccagtttatcttttcctgtaatgaaatctgtcccttcttaagcaactttctccaagcttgtaaacaacctgggatattttcctaggtgacagtctcttgtcctacctcctcctttcatttctctggttcgtgctggattcctgaacaggagatcctcaggaatttcatcaagagttgtcattttttttctctttctgtccttctcatcctggacaattctttctaaagccactgaaaatagccatggagtataagtgatcacgaagagcaagtgtagaacttcattgtcgactggggcatatgtgtgccagctcaaccacggaagtgagcatctgtttagaaaatcttggaagtaaggtatgaagctctttggagcactcattgtttaccgtactttcakttcaagtccatttttagtgagatggatatcagaagggactctggctnnnnnnnnnnnnnnnnnnnnnnnnnnnnnnnnnnnnnnnnnnn

SEQ ID NO: 385897 - DNA, 612 bp, Homo sapiens
tcacaaaccttcttcatactttatacttccttcacaataggagctccattatgtaggaatttgtactggctaatccaagcayctagcttctagcttgtggaagcagaggcgcatccaagcaacaaaatgttgggaaagaaaggttatgaccactaagatagtatatcaaatagttttcagatgaaaccaataaaaatcagatttagacaagaaggctgaagaccagactgaagagattttgagttttgagtgatggatgttaatggattctgttcccaatggagcaatacgctggcctcactgttctagggaacaaatacggtcatttatcaaatctgtcccttccccaaataaagtgactcatctgtgtaacattttaacctaaagaactctgctgtgagaccccctccagaatggtgcaaaagtcaacagttgaagctgttgggcatgatgaaatggggcctggctctaaagacccccactagcaacacagagtagtgaaggcagtgaccgtctcactgtgtgagcacagggaacctgctctaggaacccccagaataccagactgggaaaaacagctggaaaaaggtttgttccctatagctgtgctag

SEQ ID NO: 385898 - DNA, 612 bp, Homo sapiens
tcacaaaccttcttcatactttatacttccttcacaataggagctccattatgtaggaatttgtactggctaatccaagcacctagcttctagcttgtggaagcagaggcrcatccaagcaacaaaatgttgggaaagaaaggttatgaccactaagatagtatatcaaatagttttcagatgaaaccaataaaaatcagatttagacaagaaggctgaagaccagactgaagagattttgagttttgagtgatggatgttaatggattctgttcccaatggagcaatacgctggcctcactgttctagggaacaaatacggtcatttatcaaatctgtcccttccccaaataaagtgactcatctgtgtaacattttaacctaaagaactctgctgtgagaccccctccagaatggtgcaaaagtcaacagttgaagctgttgggcatgatgaaatggggcctggctctaaagacccccactagcaacacagagtagtgaaggcagtgaccgtctcactgtgtgagcacagggaacctgctctaggaacccccagaataccagactgggaaaaacagctggaaaaaggtttgttccctatagctgtgctag

SEQ ID NO: 385899 - DNA, 610 bp, Homo sapiens
acctagcttctagcttgtggaagcagaggcgcatccaagcaacaaaatgttgggaaagaaaggttatgaccactaagatagtatatcaaatagttttcagatgaaaccaataaaaatcagatttagacaagaaggctgaagaccagactgaagagattttgagttttgagtgatggatgttaatggattctgttcccaatggagcaatacgctggcctcactgttctagggaacaaatacggtcatttatcaaatctgtcccttccccaaataaagtgactcatctgtgtaacattttaacctaaagaactctgctgtgagaccccctccagaatggtgcaaaagtcaacagttgaagctgttgggcatgatgaaatggggcctggctctaaaracccccactagcaacacagagtagtgaaggcagtgaccgtctcactgtgtgagcacagggaacctgctctaggaacccccagaataccagactgggaaaaacagctggaaaaaggtttgttccctatagctgtgctagtaagagaaatgccacagaaactgggcataactaattattattcttttgtcttgggaggacttggggaagtttgggaat

SEQ ID NO: 385900 - DNA, 418 bp, Homo sapiens
acaaatattatcccagtgcgtggaaaagactctacatgtcgtttttcagtatagaataatcttaataccaaaatctttctcttaatgtacagacactaagaaaaaggaaagttgcttttcaacctcactcacaagcatagatgaaaaattctaacaactgtataaattagcaaacaaatccaacaatatgtaagccaataatacctcttgactcaaggatataagaacaggtcaacaccagaaattctattaatgtacttcattccatttacatattttaaaaagraaggaatattacatcatttgtagttaaaaactcctttttataaattttattgtataaatttaaggtatacaatgtgatgttatgagatacatatagataataaaaaatggttactagagtgaagcaaattaa

SEQ ID NO: 385901 - DNA, 418 bp, Homo sapiens
acaaatattatcccagtgcgtggaaaagactctacatgtcgtttttcagtatagaataatcttaataccaaaatctttctcttaatgtacagacactaagaaaaaggaaagttgcttttcaacctcactcacaagcatagatgaaaaattctaacaactgtataaattagcaaacaaatccaacaatatgtaagccaataatacctcttgactcaaggatataagaacaggtcaacaccagaaattctattaatgtacttcattccatttacatattttaaaaagaaaggaatattacatcatttgtarttaaaaactcctttttataaattttattgtataaatttaaggtatacaatgtgatgttatgagatacatatagataataaaaaatggttactagagtgaagcaaattaa

SEQ ID NO: 385902 - DNA, 525 bp, Homo sapiens
tggaactccttagaaacttgttaagtggttgtgaccaaaatactgacacaaatatagatagtgaaggtcaggctgaagaggtgtcagatggaaataaggaacttattgggaactggagcaaaggttatccttgttataccctagcaaagaacttggctgcattgtgttcatgtcctagggctctgtggcaggttgaacttaagaataatgacctagggtatccggtggaaaaaatttctaagtggcaaarcattcaagaaatggcacggccagtgagccgagagcgcgccactgcactccagcctgggtgacagagcaagactccatctcaaaaaaaaaaaaaaaaaagaaatggcatggctgcttctaacagtctgtaatcagatatggtagcaaaggagggacttaaagttggaacttcaaattaaatgggaagcagagcctaaacatttggaaaattaccgatgtggctgtgtggtagaaaaggaaagagcattttcagaagaggaacacaagtgggctgtg

SEQ ID NO: 385903 - DNA, 600 bp, Homo sapiens
ttccttgccataccttgaaattgccctgcgaagtctcttgtggaaaaatccacatcctatagagaatcccatttcccctttattttccttcatttttttccagattcaggggataatcaactaagagccagatacccttttaggtctaataaaacccattttacaacctgatctctctctgaagtctgctatctgagagcttcctctgcacaataaaacttgatctccataattctttatcttgacctgaacattcctttctattgatcccaggtcttgagataaactcaaccaaytgtcaactggaaaatgttcaaatttacctatagcctggaagcccccactttttgtcctgcctttctgaaccaaatcaatgtatttcttaaatgtatttgattgatgtctcgtgcctccctaaaatatataaaaacaagctgtagcccgaccaccttgggcacatgttcttaggacctcctgagggctgtgtcaggccattgtcactcatatttggctcagaataaatctctaaaaatattttacagagtttgactcttttcatcaacagacataacgtatagtatgaagaccacagttaataac

SEQ ID NO: 385904 - DNA, 577 bp, Homo sapiens
cagatgtgaattttcccctcaagagatggctttgcagggccatttcagtctgctggtcctgtggcaaccatttcaaaatatgacaaagaaatatattttggggtaaaatatcttgatttatcttaaggtctgctatctatcatatgatgctataccagaatcaggttggaaagtaagtcacatcgtactggtttaataaaaaaaaaaaaaaatgtttaatgagacttcatggtttgtatggtgtgacctaacccttgccttacatagccctagctcttttttataatttggtatcttatcaccacagtctgttttgtcagtcttatgatctctaktttaaccttaatactggtgggttgtgcctaaattccaaaagaaaggtgatataacaaggtgcatctgacctcctttctcatgatctccaggaattcaattattcaggtttctctagggtccccttggccaaaagtgggtctgttcagccatttggggggcttaagattttatttttgatttacagtagaacacagggagtagaggcctgcagtacagtgcaaagtgtaataaatgaatgaag

SEQ ID NO: 385905 - DNA, 577 bp, Homo sapiens
cagatgtgaattttcccctcaagagatggctttgcagggccatttcagtctgctggtcctgtggcaaccatttcaaaatatgacaaagaaatatattttggggtaaaatatcttgatttatcttaaggtctgctatctatcatatgatgctataccagaatcaggttggaaagtaagtcacatcgtactggtttaataaaaaaaaaaaaaaatgtttaatgagacttcatggtttgtatggtgtgacctaacccttgccttacatagccctagctcttttttataatttggtatcttatcaccacagtctgttttgtcagtcttatgatctctagtttaaccttaatactggtgggttgtkcctaaattccaaaagaaaggtgatataacaaggtgcatctgacctcctttctcatgatctccaggaattcaattattcaggtttctctagggtccccttggccaaaagtgggtctgttcagccatttggggggcttaagattttatttttgatttacagtagaacacagggagtagaggcctgcagtacagtgcaaagtgtaataaatgaatgaag

SEQ ID NO: 385906 - DNA, 577 bp, Homo sapiens
cagatgtgaattttcccctcaagagatggctttgcagggccatttcagtctgctggtcctgtggcaaccatttcaaaatatgacaaagaaatatattttggggtaaaatatcttgatttatcttaaggtctgctatctatcatatgatgctataccagaatcaggttggaaagtaagtcacatcgtactggtttaataaaaaaaaaaaaaaatgtttaatgagacttcatggtttgtatggtgtgacctaacccttgccttacatagccctagctcttttttataatttggtatcttatcaccacagtctgttttgtcagtcttatgatctctagtttaaccttaatactggtgggttgtgcctaaattccaaaagaaaggtgatataacaaggtgcatctgacctcctttctcatgatctccaggaattcaattattcaggtttctctagggtccccttggccaaaagtgggtctgttcagccatttggggggcttaagattttatttttgatttacagtagaacacagggagtagaggcctgcagtrcagtgcaaagtgtaataaatgaatgaag

SEQ ID NO: 385907 - DNA, 593 bp, Homo sapiens
taaattattcttttagtagcaaagcacagtccagcatcaattatagaaaaaattctttcctacataaaaaatgctcacagatgtaaaaatatgaaactaatgttgtttcctctctttcctgaacmgaacaatacgcttaaaaaatataaagctcatgattcacatgaaacattttctagtgctggacagcaagttggacggcacctaatgtcaggaattcattgattccttaggaagtactctctgttatagtcaataatagtaccaaaaattgaaggtttaaaaatttttcattctttactcgccagtaactacttactgcatacccatctatatgccaggcacatttcctttatagtgaatgtaggcactattcgcttaatactgaatataaggaaattgagactaactccagagtggttaaatgaattctttaaggagataaagcaagtaagtgacaaaaagatgttctttctaactctgaaatctgatgtctttccttatgtttgtttgcccaggcaatttgaggtggtaatccatttcactattgtatgacaaggaaatcggttctaggcctgtctccgccactatcc

SEQ ID NO: 385908 - DNA, 593 bp, Homo sapiens
taaattattcttttagtagcaaagcacagtccagcatcaattatagaaaaaattctttcctacataaaaaatgctcacagatgtaaaaatatgaaactaatgttgtttcctctctttcctgaaccgaacaatacgcttaaaaaatataaagctcatgattcacatgaaacattttctagtgctggacagcaagttggacggcacctaatgtcaggaattcattgattccttaggaagtactctctgttatagtcaataatagtaccaaaaattgaaggtttaaaaatttttcattcttyactcgccagtaactacttactgcatacccatctatatgccaggcacatttcctttatagtgaatgtaggcactattcgcttaatactgaatataaggaaattgagactaactccagagtggttaaatgaattctttaaggagataaagcaagtaagtgacaaaaagatgttctttctaactctgaaatctgatgtctttccttatgtttgtttgcccaggcaatttgaggtggtaatccatttcactattgtatgacaaggaaatcggttctaggcctgtctccgccactatcc

SEQ ID NO: 385909 - DNA, 593 bp, Homo sapiens
taaattattcttttagtagcaaagcacagtccagcatcaattatagaaaaaattctttcctacataaaaaatgctcacagatgtaaaaatatgaaactaatgttgtttcctctctttcctgaaccgaacaatacgcttaaaaaatataaagctcatgattcacatgaaacattttctagtgctggacagcaagttggacggcacctaatgtcaggaattcattgattccttaggaagtactctctgttatagtcaataatagtaccaaaaattgaaggtttaaaaatttttcattctttactcrccagtaactacttactgcatacccatctatatgccaggcacatttcctttatagtgaatgtaggcactattcgcttaatactgaatataaggaaattgagactaactccagagtggttaaatgaattctttaaggagataaagcaagtaagtgacaaaaagatgttctttctaactctgaaatctgatgtctttccttatgtttgtttgcccaggcaatttgaggtggtaatccatttcactattgtatgacaaggaaatcggttctaggcctgtctccgccactatcc

SEQ ID NO: 385910 - DNA, 613 bp, Homo sapiens
ttggctgctcataatgtcagttactgagagagaagtgccaaaattttcttctaagctggtggasttatttttatctcctttaaacttttgctctctgtagtttaaggctgtgtttgcgggtgtatataaatgtgtatctttctattgagtagaactttttacaaattttctttcttatctgtcacaatcatatggtggctgtgtcagaactgacactagaaattcaatctgtatcaatcattaagtatttattaagcactgtctatgggtggcagtgggtctgaatctgacctatgctgactcaaaccttcactggaaaatgtcttaagaaactccaggcccaacattgagtgggcatcatttttgacaggaatttttcctattctccatatcaaaggaaaaagacagccaagattaactagtataaattattaaccagtcagaggagcagagttacaaaaccttaatttaaaaggtatgccttacgtatttactgaataaaccatttatgcttatgttttctcttactttggaaaattacaagtattcatgaaaaaaagatggagctttgaattaacagctgagcaatatggatgagttgtaaatataggct

SEQ ID NO: 385911 - DNA, 613 bp, Homo sapiens
ttggctgctcataatgtcagttactgagagagaagtgccaaaattttcttctaagctggtggacttatttttatctcctttaaacttttgctctctgtagtttaaggctgtgtttgcgggtgtatataaatgtgtatctttctattgagtagaactttttacaaattttctttcttatctgtcacaatcatatggtggctgtgtcagaactgacactagaaattcaatctgtatcaatcattaagtatttattaagcactgtctatgggtggcagtgggtctgaatctgacctatgctgactcaaaccttcactggaaaatgtcttaagaaactccaggyccaacattgagtgggcatcatttttgacaggaatttttcctattctccatatcaaaggaaaaagacagccaagattaactagtataaattattaaccagtcagaggagcagagttacaaaaccttaatttaaaaggtatgccttacgtatttactgaataaaccatttatgcttatgttttctcttactttggaaaattacaagtattcatgaaaaaaagatggagctttgaattaacagctgagcaatatggatgagttgtaaatataggct

SEQ ID NO: 385912 - DNA, 600 bp, Homo sapiens
tagaatctttaaatcagctaatgacatggcagcaaatatgaagtggaagtaatgcaagatggcaattaattatttacagtagccttatctctagttgactgaaaccactatgacatgggaacaagagtgtaactccaaattccagaagccgtcccagatgtcatagcaaatctasaagataatacatttcgatgatcatttctatgcaagagtaacacttaagaaattgagattcactttcatgtccatgcataggtatcattctcgtatcattctctcatggggcattggaatatctaagagccagaatctaggaaaacaaattccactcgaattcttttttttttttgaaactagatatccaagcatgaaggcttgaagagtcatcttttaagaccttaaataaaataaatacactcatgcaaagtgaatttctaggcatgtcaagaaaacaacaaagttaaaatgcatggtatatattgctaaactcttgtagccaacaattactaagaaaaatccatgtaacagtacagattaatgtctgatttatatgtgtacaaatttatggtttccaacctgaatttggtgcagcatagcaat

SEQ ID NO: 385913 - DNA, 588 bp, Homo sapiens
gcttctctctacactgagtgaaaatgtgctggccgattcgcatctttgtcaccactcggtrtactcgagataaatgtataaataggaagcctgaaaggtctagctgggaaaatacaaaggctcaaggaggagtcatgcaggatgagcatctggtctttcttcttcgcatagaactgcagtttataaacttcctctctctatgaggctttttgcaccatactgggaaacttccaaatataactccattacagagccgtctgaagaagctaaaaaacatccatgctgatccagagtataaaatagatgacgttcaatatttgtcaaaacatttcacctttgcagctactgaacctgtaatgacaaggactaaggccggattgacaacaagcacacaattatacttactggagaaagttcaagggaagtttgaaatacatctgtaagagaagaatacataattgaaaaaatagttccttttggatgtttaaaatatactaaaataatttcccaccactaagtgccttaggtattctaaagtctggggtttttgtttttctttagcccactgattttgacagtgaacaatat

SEQ ID NO: 385914 - DNA, 588 bp, Homo sapiens
gcttctctctacactgagtgaaaatgtgctggccgattcgcatctttgtcaccactcggtgtactygagataaatgtataaataggaagcctgaaaggtctagctgggaaaatacaaaggctcaaggaggagtcatgcaggatgagcatctggtctttcttcttcgcatagaactgcagtttataaacttcctctctctatgaggctttttgcaccatactgggaaacttccaaatataactccattacagagccgtctgaagaagctaaaaaacatccatgctgatccagagtataaaatagatgacgttcaatatttgtcaaaacatttcacctttgcagctactgaacctgtaatgacaaggactaaggccggattgacaacaagcacacaattatacttactggagaaagttcaagggaagtttgaaatacatctgtaagagaagaatacataattgaaaaaatagttccttttggatgtttaaaatatactaaaataatttcccaccactaagtgccttaggtattctaaagtctggggtttttgtttttctttagcccactgattttgacagtgaacaatat

SEQ ID NO: 385915 - DNA, 588 bp, Homo sapiens
gcttctctctacactgagtgaaaatgtgctggccgattcgcatctttgtcaccactcggtgtactcgagataaatgtataaataggaagcctgaaaggtctagctgggaaaatacaaaggctcaaggaggagtcatgcaggatgagcatctggtctttcttcttcgcrtagaactgcagtttataaacttcctctctctatgaggctttttgcaccatactgggaaacttccaaatataactccattacagagccgtctgaagaagctaaaaaacatccatgctgatccagagtataaaatagatgacgttcaatatttgtcaaaacatttcacctttgcagctactgaacctgtaatgacaaggactaaggccggattgacaacaagcacacaattatacttactggagaaagttcaagggaagtttgaaatacatctgtaagagaagaatacataattgaaaaaatagttccttttggatgtttaaaatatactaaaataatttcccaccactaagtgccttaggtattctaaagtctggggtttttgtttttctttagcccactgattttgacagtgaacaatat

SEQ ID NO: 385916 - DNA, 588 bp, Homo sapiens
gcttctctctacactgagtgaaaatgtgctggccgattcgcatctttgtcaccactcggtgtactcgagataaatgtataaataggaagcctgaaaggtctagctgggaaaatacaaaggctcaaggaggagtcatgcaggatgagcatctggtctttcttcttcgcatagaactgcagtttataaacttcctctctctatgaggctttttgcaccatactgggaaacttccaaatataactccattacagagccgtctgaagaagctaaaaaacatccatgctgatccagagtataaaatagatgacgttcaatatttgtcaaaacatttcacctttgcagctactgaacctgtaatgacaaggactaaggccggrttgacaacaagcacacaattatacttactggagaaagttcaagggaagtttgaaatacatctgtaagagaagaatacataattgaaaaaatagttccttttggatgtttaaaatatactaaaataatttcccaccactaagtgccttaggtattctaaagtctggggtttttgtttttctttagcccactgattttgacagtgaacaatat

SEQ ID NO: 385917 - DNA, 552 bp, Homo sapiens
actaaatgtctagcacatgaatgagagctaataaggatcacaggaatgagtgaaacagtgaaagcatgaataaatgaatacaacaagataagaaacataaaaaacgaaattgcttcaaaaattgcaaaaatcaaatcctaataaccttcagtttcaacttccaagagaacttggaagtcaccattcttgtccttaccctaagaagctgaacaaactgaaaatcattaacttttttggaaccaatcagaaaattatggttgcagggcaaaacaccaccctaaaatctggagagataagtaaatacaaagaattgcagatgatatatcaatttayttagagctgaagctgctggaatcataaactggtaaaaacacaaaaatcatattttgatgaatttctaggtactgaatgtgatctgccctggaagtgagaaactcttaggggctacagtatgagataacacctgcacatttataggttttcttccagaaaccccaacaggctctcaaagtaaagacttgagaaagatcccagtgtggctctggcaggggg

SEQ ID NO: 385918 - DNA, 621 bp, Homo sapiens
tttcaataatgtataagcagtctattccaggtcccctgagtcaagctttgtggttcaccaaattaaatatatatgtgtgtgtgtgtgcatgtctctgtgtgtgtgtgtgtataatttatacatatatgtatatgtgtgtatatatatatawaaaacattagatctttacgaaagaaaaagaagtagtgcatagaatggatgagcctgaagcatggatcctggaatagttctgccacctagttccctcacagtctaatccacactctgtcctcacgagcctgggtgaacatttcttctggaggaatccgtgttaatagctcctcctagaacagggctcagctgtgcggatgtcgtcttatcaaccacaagcaaacatgggggtagggagctgtgcgtcagtgaatcttgctcgtgggaaaattgttctatcagtcacagtagtatgtagcagggctacatttttttaaaatagtgcctgcccttcttgactgtctaaaaaagcagaacgaaattctcactgaaccagtaaaccagccaaggaaaagtgtgtcaatcacattgatgatttatttctaagactcttgctgagtacaaacattctaagtaccattggttaaacta

SEQ ID NO: 385919 - DNA, 621 bp, Homo sapiens
tttcaataatgtataagcagtctattccaggtcccctgagtcaagctttgtggttcaccaaattaaatatatatgtgtgtgtgtgtgcatgtctctgtgtgtgtgtgtgtataatttatacatatatgtatatgtgtgtatatatatataaaaaacattagatctttacgaaagaaaaagaagtagtgcatagaatggatgagcctgaagcatggatcctggaatagttctgccacctagttccctcacagtctaatccacactctgtcctcacgagcctgggtgaacatttcttctggaggaatccgtgttaatagctcctcctagaacagggctcagctgtgcggatgtcgtcttatcaaccacaagcaaacatgggggtagggagctgtgcgtcagtgaatcttgctcgtgggaaaattgttctatcagtcacagtagtatgtagcagggctacatttttttaaaatagtgcctgcccttcttgactgtctaaaaaagcagaacgaaattctcactgaaccagtaaaccagccaaggaaaagtgtgtcaatcacattgrtgatttatttctaagactcttgctgagtacaaacattctaagtaccattggttaaacta

SEQ ID NO: 385920 - DNA, 558 bp, Homo sapiens
aatctgctttactcaaagtctactggttaactgttagcttcatctaaaacataccttacaaaaatatctaggatttttttttctttgagacagggtctctgttgcccaggctgaagtgcagtagtgtgatcgcggctcactgcagtctaaaactccctgactaacacaactatatatccagataaattcatattctggaatttcttctcaattttcactgcaggtaaaatttggaagccattataataaatatttttatgaggtttcctcagaaatgtggcatttaaaaattatttgtaattggaagtgtaagttctcaaattatacctttaaatggggtttgcacaagtatgacttsaatagtgttcaagtagtcaagagggtgatgcaatattattgtgtagaatttttagactaaaatattcccaaaaccacaatccttttcttttcaatacatgtgaatcaatactggatataagctttgaaagtttttgaactgtatatttccattatcagccacctaaaagaacaagaggaaaataggaataatgacccgtc

SEQ ID NO: 385921 - DNA, 495 bp, Homo sapiens
cacatgagccttcattgctgaaagcactgaaagcaagagccaaagctacctattgaagaggctaaaaaacaattgtcaagtcaggaataacctcccatgtcctactgatgtttaagattctaaatactaagtaatatattaataatgtactgtcttggttcatctagtttagyaaatttactctctagaatatgaaattctattgattatatcagcatcaaaaatatataaaagtgattgagaatgaggctttaagataacctcctaataatatgtatctgattaggatatgccacatcccactttccaacccacatatctataaagacaaaatctgaatcacatggaaaagcaagctattagtaaacaatttgcaggagtctgagaaaatttataactatagagtagataacacttcagttttaaacataatcagtgacttatactcaacttgttctcagaaatgtcatcttacaagttggtataataacccag

SEQ ID NO: 385922 - DNA, 647 bp, Homo sapiens
aggctcccacaaaggcacttttgtccaygggtggctggaaaattgttgcttctgtagggggatgatggctggggacctcctatttctccatctttgtctctgttaactattctttaaaaatgccaagatgtgggggctttgttgtctgtatttttttgctctcttaattgctctgaaaagaaatagtatgaaaataataaacttcattgaaaccagagctaaggacagtttggcctatctctacacaacttgcattgtggagttcacagcgttgttcataaaaataaaaaacaaataagatcaaggctaccactaaattcagctatcacactaagagctcattctattgagggaacttttatgtaatggaaaagcaccttcagcatagccttggagtgcgatctctactccttgcagtaggtgaacatcatctttctcaatgagtattctagaatcacagaatttggattacaggagaatccttaaagggcaccatgaatttaaggtcgtatgtgctttcaactcaatttccagttaaacaatgcccacacccagggctgttcagctgaatcaggaagagtgtttagaatccatctttgaactcagcttagtcatgtggactctctgtccctgctgaggcttcagct

SEQ ID NO: 385923 - DNA, 647 bp, Homo sapiens
aggctcccacaaaggcacttttgtccacgggtggctggaaaattgttgcttctgtagggggatgatggctggggacctcctatttctccatctttgtctctgttaactattctttaaaaatgccaagatgtgggggctttgttgtctgtatttttttgctctcttaattgctctgaaaagaaatagtatgaaaataataaacttcattgraaccagagctaaggacagtttggcctatctctacacaacttgcattgtggagttcacagcgttgttcataaaaataaaaaacaaataagatcaaggctaccactaaattcagctatcacactaagagctcattctattgagggaacttttatgtaatggaaaagcaccttcagcatagccttggagtgcgatctctactccttgcagtaggtgaacatcatctttctcaatgagtattctagaatcacagaatttggattacaggagaatccttaaagggcaccatgaatttaaggtcgtatgtgctttcaactcaatttccagttaaacaatgcccacacccagggctgttcagctgaatcaggaagagtgtttagaatccatctttgaactcagcttagtcatgtggactctctgtccctgctgaggcttcagct

SEQ ID NO: 385924 - DNA, 577 bp, Homo sapiens
ttaaaactactaggtaaaaccaggtgtcgtgatgtacagaaggtataatttagaaaaattattagctatcaggaagtggcaatgaggaattgacaggcactcgattatctttggaaactgtgggatgtttttacatcagcaaataggatatgaataatcaaatataggattgtaaatatgatcttaagcagattattaaacataggatttctgtgtaattattgaaaaaaatatgaccactctgaagtgtgttggagttacccaatagtagtctctccaaattaagcttatttattatatagatcaatgaagggttgtaaacagtgtctctgtttatattttagtaaggcatgtgttatggactgaattgtgtctgcctcagaaaagatctsttgatgtcatagcctccagtacctcagaatgtgaccttatttggaaacagagtctttacacaggtaattaagttaaaaggaagtagttagggtgggccgtaatccaatataactgatggtccttatgaaaggggaaattgggggcacatacagacgtgcacagaagggaaacgatgtacaggtat

SEQ ID NO: 385925 - DNA, 588 bp, Homo sapiens
cttcgaggtcatattcctacaatctgtacccttttctttttaaagaaaagtgagtgacatacactcagattacttttgctggatttttttttaatccaaaaagaaaatcagaatgtgtgattctttgccttaagtttgtgtaatgcctcccattgactgtagtttcctcctttataacatttccttcctagcttccccgaatattggctgtggacattataatatgtagtggatgtagggcctgccaagtaataaaggtgcatttttatcaatgtrgcaaaactgccagcccctttgcatggtgcatgctgcagaatgtgctgttcaaccctgggtctgcccacgctgctcctgcatttgcaacccttgctcctctccagcgcctcccaaggctcagtttcaatatcattcctctgaaatgtctcgtgacaaaaacctccctcattcctgaagatgaactccttgagggccaggaggctgtcttgtgaatttctgaaataatatgtgtgaagtgcctagaattgagcctggtacaaggaagaaacttctttcattgatgaaatgccatatctctgtctctatctatat

SEQ ID NO: 385926 - DNA, 557 bp, Homo sapiens
aatggttaagaatgacagttcttaagtacaatgcccgagttcacgctctccactaactagctctgtgaccttgggaaagttaatgattgtctttgtggctcaattttctaacctgcaaaatagggattacatcaaaatggattttaaaatgtttagagtccctgggatatcagtataagttcagtgtcagctactactactgctgctctagtactactataattatgctgttattatgactatcataatcatcaccatcacaattggcataatgatttagccagaattaattttgcttttcaaggctgtatttattacaatgctttgcaaccctaacagcaaataagaatcaacccagggaaagttccaaatacagcgrtagctggatcccatccccagaacaattaaagcagatattctgaaagtggaaaatggatgttggtttcaaatgtgcatctagcatggagaacacctgatccataggaaacttagcctcacagcccctacttttagcttcagtgtgctttgttttctctttgcctcaacaacaaattcat

SEQ ID NO: 385927 - DNA, 570 bp, Homo sapiens
caagtcacggaacaataaccccagaaacacagagtttctaaactggtagtctcatgtcattttataccgaggttaaacttttatgatgacaaccagagcatccctcaaatcaaacgggggatgtatgaggactcttttggttcattactgaatcctagaattcaacmaatacctgttgaacatagttataaagaaataataagttccaaaggggataatgcatgcatgagaaatattcaacataaatggtgacaacaaattaggccagtcagagtttgaaggaagcacagcagatatctgatcaaaaataaaaaggggaatgtaatcttctcatttgtgaaatctggattcttagcattaaagagtataactcaaaaccaaaaccaaaccctggctaagtgtatcaaagaacatgatacttaagtgccttgaattcacctacatagaactatcgagaagccaggtgtcaaagatattgtgagaagtccaggaataggtaataattaaccacaggctccagcaatgcaggcaagagagctgttacatatatgcctgctgcttgtttggcta

SEQ ID NO: 385928 - DNA, 570 bp, Homo sapiens
caagtcacggaacaataaccccagaaacacagagtttctaaactggtagtctcatgtcattttataccgaggttaaacttttatgatgacaaccagagcatccctcaaatcaaacgggggatgtatgaggactcttttggttcattactgaatcctagaattcaaccaatacctgttgaacatagttataaagaaataataagttccaaaggggataatgcatgcatgagaaatattcaacataaatggtgacaacaaattaggccagtcagagtttgaaggaagcacascagatatctgatcaaaaataaaaaggggaatgtaatcttctcatttgtgaaatctggattcttagcattaaagagtataactcaaaaccaaaaccaaaccctggctaagtgtatcaaagaacatgatacttaagtgccttgaattcacctacatagaactatcgagaagccaggtgtcaaagatattgtgagaagtccaggaataggtaataattaaccacaggctccagcaatgcaggcaagagagctgttacatatatgcctgctgcttgtttggcta

SEQ ID NO: 385929 - DNA, 587 bp, Homo sapiens
ttgtgtttggcagaatcctaaggtggccccaagattcccacctctaggtgtacatattttgtatactcgctcaccctctgtcttgagtgtaggcagaacttgtgaatatgaaggaatgtcactccgtgacatcttaggttagatgacaaaggttatcccctcaggggatcttgattatagctgcaaaatcccctttgtcatcccctttaaattaatcaaaagggaatatgagagtggtctgcagataacaagtagcaagaaaatgaagacttcggtcctgcagctgcaaggaaacaaattctgccgacaaacgcgagaaactttgcagtgaatcttttcctggtcaagcatccaggttgagaactcagctcagccaagaccttgatttcagacttgtgagagcttgcatggagaactcagtgactgtctgtagtttargagttaattttctcactctgtgtattaactgagtctgcttgtaatttattgtttctgacttttttaaaaaactgtaaatattcattgactttctaacggattgcctttgattgatcgattggtgatggatgctaatggaatctgtgacc

SEQ ID NO: 385930 - DNA, 583 bp, Homo sapiens
ctcattttgactttttggcagcagggaaagttaagttccctgcctttcttcctgaagaatgagtaaaatcaagaacaagattagttatggggccaccgttaggtgaaagggtttttggtgtgctgattaaaggtgtttgtgctgtcattgtwctgtctttcttcttggtttgacttttgggattaccttctgtactagttttctaggattgccataacaaaatttcaggtggtttaaacaacagaaagtcaatttcttacagactggggtcttatgaggcttctctccttggcttctagatgaccaggttctcatggtgtcctcacatggtaatccctagatctgcctgaggcctctatgttcgaatctcctcttctcagaaggacaccaggcatattggattagggctcacctagatgatctcattaattacctgttgaaagtccctctctgtaaatatgttcacattctgatatacaaggcactgagacttcaatgcactgatgtttgcagggcactattcacctcataataccctgtaaccactgatatccagttctaacccctaatatccaactatgga

SEQ ID NO: 385931 - DNA, 619 bp, Homo sapiens
tgttattcagtgatgctcagaggatcatacaaaagctctataataataaactggaatgtgcttttccccagcctccctgtacatatatatctctatgaattcatatggaaggagatggagctaagtagctcaggtgggacaagacatgattcagaaatccaagcacaggcacatttgctactataactttaatcattttgatttttgaataaggcgatcactgcaaactgcacattttcctggcagtaaagtaagtttcaakgaactccttatgtagaaacacatggctctggtatattttcatcaacatatatagctcctgcagtttgacgttattcagtagtattccttcatttgttctatatttctgtaaagaggataataaaataccagcttcaaatcattttagtcacagctgataggattataatatcaaaattccatttcttttatatattgtattgattattgacactgaattggagtgacttactattacatgctaaatagagtttctggaagaaaattagagatttaatatctgttttggaacatatttacagtaaaaaaaaaaaacacaagagtcactcttcagtgttcctgctggttttggttgtag

SEQ ID NO: 385932 - DNA, 607 bp, Homo sapiens
  misc_feature (1)...(607): n = A,T,C or G
tctgttttcctgacagtctatttctttcaatagaaggatcaaatggatgtttttaaaaagcgttcatgcgtctgggcttggagcacagtgagagtcagtcaggctgtggatccccagataagggagttttttttttttttttttgagacaggatctcactctgtccctgaggttggagtgcagtggcgggatcagsgctcactgcaacctcctccttccaggctcaagccatcttcccacctcggcataacctttggggagaagatttgtttacattttactctatctgatactttggtgtctgtgtacttaatatatttagtatactgtactttagcacagtgtttcctcaaactttgttttttgttcttgagcttcaagaactcaagaaacaactggcagtaagttactacctgtacaaaccagttttggaaagaggtcatcaggttttattcaagaagttaaagccatgatatgggaatggggagaggccactgtggccggggcagctgcgctcgataaaggtctttggtaattaccctttgttgttcccgtggtccacagctgttactcctgtttgttgatcctgtgcctgaagattgctcan

SEQ ID NO: 385933 - DNA, 595 bp, Homo sapiens
ctgctacacagttgtaattatagtagatgcccatttaaaaaaaatgtagatttttttttttgagactgagttttgctcctgtcccccaggctggagtgcaatggcgcaatcttggctcactgctacctctgcctcccaggttcaagggattgtcctgccacagccccctgagtagctgtgattacaggtacacaccaccacgcccagctaattattttatttttagtagagatggrgtttcaccatgttggccaggctggtattgaactcctgacttcagatgatgcacctgctttggcctcccaaagtgccgggattacaggtgtgagccatcgggcctagcaaacaaaaaatgtagattttaaacaaaaatctaatattaaaaatttactgttccatctttatgcatttactttcagtattacctcaggacggattccccacaatgaaagtttcagttcaagagatattaaacacttttatgtttcccatacatacatattgacaaattgactttcaaatatttgttccaatttacctcaacctcattgcaaacgctatttctttgttgctgtcccatcattatttaccttca

SEQ ID NO: 385934 - DNA, 595 bp, Homo sapiens
ctgctacacagttgtaattatagtagatgcccatttaaaaaaaatgtagatttttttttttgagactgagttttgctcctgtcccccaggctggagtgcaatggcgcaatcttggctcactgctacctctgcctcccaggttcaagggattgtcctgccacagccccctgagtagctgtgattacaggtacacaccaccacgcccagctaattattttatttttagtagagatggagtttcaccatgttggccaggctggtattgaactcctgacttcagatgatgcacctgctttggcctcccaaagtgccgggattacaggtgtgagccatcgggcctagcaaacaaaaaatgtagattttaaacaaaaatctaatattaaaaatttactgttccatctttatgcatttactttcagtattacctcaggacggattccccacartgaaagtttcagttcaagagatattaaacacttttatgtttcccatacatacatattgacaaattgactttcaaatatttgttccaatttacctcaacctcattgcaaacgctatttctttgttgctgtcccatcattatttaccttca

SEQ ID NO: 385935 - DNA, 460 bp, Homo sapiens
atgaggaggagttaaagacaatggagagtggaggcaggcgagagagcactctaggttgacactgaggcaggaaggacacgtgtgtgagagggtgaagaaataaaatgacattataatgcttgagaaagagtgaaccactaaatctccattagtttcaggaacggttcatcaaagatgggtctcagaataggggggaattattcttgtgatttggaagcctttggttgagcaatttagatttatcaacatgggtgagcactaagttcacgggaggattgccaagaaaagagagaaggaatggtcgtggggctaaagtcacaccagtgtcaaagcagaaaacatttaggtattcaaggacactcacagtctcacttcttggcccacagagattctgagtctcatcagttgaccatacgttgttgttgttgttgttrttgttgttgttgttgttgttgttgtt

SEQ ID NO: 385936 - DNA, 549 bp, Homo sapiens
ttgtgcacatgtaccctagaacttaaagtataataaaaaaaaaggaaatatgctgtattttatatagaatccatatgtttaaaatgatccaggcacaaagacccatgtgagtaagtctcgtgatccaaaatattttttaagagttttttttcactcggttttaaaaattaattaattaatttacttttttttagaaacagggtctccttatgtcatccaggctggagtgcagtggtaattcacaggcacaaacatagcgcaccgcaatcttgaactcctggactcaagcactcttcccacctcagcctcccaagtacctgggactacaggcacawgcaaccatgccccaaaatcttttgttctttaacccaggtattgctcgttattctacacgtgtggtaatgtatggaattcaaaaagtcacattgatgtcgaagttgaggaactgctgatgcctccattataagaaattttaacatgtacatctgttagccacagtaattctgtcccattgcatgtaatcactaaaattaaaaatgaacatatgaa

SEQ ID NO: 385937 - DNA, 548 bp, Homo sapiens
gataatatctgtttttttgtttgttggttggttttagaagaaatattgggttaagacttttcatcccagtccgtttttccccccatttggtgattgtgctagtcgcatgtgggtgttggttcagttggaattcattcatttattcctttttcagactcatattgaatgccactttccaaatacttggaaacagggatgaatttaacagagcaggtcttcagggagtttactttctagtagaagaaataatcagaaaacaaataaatacgtaatataaagttgggtaataatccatgctaggaagaaaaactggggcatagtgaatgacgtggccagggcagaggtgctaygtttgatactatattcttgtcaagcactctgacgatgtgacatttaaataggaactgggtgaagggaagaaataaggcttgcaaagatacagagaatggattttcttagaagattatcctttaatgtgcttactttaaaatatcatggctgtaccctattgctagtgtcctttagtacattctcatgggtcagtattt

SEQ ID NO: 385938 - DNA, 468 bp, Homo sapiens
gtgactgagttctcaccaatggaattgtgagtaaatgtgatattctccatctcaaattctggctagctctcttattagtgcctctccatcctctgtccccttctggtgagctggaatgcagaccaccgccaaggccaccttaaaggccactcactgaagagcgctgactctttgtctcctaggtcacttggatttgctgaccttgatgaccagtaaactggctcaatactgttctctgagcaagaaataaacttctatgtttaagccacaaaagttttttaaaactgaaaagatgaagagtttattttaggctgaatattctaaaatatcctttttaggatatatggattttaactgggcactcctgaaggatggggtagggcttgaattyaattgaagtacaagttgatattcaatatatgtgacaaaataagataaaaatccaagaagaatttgtgcaaataggtg

SEQ ID NO: 385939 - DNA, 576 bp, Homo sapiens
cattaattttccttaattttaaactaaatctcaaagtatattttattcatattcagaaaaggataaatggaagatcaaaaagcaataatgcagacctcaccagtgcccagcccctgagggaaccattgcactgcattttttatgtcagccgacctttcctttttagtattcatgaaaacttagcaaataatcaattgaattgatttcagggacatatatccattgcttcctgcctgaaacgtgaagctcaagcatggttatctgacacaggagtgccctttcattctgtcttctgtaggaacaactgtacagaacaagtaaatgagcgacccratgaaatctcccatcccacagtctgctcttgccttactattcaattcatctctcttcatccgcacagggctcttgttctccttcaaagcaagctccggggctgtggaggaaaattcaggtgcaatgaacagaaaccacttcacttgttagccaagaggatatttaaggtgctgagcaatgaaaagttaatacgatgtactattcagtctccataaatcacctctaagtttaacatcttaaagg

SEQ ID NO: 385940 - DNA, 604 bp, Homo sapiens
ttcttctctgtaaacctagtacctctctctgcctttctcatcctgtccccagagagaccttgtttgcattgattagcccattatttcttttttcattatttcactgtcatcttgctgtttccagtttttctttttaaacctgcttagatctttccttccttagcacatctgccagcgttgtctatactggtgtttcaggaacattggggccgtatgtgaagactcttcaaaacatattttgtttagctctatgattagaaattgagattcagtagaaattatataagtattagtaatcttccttttattaatatacccagtgattctaaatgcaactgatatattaaatcagctgtcactatctctatttctcaattcctattcattccttagtaaacctgctcacttgaacttccatttctttttagcagttttcttgagataataaacagaattttttcagtcagtcattatgttrtttgaaaaattaaaaaatacattaaaattggaaaactttgtagtgttaacatttagagaagatgaatattcagaagactttgaaagagccaaaagtatatctgcataaatgttgactaaactttcc

SEQ ID NO: 385941 - DNA, 546 bp, Homo sapiens
ttttaaaattaaacaacttacccttaaataacccaagaaatggaatctgttataaatgaaaagagaaggagtgtctagaagtcagtagattttaatagttaaggaagcttgagacctaaaagaacaagtgtttctttcacaaatggatgtgaattgcacyacggagtaggagagactccagtaccacctctggaacttgagggctccgaggtgtaaaaatgaatattctttactacagagagcagcagagaacctgtactatcagaggagagttctatttcaattgggagagaaaattagaggcacatattggtgaagaagcttaggattttttgaaatacctgaaattcagaaacataattatgaatacacatattactagaaaatttcaatgcaggttaaaggtagtgacaggcaaatgctgtgtttaaataaaaaattgatcttactcttttggtatttattttgatgactttaaaattgccagagggttcaacagacatccctaatcatttccatccaacttctagctattcccaaagcctt

SEQ ID NO: 385942 - DNA, 546 bp, Homo sapiens
ttttaaaattaaacaacttacccttaaataacccaagaaatggaatctgttataaatgaaaagagaaggagtgtctagaagtcagtagattttaatagttaaggaagcttgagacctaaaagaacaagtgtttctttcacaaatggatgtgaattgcactacggagtaggagagactccagtaccacctctggaacttgagggctccgaggtgtaaaaatgaatattctttactasagagagcagcagagaacctgtactatcagaggagagttctatttcaattgggagagaaaattagaggcacatattggtgaagaagcttaggattttttgaaatacctgaaattcagaaacataattatgaatacacatattactagaaaatttcaatgcaggttaaaggtagtgacaggcaaatgctgtgtttaaataaaaaattgatcttactcttttggtatttattttgatgactttaaaattgccagagggttcaacagacatccctaatcatttccatccaacttctagctattcccaaagcctt

SEQ ID NO: 385943 - DNA, 509 bp, Homo sapiens
aaattggaactgaactgtgcaaacaatgtgcttctcatatttgttatagttgaggcacagatttggctttgagttaaattatagatgtaacaaaaaaagagagtcattcatttacacagctctcattatttgagaaggcatactgtgcttgtttgaatatgaggtatgagtcaattttctagcatctccaaaacaaaaaaaaaattcacttgagaygtcatagaagaggtactaagccatttaaagacaatgacctcaaaaaaaaaaaaaaaagaagaaaaagaaaaaactccataaaataaaaacaaacacaaaacctctgattagaaaggggacaggcatcataagactctttcttttattgctcctccataaaaccaaggaatataatagtaaattgccattcaaggacagcaagaaaatactgtctaagaacctttctgatgactttggtggatacagtgatttaacttagatgataaaaaaaaaattagattacattcgagcaa

SEQ ID NO: 385944 - DNA, 601 bp, Homo sapiens
agacactttttaacgggactgaccttaatgctgcaccttcctccttcctcgacaactgtggactgctgcacaaacttgcagaagcaaatactaaggtatgcgattcattagccacaccatggaggccgcaactagaaagagaatcccagagataatcacttggttaacagtataaggatgtgatcctttgagttagtctatggacaacttataaaacagggcaggataacatggaagtattattggttcctaacaccttgttgttggctattgttttaacaaaaatgacctccttcaaaggaagcagtgagagttctgaagaagaaagtgaaggtttcattttggaagactaatcaatgtcaygtggagtcacactaacactgagccagagattttcatcagccaactgtgaccatcaatgtctcgcgtctcactgaagataaaaatcattgggaaaattagttcctacaagtaagaagggttaaagttggtacaaatttctaaatcaaaatttggctaagaagaaaaagagaaatgtctaaaataggaaacacctttgagccagatctgagcacaatgggctactccttttgtcagtaaa

SEQ ID NO: 385945 - DNA, 657 bp, Homo sapiens
tttgtttgggtacgtaaactgctttaaagtgtatgaaagccttcttacccccttcacctaacctgggttttaagttcctctataagatgtttgaacatcaatctctagtggagaaagtagcctttaacttgtcattttagckaattattcttagtgcaagcatacatacagaaatctttctggtattagcatttttttgaagtgtggctcatgcaggacaatggaatttacttcattcttgcagattcatatagctaaagacaaatgtaaatctttggttgtagctttctctgaaagcaataagatgtatatacaactttaaatcttggattttatttacatagggtgttatttgacatcaatttttattctctttactccaaaggaataaaatagtaaaagctagaaaatgtttttcatagattttcagctcttcagaggatgaaaaaaaatttttaccattaaacaaggaatcatgcagttcttataaaaattaccagaggacacagtataatttcagtgttgattatttatttaaaatattatacataatttagtttttgaggacagcagcgatcaacagacagtaatatctaggtaacaggaaagtaaattcattttattgttttaggtgctgtttagatagtgtcattgttt

SEQ ID NO: 385946 - DNA, 595 bp, Homo sapiens
tatatatttatggggtacttgagatgtttgatacaggcatgcaatgcataataatcacatcatgaaaatcacattccctcaagcatttattctttgtattactaacmatgcaattatacaattttagttactttaaaatgcacaattactgactgtagtcaccctgttgtgctatcaaatactaggtcttattcattctttctgattactttttgtacccattaaccgttacccagccaactttaattttttaaaattagaggtaatgcaaaagtatctaataactcaaaatttacagaatttcctgagttaagaaaaaaattcaaaagtgatgcttgccttttcgctttcctaaagatgtcatttgaaaacaagtcttctgttttgataaagttaaattaatccatttcaattttatagtaatgctttttgtgttctaagaaatctttacctacccccaaggtcatgaagcctatataaatctctgttaatataattgtattataattctctgttccattcacttgatctgtgtctatctcttagtcaatagcaaactgtcttaattactatagtttagattatggtaggcctt

SEQ ID NO: 385947 - DNA, 516 bp, Homo sapiens
tttaaggaccctcgtctcttctcacacagcatttatataaacaccttctacttttctatcatcctaatatagttaaataaaacatttggttaaaccaatactcagtgtgtatattattaatattayttaaactattttcataacaaagcatataataatccacagtcattttcctacataatttttgtatttatagattaataattgcttcattttgtctttgtttttaatcactaattcaatctgcaaccctcccccagttgtataaatctccatccaatatttctatagattaagtattcttttttttatctttttgaggaaatatctcctacccatttttatttgacccaatttaaataaattgatctgtaggtttatttcacaggtattatttgacattacttcttcactatcattttgcagagtcccattacctctcttagattaaagccatgatttcttgaatatcagaatactcccttttcttagattactcccttattttagtgaagt

SEQ ID NO: 385948 - DNA, 586 bp, Homo sapiens
tattataaaactattttcacaatcttttatcttacatagtaagacattaaagaatagagtggtttaataattttggtggtgattaatagtttaataattttagtaggcaggcaagatggctgactagacacagccaggtggaaaagctaccaccaagggaccaggatgactggcacactcctaacagatcttcagagagaaggcactgagaaggggacaaagggaagatgcagaagctgrgctgaagtcgaaggaagctgggaacactgcatggggctactgcataccaggactcattcctggaccctaaaaactctggaggaacagatgagttgaacaggcaaggagcaacctgctctcgccatgggactctggaatccaggcaggaggaaattcctctaccactgtgaacacttgcattggcaaggagaagtgctaggggcagcataccagccagtgcagagcccagtgggagcatctgtagtgaagcacagcaaggtatgtccatccccctaggctccacttgctcccatagaagactttagcccaagaagaactgtctgacctgaattctgcagcacagtct

SEQ ID NO: 385949 - DNA, 573 bp, Homo sapiens
agtgctattcacaatggcaaagacatggaatcaacccaaatgcccatcagctgtagactggataaagaaaatgtggttcatatacaccatggaatactatgcagtcataaaaaagaatgagatcatgtcctttgcaggaacatggatggagctagaagccattattcttagcaaaataatggaggaacataaaaccaagtactggatgttctcatttataggtcaaagcyaaatgatgagaatacaaggacacatagagcagaacaacagacactggagcctaccagagggtagtggtttggaggagagagaggatcaggaaaagtaactaatggggactaggattaatacctgagttacgaaataatctgtataacaaacccccacaacacgagtttacctgtatagcaaacctccacatgttcccctaaaaagttaaaaaaaataaattttgtgagatacctgtcaataactctgaagggtctgagaattttcccctcttgcaagctaacaagattctgtaccacattttcatggatgctggcagaaggtacaatacttccgggtcagaga

SEQ ID NO: 385950 - DNA, 617 bp, Homo sapiens
attgaaactacatactacaagtcaatttaaaagcatgatatttaattgataaatctggccaatccctttaacattcatagtggagatgaataaattaaaaaggcgtcaaaatggaagatagatgaccctgctaaaaaaatttttaattgcattcgtctacttttaaaaataaatcccacattgaatttaatatatgaactattttctagtccttttttttttttttttgtagaratggggtctcaaactcggcctcaagcattccacctgcctcagcctcccaaaagtgctgggattgtaggcctgagctaccacacctggcctctagtctttctatttataagtaggagatataatagcatttagggtaagtggtggaaacttttgcagtttttcctgtaactatctgactcagcatcagctgaaaatatccttgtattattttaacattttcctttcctctactaaataatgtgtcactctggctatgccctgaggtggtgactcagttctgtctaagacgctgcctagggatcttaagcaatgattgaaaatacaggaagttttccccttagaaaagccctggttggctgggcgcagtggctcacacctgttat

SEQ ID NO: 385951 - DNA, 435 bp, Homo sapiens
ctgcccaccctggcctcccaaagtgctgggattacaggcatgagccattgtgtccaacctgaattatctatttacattccatgcccattttttattgtaatatttgttttttacataatttcacagaaagttgtaatcaaaatgttaggaaagattatttctaaggaatattacaatgagtattttaagattgaattttaaatttttttcatttaaaattttatacgtgtatcttttttatgctataaaattatataacaattttacttaaaaggcaataaaggatatgatgatcagcatgtatgtcacaaaacaatataaagattccatataatagaaacccatttttattcttataaacctcctgtaattcaaggctcatttttataccagttayttgactccagcatcactcatacagcatttctgtatgtc

SEQ ID NO: 385952 - DNA, 592 bp, Homo sapiens
aaaagaaaggtctgcagttgatttcttttctttaaaagtaggtgggacaaaagtacatgaatttatatgggcagaagtggattgatggggaagtaataattcttagttatctaccatattctgggcattattgtagacatgtctttcatttaatctacactgtgatccttttaagcagtgtttataagtgactaatttttagataatactcccatyctgacacagcaggtagcagcttattcatgcaacaatctgatataggtttattgccacactttgggaactcttatttctctttcactgtaaaggtcttcaatttacaagttactgaagagagattgttcttatattgtttcttagtagatccagctcttgtagttgactaaaatttggtccaaatatttcttttcctattatgctaatatttgccttcagactataccttatggtgatatcaatatcaacaccaatgctagtacaacatcggtgacaatctgaacactaacataactaatattgatataccattacaaacatgaatagcaatattgacatcagtaacgataccaataccaatgacagcacaaaatac

SEQ ID NO: 385953 - DNA, 537 bp, Homo sapiens
caatgtgtttaagcatatgtttatcagttcatttaaaagacataatagtggtggtgaactgaatcacaatttcctcccaaaggtttgtttcttttgctgttttttaatgtgaagctacacttcccaacactcttgcaactttgttaaaaatgaaccttgaaaggtgcctatataatttcatagtagtaaaataccattatgtttaatattgttagagataaatcggccatctgctctgatttggaaggttttttaaaatagagatccatatattcatagyattcactttaacggaatgaaaggcagcagcccaagtcaggggcttataattaaaactcccatctccctgggacagaacaactaggggaaggggtggctgtggacacagctttgcagacttaaacattcctgcctgctggctctgaagagagcagtagatctcccagcacagtgcttgagctctgcaaagggacagactgcttcctcaagtgggtccctgatgcctgtgcctcctgattggaaaccacctcctggcag

SEQ ID NO: 385954 - DNA, 609 bp, Homo sapiens
gcactggcagaatttgtctgatgtaactattttgaaactctggaatctattgagggcttgaaactttcagaggatgcttttttacaaaaaaattttaaagaccatcctaagaccatatgaaatcttgaaaaagaagaaccaatctggaggactcacacttccttattttaaaacttactgcaatgctacagtaatcaaaacagtgtggtctgacaygaagagagacatagaaacaaatggaatagaatagaaagctcagaaataaagtttcacatatatggcgagaggatttttgacaagcgtgccaaagccattcgatatggattgtcaatggggaaaggacaggttcttcaacaaatgttgctggtagaactgaatatccatatataaaagaatgaagttgagcacttacctacatcgtatacaaaaatgaactcaaaatagatcaaatataaatctaagatctaaaacttcaaaactctgagaagacaaaatagggtaaaaatttcacaacattagatttggcaatgatttctttgatatgacacgaaaggcacaggcaacaaaagaaaaaataagcaaattggacttataaacattaaaaagttt

SEQ ID NO: 385955 - DNA, 609 bp, Homo sapiens
gcactggcagaatttgtctgatgtaactattttgaaactctggaatctattgagggcttgaaactttcagaggatgcttttttacaaaaaaattttaaagaccatcctaagaccatatgaaatcttgaaaaagaagaaccaatctggaggactcacacttccttattttaaaacttactgcaatgctacagtaatcaaaacagtgtggtctgacatgaagagagacatagaaacaaatggaatagaatagaaagctcagaaataaagtttcacatatatggygagaggatttttgacaagcgtgccaaagccattcgatatggattgtcaatggggaaaggacaggttcttcaacaaatgttgctggtagaactgaatatccatatataaaagaatgaagttgagcacttacctacatcgtatacaaaaatgaactcaaaatagatcaaatataaatctaagatctaaaacttcaaaactctgagaagacaaaatagggtaaaaatttcacaacattagatttggcaatgatttctttgatatgacacgaaaggcacaggcaacaaaagaaaaaataagcaaattggacttataaacattaaaaagttt

SEQ ID NO: 385956 - DNA, 586 bp, Homo sapiens
aagactaaccatggcactgcccagacaaaacactatctgagagaataggaactgcagcacagtctatggggcaggtgtagccaactgcrgtcagaccattttagctccctaccattcaacattcaactcacgcaactaaactcctcttttccaattcatgaataaattcactagaattctcatgtctcttttcatatccttaaagattataattaccattatggaattaaaaatctatattctcatatcatactttttgaattatgtatccctgggaggtcacacctaggatatgaatctgttctcagtacactgaccaaaccatgtttctatgacttaaagattaaactactactaccacactgaaactactaccgagtgggagcagctcaaaaccagtggatcaggagagttgaagatttgaaggagagtggttaaagaaaggggaaaattatgtttgctgaatagaagggtaggagaaggtgggaggagaaaaggagagattttatgaggtcaaagaacaggtattgcagcggtcactgagtaattcagaatctaattgcttttcaacagtttggaccttaca

SEQ ID NO: 385957 - DNA, 547 bp, Homo sapiens
tacttaaacttctaaatcttgcatatagttcaaccataggccaatcatttatttgatgatccacagagatgaataaagtttagtcttaaaataacaaaaagaatattactaaaattatagcattctattatctagcttttttaaaaatagtgatcctcatattatgcaacttttaaatctgcatacaaaaatattccatggacacgttttctacctctaatttgaatattcaccctgttcactcatactctagcccagcattgttcaatagaaatataaagtgaactatataggcaattttaaattttctagtagccacattaaaaacaggaagagtgacatgtaaagttagttttaatgaaataatttacttatcatttaaacatataatcaatataattaagttatttaaataaacatttaaccaatatgtaaattaatgatatatttttcttctttggtactgagtctttgggatccagtgtgtattttacactcayggcacatatttatttggactagccacattttaagtaatcaatagcca

SEQ ID NO: 385958 - DNA, 566 bp, Homo sapiens
aaggacatgaacaggcatatctaaaaagaaaacatactaacaggtaacaaatatatgaaaaaatgctcaatatcactaatcaacagagaaatgcaaattaaaaccataatgatataacatctcacatcagtcagcatgacttctattaaaaaaattaaaaaaacaacagatgttggtgaggatgcagagaaaggggaattcttatacattggtgaaatgtaaattagtacaacctttatggaagacactatggagatttcttaaagagccaaagatagaactaccatttgatccagcaatctcattacygggtatttactcaaaggaaaataaatcattttaccaaaaagacatctgccctgttatgttcatgacaacactattcacaatagcaaagtcatggaatcaacctgagtgtctgccagaggatgattagattcagaatgtggtgtgcataggttacacacacacacaccatgggattctatgcagccataaaaaatgaaataatgtctttgcagcaacatggatggagctcggggccattatccttagtgaaatgactc

SEQ ID NO: 385959 - DNA, 566 bp, Homo sapiens
aaggacatgaacaggcatatctaaaaagaaaacatactaacaggtaacaaatatatgaaaaaatgctcaatatcactaatcaacagagaaatgcaaattaaaaccataatgatataacatctcacatcagtcagcatgacttctattaaaaaaattaaaaaaacaacagatgttggtgaggatgcagagaaaggggaattcttatacattggtgaaatgtaaattagtacaacctttatggaagacactatggagatttcttaaagagccaaagatagaactaccatttgatccagcaatctcattaccgggtatttactcaaaggaaaataaatcattttaccaaaaagacatctgccctgttatgttcatgacaacastattcacaatagcaaagtcatggaatcaacctgagtgtctgccagaggatgattagattcagaatgtggtgtgcataggttacacacacacacaccatgggattctatgcagccataaaaaatgaaataatgtctttgcagcaacatggatggagctcggggccattatccttagtgaaatgactc

SEQ ID NO: 385960 - DNA, 612 bp, Homo sapiens
gactttctttgcagagcatatgacaaactgtggcatatgttgttgagcatatgccacaacactagcaatacatcagtaaattccacctttcatgagtttttgtatatttatacctaaaactatgaaaaagtctctgggtacaatagaaatggacacaatctcttatagaaccaagagagaatattaatgtttaaagcattcatgtatttgaatataatgtaaaacacagggcggtatactctcattcatcatttttaggtataaacaaaataaccttcagaagtccatacaaattttttttaaataaaaagtacttgtgaagcccagaggattttagtaggccatatgttgctttttactttttcctaaacagggttaaatccataataaataatrctagtattttctcccataccttcttaggtttctcaataggaaatgataaataagaaataggcagagaggagaaaaaaatgcttgaagcacatgtcaattttcaattcaaatgctgtgagcttaaattttattagtttatatacttgaatatccattagtttataattaggtgctctgttcactgaatgatataagatctttctaaattgagctttt

SEQ ID NO: 385961 - DNA, 602 bp, Homo sapiens
agagtctttttaaactccataaacatggttctatacatgattctcatgttttaaaaagtgctgcaactttaatcatatttataagcaagaaaattatattcattgaattgtagctgaagtatttgccatttgctttcattcttgtattttttattgaaatttaagctctttccaagatgagctttaacatgtaagagaaaaatatttatatatttgaagtttcattatacatttaattaatagtcaatattatttttaacatgtacagcctatcaattctctgatttcacctcttcacctctcctgtggcctggtaatgtgtaaagcctaatgcaatatttgttaactgcctgtgaatgtatcttccagataacggtgattttttttttttttttaatggcagatgtcttatctttttagatcttaaaggtagtggagttttcatcaatagaaaaatgaggttacataaaatcttcctaccactgtaacggctcarattctattcaaattaaatagctcttcaacaagaagttaatatgtcagctgaagtgttagcgagacacagtttcagcacagagcctttcttttcagttcacagaata

SEQ ID NO: 385962 - DNA, 558 bp, Homo sapiens
ttgtaggaaacatgaattggaagtcaaagaactaaactctattctcagctatgtcactttcttgttgctttaggttacgggaagtcaccaaagcaattatctctctgtattcccacaggtacaaatagagactatttttcccataaataactggagagaatcagatttcaaatgtatctttattagatgtctgttttaagaagataaaggacatcccactgaagtgcagggttttaaaggagttgtaagcaatatttcatttgatcagtatatttaataactttgttttttmtaggggtcaagatgggagaatataaatctgaatgaagcatatatcctgtcccaatgagtttacaagtctgagaagagacacatgcaaaggagcgcatactaagacagaaaggagacattttcaagaaaccaagatgagttcaacatgactacagcataaagctaattgggactgggaaagagttaaggctagaagtttgaaggagttgacatgagagagctggtgtatgccatgctaaaataattcttttagggaatagtgggcac

SEQ ID NO: 385963 - DNA, 540 bp, Homo sapiens
ccttttgttggagatcttcaatggtgttgaagtaacgctgataatccgggcacaccattgggatatcctgttcacattgttcttggatcctggattccagctctgcgttggtctcctccaggctgcgcaccttctccagatagytggcgagtctgtcattcaggaactgcatcgtctccttctcattgctagtgaacaccccatcctcacaccaggcacagttccccaccaagcagggactattacaactcccagtaaagtagcatggcaggaggcaaccagtcagcccgcgagacctggataggaagcttggagtctgacatcgggatgtagcacaggtaccggggagacaagctgtttccacggagcagcttgaggcaggtgcacaaccggaagccgtgccacaggactcaggagagcagtgtgtggaggagcagtcagaagtcatccttccagaagcaaagacagagactggctgcaaaacttcagttgccttgactccaaaactctcctctcctgagagttttataaccccccaaa

SEQ ID NO: 385964 - DNA, 560 bp, Homo sapiens
ggaaggtggagcactagggcaacaggacacagaccttttgttggagatcttcaatggtgttgaagtaacgctgataatccgggcacaccattgggatatcctgttcacattgttcttggatcctggattccagctctgcgttggtctcctccaggctgcgcaccttctccagatagctggcgagtctgtcattcaggaactgcatcgtctccttctcattgctagtgaacaccccatcctcacaccaggcacagttccccaccaagcagggactattacaactcccagtaaagtagcatggcaggaggcaaccagtcagcccgcgagacctggataggaagcttggagtctgacatcgggatgtagcacaggyaccggggagacaagctgtttccacggagcagcttgaggcaggtgcacaaccggaagccgtgccacaggactcaggagagcagtgtgtggaggagcagtcagaagtcatccttccagaagcaaagacagagactggctgcaaaacttcagttgccttgactccaaaactctcctctcctgagagtttt

SEQ ID NO: 385965 - DNA, 578 bp, Homo sapiens
tttatttcctattctttaactcctctcattctgagactccaatttcatcctcatttcaccacttggtactttcccacaggcttcttagtttcttcaatttctttttcaatccttttttctaccctggctaggctggaacctcaaagtctgttaatagtgaatgacctctggtatctccactcagcttctaatcacccagcagccactctttgctatgcctgatggaatttcagccagcgtatttgcaactgtgccttctgtaagtacttgagaacttttacacagtcttctttacttacctacgtatatcttcttcctctccakaataactttccaaaccccatttagatatagctactcgtgttgcaaacatgacctgtgtagagcaagaagaacagagtatttccatcttgaactctcttctccttctcggctcctaggctcaattggtgacataactccactgtctagtctttctttgatattttcttttcctccatatccctttgatgactagctgcagtcaattcctctttgactatgtctttcccactttacccccatgacaacagtcttca

SEQ ID NO: 385966 - DNA, 578 bp, Homo sapiens
tttatttcctattctttaactcctctcattctgagactccaatttcatcctcatttcaccacttggtactttcccacaggcttcttagtttcttcaatttctttttcaatccttttttctaccctggctaggctggaacctcaaagtctgttaatagtgaatgacctctggtatctccactcagcttctaatcacccagcagccactctttgctatgcctgatggaatttcagccagcgtatttgcaactgtgccttctgtaagtacttgagaacttttacacagtcttctttacttacctacgtatatcttcttcctctccagaataactttccaaaccccatttagatatagctactcgtgttgcaaacatgacctgtgtagagcaagaagaacagagtatttccatcttgaactctcttctccttytcggctcctaggctcaattggtgacataactccactgtctagtctttctttgatattttcttttcctccatatccctttgatgactagctgcagtcaattcctctttgactatgtctttcccactttacccccatgacaacagtcttca

SEQ ID NO: 385967 - DNA, 576 bp, Homo sapiens
gttctttttggtaaggaagcttaaagagaaataatttcatatgagaaargatcttgtatggtaaatttagacctaaaataaaatgattgtttaagaaagatggatgttcaaaacaaaccagaaagtccaagcatatcatgaacagtctgtaaaagtcataataagaggattaaaaaaaaaaccaacaaacttttatatggtcaagttgtctgtaattaaaaggaaattataatagtcttcctgaagattgggcttcatgtaaaaaaaaaaaagcactgataaacaaaatagttagagcgatgaaattttcttaagggattgatttactcttattaaattataagagattttaatttttttaacccaaagttcaactgtttactcgctgttttctctccccttcaactcgtttgcagctcatataagttattttccttaaattctatttgttatggtctgatgctaacaatgttttctaaaagtctaaagaaaatgttttcttccaaagtaatattctgtgcagtgtagaaggtcttttcttttgcctttgggtaattgacctaacagattttatgg

SEQ ID NO: 385968 - DNA, 576 bp, Homo sapiens
gttctttttggtaaggaagcttaaagagaaataatttcatatgagaaaagatcttgtatggtaaatttagacctaaaataaaatgattgtttaagaaagatggatgttcaaaacaaaccagaaagtccaagcatatcatgaacagtctgtaaaagtcataataagaggattaaaaaaaaaaccaacaracttttatatggtcaagttgtctgtaattaaaaggaaattataatagtcttcctgaagattgggcttcatgtaaaaaaaaaaaagcactgataaacaaaatagttagagcgatgaaattttcttaagggattgatttactcttattaaattataagagattttaatttttttaacccaaagttcaactgtttactcgctgttttctctccccttcaactcgtttgcagctcatataagttattttccttaaattctatttgttatggtctgatgctaacaatgttttctaaaagtctaaagaaaatgttttcttccaaagtaatattctgtgcagtgtagaaggtcttttcttttgcctttgggtaattgacctaacagattttatgg

SEQ ID NO: 385969 - DNA, 576 bp, Homo sapiens
gttctttttggtaaggaagcttaaagagaaataatttcatatgagaaaagatcttgtatggtaaatttagacctaaaataaaatgattgtttaagaaagatggatgttcaaaacaaaccagaaagtccaagcatatcatgaacagtctgtaaaagtcataataagaggattaaaaaaaaaaccaacaaacttttatatggtcaagttgtctgtaattaaaaggaaattataatagtcttcctgaagattgggcttcatgtaaaaaaaaaaaagcactgataaacaaaatagttagagcgatgaaattttcttaagggattgatttactcttattaaattataagagattttaatttttttaacccaaagttcaactrtttactcgctgttttctctccccttcaactcgtttgcagctcatataagttattttccttaaattctatttgttatggtctgatgctaacaatgttttctaaaagtctaaagaaaatgttttcttccaaagtaatattctgtgcagtgtagaaggtcttttcttttgcctttgggtaattgacctaacagattttatgg

SEQ ID NO: 385970 - DNA, 481 bp, Homo sapiens
tcatgcaactcataggtatttgatggtacaaatccatggctaggctaagctttccaaaagtcttatccgaaattccttctatggaacaaagttctgatagagacagggggctgagaaattctaggcagaaaagggtaggtctctgacaaaaccccaccttcaagctgaaaagccttaaaccacggcccaaagtgagaacttatatccctgttttcctgcttgaaagttgcctttttctaaaccactcatggctccatcctgtccatcctatgcctgtgaagatgccagactcagctggcagaggcaagaagcagctggacattgggaactacagctggacgtcagagagaagcagcttgattcagagggacagsttgatggtgtaatcttggagaagaatccagctggatacagcctaactttgaggaagattacctacccaccccatcctttttcagctcccctttctgctaagagccac

SEQ ID NO: 385971 - DNA, 595 bp, Homo sapiens
gtagctgggtgacttgatccaggtcatgtggagtgagccctaacctttgcatgtctcataggtagacctgcatgcaaaytctgcaattggagctttaatggagcatgagtggatgaatatcattaatgggtcagtgaagcatctcaaaaatagaactcatctgcaattccaatttggtttccatcactttctttcccataatgacgtgtttcatcactcatgctcgctgattttcccactgactctatggcttcagcctaaaattatgcctcttatttttccatagaactcaccatgaattaatcttgacatatccctcctccttaaaaggactataattttttaaatgtctttttaataagactacccttcataaagatataaatattcggctgtgatctgattctccttcacataatcttacgtgtttgagacctgtgcatgttaacctgaattttcagaattgacacattttatttctatgaatcaatccttacgtatgtattacttttctccaatagaatagagtcctttttctcactaatattaccaacatactctccctgacatatgcatttaaattaaattcatgatt

SEQ ID NO: 385972 - DNA, 595 bp, Homo sapiens
gtagctgggtgacttgatccaggtcatgtggagtgagccctaacctttgcatgtctcataggtagacctgcatgcaaattctgcaattggagctttaatggagcatgagtggatgaatatcattaatgggtcagtgaagcatctcaaaaatagaactcawctgcaattccaatttggtttccatcactttctttcccataatgacgtgtttcatcactcatgctcgctgattttcccactgactctatggcttcagcctaaaattatgcctcttatttttccatagaactcaccatgaattaatcttgacatatccctcctccttaaaaggactataattttttaaatgtctttttaataagactacccttcataaagatataaatattcggctgtgatctgattctccttcacataatcttacgtgtttgagacctgtgcatgttaacctgaattttcagaattgacacattttatttctatgaatcaatccttacgtatgtattacttttctccaatagaatagagtcctttttctcactaatattaccaacatactctccctgacatatgcatttaaattaaattcatgatt

SEQ ID NO: 385973 - DNA, 424 bp, Homo sapiens
agatagtttccaattctggggaaaatcaggtagagagaaacaaatatgctccaaatatttttcacaggagtatactaacttgttaaaagctgacaacagctcaaaagaaaagtttccttgactgaaaaaaacaaaataaagggtcagcaatgttttaagcraaaagtcaaaaagattacttcagtcttctgttagttcagttcatgcagttaattcctgttctgcttgctattcatgaacatttcaggtctccatgagtcctgaaagcttttccttcattgtgatgtcacaatctccagagttattagaaacctgcattcaagaatacctgttagagttttatagctgattataaaaccatcttctaaagaggactaaaacaagacaaaaattgtccatgggtgacaaaaagttttaggtcagc

SEQ ID NO: 385974 - DNA, 580 bp, Homo sapiens
gagtaaaaacacatttttctgtatgtcttacagyataggcatttggagtaggaagttttgatttacctttgatcatcaaaactgcatgatggattttcattgacaaaagcatttgttatatgtaaacaatatttagaattattaagccttcaataatatgcatccaagacattctattgggtactctgggtatagaacagataaaccctcctctttttcctgcaggtacttgtataagacacatgcataagaaacagaatttggcaaaaatgaaaagaattacaattatgttcattaaacaactaaaataaaaatgtatagtatgtggatcagttccatacatcctcagggtatgtatattacttgtgaagtattgactatgtaccagacattgtgctaaatatctttttcattttcactctttattacaaccttataaagtagtgtacattcttattgctcttttagcagaatactcaaaagaagcattaaaaagctaaaacaaacaaacaaaatgcttgtccaagattaaagagaaagtaagtctaatatgtcttagtgtagccaagaaagtggtaaa

SEQ ID NO: 385975 - DNA, 580 bp, Homo sapiens
gagtaaaaacacatttttctgtatgtcttacagcataggcatttggagtaggaagttttgatttacctttgatcatcaaaactgcatgatggattttcattgacaaaagcatttgttatatgtaaacaatatttagaattattaagccttcaataatatgcatccaagacattctattgggtactctgggtatagaacagataaaccctcctctttttcctgcaggtacttgtataagacacatgcataagaaacagaatttggcaaaaatgaaaagaattacaattatgttcattaaacaactaaaataaaaatgtatagtatgtggatmagttccatacatcctcagggtatgtatattacttgtgaagtattgactatgtaccagacattgtgctaaatatctttttcattttcactctttattacaaccttataaagtagtgtacattcttattgctcttttagcagaatactcaaaagaagcattaaaaagctaaaacaaacaaacaaaatgcttgtccaagattaaagagaaagtaagtctaatatgtcttagtgtagccaagaaagtggtaaa

SEQ ID NO: 385976 - DNA, 580 bp, Homo sapiens
gagtaaaaacacatttttctgtatgtcttacagcataggcatttggagtaggaagttttgatttacctttgatcatcaaaactgcatgatggattttcattgacaaaagcatttgttatatgtaaacaatatttagaattattaagccttcaataatatgcatccaagacattctattgggtactctgggtatagaacagataaaccctcctctttttcctgcaggtacttgtataagacacatgcataagaaacagaatttggcaaaaatgaaaagaattacaattatgttcattaaacaactaaaataaaaatgtatagtatgtggatcagttccatacatcctcagggtatgtatattacttgtgaagtattgactatgtaccagacattgtgctaaatatctttttcattttcactctttattacaaccttataaagtagtgtacattcttattgctcttttagcagaatactcaaaagaagcattaaaaagctaaaacaaacaaacaaaatgcttgtccaagattaaagagaaagtaagyctaatatgtcttagtgtagccaagaaagtggtaaa

SEQ ID NO: 385977 - DNA, 524 bp, Homo sapiens
accaccctttaatccccgagtaattatctcagttaccagactgactgttgyagtactgtaggatatgcagtgcttgctttcaaataaccctcattttacttaatgatggccccaaagtgcaggctacactaatttggttgacttggactttagaaaataatgtcacttaatgctattccaccataaaatcataataaaatcatgtattttgcagcaacatggatggaactggagatcattatcttaaatgaaacaaatcagacacagaaagacaaatatcgcatattctcacacatgggggctacataatgtgtgcacatggacatagagagtagaatgatagaccatggacactcagaaagcttagagagtgagagtggggttgacaatgagaaattacttaatgggtacagtttatgttactcatgtgatgatggcctaaaagctctgacttgctaattatgcaatctatgcatgcaacaaagtcacacttgtacctcaaaacttaaaaaatgaaataaaat

SEQ ID NO: 385978 - DNA, 631 bp, Homo sapiens
tgcagtgcttgctttcaaataaccctcattttacttaatgatggccccaaagtgcaggctacactaatttggttgacttggactttagaaaataatgtcacttaatgctattccaccataaaatcataataaaatcatgtattttgcagcaacatggatggaactggagatcattatcttaaatgaaacaaatcagacacagaaagacaaatatcgcatattctcacacatgggggctacataatgtgtgcrcatggacatagagagtagaatgatagaccatggacactcagaaagcttagagagtgagagtggggttgacaatgagaaattacttaatgggtacagtttatgttactcatgtgatgatggcctaaaagctctgacttgctaattatgcaatctatgcatgcaacaaagtcacacttgtacctcaaaacttaaaaaatgaaataaaataataatgtcatttagcttcttcccaatacatttaaacataattaagcatcatagctaaagaatgcttctaagtgatgaggttcaaggctcaagtacagaataatatgattcacttgcaattagcacaaagtacattcacgctaggttaaatatatcttctgtaattacattt

SEQ ID NO: 385979 - DNA, 631 bp, Homo sapiens
tgcagtgcttgctttcaaataaccctcattttacttaatgatggccccaaagtgcaggctacactaatttggttgacttggactttagaaaataatgtcacttaatgctattccaccataaaatcataataaaatcatgtattttgcagcaacatggatggaactggagatcattatcttaaatgaaacaaatcagacacagaaagacaaatatcgcatattctcacacatgggggctacataatgtgtgcacatggacatagagagtagaatgatagaccatggacactcagaaagcttagagagtgagagtggggttgacaatgagaaattacttaatgggtacagtttatgttactcatgtgatgatggcctaaaagctctgacttgctaattatgcaatctatgcatgyaacaaagtcacacttgtacctcaaaacttaaaaaatgaaataaaataataatgtcatttagcttcttcccaatacatttaaacataattaagcatcatagctaaagaatgcttctaagtgatgaggttcaaggctcaagtacagaataatatgattcacttgcaattagcacaaagtacattcacgctaggttaaatatatcttctgtaattacattt

SEQ ID NO: 385980 - DNA, 631 bp, Homo sapiens
tgcagtgcttgctttcaaataaccctcattttacttaatgatggccccaaagtgcaggctacactaatttggttgacttggactttagaaaataatgtcacttaatgctattccaccataaaatcataataaaatcatgtattttgcagcaacatggatggaactggagatcattatcttaaatgaaacaaatcagacacagaaagacaaatatcgcatattctcacacatgggggctacataatgtgtgcacatggacatagagagtagaatgatagaccatggacactcagaaagcttagagagtgagagtggggttgacaatgagaaattacttaatgggtacagtttatgttactcatgtgatgatggcctaaaagctctgacttgctaattatgcaatctatgcatgcaacaaagtcacacttgtacctcaaaacttaaaaaatgaaataaaataataatgtcatttagyttcttcccaatacatttaaacataattaagcatcatagctaaagaatgcttctaagtgatgaggttcaaggctcaagtacagaataatatgattcacttgcaattagcacaaagtacattcacgctaggttaaatatatcttctgtaattacattt

SEQ ID NO: 385981 - DNA, 631 bp, Homo sapiens
tgcagtgcttgctttcaaataaccctcattttacttaatgatggccccaaagtgcaggctacactaatttggttgacttggactttagaaaataatgtcacttaatgctattccaccataaaatcataataaaatcatgtattttgcagcaacatggatggaactggagatcattatcttaaatgaaacaaatcagacacagaaagacaaatatcgcatattctcacacatgggggctacataatgtgtgcacatggacatagagagtagaatgatagaccatggacactcagaaagcttagagagtgagagtggggttgacaatgagaaattacttaatgggtacagtttatgttactcatgtgatgatggcctaaaagctctgacttgctaattatgcaatctatgcatgcaacaaagtcacacttgtacctcaaaacttaaaaaatgaaataaaataataatgtcatttagcttcttcccaatacatttaaacataattaagcatcatagctaaagartgcttctaagtgatgaggttcaaggctcaagtacagaataatatgattcacttgcaattagcacaaagtacattcacgctaggttaaatatatcttctgtaattacattt

SEQ ID NO: 385982 - DNA, 342 bp, Homo sapiens
atcagattaagataatcataaggagaaaaagaagagtgaagtcgtttcagctttgcaacagcacttcccrcccatttgcagggatctgtttttcctgctgttgtgttaagggaatgaaatcactgcacaggccttttgcacagaggcagtgcaaaaggatttaaggatctttctaaaaccaggcttaagtcagagtgttctggcagtcctttgaaagaagttatctagctgaaacatcacttgcctcctcagaaaggtttggtgtcagctggaaaaggaaggaagctggaaggagggaggaggtgccctccttctctgaaggtgataatgataaatgaggat

SEQ ID NO: 385983 - DNA, 481 bp, Homo sapiens
agagtgaagctgaagtcatgaaatatccatgaatataacaacaggggaaacrttttgaaagattgatcacaactcatcatcttttaaaaaataatttcaacttttattttagaatcaaagagtacatattcgtatttgttacatgttgtgtgatgctgaggtttgggctacaaatgattctgtcaccaggtactgagcagtgggtcatttttagcccttcctctctccctctctcccccctttttggagtccccagttgttctcatctttgtgtccatgtgtatccaatgtttagctcccatttgtaagtgacaacatgcaatatttggttttctgttcctggaaaaatttgcttaagataatgtcctccagccacatccatgttgctgcaaaggacaaaatttcattcttttttatggctgtgtagtattccatggtgtgaaaatgtcacatgttctttatccaatgcactgttgatggg

SEQ ID NO: 385984 - DNA, 481 bp, Homo sapiens
agagtgaagctgaagtcatgaaatatccatgaatataacaacaggggaaacattttgaaagattgatcacaactcatcatcttttaaaaaataatttcaacttttattttagaatcaaagagtacatattcgtatttgttacatgttgtgtgatgctgaggtttgggctacaaatgattctgtcaccaggtactgagcagtgggtcatttttagcccttcctctctccctctctcccccctttttggagtccccarttgttctcatctttgtgtccatgtgtatccaatgtttagctcccatttgtaagtgacaacatgcaatatttggttttctgttcctggaaaaatttgcttaagataatgtcctccagccacatccatgttgctgcaaaggacaaaatttcattcttttttatggctgtgtagtattccatggtgtgaaaatgtcacatgttctttatccaatgcactgttgatggg

SEQ ID NO: 385985 - DNA, 583 bp, Homo sapiens
gttatctggaaacacatttaaacatagaaaaggtacaataaaaatatgacattatagttttttgggacagcttttgtatgtgtatgttccatcattgttgactgaaatgtcattatgtggcacatgactctataaataaatatgtgtataaaaataaataaacacatatttatttatacagtaatatactatctctctctctctctctctctctctctgacaaaggacctcccccaaggacctagcaatttcatggttaggtatatgtccaagagagatgaatgtatatattttatacacacaataatatttgcacaagaatgcttatagcagctatattcttaatagcactaaaataaaaataactgctcataaacagaataatggacaacaaactgtgacatgtttatgtaatggagtagtatgcaacaacaataaagaatgaactgccggtactcatgacaccatggaaaaatctcaaaaacatattgagctgaagaagtcaggcacaaaacagtacraacagtatgactacatttatattaacttcaagaacaggcaaaactcatctttgacatggtta

SEQ ID NO: 385986 - DNA, 506 bp, Homo sapiens
tttcaattgatgcatcttattgtctgaaaattgtatctcaataaagtggagttaacataaaaagttaagatttgatacaactgtgcagctgcatgaatgttcactactttatctatatacttaaattacaaatggatcaaagattcaaatgtgaaaagtgaaaatcataaatgtactaaaataaaatataggagaatacttttacaaattcagatgaggaaggcctttgtaacagtgacttgaaattaagaacctgtaaaaaatacgataaatttgactycataaaatagcagtgtttgaaatagtccattagtttgaaaatgtatgaaaaatactgaaagtaaataaatcaagaggttagcagtgaaattctttgcattttatagttactgatgaatattattttcttgtttttattccacaaattccacaaattgaatgtatctcttttagaatcattagaaaaattgtctgcaaaactgtttctgcttcgttagtttcttaga

SEQ ID NO: 385987 - DNA, 631 bp, Homo sapiens
caatgagtcatggctaagtactttcacttggagtggtggaatgagatctgacacagagtttataacttccttgagatctgaccatctccccaaccattcaagaagcatacacggaatcagagtcatcttcattatagatgggacatccttctcccgaatgagtccttccttctaattcctttccaacatttcatctgaccaggacattatttgacaacaaaagacacattcacattataaaarttgtcccccatgatttgcagagagcaatctacaggtaggagggagaatcacatttagaaataaagtgtcagagtcatgtgaccagtgctttgtaaaagacactgcagagaccagggacaaaggtgacccccactaaggaagaaatatgacaagtgtttccaatagaaacacaggagcacagcaggaaaaggaaatgggttattttctctcttttggagtatttaagtagaagcacacaattatgtaattacatgattaagttttccacgaggtaaataataaggaaataatgacgtggtggcaatgggccttcagcagggtataaaggaggctatggacccagaagacttccaaacccaagaacttcactctcttgaaaacccaccca

SEQ ID NO: 385988 - DNA, 631 bp, Homo sapiens
caatgagtcatggctaagtactttcacttggagtggtggaatgagatctgacacagagtttataacttccttgagatctgaccatctccccaaccattcaagaagcatacacggaatcagagtcatcttcattatagatgggacatccttctcccgaatgagtccttccttctaattcctttccaacatttcatctgaccaggacattatttgacaacaaaagacacattcacattataaaaattgtcccccatgatttgcagagagcaatctacaggtaggagggagaatcacatttagaaataaagtgtcagagtcatgtgaccagtgctttgtaaaagacactgcagagaccagggacaaaggtgacccccactaaggaagaaatatgacaagtgtttccaatagaaacacaggagcacagcaggaaaaggaaatgggttattttctctyttttggagtatttaagtagaagcacacaattatgtaattacatgattaagttttccacgaggtaaataataaggaaataatgacgtggtggcaatgggccttcagcagggtataaaggaggctatggacccagaagacttccaaacccaagaacttcactctcttgaaaacccaccca

SEQ ID NO: 385989 - DNA, 631 bp, Homo sapiens
caatgagtcatggctaagtactttcacttggagtggtggaatgagatctgacacagagtttataacttccttgagatctgaccatctccccaaccattcaagaagcatacacggaatcagagtcatcttcattatagatgggacatccttctcccgaatgagtccttccttctaattcctttccaacatttcatctgaccaggacattatttgacaacaaaagacacattcacattataaaaattgtcccccatgatttgcagagagcaatctacaggtaggagggagaatcacatttagaaataaagtgtcagagtcatgtgaccagtgctttgtaaaagacactgcagagaccagggacaaaggtgacccccactaaggaagaaatatgacaagtgtttccaatagaaacacaggagcacagcaggaaaaggaaatgggttattttctctcttttggagtatttaagtagaarcacacaattatgtaattacatgattaagttttccacgaggtaaataataaggaaataatgacgtggtggcaatgggccttcagcagggtataaaggaggctatggacccagaagacttccaaacccaagaacttcactctcttgaaaacccaccca

SEQ ID NO: 385990 - DNA, 589 bp, Homo sapiens
tgatagtgtcaggttttacagggggagggctcagttctgtaagactgccccctacttccagtgccaagcacaagctccaggttgttttgcctgtgcttctgaccaaccagccataaattgggaattccatgacaccctcaagtttgatgaatgtgctagggcaggtcccaggactcagggaaacatttagcttattggtttattataaagacaattacaaatggcacagaagaagagatgcatagggtgaggtgtgggggaaggggtatgaggagctttcataacctctctgggaacagcacattccaggaacctccacacattcagctatctggaagctcctcaaactctgtgggtttttttttttttttttttttgaacattttacggggacttcagtggatgggcatgatggacaaccattagaaacgtgattggacaaaaagagtatgatctaatgttagtagagtgagtgatgaaacctgtctgtcaratccttcttggtctctctatgcagccttccttcctccagggcatggggcagaacctcttctgaaatggggatcttatgacctacaatcaggcaagg

SEQ ID NO: 385991 - DNA, 523 bp, Homo sapiens
ttcatacatgtgtgatacatgcaagacaaagccatttatttgttgtgttctttttgctgataaaaagtacacatgaaagttttaaagacaacaaaagggtagacaatgacaggagagccactttacactctagttgtttgctgtgatactgaacatatttgaacagcttattgtatgtacaccctgtatgtttattgtatgtatatccttctacatttatctatgaatatgcaaatatgtatataattttttcccacaaaatggtagcatgctatacacattccctttactgtttgccttttytattttgtaatgtattcttccattgcagaaaactgtgatctaccttttctctttgatggcttcatatgtttccatgttatgaatgagccataaaacattatctggtccatctattgatagacatttaggctgtttctgttgcttgctatgataaaaaaaaatctgcagtgaaaatcgttttacaatatattttcagtacatgtggaagtgcatttatagg

SEQ ID NO: 385992 - DNA, 616 bp, Homo sapiens
tatacctgtgagaatctttatctatttacccctgaagaaaattcaccctcaaaaaataaaaataatcatacttccgagaaggaaatgttttgagaaattccaaaggcaactcgctacaaattcgtgaaacattttcttccaattgctgaagcaaattccttccctgtttctgatctgtaattcacaaacttagagatgaccctgtaatttagatgataatgactacaaaagaaaaatataattaggaggtgattatataactacttaagttacataaaatggaaattcgaaaaaccctaaaactcttttgtaacattaggaattattttyaattcatcatagttattgttgtctgtatcctcagctacatggtcctggttatgaaataatggaaaactatttgggaattgatccaatgagaattaaaagctctgaggcagttattgcattttaggagcaatggacttgttggaggaccaggaagaaacatgggaaacagagcaagtcaaagtttgctgatacagaatttatgtcgccctttctggtaggagagctgccccctattgtcattaattacactaccatttcccctattgtcattaatttcactaccatt

SEQ ID NO: 385993 - DNA, 592 bp, Homo sapiens
gaaaaaagacttcacaaaattaaattcaaacaagttaccaaacttacacattttctgtttattgacgtctggaaaataattaatatttctttttaaagttcaaacttaaagctcctacataatttttcctggctcagtttttattcttgagatagggctcatcaaacaaatcaacacaccttgtattattgcctgtaatgatacattgtttgaaattttcctctaaaatattctacccaccaatcagaagatacccagaagtctaggtgataattcttcttttattcaaatggacaatttgcttgtcattaaggtaaagacaaagccaaggatttttcttctggatatcttattaaaatacattgcttctctgaacgttgactttcagttaattttttcttgtccttttttaaaaaaayaatttattttaaagcagttttaagtttacagcaaaattgagtaggaagtacagagttcccctgtacccctgaccccacatatgcacaatcctcacccactatcaatatcccacaccagagtgatacagttgttacaactgaggaacccacaatgatacctcattatcacccaa

SEQ ID NO: 385994 - DNA, 584 bp, Homo sapiens
aaggttgagcactttctctttgcagttacttatttttacaaatcagtgtattctaatgtattcctgaagattaaatcattttgaatgtttggattttaaaatgatagtgctataaagttgagtccagcactayaggcaaaagttattttacatttgggccgagtaaacatgccacttattcttatttgtagaatactaagattgcaccatctaaaagagatagcttcataaaatttattttctaacgttgttaaacatcaaataacacagtctctttaacttttcattaagtatactatagcagttcttaactgttaaatgtgctgtgctgacacatgcataaattaaggaacaatttgcataattctggcacttagaacttggtcttatcaaaggtttcaacactgatttgtacaacatagaactttaaaatttttaagtatgaaatataacttttgaaagcatagaagtgtaatttgagtattaagaaattctatctgattctcttgggtttgaattgtatttttaaatttagttttttgattcttttactccatttagacttaaagtttaaaataacagga

SEQ ID NO: 385995 - DNA, 584 bp, Homo sapiens
aaggttgagcactttctctttgcagttacttatttttacaaatcagtgtattctaatgtattcctgaagattaaatcattttgaatgtttggattttaaaatgatagtgctataaagttgagtccagcactataggcaaaagttattttacatttgggccgagtaaacatgccacttattcttatttgtagaatactaagattgcaccatctaaaagagatagcttcataaaatttattttctaacgttgttaaacatcaaataacacagtctctttaacttttcattaagtatactatagcagttcttaactgttaaatgtgctgtgctgacacatgcataaattaaggaacaatttgcataattctggcacktagaacttggtcttatcaaaggtttcaacactgatttgtacaacatagaactttaaaatttttaagtatgaaatataacttttgaaagcatagaagtgtaatttgagtattaagaaattctatctgattctcttgggtttgaattgtatttttaaatttagttttttgattcttttactccatttagacttaaagtttaaaataacagga

SEQ ID NO: 385996 - DNA, 606 bp, Homo sapiens
cataatagatgtacatattttggtactacattgataatttaatacattcatataatttctaaagatcaagtcagtgtaaatggaataattttcaccttaaatatttgtcttttctttatgctagatattcaaattattctcttctagctatttttgaaatatacaatagatattgtaaactatagtcaccctactgatatatcaaacagtaagtgttatttcttctatcaaattgcatgtttacactcattaatcaacttctcttcatcctcccctctccagtccccttcccagactttggtaacaamcaatttactctctatcttcataagatacactttttttttagctctctcaaatgagtgagaacgtgtgatatttgatatttgtctttctgtctttgtcttatttcacttaacgtaatggtctccaactccgttaatgttgctgcaagtgacaggatttccttctttttatggctaaataatattccactacacacacacacacacacacacacacacacacacacacacaccacattttctttatccattaattcattgacatagattgatttcatatttttgctattgttgtgaataa

SEQ ID NO: 385997 - DNA, 563 bp, Homo sapiens
ttactatagctttgtatatattttgaagttagtgtaatgccttcagttttgttgtatttgctcagaattgctttggctattcagggtacttttatgattccacataaattttagaatttttttctatttttatgaagaatgttattggcattttttggagattgcattgaatacgtaatttgctttaggtggtatggtcgttttaacaatattggttcttccaatccatgagcatggaatatctttccttttgttgtgtcgtcttccatttctatcatcagtgttatatagtttttctagtatggatctttcayctcattgattgaatttattcctaggtatttgatattctttgtagctattgtaagtggggttgctttcttgatttatttttcagattatttgctgttggcttatataaatgctattgatttttgtatgttgattttgtattctgcaatctgactgaattagtttatcagttctaacagtttttggttttttaacagttctttaagtttttctaagtataacatcatattgtttgcaaacaagactaattt

SEQ ID NO: 385998 - DNA, 581 bp, Homo sapiens
cttttgtatttgaccttgccttgctaatatcaacaatagtctcagaattcaagaagtatttttggtagctacaaattataacaaagtaaatcacacttcttttgcatttgtctctctgactattcttcatctttgtgaaaaacaaataaatagacataagaaatgcaggtaggcacttttgcgctggcaaattgaattaatttggcagatatatttaattttgcctgcaagcagctattcagtgctaaattattagaagtatattactggatgtgatatgttataggttcctagaaaactatgcataaattcaaattcattagtttaacataagttcctctagtagaacaagaatccctccatgatgaggcaaccaaagtaaaacatgtgtatttgttattttatatgttccaagttgactttacagaagacttatgataatatcgataatacagtgacaagctatatgacatttactttyggttgattttgggggaaaaaagtatttaaacataccaaaaatatattctaaatatattccaaacaaacactaaactaatggaataggtatagatgaattt

SEQ ID NO: 385999 - DNA, 518 bp, Homo sapiens
aaaataaatatgttccttgacaatcaccctgacaggctgaaatacctgaaattaatctgttcaattatttgaggaaatataccattaaacatrataggcatgtaaatattgttaactatgggattacaaggacatctgaggaagtacttagtttcagtgttaaatcagggcagtgtgatttctccaaatgaaagaggaaccataacagatttcgttaacagttttcaattaagaagatcctgtataatcattccagaagaagaaaaagttgatttttgaaaagcctcctctaaaatctctaagcactgaagatatgccactgctacaagaatagtacctattttagaactgcgaataaatgaggaaaagttagaaattatgctctcataaaactcttcgtaactaagataatgaaaatttcagaaacaatacataagaaaaccaggtgaaagggaggatttcaacaaatgtgaaatgttttcctattatagtagcaaggctttccataaatttttgtc

SEQ ID NO: 386000 - DNA, 536 bp, Homo sapiens
aggccaggctcagtggctcatgccygtaatcccagcactttgggaggctgaagtgagaggattgcttgagcccaggaatttgacaccagcctgagcaacatagtgagatcttgttgctacaaaaaatgaaaataaaataaaaaattagtgtggtgacatgtgctgtggtcccagttacttggcaggctgaagtgggaggattgcttgagctcaggagattgaggctgcagtatagactgactgaatagattaaaaaacccaacaaaacctaactatatgcggcctatgagaaactcatctctaatgacatacataggctgaaagtgaagggatggaaaaggatattttatgcaaatggaaaacaaaagcaagcaggagtagctttgtctatatcaacaaaataggcttcaagtcaaaagctgtaaagggaagcaaaggacattatatgataaaaaagggaataattcagcaagagagtataacaattgttaatatatatgcacccaatactgggacacccaggtatataaagtaaa

SEQ ID NO: 386001 - DNA, 507 bp, Homo sapiens
acctatgtaacaaacctgcacgttctgcacatgtatcccagaacttaaagtataaaaaacaaacaaacaaatagatgaaatgtttccaattaaaaaaaaaaaagaagacatatatacggccaacaatcwtatgaaaaaatgctcaacatcacttattattagagaaatgcaaatcaaaacaacgagataccatctcacaccagtcagaatggttattattaaaaacgtgaataaataacatgctggtgaggttgtggagaaaagggagtgcttattcactgctggtgggagtgtaaatttgttcagccattgtggaaagcagtgtggcgattcctgaaagaacttaaaacagaaataccattcaacccatcaatcccatttcacttagcataatgtcctcaaagttcatccatgttgtagcatatgccagaattttcttcctttttaagttaaataatactccattattacttattacatttactccattattacattattattgcc

SEQ ID NO: 386002 - DNA, 401 bp, Homo sapiens
aaactttactttacactcttcttgcttgcatggtttctgaaaagaagtctggtataattcttttctttatttctctataggtaaggtgtctttttttgtagtttgaaaatgatatgcctaggtgtagttttatttttttagttttaaaaaagtttatctttcttgatgttctcttagcttccagaatctgtgattaggtttctgacattaatttcrgagaaattgtctgtcattattgtttcaggtatttcttctgctccttttgctttttcttctccttctgttatttccattatgtgtatatgttacaccctttgtagttgtccccacagtttttgaatattatgttctggtgttcttttcaattttaaaatatttcctttttaattttggaggttctt

SEQ ID NO: 386003 - DNA, 427 bp, Homo sapiens
acacaagggaatctcaataaggttaacaactaatttctcatcaaaaactgtggaggccaggaagcagtgaaataatctatttaaagtgatcaagggaaaaaataactgttaataatgaattctatatccagcaaaatatcctttcaaaaatgaaggagaaattaacacattcccagataaaccaaaactgtggaacttcattaccactaggacttctctggaaatgataaaagggagtccttaaaacttaaaaaaaaaaaaaaaaaaagggatgggcacggtggttcatgcctgtaatcccagcactttcggaagccaaggcaggtggatcacctgaggtcaggagtctgaraccagcctggccaacatggcgaacccctatctctactaaaaatacaaaaattagctgggtgtggtggcatgcgcc

SEQ ID NO: 386004 - DNA, 525 bp, Homo sapiens
actacaaattttcatcccatagatagggtagttacatttttttctgctggtttccttcactgagttaatgtgtgagactaccaaaagaattttagtatcttccattaatctgtcttattggttctttatgcacccttccagttgtccacactctcaatcattgttattccagagatacagtgatgattaaagacagtctcataattgtccaagctgtttcctcatattaatttgttcacatgtggtatcacgtgtcagggcaagctcaattcccaccaaagagaatctataggaatcctggacccagagtcctaaatcctcaactattatttcagagaaactccttttcatgcccactccaaagcctgccccakgatggctaacagaattctttcagaggaattctcatccacacccacaggtatggttgaatctccattactcagacaagaaaatggaaatattgaacattatacttctaaaactctgtgttatttattcataaataacactatgtggctaata

SEQ ID NO: 386005 - DNA, 525 bp, Homo sapiens
atatctttaaagtggaaaggaaatattaccaagagaagccccttttgacaatttaartgaatgagaaccttaatgctaagaagtagactattagattagcatgtaggagaatcctgactgagattgtggcaagcagtgccatcagacagatgccaaaggacaaaggcttcttccaaacccactttttgtcacattttgttttcctggagctaacactgccagtgagtcccaatagctcttcaacaggagtcaaaattgtacatgaacatagaaatcatgaatagctcctcataatatgtggatgatatttgtgtcagtaaagaagtattttagtacatatatagccctattgagtcttgctctaaaggatatggcagttttctaggaaaattgaaatagacaatagtacattaacatagatttatacaaataaaaatcataagaataggttgtaagaatacttataaagggtttggacgtttgatttattggaaaaaatatttttagactcacaaactgtgaccc

SEQ ID NO: 386006 - DNA, 557 bp, Homo sapiens
aaatttctcatccatattctgaacttttttgtactgtttttcatatttctcttgcacctcattragctttgttaaaatcaatattttggtttatttatctggcattttgaggcattcttttttatttggatctgctgccatgcaattgttgtgtggtgtcaaaaatccctactttttcatgtttcctacgtccttccattgatatctgtgcatctggtatagcagtcaccttttcatttttttgttcacattaataaaaaatttactttctatataattgttacagatttcaataattttattcttttcactccctcttcttgctctaaatgccattttaaattattaactatgtattgaagtcagctccattgtatgccccttgtagttccaaagatttctttttctttctttttttttcacttatactttaagttctagggtacatgtgcacaatgtgcaggtttgttacatatgtacacatatgccatgctggtgtgctgcacccattaactcgtcatttactttaggtatatctcctaatgttatccctcccc

SEQ ID NO: 386007 - DNA, 557 bp, Homo sapiens
aaatttctcatccatattctgaacttttttgtactgtttttcatatttctcttgcacctcattgagctttgttaaaatcaatattttggwttatttatctggcattttgaggcattcttttttatttggatctgctgccatgcaattgttgtgtggtgtcaaaaatccctactttttcatgtttcctacgtccttccattgatatctgtgcatctggtatagcagtcaccttttcatttttttgttcacattaataaaaaatttactttctatataattgttacagatttcaataattttattcttttcactccctcttcttgctctaaatgccattttaaattattaactatgtattgaagtcagctccattgtatgccccttgtagttccaaagatttctttttctttctttttttttcacttatactttaagttctagggtacatgtgcacaatgtgcaggtttgttacatatgtacacatatgccatgctggtgtgctgcacccattaactcgtcatttactttaggtatatctcctaatgttatccctcccc

SEQ ID NO: 386008 - DNA, 478 bp, Homo sapiens
gacttaaacagtctgtgttggtgttcctggaagcagcaatgcgttcagcagactagtccccagtctcacagctgcatgtagcagggcagtgggtattgtccttaggagagcttggtttccctgtccctcctactgctgggtggtggctgcaaccacatcacctcaaatttggcccgaaagtagggcaaaactcagtgttaaactctcagaatggtgccagctgtgggctggtgaccagaatgggtaggccctcccacctcargtgaacagcatggggaagaagctatggagagtgtagtccactcaagtctcagtctcacaggagcctgtggcaaggcagtggatgttgttctaggtatgtgtaagagagctttgtttccttgtccctccttggctaggcagtggaggctggctaaccacatcaacttgaacttggcccaagggtggggcctagcttagcattaaactcttaaaatga

SEQ ID NO: 386009 - DNA, 478 bp, Homo sapiens
gacttaaacagtctgtgttggtgttcctggaagcagcaatgcgttcagcagactagtccccagtctcacagctgcatgtagcagggcagtgggtattgtccttaggagagcttggtttccctgtccctcctactgctgggtggtggctgcaaccacatcacctcaaatttggcccgaaagtagggcaaaactcagtgttaaactctcagaatggtgccagctgtgggctggtgaccagaatgggtaggccctcccacctcaggtgaacagcatggggaagaagctatggagagtgtagtccactcaagtctcagtctcacaggagcctgtggcaaggcagtggatgttgttctargtatgtgtaagagagctttgtttccttgtccctccttggctaggcagtggaggctggctaaccacatcaacttgaacttggcccaagggtggggcctagcttagcattaaactcttaaaatga

SEQ ID NO: 386010 - DNA, 596 bp, Homo sapiens
caacagtgtgtaagagttcccttttctctgcatccttgccagcatgagttattttttgtctttttggtacccatccaaactagggtgaaatgatacctaactgtggttttgatttacatttccctgatgactagtgatgttggcattttgaaatatatttttggccactcttgtatgacttctgaatagagaaatgactgttcacatcatttgccctttttaaaataggattatcctgggggttttgctgttgagatgtttgagttccttttatattctagatattaatcccctgtcagataaatggtttgcaaatattttctcccattctgcaggatgtcttttccctctgttgactgtttcctttgctgtgtggaagctttttagtttgatataatcatatttattagtttctgctttggttgcctgtgattttcaggtcctattcataaaatcttttcccasactaatgtcctgaagcattttcccctatgtttgattccagtagttttatagttttaggtcttacatttaggtctttgatctattttgaattgatttttgtatagggtgagaggtgggagtctagtttcttc

SEQ ID NO: 386011 - DNA, 574 bp, Homo sapiens
aaacatatttcaatgagtaattacaaacaggcttgaaaaaatgaaaaaaaaaagctttagcaaagaaaaagaatgtctcaacaaataaatgaaagatataaagaaccaaactgaaatttagaactgagagataatagtaactgaaattttaaaaggctcagtgaataagttcaacagcagaatggaggaaatagaggaaagaaatgatgaacagaaagagcaaacaatgcaaattactcaatctgaacaacacagaggaaaaaagacttgaaaaaagtgaacatgcttcargaacctttggaagtattttttaaatgtaatatttgtgccattgaagccctggaaggagagaaaaatgagggcagggatgaaaaagtacttaaagaactaatggctgaaaacttcccacatttagcaagaaacacaaaactacaaattcgtgaagctgactgaaccccaaacaagataataaaataatacacaggaagacataccataattaaaattatgaaaactaaagacaaagtgttgaaagcagccatgacaccttatatgtaggggaaagcaatttgaa

SEQ ID NO: 386012 - DNA, 605 bp, Homo sapiens
agcagtgcgagtgcggccttttagtcaggttagtgatggatgttacgctgycttgttgaaaatttcactgactttgattttattacttttttaatgatagttatcaaacttgtatttaagctgcttgtcatttatggaatattgaacttatttaaatgaacttgttaaatgaataaagagctaaacataattcagtaaacaattttattcctttgcgcaagtagcacaataaacatggatgcaatgtatgtcaagttaatacttttttaaaccaacgcaatttggtgaatatagatgtgtggtacctgtttttaataaatgtactttttccccctctgtgaatgtagatcataagcaaacaaattgcctgttctaaatgaactttatatatattttaaatgaatgtatgtacttatgtataaatgtctttatatagcttgaataaaaacactgctcattaaaatgtgttgctacaacaaaaaaaaaaagaaaagaaggaaattctgtcatttgtaacatgaacctgtaggatattatgctaaataaaaaaagctaagtacaggaaaacagacactgcatgagctcacttatatgtggaatctaaa

SEQ ID NO: 386013 - DNA, 576 bp, Homo sapiens
tcataagcaagccatcatatattgaaatcatcaggatatatatacatgtatatacacaatattgcaaagtaataggtaatatgctaaataagtaaataagcacttaattttctagcccattatgatttattgttaaaaaggctgttttatggcaaaacttagtctcccagcattcttacggttaaaataatttaaaaatatatgatgatttttctattttgttgatatttaaggcaaaaattctcaagctttaatgtacataagaatcacctaaaggtttttttaaatgctggtttccttattgctaccctttaatattctcagactgtaggcttaaataaggcctggaacttgaatttttaacyagccctcctgacaattctgatgcaggtggtcctcaagagtaaggttttcaataatcccgttgtttaggaaaaaaataccaaatttttatatttactataggtgttctgtcaattatatatgacatgtttttaacagacatttatatcataaagttatactacaaagtacatggttatgcactaaaataaattatattataccttaagggtg

SEQ ID NO: 386014 - DNA, 591 bp, Homo sapiens
atttttaatatttagtatgaacaggatggtaaaacttacagtctatccagtggcaattaaaaaaaaatacagtaatgctaagttagcctcgtaagaaataagcactgcatttactcttcgggaaagctctgtgcaacagaaacagttgctctcaccaaatggtttcagctgcacatgctcagaagcgttttctctcttctaactagaagaagattgaaatagttccccacaagactcacatgctactaagatagactttaacactttctcctccattagtctgtgtcagctactaaaagatgagggaatttctggggcttccctctggctggcaagacccctcccatccccttaatattcaaagtgtgraatctgagtactgtatagacttttggccatcactgaaacactttgattaaattatgtgtctatacttggtttaagtagcagtggacagatggacaatatcacttgctgcagatgaaaaccctctggatagctatgcttctgagaacatgaaaagccacttctcagaaaggtggggcataggttagcaagacagccaaaaaaggtctactacacacacaaata

SEQ ID NO: 386015 - DNA, 589 bp, Homo sapiens
aaaaaaaaagagggttaaatattatttttcttcatccaaaaggaaaaaaattaagatgctggttaccaccatgtattgccagggatctgggaagacaagtattctcttacactttggtatgtattagttcattctcacattgctgtaagaaccacctgagactgggtaattcatgaataaaagaagtttaattgactcacagttccacaggctgtacaggaagcatgactggggaggtctcaggaaacttaaaatcatggcagaaggtgaaggggaagcaggcgcatcttcacatggcggagcaggagagagagagtgaatggggaggtgctacacacctttaaacaactggatcttgtgaaaactatcatgagacagcactayggtttctaatggtgctaaaccattagaaactacctgcatgatccaatcacttcccaccaggccccacctccaatactgaggattataattcaacgtgagattgggtggagacacagatccaaactatatcatggtggcagtgtaaattttagcaatcaaactgataagtgatctggcaaaatttagtataaataacacgcataaa

SEQ ID NO: 386016 - DNA, 553 bp, Homo sapiens
gattcaacacctagaaaaccccatagtctctgccaaaaactcctagatctgataaataatttcagccaagtttcaagatacaaaatcaatgtacaaaaagcagtagcatttctatacattaataatgtcgaaactgagagccaaatcaaaaatgcaattccattcaaacttgccacaaaaagaataaaatatctaggaatacagctaaccagggaggtgaaagatctctaaaatgagaatcataaaacactgctcaaagaaataagagatgatacaaacaagaaaaagcattccaagctcatggataggaaaaagaaatattgttagaacagtcatactgcccaaagcaatttacagattcagtgttattcctatcaaactaacaatgatatttttcacataattaggaaaaaccattttaaaatgaatatggaacaaaaaaaagrgctcaaatagccaaggaaatcctaagggggaaaccaaccaacaaacaaacagaaaagctggaggcatcacgttacctgaattcaaactatattacaaggctatagta

SEQ ID NO: 386017 - DNA, 605 bp, Homo sapiens
ctacatgggcaatatttgtagtaatctaggtgaaacagaatgatgatgtggccaaagtggaagcattgtaagtaacaaaaagtgattgcattatgcatttcttttgaatgtaaacttaagcaataataaggatagattggatatgagatattggacaaagatagaagtcaaagatgatgtgactccaagttttgtgaaaggatggacttgttataaatttgatgaacacagtaaggatttttcttttttggtgtggcatgggtatgagaaggaatcaggagttcagtttagtatgagattctattagacaaaagagtggagatattgtytatatattgaatatataagtctcaagaataacagagaggttctcattataaacatgcatttggaagctttcagtaaatatatattatctaaagacgtgaaatttgatgagatcattaaggaagtatatgaagaaagacaagttaagaagcgtaaggaaatgcttcagagcacttagttgttaaagtctcacctcatcttttaaggcatgaaaaaggaaaaggagaagagactgagaattaagagctaacactgtaggaaaaaaaataaataaataa

SEQ ID NO: 386018 - DNA, 600 bp, Homo sapiens
gatttataccagaaagaaatgcaattttaagaatcaatggcagataaatggtaatttaacctacaggagtagaaaaaagtgaaaagcctatggattatttaagaaagttacaaatagccagaagaagacagtgtgtgcaagtcaattcaattcaactaactgatttttccctgagtgctttgtatttgctaggatgggtgtagaatttgagcaaaagattgaaagtcgaaaattaaagaggaagaggwggaaaaccaacctcaaactttttacattactttgcaaaaagaagtgtaatgtgagacttctttgggtgaatttacaaaatgcatttaaccatattttcatcacatttctgtgaatataaattaatacattgtcattattacatttacacagccaagccacccaagcactatttttaacacacaatttattcagaatatcatattccttatctgtatccattattactgcaggctacccaaaagtgaaatctttgttttcatcaggccactttttatcctttacatctgactcagaacatgcccaaactggctatatttgttgaacgatgaccaaaatttgttttaagattac

SEQ ID NO: 386019 - DNA, 492 bp, Homo sapiens
aaacaaaaagcttaactagggaaagggccttgagcagatgaaatgttttctgtgttagaacacatktctgccagtgtggctgaaaatcaactcatagaatgaagagcaaagaaagattagatgagccagtacaacaggactctgttattttagggcattatatttgaatatagtataatggaataccattatattttaatcagtactgcttatgatttaatgattgttttttaaagatgccatggctcctacatggatgatagaataaagggctgcaatatggcacagagaccaataggaaacatctatgttgttcttgtgcttaattggattttcttttgtgttctcactataatttgaattttttccatattttcttctttgtttatgaacttctatcatctttgactaatgtatttctctcatttgtacatttaataaattggaaaatccaggataatagatcctgaatctgatcactgtatttccact

SEQ ID NO: 386020 - DNA, 491 bp, Homo sapiens
attggtgcaaaagtaatcgcaaaaggtattttgccacttttaatggcaaaaacgcagttaattttgcaccaacctaaatacctgggagggactcggcttttgcttaacagtagcctatatttctggcagagagagaaaaatagatcacagtccagaggaagaatctatatagcatacccagccaatctctkttaaatctagaataattttcaccaatttttttctattctgagtaaagttgaaatcatagaacaacatagcatgacagaaccttggagattatttaattccacgtcctcatttgattgatgcattaacattaagtatatttttaaggacataaaatatatacaggattaaaatcaaaatgatgtagactttttcttgacctcttgactcttattttctactttattagcacagataatttttgaagttgtgggttttagtcaaagatttgagtttaaaatgggcctgtactattaactgga

SEQ ID NO: 386021 - DNA, 619 bp, Homo sapiens
atacattcttcttatctgcacacgtaatcttcacaaaaattgatcatatgtttggccattaagcacatctcaataaatttaaaaaattgaaaccatatcaagtatctcctcagacaacagcaaaataaaatataaaagaacaccaagaagaactctccaaactacacaagtacctggaaactaagcaatttgctcctgaatgacttttaggtaaacaatgaaattcagggagaaataaaacttttttgaaaacagaaacacayggaaacttctgggatacagcaaaagcggtgctaagaggaaagtttataacattaaatgcctacatcaaaaagataggcatttaacaacctaatattgcacctcaaggaactagaaaaatatcaaacctgaagctagcaaaataaaagaaataacaaagatcagggcagaactaaatgagattgaggccaaaaaaatatttaaggaccaaccaatcaagaagttggttctttaaaaggataagcaaaattgacagaccactagctagagtaaccaagaaaagaaagataaaatttaaattagtacaatcagaaattataacagtgatcttacaactgaaactaaagaaatataaaag

SEQ ID NO: 386022 - DNA, 587 bp, Homo sapiens
tatatatatatatcatatataagatatatatatatgtatacacacacgatatatacacacacataaataatctggattttgttaaatattttacatgaattttctttcactccttataaaacactgttatgtattgtatccctattctagataaacaacaaaagaaacaataaaaaagtgagctttaaaagggctaacacctcggtcaattttgtaactatataactcataactcagagtggagttttgagctcacatctgatttcaaatctctgaacygctatcttttactttatatttctttagtgccttacaatattttcaagtattatcaggaaaagaatggtttttgatgggctgtctgtttagattagagatgagtggtttttactagattttatgggcatggggacttgctttggtccagaaatatatggaaagcatagattgtaggtttcagaacctgctaacttggttggttcaccttctttctttctttcccttaggcatactacataacagctgtgtgtctgtctcagtttcctcatctctaaaatgaaaattttaaagctatgtccttcataagg

SEQ ID NO: 386023 - DNA, 578 bp, Homo sapiens
taaacaatccattcaaatatgtctaaaaatcagagcacaggatggcatcttgatgtggatctgactacagtaatgactgtatctctgtgtggggttaacaagaaaatctttcttttattctttctacttttttcaaaatatttcttcacagatgagatgaggaactcacagagcctaattgctgtgatttcaggtcacaaggttgacaagcaaaaagagttctgaagaccctgaccyttcaggaagtgtatcatatgtgaggtaaaactggtggatggagctgaaatataagccaatatgccgttaattattaatttcaacattggaggtgtgtaggataattttcaattagttacagtactagctcacaaagagagttctgatgggaagatggaaaagagaaggtcagaacaacatttgagaacgattaaattgaaagaaaaacttaaagactaagtttaagtaggctttagtggggtaagtattactcatgtgacagagaaacacaattccacaaaccagaaaccccccaaaagtaatatttaaagaaattataatggacataaaaaaacatgaaa

SEQ ID NO: 386024 - DNA, 578 bp, Homo sapiens
taaacaatccattcaaatatgtctaaaaatcagagcacaggatggcatcttgatgtggatctgactacagtaatgactgtatctctgtgtggggttaacaagaaaatctttcttttattctttctacttttttcaaaatatttcttcacagatgagatgaggaactcacagagcctaattgctgtgatttcaggtcacaaggttgacaagcaaaaagagttctgaagaccctgacctttcaggaagtgtatcatatgtgaggtaaaactggtggatggagctgaaatataagccaatatgccgttaattattaatttcaacattggaggtgtgtaggataattttcaattagttacagtactagctcacaaagagagttctgatgggaagatggaaaagagaaggtcagaacaacatttgagaacgattaaattgaaagaaaaacttaaagactaagtttaagtaggctttrgtggggtaagtattactcatgtgacagagaaacacaattccacaaaccagaaaccccccaaaagtaatatttaaagaaattataatggacataaaaaaacatgaaa

SEQ ID NO: 386025 - DNA, 608 bp, Homo sapiens
ttggaacacattagttaaaaattaaggaaatccaaattgtgttaattttagttgataataatgcatcaatattcattggttgtgacaaagatactttagttatgtaagatgtttacaataaggaaaacagtgcatggtttatgaaaactctctggactatcttcacaacttttcagtaaattgaaagctactctaaaattaaaagtttatttaaaatattatcttgataattcctagggaatcatatattttctgagtaataattagggtttttagggtcatgtcaaggcttagaacaaaattttttgtgtgtgttttttgagacagagtcttgctctgttgcccaggcttaagagcagtggcgcgatctcagctcactgtagcctctgcctcctgggctcaagtgattctcctgcctgaggcttacaggtgcatgccaacaygcctagttaatttttgtatttttagtagagacagtgtttcatcatgttggccatgactggtctggaactcctgacctcaggtgatccacatgcctcggcctcccaaagtgctgggattacaggcatgagccacagcacctggccacaaaatgtttcttttgccat

SEQ ID NO: 386026 - DNA, 581 bp, Homo sapiens
gcaaatatttcttattagatttcttattaaacttaaaaaaaaaaaaaggtgccagattcttaattgattctctcctggatcaggtaaaatacctaraaagggaaggtgattctctacagaatgcagattttccccaggagagacagctttgcaggctatttcaagatatgacaaagaaacagatttggggttacaatagatttctttctttatctgtcatgtgatattatgctagagtcaggttggaaagtaagccatgctatatagggttaaataaaacccctctgatgagactttatggtttgtggggcatgactccccaggcctcttatataggaatctgggcaagaaaaggaaaaggtcagagtttagtcctcaagaataagatgtgatattggagaatatacaaatgtaactttccattaagcttaattttttataaatgtatttttcctcttctattaggggccttctctgaattaataatgctaagtgagtatacatttgaagaactgaaaaacttctaatgaaaagtataatgaatgagctgaaaataagtataaatagagtttctaatattt

SEQ ID NO: 386027 - DNA, 541 bp, Homo sapiens
tggtggctgaacactaacagtatgagtttctcggggataagggaggctaacatgctgtgtgtgaggcagtgataagcgctggctccctgctggaagttaagrgttgactgggctacactgggcttcaggagagaagaaaacaacactcctctcactcaaaataagcttgcaaaattcaaatgtttgaaaatgaaaatgtgtaatatgaaaaaaagataaccagggcccatacggtggctcatgcctataatcccagcactttgggaagtcaaggaaggaagatcacttgcttgagcccaggagtttgagaccagcctgggcaacatggcaaaaccttgtctctacaaaaaaacaatgacaacaacaataacaacaaaaaacaccccaaaattagccagagatggtggcagggcacgcgcctgtagtcccagctacttgggagcctgaggcggaaggacttactgatctgggtagggggaggctgcgatggggtgtgattgcaccactgcactgcagcctaggaaaaagaataaggccctgc

SEQ ID NO: 386028 - DNA, 634 bp, Homo sapiens
agacagacattagagtttaggggtctgacaacatgggaacttaaatgctagactcataatgacttagttttgaaggttgatggcatgattaattgcatagggcagaaatataacttcatggaccagataaatcgtgtttagaggaagaagcacagtatatttaggttagtggatatttggcatctgcgatgttcagaattcattcattcattcattcattcatctgttcgacatgatctcaggcatgtgctggtttctgaagataaaatggttaaggcagcaaatgatatgaaacatacacttgaaaattgaaatggtaactgatttaaaggaagcaaaaagggaacttcactagaaagtaatatgaccaaagaggatacatttttaggtacagtgatccaagaaagagaagtccaagtggtgatattttaaaatgagacttgaaragaaagaatcaagcatgaaaagagcacaggcagagctaacaatgcctatgaaggatgaaaggagtttggcaagtttggtgagcttttgtgtgcagtgtggagatgaggttaaagagcaaaagcagaagggcaaatcatgtagtacatttcataatccttagaaataggctgggttaaatttcaaatgc

SEQ ID NO: 386029 - DNA, 650 bp, Homo sapiens
gcagtggcgtgatctcggctcactgcgagcttcacctcccgggttcatgccattctcctgcctcagcctcccgagtagctgggactacaggcacccaccaccatgcgcagctaattttttgtatttttagtagagatgggttttcactgtgttagccagcatggtctcaatctcctgacctcgtgatgcacccgcctgggcctcccaaagtgctgggattacaggcgtgacccacaacacccggcctgaaagctaattttcataaagtgacaatgggcctctccagctctggctgatacacaaatattgttttcacttaggaactgagtatttcttgaagcgggttaataagggttttacagaaggctggtgaattatctggaggcaattttacaatttagagaacaagtgattatgtctatttagtgatgaatggggcagaattgacattctcaaaagacagggcaataggattctagtcagtaagctttgctcagtggacgctttcacctggagttttagagaaactagctaagtacagtgactyttctacatgtcaatatgataaatatttgttaaatgttactgtgtaaacagcacccaattagtcactggtacacaatttgcttctctcgttcacctgtgtctca

SEQ ID NO: 386030 - DNA, 627 bp, Homo sapiens
ggcaccatcagctggatgaagtgtttgggtgactagagtttgagtgggatgagagtgctagatgtcacccttcaagctccatttatggcagctatttactctgacattggaagctgaccccgttgttgtgctttgacgtcctgagggacaacatgatgcagtaaatgtcaggataaaggygttatgtttcaggaatctgccgaggtcacagggaaaggttggtacattctcaatgtagaggaaattctcactagtgaatatgaatgggccgacctctgttgccttttgtatgtctgtttcagtgattatgcaacaatgctgtctgcctagagaaaggtgactctggtgcttgagaaaatgaatcaaaagaccacttcttggttttgggtttatgacaattactccaaaataattgagtccaatttgagtagtctggaaagggatggtgtgtcctatgccacgaatgcagattgtaacatgtagtgctagaattatacagcagtcttcattatgataggggatattttcattgtgctgctttcatattttgaaagactttgtcagacacgtaagtctgcctggcaatgcttattactggttgaattgcctaaaaggaggggtgagcaa

SEQ ID NO: 386031 - DNA, 615 bp, Homo sapiens
tgccatactgagttgaatagctaggaatcttaactcttttagggagagaagttgaatgtgagaccctttaaaaasaccagttcagcataatcagtataaagtgatatgagacaaaaagagattttaacaaaacagcagaggagaccaagcttaaaacacatttctcagaattctcctccctgtacagctctagattcgttttcgccacaggagacatttgcatgcaatttagaagacagaagtgaagaaatagtcatacatttttatactttaaagcttgatacagagcatcaggcagtgtagcagctcagcaatgaactagggcagtatttcctgaagctcccacctaaatcctccccttcagtttattttattattgggttaaggatatgtgtaacttacagtgaaggacataacctttccctccaggtaaccagtcactgcaccaaggttagagatggtgagagacagacataggtcccagttgttgtcatgagctctagttattgactttacacatcctggttttctttagagtagcactctggatgaccaaaacagcttcagaatcaacacaagacagagggtacacagcctgctctaataggtcagtcc

SEQ ID NO: 386032 - DNA, 524 bp, Homo sapiens
cagtgtagcagctcagcaatgaactagggcagtatttcctgaagctcccacctaaatcctccccttcagtttattttattattgggttaaggatatgtgtaacttacagtraaggacataacctttccctccaggtaaccagtcactgcaccaaggttagagatggtgagagacagacataggtcccagttgttgtcatgagctctagttattgactttacacatcctggttttctttagagtagcactctggatgaccaaaacagcttcagaatcaacacaagacagagggtacacagcctgctctaataggtcagtcccgcaattgcataaggtttaactcttaaagtaaatcattcaataccacttgacgatctgtgggtattctgcttctctgactaaaccttgactaattacaagggtctgcaagaaactttgtagaggtaataagtcgattgtaccaatggtcctaattatccatgctttttttcctgaaattatacagtccctccatgctctgattt

SEQ ID NO: 386033 - DNA, 524 bp, Homo sapiens
cagtgtagcagctcagcaatgaactagggcagtatttcctgaagctcccacctaaatcctccccttcagtttattttattattgggttaaggatatgtgtaacttacagtgaargacataacctttccctccaggtaaccagtcactgcaccaaggttagagatggtgagagacagacataggtcccagttgttgtcatgagctctagttattgactttacacatcctggttttctttagagtagcactctggatgaccaaaacagcttcagaatcaacacaagacagagggtacacagcctgctctaataggtcagtcccgcaattgcataaggtttaactcttaaagtaaatcattcaataccacttgacgatctgtgggtattctgcttctctgactaaaccttgactaattacaagggtctgcaagaaactttgtagaggtaataagtcgattgtaccaatggtcctaattatccatgctttttttcctgaaattatacagtccctccatgctctgattt

SEQ ID NO: 386034 - DNA, 524 bp, Homo sapiens
cagtgtagcagctcagcaatgaactagggcagtatttcctgaagctcccacctaaatcctccccttcagtttattttattattgggttaaggatatgtgtaacttacagtgaaggacataacctttccctccaggtaaccartcactgcaccaaggttagagatggtgagagacagacataggtcccagttgttgtcatgagctctagttattgactttacacatcctggttttctttagagtagcactctggatgaccaaaacagcttcagaatcaacacaagacagagggtacacagcctgctctaataggtcagtcccgcaattgcataaggtttaactcttaaagtaaatcattcaataccacttgacgatctgtgggtattctgcttctctgactaaaccttgactaattacaagggtctgcaagaaactttgtagaggtaataagtcgattgtaccaatggtcctaattatccatgctttttttcctgaaattatacagtccctccatgctctgattt

SEQ ID NO: 386035 - DNA, 602 bp, Homo sapiens
gagggctaatttgtgattatttcctcttgacatctaacaagtaatcatgcaggtatcatgcatattcaccaaataggtttagaatgaatatatggttatttaaattataagccctagaaggtttgatcaaatcaggtaaacatgattttgaatgcctcctttgtgtaaggcaaaaagtagattagattttctgtattcttactatatttccacwttaaaattcagattcaacttgtgttaactgaatattaactacaatattgaaatatttggtttgtactttctattccagaaagaagatggcttacaaaaccacataaaatattacaaataacatacaattaaagcgagagagaggaaaatatggattggtgcaaagtggacacaggattgaaaatgaaaatggaatgaaagtacaaagtgtagaatcataaagatatttctaaacgtgctaggaaagcataccagtcagactactcttagctatgtgatctaaacaaaacggttacgagtctaaagtaaatattctcataatttagagcagagctctcaaaactagatcacataatgatcttctcaacaacatccttccgttagacgca

SEQ ID NO: 386036 - DNA, 354 bp, Homo sapiens
cccgttcacttgctccttccaggcaggtgacctagacttgaacttggcccattaatttgccttggaaaatgaactgtgaccagatgtgacacacaccactcctgaacagaacattttaagggtatttcaagtttcctgtgccctctgccatgagaagggcatatttcccatatgagctgctcctttggcctgggtccctgaatgagaagacactcgaaatcgattctcaatgcagcctggagcagagctgcagcagccaaacacagcctctgacctgtaacatgagcaggagtaaatatttgtcrttgtaaactacaagatttgaggttgtgaagcagcgtaatctagcaaaag

SEQ ID NO: 386037 - DNA, 613 bp, Homo sapiens
cattgctagtgggaaagtacaatggtgcaactgctgtggaaagcagtatggcagctcttcaaaaaattaaacatagaatcactgtatgatgcagcaattccacttctaggtacatacccaaaaaaattggcagcagggacttgaagatatttgtatgccaatgcttatagtaggattattcacaatgacaaaaggtggaaacaacccaaatgtccatcaaggatgagtggataaacaaaatgtggtatatacatataatgaaatcttactcaaaaagaaatgaaattctgatatatgctatgacatggatgcaccttgaagacactaagctgagtgaaataagacagacagaaaaggacaaatatcgtatgattctatttacgtgctctacctagaatagtcaaattcatggagacaaaaaagaatagtggttatcagggctgggggaagggagaatggggagttgttgwttaaaggatacagagtttcaggctgggatgatggaaaaaactttggaggtgcatagtggtgatgattgtgcaacaccgaatgtacttcatgccactgaattgcacactcttaaatggttaaatggtaaattttatattatgtg

SEQ ID NO: 386038 - DNA, 515 bp, Homo sapiens
ctcccctgtgaactccagacctgcaggtgcaactgcttacttaacatctgcctcaaggtcactgttatgggttgagttgtatcgccgcaaaaatatgtatgttgaagttctaactcccaggacctcagaatgttaccttatttggaaataagktctttgcagatgtaattagtgaagacaaggtcataatggcatggagtacacccccaacccaattacagttggtttccttataagaagagggaagatggtgtagacagacacacagagtgaatgccatgctatgatggaggtagaaattggagttacattgtcacaagtgaaagaatgcctggggctacaagaagctggaagaggcaaggaaagaaccttgccaagagttttcagagaaagcccagacctgccaatacctgaaaaagcaatacagccactgtacccttgccacctcttctactttattccccatatatcaatgataattaagtcctatcggttttcctttcaaatatatcttg

SEQ ID NO: 386039 - DNA, 605 bp, Homo sapiens
ataaatgcaccaatatgtatgttatatacactcaaatatgtattttccccaaatgacatcaatttcatggtttttattggtattaagttttaatgttttaaatgttgtcttagtatctctatatatggattaataaatattcatatttatgccatcaattttaataaaatgcatctatctaaataggtagatgtataaatactgtattggtcagtttttgcacaataattattgacaatcaaccacttaaactcttagtgtcttattaacactaagtatttattttcatattcctgaatgttcattttaataatcagttggctgatcccaaggcagggctcagctggttggttcggctgcagggaatcgagcttgtctccagcctatggattgcatttatctgaggccaagcctgaaggacactgactactcagggcagaagattctcatggcaggtcgcaggagtagacaaatcccaaaccaagctgacctgatacaattaagcccragaatctctaacataggtacacacaactttaattgattctttcacttggtaattattaaagtttctaaaaatgtttactccatttaaacatgaagtt

SEQ ID NO: 386040 - DNA, 587 bp, Homo sapiens
gtattagaaatcagaaacagaaagttatcagaatggggttggtgggagaaggaggaggaatgaaaaattacctattgggcacaaggtacactgttcgggtgatgggtagctaaagcccagagttcactactatacaattcatcagtgtaaccaaaaacaactcttaccaataaagccactgaaattctaaatttaattttttaaaaatttgccaaaaagaatctaaatatttggaaaatatgtaaagtaccactatatgtagtttggggcaaagaagcaacaaaaagggaaattaaaaagtacttggatctgaaagtaaacatcacatatccaaatttatgagattcaaaaaaatgcagttaatttatagcattatgaatgtgttttagcaaagaagttttcacatcaatcactggaaatgtaatcctgacaaactaggaaaaaaagaataaatgccactcaaaagaagggtcttttattcttagaaatgtgaggatgtgacaagcacwcatctagtattccaccaatacagtcatatcagtctccaaatgaaaacaccattagcagctgcacaagaagaaagtctt

SEQ ID NO: 386041 - DNA, 474 bp, Homo sapiens
ctgtcttcaagtggtctctggctgtggcctcccaaagcactggcattatagacatgagccaccatgcctggcctaaagtctcttaacatttaataaatttaagacactttattttaataaaaatgttaaacttaattaataaaaactgaacacttcaatagttttactcaaacacttaggtagaatttgattaaaagaaactcacaaagcaataaaataatactatttggccattttgtcacagaataagtgatgtccttagggttctagccatgttttgtatgagttccagattttgtctctaagttaactgaacagagatagaactacatcatgcctgatgagaacatacccagttcatgcaaacatttgggttcycagaaggaggttgggaagccttccactaacaaccatcctggaacttaatcccattaaagtgaatcctgatatatatagcatatactactaggaaaa

SEQ ID NO: 386042 - DNA, 474 bp, Homo sapiens
ctgtcttcaagtggtctctggctgtggcctcccaaagcactggcattatagacatgagccaccatgcctggcctaaagtctcttaacatttaataaatttaagacactttattttaataaaaatgttaaacttaattaataaaaactgaacacttcaatagttttactcaaacacttaggtagaatttgattaaaagaaactcacaaagcaataaaataatactatttggccattttgtcacagaataagtgatgtccttagggttctagccatgttttgtatgagttccagattttgtctctaagttaactgaacagagatagaactacatcatgcctgatgagaacatacccagttcatgcaaacatttgggttcccagaaggaggttgggaagccttccactaacaaccatcctggaactyaatcccattaaagtgaatcctgatatatatagcatatactactaggaaaa

SEQ ID NO: 386043 - DNA, 415 bp, Homo sapiens
gatctttgaaaatacgtcaagatcaaaaataaatgcttcctaagtgaatattcatatctattccattactgaggaccagctcttagtaattaagaggatcgaatgcttggccttcagtcagtcaactttcccagattttttaggaagtgacatgaaccatagaaatccatgcaggagctcaacaatatgaatttcagttaatgaggcttgcatacctatggctcttytgagcattcaacttgccaagtagcattacccctcccaaaccactaacatctaaccacacatcagtgatcagactaacaacgcgtgtcaaatgagtacagtgcacctaacccagcatccagaggacagtggtagttttcctgtatacggatttgcctttcttgtcagtcatgtttctgccagaatcatc

SEQ ID NO: 386044 - DNA, 402 bp, Homo sapiens
tcctgtaagtctcttaggctgtcttcactcttcactccttttcccttttgctcctctgactccataatttcaaatgactagtcttccatttcactgattctttcttctgcttgatgttattgaaactgcctttgcaaaaattataactgaagaaattataacagcaaaagacatcagacttaatcaactccatcttgcttctagcatttaaactgtccttgttcattcctggcagtaggatgaactaattttgggatggtattcagttcatggttttrctctcaaacaaagttgatagtagccatttcccgaaaagatccccttcttgcctggaaccagtctgcctttgcaggataaacaaattagccataacattagaaattacagctgagggtttatgca

SEQ ID NO: 386045 - DNA, 606 bp, Homo sapiens
taaactgaacttgtatgagaatgaaatcttgtacttaagatttaatatgtctgttatgtagaataaatttctgtagactaacttttgactatgcacatttcaaatattgtttcttcaccactgccaacacacttatcatagcagatcccatatgacatattcatgttgacatacggcttctttcattgcatatttggtccatgacacaagtgagtagaaaagtatttctatactgggacaattgttagtaattaactagtagaagtgaatacaaaccatatacatatatcccactaaaccagaacaaaatatrcccccaaataaaattacctagatttcaaaattgcctatgaccaagtataacacaaagatagtatttgtttatcttaacatatataaataaaaaaaaaagtatagtgaacgtatggcataaaagatattaacaattagtactcctaaaataaaggacacttgctatgaatggagcttgcaggactggaaggtgctctgggtgagtcagtgcacaaatggtgagtgaatgtgaaggcccaggacattactgcacactactgtagattttataagcactgtacacttaagctacac

SEQ ID NO: 386046 - DNA, 587 bp, Homo sapiens
gttataggtttttgtgtttgttcccataaatttctgttttccttctcatatcacctatcacatagtctcttgttttggcttttgtttgtttgtttctctttcactaaatacaagaaatttaacaccgctttctgcacctgacataggattaaaattcatcatggtgcctaatacatggaaggcatttaawcatcatttgtggagtatactaataaaagacacagtgctgggcaaatgggcatatgacaattgtttatggtaattagattggctgaattttctaataatgccttttgttttaagaaaattcatgatgtttaataattataatgcctataaacctgtgcttatttaaaatctgttggcaaaaaaagaaaacatctgttatttttgcttcatgtagagttaaaagggaacagaaagaaagtcattggataagacgaagagtgattgaaaagaaatttagctgcttctgctgagcgaaaggatagagtaagcaactcaagtattagccacttagtgaaaatgatgccagaggtagtggagttggggagagattgaaattaatatatataaatgaattatat

SEQ ID NO: 386047 - DNA, 587 bp, Homo sapiens
gttataggtttttgtgtttgttcccataaatttctgttttccttctcatatcacctatcacatagtctcttgttttggcttttgtttgtttgtttctctttcactaaatacaagaaatttaacaccgctttctgcacctgacataggattaaaattcatcatggtgcctaatacatggaaggcatttaaacatcatttgtggagtatactaataaaagacacagtgctgggcaaatgggcatatgacaattgtttatggtaattagattggctgaattttctaataatgccttttgttttaagaaaattcatgatgtttaataattataatgcctataaacctgtgcttatttaaaatctrttggcaaaaaaagaaaacatctgttatttttgcttcatgtagagttaaaagggaacagaaagaaagtcattggataagacgaagagtgattgaaaagaaatttagctgcttctgctgagcgaaaggatagagtaagcaactcaagtattagccacttagtgaaaatgatgccagaggtagtggagttggggagagattgaaattaatatatataaatgaattatat

SEQ ID NO: 386048 - DNA, 541 bp, Homo sapiens
tgattgataggttccacactgtgttacagctaaaatgggcttgacyattagctattgcaacaatattgataatctatttactcttataggtttctgtaaataagagtcattctaatttcttgcagggtcaagataagtacaattaatgttatacaataaatgttttgcttctcttttgttactgctttggtactttccatagacgacagaaaatatcacaggaatatgaaaggtctgtagagatgataatgagtgctctctagaataacactgcccaatagcaatttctgttttaaaatgttctatatgttttttgacccaatactgtagtcactagccacttgcagatactgagttcttgaaatgtggccagtgacactgagacattatatttttaatgttatttaattaaaatcaatttaaacttaaacttaaatttaaatacttgtacatgtctgtggttgctatatcagacagaacagctctcaaaaaaaaatcagaacaattatttgactttactgctttttcttctcaattccaa

SEQ ID NO: 386049 - DNA, 541 bp, Homo sapiens
tgattgataggttccacactgtgttacagctaaaatgggcttgactattagctattgcaacaatattgakaatctatttactcttataggtttctgtaaataagagtcattctaatttcttgcagggtcaagataagtacaattaatgttatacaataaatgttttgcttctcttttgttactgctttggtactttccatagacgacagaaaatatcacaggaatatgaaaggtctgtagagatgataatgagtgctctctagaataacactgcccaatagcaatttctgttttaaaatgttctatatgttttttgacccaatactgtagtcactagccacttgcagatactgagttcttgaaatgtggccagtgacactgagacattatatttttaatgttatttaattaaaatcaatttaaacttaaacttaaatttaaatacttgtacatgtctgtggttgctatatcagacagaacagctctcaaaaaaaaatcagaacaattatttgactttactgctttttcttctcaattccaa

SEQ ID NO: 386050 - DNA, 541 bp, Homo sapiens
tgattgataggttccacactgtgttacagctaaaatgggcttgactattagctattgcaacaatattgataatctatttactcttataggtttctgtaaataagagtcattctaatttcttgcagggtcaagataagtacaattaatgttatacaataaatgttttgcttctcttttgttactgctttggtactttccatagacgacagaaaatatcmcaggaatatgaaaggtctgtagagatgataatgagtgctctctagaataacactgcccaatagcaatttctgttttaaaatgttctatatgttttttgacccaatactgtagtcactagccacttgcagatactgagttcttgaaatgtggccagtgacactgagacattatatttttaatgttatttaattaaaatcaatttaaacttaaacttaaatttaaatacttgtacatgtctgtggttgctatatcagacagaacagctctcaaaaaaaaatcagaacaattatttgactttactgctttttcttctcaattccaa

SEQ ID NO: 386051 - DNA, 589 bp, Homo sapiens
tatagaattctaatatataaggccaagtctaatgaaaatcctgtctaatattctttgtgagaaagcctttgcaagtgcccccaaattacattttgagggctttgctgttttttttgttttttgttttttttttgttttgttttttgttgttgttgatgttgttgttaaaatagaagtcagaggatttttcttaccarctttgccctttacattgcttcatggttatttcttaaagaattaaatggattctgtattatagagcccaaagtcctttgaaagtaagggtagaataagagaactgaaggacgaaaaggggaaagggagaggagaggaagtaaaaaagctcagactagtgcatctgtaggtgcttcatagccagaataatcttttctaatgttgagctacatatttttagaaacatagtaaaatttatctggaatatagtatcgactagctcaaagatagggatgactcttggcccattttgctgcttagatctcaaggataagtaacaatgtaagtattatcaatacactgagaatacaataaatgggaatttcagtaactctgtatagtcttagattagaat

SEQ ID NO: 386052 - DNA, 553 bp, Homo sapiens
tacatgataataataaacaattatgttagtggtttatttgtttactgtactctatttttaatcagtttagagtgtattcattctgcttattaacaacaaaaagttaactgtagcttagctacaggcaggamctccaggaggtgttccagaaggcaatattatcatagaagatgacagctccatatgtgttattgcccctgacaatcttccagagggacagcatgtgaagatggaagagaatgatatctatcatcctgatcctatgtaggcctaggctcaagtgtgtgtttgtgtcttaattttttaacaaaaacgtttaagaagtaaaaaaataaataaataaaaataaaaaaataagtctataaataaaaatataaagaaagaaaatatttttgtactgctggacaatgcttattttaagctgtgttattacaaaagagtcaaaaagattaaaaagtatataagggaagccaggcatggtggctcatgcctgtattcccagctattggggaggctattttgggtggggtgcttgagcccaggagtttgtgcc

SEQ ID NO: 386053 - DNA, 614 bp, Homo sapiens
ttttattgccagaagtttttgaagaaaactttttcaacccacaatattcttgaccacccaagacgactacatataactccttagttatacctgaccctttaccattactgcatagcaagtttcccacaacactctttttttgagtgagcaactagaggattatatgcagactgatttttttaaaatgaaaaagttgagaagcaacaattagtctagcttggcagaaatatatttttcttttgctcattgtgggccatatcctaaaagtgtgctaagcctagtgaaattgaaatatgccctgagagaccrtagaaatctcaatgagaggcagtggagttacccacgtgtgatgtcttgagaaatgtttcagattttatagcttcctatagaaaacaataaagttcttattaaagtctaagcatttagatggaaagcaggcaagtgttgtctcttttgttcccaagaagtctgtgctgaattcaaggttattaaggcacatctgtgggtccccagtaatcccttgggataaaggatcccatgcaggtttctcttacatgctagcttctctttcaaccctggtatataaccaatcagtatgcaatatataagataga

SEQ ID NO: 386054 - DNA, 625 bp, Homo sapiens
agtggagttgagaaattgagagatcagaaaattaagttccatctttaaactaaaagggaatctgtctaatgagagatgaatgaagcccccaattgcttttttttaaatgartattactcattttatttttcctctgttattttattctctctttattgtctatccctctcatttctttcttcttattttatgtagatacacagcaggggatcagtgtattcttcccaaagtttactttcacaaaaagtaaataaaaatttgaaaagtaaacagatcatcagattagaatttaagggttgttaaaatacttcaaagactacttatatggaaagtttaaagaatatatattgtttatcagagatggaaaagatgacgagtaactccattctatgcgtacttcattttaggtcaatggcgaacattttctacactttaatggcagcataacaaagaagacatctaaggaattttactcatcagtgtggagtaatgggcaggcgtattgaaatggtctctggagtaatgagcaggcatattgaaatggtctctttttatttttttaatatgaacactcaacttgtgcctttttttctttcttgtctttgtaaatatagatacttgcagg

SEQ ID NO: 386055 - DNA, 625 bp, Homo sapiens
agtggagttgagaaattgagagatcagaaaattaagttccatctttaaactaaaagggaatctgtctaatgagagatgaatgaagcccccaattgcttttttttaaatgaatattactcattttatttttcctctgttattttattctctctttattgtctatccctctcatttctttcttcttattttatgtagatacacagcaggggatcagtgtattcttcccaaagtttactttcacaaaaagtaaataaaaatttgaaaagtaaacagatcatcagattagaatttaagggttgttaaaatacttcaaagactacttatatggaaagtttaaagaatatatattgtttatcagagatggaaaagatgacgagtaactccattctatgcgtacttcattttaggtcaatggcgaacattttctacactttaatggcagcataacaaagaagacrtctaaggaattttactcatcagtgtggagtaatgggcaggcgtattgaaatggtctctggagtaatgagcaggcatattgaaatggtctctttttatttttttaatatgaacactcaacttgtgcctttttttctttcttgtctttgtaaatatagatacttgcagg

SEQ ID NO: 386056 - DNA, 660 bp, Homo sapiens
gtaaagagaaccagaagaaggaacagaagtaaacagaggaaaaacaatttatacctaaacatattatattcaaactgaagaaaattagaggcaaagggaaattctttaaagaagccagaataaaaacaccttatctatagaggaataagamtaagtattacattaggcttcttttcagaaatcattcaagcaggaagagagtggaataaaatattgaatgtattcaaagaaaaacaaacatagtattccatatctagtgaaattatcattcgaaaaagagaaacaagaaacaactggacaagaaactttctccaaaaaacaaataaacgtttacaaatataaagcgtatgtcaaatatatggcataattctgaattattgttccataaatggtagctgtttcaataaccaatgagaaaaagtaattatgctccgagtattcatgggcaaataatgcactgtgcatactttcataatttttacttaaaccttattaaacttcacggttaagtaaactgaaatttaaaaattttaattaatctcaagtgaaaatgaacatttcaataaaaaacaaaaaaactcaaaggaaataccaatttcatagggaatagagataactcatgaacttgagagtaagaagcgtttagttgatataaaccaa

SEQ ID NO: 386057 - DNA, 660 bp, Homo sapiens
gtaaagagaaccagaagaaggaacagaagtaaacagaggaaaaacaatttatacctaaacatattatattcaaactgaagaaaattagaggcaaagggaaattctttaaagaagccagaataaaaacaccttatctatagaggaataagaataagtattacattaggcttcttttcagaaatcattcaagcaggaagagagtggaataaaatattgaatgtattcaaagaaaaacaaacatagtattccatatctagtgaaattatcattcgaaaaagagaaacaagaaacaactggacaagaaactttctccaaaaaacaaataaacgtttacaaatataaagcgtatgtcaaatatatggcataattctgaattattgttccataaatggtagctgtttcaataaccaatgagaaaaagtaattatgctccgagtattcatgggcaaataatgcactgtgcatactttcataatttttacttaaaccttattaaacttcacggttaagtaaactgaaatttaaaaattttaattaatctcaagtgaaaatgaacatttcaataaaaaacaaaaaaactcaaaggaaataccaatttcatagggaatagagataactcatgaacttgagagtaagargcgtttagttgatataaaccaa

SEQ ID NO: 386058 - DNA, 632 bp, Homo sapiens
aaaactctgaactgagctcataaaagcaatctttttcttttacactagtattttattttttaagagacagagttctgctctgccacacaggctagagtgcagtgcagttgcaggatcataactcactgcaacctactgggctcaagtgatsctctcaccttggcctcctgagtagataggactacaagagcaccccaccatgcccggctaatttcccttaggatcttaattttagtatcaacgcaagttgttgttttttgctcagtgtgacttagaatcagtgaaatcacctagaaaggcaacagagaaattcactgcagattttgcctcatggttaaggataaacctatatataaatctttaagcacagcttattgatagttggatctagttagctaaagaacatgcttgactttcttcattttacaaattttactttcatttaaaaccatgcaatttaggtagaagaaattgattgaaattatttgttcttttgaaaaaacatttagccaccttaaggattcttctacttatactttgaatttttttgtctccattaacatttaaaaattggatactcagacttattctgcattcatgatagacattttctgaaacctcgtaatccttta

SEQ ID NO: 386059 - DNA, 499 bp, Homo sapiens
caccatttatatattttttatagtaaaaatatttttaaatgtatcctgtaatattatgagctaattgatgatgcttcatattttctcccaggaaacccagaggttattattattggataataacatcttatacacaaagagtaaaatatattttgttttaagggtggaattcaaatttgatattcatgttacatgcgtaagcatgtaacatttatagtcagtaacatmgctagagttgcacttgttacaaaagacaataatatatctctggtgtttatccatgttcttgagtaaaaaatttagataaaatttcttcatcactatataaatgtaaatatcaaaataattatatctctatctctgtagctgatagcatttgaaatattcaaagcagctcttgcttttgagatagtctgatattttaacataaacatatatatttgtacttgctatccaaataatttcaaataaaaagctgggaattttatatgtatcttca

SEQ ID NO: 386060 - DNA, 554 bp, Homo sapiens
atgtacagaactgctctttataaaaccatcagaactcgtgagacttactcattatcatgagaacaggatggcataaacctgcccgcatgattcaattatttcccaccagttccctctcaaaacatgtggggattatgggagctacaattcaagatgagatttgggtggaggcacagccaaaccatatcaggaattgaaattagtatgttgatgagatagctacattcttatgttcattgtagcatttttcaaaatattcaagatattgaatgaaactaattgtctattaacagattaatggataaagaaaatgtggggctgggcatagtaactcacacctgtaattccagcattttgagaggctgaagtgagaggataaattgaggccagaagttcaagatcagcctagtcaatatagtgagactcagtctctacaaaaaaataagaaaaacttagccaggcatggtggyacatgcctgtagtcccagctactcaagaggctgaggtaggaggatcacttgagcctcagaatttgggactgcagttagctatga

SEQ ID NO: 386061 - DNA, 586 bp, Homo sapiens
ttctagaccttccctgagccagagcgggagaactcactgccctaaagggagagtccaaggcctggcaacattcactacaagctgactaaagagcccttagyttgttgaaagaatgttggtggtagccaagcaatacttactgtgggcctggggtggaggtggtcatagggagtgactcctctgcttgtgaaaatgggaaggaagagtggaaaggactttgttttctggcttggatgacagcccagcccagctgactagagaatcaggtagatacctaaggtttccaactccaggccctggctcccagatagcatatctggacccacgaagtactgggggaaatttaccaccctggaagaaaggaaacaagcctggctggctttacaaaatgctgattttagagccctaggaccttaagtgaacataggcagtagccaggcagtggttgccatggccctcgtgtgagaccgaatgctgttctggattcaggcctgcccggcacggtcccagtggtagtggccacaggggtcattatgtcacctctcccatagctccagacagctcagtacagagagaaagactcagt

SEQ ID NO: 386062 - DNA, 586 bp, Homo sapiens
ttctagaccttccctgagccagagcgggagaactcactgccctaaagggagagtccaaggcctggcaacattcactacaagctgactaaagagcccttagcttgttgaaagaatgttggtggtagccaagcaatacttactgtgggcctggggtggaggtggtcatagggagtgactcctctgcttgtgaaaatgggaaggaagagtggaaaggactttgttttctggcttggatgacagcccagcccagctgactagagaatcaggtagatacctaaggtttccaactccaggccctggctcccagatagcatatctggacccacgaagtactgggggaaatttaccaccctggaagaaaggaaacaagcctggctggctttacaaaatgctgattttagagccctaggaccttaagtgaacataggcagtagccaggcagtggttgccatggscctcgtgtgagaccgaatgctgttctggattcaggcctgcccggcacggtcccagtggtagtggccacaggggtcattatgtcacctctcccatagctccagacagctcagtacagagagaaagactcagt

SEQ ID NO: 386063 - DNA, 654 bp, Homo sapiens
gtttaaactagtttattcaagttttattaagcccgcaataaattaaatataaaattttaaataaagattggtaagagcaagctaaattttatacctcttttcttagttatcacaaaggaataacaaacaacgtgctctccttaagccatcctgactactctaacatcctgcttccactaaaaatactgacggccaaattcacaaataagagacaagatggaaactgattgatttcacaccggtaaggctgaaatttaaatgggtagttttttggaagagatcccattaagggagggtatttggccatttatcataggttcataatgagttaattagtcagaacattttttcttccattcattcagatactcattgwgtatgtattgtggtctgtgtgtgcatttgtgtttgtaaatatggcaggattccatctctgccctcaagttgcttaactgagggtcactgcacaaagcacaatatttactgcatagttattgctactgcttcaaggcacaagtcagatatcttccaggaacctatatttaagttgtctactaattattcaactaaatacctgaatgatatctgtctatattgtgctcttactctaagctcccacaaagctggctctatgaaatacaatttactttttca

SEQ ID NO: 386064 - DNA, 654 bp, Homo sapiens
gtttaaactagtttattcaagttttattaagcccgcaataaattaaatataaaattttaaataaagattggtaagagcaagctaaattttatacctcttttcttagttatcacaaaggaataacaaacaacgtgctctccttaagccatcctgactactctaacatcctgcttccactaaaaatactgacggccaaattcacaaataagagacaagatggaaactgattgatttcacaccggtaaggctgaaatttaaatgggtagttttttggaagagatcccattaagggagggtatttggccatttatcataggttcataatgagttaattagtcagaacattttttcttccattcattcagatactcattgtgtatgtattgtggtctgtgtgtgcatttgtgtttgtaaatatggcaggattccatctctgccctcaagttgcttaactgagggtcaytgcacaaagcacaatatttactgcatagttattgctactgcttcaaggcacaagtcagatatcttccaggaacctatatttaagttgtctactaattattcaactaaatacctgaatgatatctgtctatattgtgctcttactctaagctcccacaaagctggctctatgaaatacaatttactttttca

SEQ ID NO: 386065 - DNA, 532 bp, Homo sapiens
ctattaaatttaattacttacccctgtggctttaaattgagggttgctatraaacaaagacggcttctattaaatttaattactttcccctgcggcttgcataggaatggtggcttccattaaaaactgcatggtataggtgtggctgctaatcaaggatgcttctaaatgaagatatacaatctgtagtaacaattaatcaaagaagatgttaggtatggaaatagaatcacatgataatgtcacttctaaaatttattaaagtcatcatagttctgaaacaattttcataatttatgtcgttctgttttctaaataaaaactatagctcacatctgcacatactatataggatatattaatgttcgattgaagaaggtaaatatttttaaacatccaaacctatcaggtaaagaataagactttgtgatgctttaaactgattttccccctttgatagtagctgaataaagaaaatggcttacagatttagctgtgtatatagtttgaaagtaacaactgaaaaatgatg

SEQ ID NO: 386066 - DNA, 595 bp, Homo sapiens
ctttctgtcatggaatgtggccccacagcccctgtctgcctttaaatcaggcaataatacacctttaaaataagttggacatgctttccagcttgatgattattttggatatatttgagcatgattttgatttctctttcagttacgggatttctaaaattatatgcatgtttcatttggttatgaaatgaaaagtcactaaaataaacatgagattgtatattttaaaaagtgtatgtttagcatatagttctgcttgtttttactgcttttgtaatataatgtagttaagaaaagaaaatgcaattcagaaactaacaaaacctttcccatttgtttcccattaaaatatattaataaaataacgtcaacaaactttttgttcttacacagaaaattttgcattgcagctatttcttaatataacttaagtgactatttagattttcyatacaaattaaaaataaattgaaaaattgtggcattcaccttgttaattttagcacatagccaccaatcctataatgtctggataatttccaaaaatactattttcctaaataccctgacagattttgatgaaaatgtcttgtta

SEQ ID NO: 386067 - DNA, 515 bp, Homo sapiens
tttttttaactttgactttgttacagaattttagatattcaactatctgaaggcttgtaaaattcccagaactatctttgtaaaagaatttcaggtagaaaattattgatgttattataagtatcatgtaaagatgacatgtcaaaaaycaacactaaaagatatagaggtttcagagttctcccaatatttgaaattgctaaattggacatcactagatttcataaaattaaatctaaaataaatatttaataaaacgccaaaagttttccatatgattcttccaccatggatatcaaaaccaacttaataggcaataatagaatttgatttagagaagaatcaaagagcaatggtacctttgaaacagagaattacgaagacaaatgaagatttctgctttgcattgaaaaattaaaatatttagaaatggaaaataacatttggtgcttcaaagatattattagtttttatgttacattttctacagtttttaaactgcaatattgtcttta

SEQ ID NO: 386068 - DNA, 569 bp, Homo sapiens
acttattaccaaaattctttcctaatgattaaaataatttgtgtttgtattcgacagcaatagatatgaacattttacttgcttcaatagaaatcctattaaaagggtataaatgagttccagggacactaaatctgcatgagctcattgattacctacatcatatatttttagcatagtcttttctaacactttagctgcatccttaacaaacaaaaaacaaaagaaggaaatgtataaagctacaattcaacacgtcatctttgaagaattttcctgtgycagaaatcataagaaaattatcttttcctattgtctttccaaggaatggtaactcagaccccataaatcctgagacaatgtgacagaactaaagaggcaagaatttcccccagaattttcactcatcaacttgaggcagttttctctgcagtagtttaaatttatattcaacttagaaatacttttggttttcaatattttttcatactttttcctcccaatttttatagctttaaggcctcgatgattttatggttaatagttcatattattgaagaagaaagtag

SEQ ID NO: 386069 - DNA, 569 bp, Homo sapiens
acttattaccaaaattctttcctaatgattaaaataatttgtgtttgtattcgacagcaatagatatgaacattttacttgcttcaatagaaatcctattaaaagggtataaatgagttccagggacactaaatctgcatgagctcattgattacctacatcatatatttttagcatagtcttttctaacactttagctgcatccttaacaaacaaaaaacaaaagaaggaaatgtataaagctacaattcaacacgtcatctttgaagaattttcctgtgtcagaaatcataagaaaattatcttttcctattgtctttccaaggaatggtaactcagaccccataaatcctgagacaatgtgacagaactaaagaggcaagaatttccsccagaattttcactcatcaacttgaggcagttttctctgcagtagtttaaatttatattcaacttagaaatacttttggttttcaatattttttcatactttttcctcccaatttttatagctttaaggcctcgatgattttatggttaatagttcatattattgaagaagaaagtag

SEQ ID NO: 386070 - DNA, 569 bp, Homo sapiens
acttattaccaaaattctttcctaatgattaaaataatttgtgtttgtattcgacagcaatagatatgaacattttacttgcttcaatagaaatcctattaaaagggtataaatgagttccagggacactaaatctgcatgagctcattgattacctacatcatatatttttagcatagtcttttctaacactttagctgcatccttaacaaacaaaaaacaaaagaaggaaatgtataaagctacaattcaacacgtcatctttgaagaattttcctgtgtcagaaatcataagaaaattatcttttcctattgtctttccaaggaatggtaactcagaccccataaatcctgagacaatgtgacagaactaaagaggcaagaatttcccccagaattttcactcatcaacttgaggcagttttctctgcagtagtttaaatttatattcaacttagaaatacttttggttttcaatattttttcatactttttcctcccaatttttatagctttamggcctcgatgattttatggttaatagttcatattattgaagaagaaagtag

SEQ ID NO: 386071 - DNA, 453 bp, Homo sapiens
acaacacataatcactttcctttatgggaaatcaaaaaaaaaactcctatgctcccaggaaagcaaaaaatcagctgtattagtagaaaaaattgtggcactttctttcatagcccctctcactggcacagtgctacattagtagtactctcccatctcccaagtttcccctggggaagcaacaaggagactgaatactatatccaactttctgactttttgggtggsggaggcctacctgacaaactggcctctagcttctgtatctgctgtctaggatgctgacaggacgtggcatactctagatgcctaggagctgctgagagcaaaagagtgttatggcatgctgctgttccagcagacagaggtcaatgcaggttggcagcttctccatcagagaaaaaaaaagagttgagcattaattctactttctagggctttgcccaacagaat

SEQ ID NO: 386072 - DNA, 574 bp, Homo sapiens
tgaagaagtataaacaaacaaagaaaaaatcaatgaaattaagagttgctccttgaaaagtgcaactaaatcaataattttttagctagattaagaaaaaaakaaacaggattcaaataaacaaaatcaaaaatgaaaggggagacgttacaactgatatgacagaaacaaaaaaattaaaagataacactatgaacaattatatgaaaaaattaattatgctataagaaatagataaattcctagaaattttcatttaatcacaactgaatcatgaggaaatataaatctgatcagataaattgttgtcatgagattaaacaagtcataaaatatctaccaacaaaaataagataggaccagatagatccactggtgatttctaccaactatatcaagaaagaagaattaatgccaatcctttacaaactcttccaaaaaaattgaagaatactttcaaactcattttatgaggctagtattaccttaataaaaaaccaaagacataaaactacaggttaaaatatctggtgattataaaagcaaaaattcttaacaaaatattagcacatca

SEQ ID NO: 386073 - DNA, 574 bp, Homo sapiens
tgaagaagtataaacaaacaaagaaaaaatcaatgaaattaagagttgctccttgaaaagtgcaactaaatcaataattttttagctagattaagaaaaaaagaaacaggattcaaataaacaaaatcaaaaatgaaaggggagacrttacaactgatatgacagaaacaaaaaaattaaaagataacactatgaacaattatatgaaaaaattaattatgctataagaaatagataaattcctagaaattttcatttaatcacaactgaatcatgaggaaatataaatctgatcagataaattgttgtcatgagattaaacaagtcataaaatatctaccaacaaaaataagataggaccagatagatccactggtgatttctaccaactatatcaagaaagaagaattaatgccaatcctttacaaactcttccaaaaaaattgaagaatactttcaaactcattttatgaggctagtattaccttaataaaaaaccaaagacataaaactacaggttaaaatatctggtgattataaaagcaaaaattcttaacaaaatattagcacatca

SEQ ID NO: 386074 - DNA, 574 bp, Homo sapiens
tgaagaagtataaacaaacaaagaaaaaatcaatgaaattaagagttgctccttgaaaagtgcaactaaatcaataattttttagctagattaagaaaaaaagaaacaggattcaaataaacaaaatcaaaaatgaaaggggagacgttacaactgatatgacagaaacaaaaaaattaaaagataacactatgaacaattatatgaaaaaattaattatgctataagaaatagataaattcctagaaattttcatttaatcacaactgaatcatgaggaaatataaatctgatcagataaattgttgtcatgagattaaacaagtcataaaatatctaccaacaaaaataagataggaccagatagatccactggtgatttctaccaactatatcaagaaagaagaattaatgccaatcctttacaaactcttccaaaaaaattgaagaatactttcaaactcattttatgaggctagtattaccttaataaaaaaycaaagacataaaactacaggttaaaatatctggtgattataaaagcaaaaattcttaacaaaatattagcacatca

SEQ ID NO: 386075 - DNA, 597 bp, Homo sapiens
tcatccaaataagttaatttgtgtgagatcaatgatttacctgagccacrcatggtaaaatcaagctgggaaaaaatagtctttttgacaacaacggcagggaactgagactttataatttttttctgttctgataacattagaatcccctttaaaagaagaaaagtattattggtttgcctcaaagacaagataataggaaaaacatgtgaaattattctgtttcagtaatccaaacaagagaaaaaccctaatggaaagaaactgatagagagcaaagtagatagactcatttctgagtctgatttttttaatgattaaaagggaaagtggaatacatatatgaaacaatttctcagttaagttgccacgataataggaaagcctgatacggtcatgcgcatttaacactgaatatgttgaaccttcatattttgaaacttggacaaaaaaaaaacgtttaagtacttaaatgagataatcacaaacttgaaaataaatgccctattgatattctatgtttgtttgtttgtttgtttgttttaattaaaggagagttgctgttgcaggttaaataaagagatgttcttaattcct

SEQ ID NO: 386076 - DNA, 597 bp, Homo sapiens
tcatccaaataagttaatttgtgtgagatcaatgatttacctgagccacgcatggtaaaatcaagctgggaaaaaatagtctttttgacaacaacggcagggaactgagactttataatttttttctgttctgataacattagaatcccctttaaaagaagaaaagtattattggtttgcctcaaagacaagataataggaaaaacmtgtgaaattattctgtttcagtaatccaaacaagagaaaaaccctaatggaaagaaactgatagagagcaaagtagatagactcatttctgagtctgatttttttaatgattaaaagggaaagtggaatacatatatgaaacaatttctcagttaagttgccacgataataggaaagcctgatacggtcatgcgcatttaacactgaatatgttgaaccttcatattttgaaacttggacaaaaaaaaaacgtttaagtacttaaatgagataatcacaaacttgaaaataaatgccctattgatattctatgtttgtttgtttgtttgtttgttttaattaaaggagagttgctgttgcaggttaaataaagagatgttcttaattcct

SEQ ID NO: 386077 - DNA, 597 bp, Homo sapiens
tcatccaaataagttaatttgtgtgagatcaatgatttacctgagccacgcatggtaaaatcaagctgggaaaaaatagtctttttgacaacaacggcagggaactgagactttataatttttttctgttctgataacattagaatcccctttaaaagaagaaaagtattattggtttgcctcaaagacaagataataggaaaaacatgtgaaattattctgtttcagtaatccaaacaagagaaaaaccctaatggaaagaaactgatagagagcaaagtagatagactcatttctgagtctgatttttttaatgattaaaagggaaagtggaatacatatatgaaacaatttctcagttaagttgcmacgataataggaaagcctgatacggtcatgcgcatttaacactgaatatgttgaaccttcatattttgaaacttggacaaaaaaaaaacgtttaagtacttaaatgagataatcacaaacttgaaaataaatgccctattgatattctatgtttgtttgtttgtttgtttgttttaattaaaggagagttgctgttgcaggttaaataaagagatgttcttaattcct

SEQ ID NO: 386078 - DNA, 628 bp, Homo sapiens
ggcataagaaagtaaaaatacagagaaatcccaaagaagcacaaaaaaaatagaataattaaaatatgcattggaacatgtaaaggacagaactaagactgcaaataatgtaatcagtaacaacctagagaagttctctaagaaaatcataaatacagtgaaagagaaaattcaacatgtgaataatcaccactgagaaagaaataagaatagagaagcaatcatcaaagagatattagaaaggaaaaatataatgtcctaagtgaaaaaaatcaaagcacagacattgatatatcaaaaagggttaccaaattctagacaaaattaatataaagtaggctaaattaaatataaactgtataaattttttagtctgacataagattttgtaaaaattcaggaagacaacaaaaatagttttggagaattgaaaaaagtcaggcctgccttattcaacccagaataccagaactgtattcagaactgggggaaataaaagatgtggtacttattttatacccagacaagataacgtggacamatggctcagggaatataactacccaagtgtatctacctgaaattaaacaaaatttgttatcagaatattgagagcaaaaccaaaagt

SEQ ID NO: 386079 - DNA, 583 bp, Homo sapiens
cacatcttgaaataataggtttccttattagtaccttgcatccagctgtgatgtctgaaagaaattgagcttagtttcaaactgggctgactgaatacacgcacatatgaccttttggtgtctacagccaagagtgtttgtaacttcataatagcttcttatccatagtgtttattgataaaattgtatgaaggccttttaaaatgacatataaaaacaggtttccgttttaaatttttttcctcttcatttagaatagaagttaaagcagattatttgagcttacattttcttggaattttgaagacaacttaactgatttctttctgcattagcgacaggagaatggtgacaactaagttttggaagactcagacactgtaacgcaatattatctggcactttttaaaaaagatattgcataattgataggatatatcagaagttaacatggatrtaggaagactttattggaacacaaattaaaacaaaataataaatatatgaccttggaacttttctctagaaaaaaaaagtttaaacagtatttcaacttatagtgattgctggaaaggtgaaactt

SEQ ID NO: 386080 - DNA, 608 bp, Homo sapiens
accagccattagtatccactaaaagtttcacggaggcaggggaggtattatttaaaaataggcacaagaactgrggacattgagcataggaacaaatgcctgctgagtgtccaagggcatcagtttattacatcgcaatagagtagtgaaagtttataaagaggaacttgaagcatcatgtccaaggacatcacttcaactcagtaaaatagttaatgtttgtaaagaggatcctgaatatgcaagaaatgattttaaaagttaaattattattttcagtaatttaactgaagaggcaatacattttgaacaatttctgttgagaagagccaagtaaaaagtgtttgtgccttaatgaatacctattcagctatcaaaaaaaaaccccagttattcagactgattcaatctttaagtgctctttttataagaagataatgaaagtaaaaataacatactaacatggcaaatcatttcacaagaaggtatggcaaagactgctaattgtccctgaattttcactctccaagtcttcttttggaaaatagaaatatcctgtgtatttagggagacaactacatgctcatctggaaactgcatgccccaga

SEQ ID NO: 386081 - DNA, 608 bp, Homo sapiens
accagccattagtatccactaaaagtttcacggaggcaggggaggtattatttaaaaataggcacaagaactgaggacattgagcataggaacaaatgcctgctgagtgtccaagggcatcagtttattacatcgcaatagagtagtgaaagtttataaagaggaacttgaagcatcatgtccaaggacatcacttcaactcagtaaaatagttaatgtttgtaaagaggatcctgaatatgcaagaaatgattttaaaagttaaattattattttcagtaatttaactgaagaggcaatacattttgaacaatttctgttgagaagagccaagtaaaaagtgtttgtgccttaatgaatacctattcagctatcaaaaaaaaaccccagttattcagactgattcaatctttaagtgctctttttataagaagataatgaaagtaaaaataacatactaacatggcaaatcatttcacaagaaggtatggcaaagactgctaattgtccctgaattttcactctccaagtcttcttttggraaatagaaatatcctgtgtatttagggagacaactacatgctcatctggaaactgcatgccccaga

SEQ ID NO: 386082 - DNA, 430 bp, Homo sapiens
gttttccatttcatttatagtaaaagccaaattcagtgtaaaggcttgcaaggtcctatgcggtgttatcctttgctctctattagagctcatctcctaccactgtcactcttagccactcagctgcagccacactatcatcactactgttctttaaaatgccatgtatgctcctaccttgactaaccatygaaatatctcccagctatatattatgctcactttctttagttgcttctctgtctaatgttaacttatccaagactcttcctagatcatcatatataaaataagttataaaataataacccagcaatccctgtctccctttaccctgctttaaattccttcattgtttgtgaccacttgacacattatccatttgcatgtttattgtcaaaattacctcattaatatgaaagctccatta

SEQ ID NO: 386083 - DNA, 430 bp, Homo sapiens
gttttccatttcatttatagtaaaagccaaattcagtgtaaaggcttgcaaggtcctatgcggtgttatcctttgctctctattagagctcatctcctaccactgtcactcttagccactcagctgcagccacactatcatcactactgttctttaaaatgccatgtatgctcctaccttgactaaccatcgraatatctcccagctatatattatgctcactttctttagttgcttctctgtctaatgttaacttatccaagactcttcctagatcatcatatataaaataagttataaaataataacccagcaatccctgtctccctttaccctgctttaaattccttcattgtttgtgaccacttgacacattatccatttgcatgtttattgtcaaaattacctcattaatatgaaagctccatta

SEQ ID NO: 386084 - DNA, 534 bp, Homo sapiens
ataaagcatagactttctaaatttatagttttttttttcatctyggtgagatcacattgctttaacctttccctagaataaaaatatctggttcagtgatggatattttgagctgctggttaggattcacatcttttttttcctctttatttctttaagacctctaatttgcaggggtttagggaatatgtcaaaagttctagatattcagatcaatatatatctagtgatttttcagatttttttttaactgaagacaacattaattgctccattagatacggttataagcagaccacactcagaagtagggaaatcaagtaaatgttttattttgggaggtgaggttgatgggcctctaaatttactttgcagtttcatttaactctgttctgtatcagaattcacacacgataataaaatgttttataacatgtagcatgtaaaacatgttgtcagtttctgtttcttggtgtgaagaaaattatccaacgttataaaagttaaacccttagagataaaccatttatatca

SEQ ID NO: 386085 - DNA, 534 bp, Homo sapiens
ataaagcatagactttctaaatttatagttttttttttcatcttggtgagatcacattgctttaacctttccctagaataaaaatatctggttcagtgatggatattttgagctgctggttaggattcacatcttttttttcctctttatttctttaaracctctaatttgcaggggtttagggaatatgtcaaaagttctagatattcagatcaatatatatctagtgatttttcagatttttttttaactgaagacaacattaattgctccattagatacggttataagcagaccacactcagaagtagggaaatcaagtaaatgttttattttgggaggtgaggttgatgggcctctaaatttactttgcagtttcatttaactctgttctgtatcagaattcacacacgataataaaatgttttataacatgtagcatgtaaaacatgttgtcagtttctgtttcttggtgtgaagaaaattatccaacgttataaaagttaaacccttagagataaaccatttatatca

SEQ ID NO: 386086 - DNA, 647 bp, Homo sapiens
agcaaataaattttatagttaaattgcactctaggctaaatggacccaacggatatttacagaatattccatgcaacagctgsagaatacacatttttctcaatagcacgtggaacattcttcaggatagaccatatgttacattaccaaacaagtcttaacacagttttttaaaaaactgaaaaaatcaaatttgtgtcaagcatcttttctaaccacaatggaatagaagaactctattctaaaaattaataacagaaggaacattgaaaactttacaaattcatgaaaattaaacaacatgcttctaaacaattaatggggctgtgaagaaagttaaaaggaaattcaaaaatttcttgggataaataaaaacagaaacgtcatacaccaaaatctatggggcatagcaaaagcaattataagtgggaggtttatagtaataagcacctacatcaaaaaagtagaaagacttcaaataaacaacctaatgatgcacttccatgaactagaaaagcaagaattaaccagagttagtagaaggaaagaaataataaagatcacaacagaagtaaatgaaatagagactaaaaaaatacaaaagatcaattaaataaaaatttgttttttgaaaagataaaattgac

SEQ ID NO: 386087 - DNA, 647 bp, Homo sapiens
agcaaataaattttatagttaaattgcactctaggctaaatggacccaacggatatttacagaatattccatgcaacagctgcagaatacacatttttctcaatagcacgtggaacattcttcaggatagaccatatgttacattaccaaacaagtcttaacacagttttttaaaaaactgaaaaaatcaaatttgtgtcaagcatcytttctaaccacaatggaatagaagaactctattctaaaaattaataacagaaggaacattgaaaactttacaaattcatgaaaattaaacaacatgcttctaaacaattaatggggctgtgaagaaagttaaaaggaaattcaaaaatttcttgggataaataaaaacagaaacgtcatacaccaaaatctatggggcatagcaaaagcaattataagtgggaggtttatagtaataagcacctacatcaaaaaagtagaaagacttcaaataaacaacctaatgatgcacttccatgaactagaaaagcaagaattaaccagagttagtagaaggaaagaaataataaagatcacaacagaagtaaatgaaatagagactaaaaaaatacaaaagatcaattaaataaaaatttgttttttgaaaagataaaattgac

SEQ ID NO: 386088 - DNA, 556 bp, Homo sapiens
cagaacattggaagcactcttttttttgttcttaaagcagccaggygttggaatttgctccagctcatttcatgctaagtggagtgaagaattatggcaagtgtatagtagtccaaaccattgccttagttctcagaagccttagtctgatgctctttcttgtcagcatttagattcaggcaagacagaaaccagtcctatgggtagccacctaaaatgtctaatccttgaatgtatgtttaagtcttctttttccctccccagaaagaagccaggagatgaatgcttttctcctgattgtgccacactgagccaggggaggaactatggccaatgagtatgtgttaattcattctcgcattgctataaagaaatatctgtaatttataaagaaaagtgattcaattgtctcacacttctgcaggctgtacaggaagcataatactggcatctgattggtgattggaagcctaaggaaactaacaatcatggcagaaggcaaaggaggagcagacacagtcatatggcctgagcaggagcaagagagagagctaga

SEQ ID NO: 386089 - DNA, 591 bp, Homo sapiens
gtactgtgaaattcttgaagtgattttcttttcagttccagaagttcatagtttgattctttgttaaaatgactatttcatcgtccagcttctaggttgttttactaagctccttggattgggtttcaactttcttctttatcccagtgagcttctatgccattccgttttgaaatctatgtctgtcatttcagtcatctcaatcttgccaagaatcatttctgggggactagtgtgtttgtttgatggtaaaggggcacaccagctttttgagttgctggagttcttgtgttgatactttctcatgtgtgagrgctggtcttcctttaactgtgaagtaaattgagtatagtcagtaggcttaatttctgggtgtttccagagtgctagaactttgtatagactctttatttgtggctggatctttgctttggtgcttaagagtgttggctgacagataggctcttactcagctgcatggctgttttgttttggctcagttggcagcaatgctctgtggtgtgggaggagcaagatgacaccttcagctgatccactcttgggccttggaggagccctttccaatcactg

SEQ ID NO: 386090 - DNA, 569 bp, Homo sapiens
gagtcatatgtccatccttgaaccaatcatgactgtgtggattggccagatctgtgacatgcacattcctggatattggaagggtggagccattcctgcttttccacccaaaccatagggactgaagattgtggactgtggtgcacagagtagagtcaagaagcaattagcaagattggaggtgagctggagtacaggatgcagagcagtggttgctgggcagacagattccaaggcaaggtctggcctgaacacacatgtctacatgaatcaagcagccttcactaatgaccttctgaaaggaaataggatgacttttatttcgctaagaggaaattgatctactaaaagtaataatgttttccacatacaagtcaaagaacaacttytgttttgattcaaaactttcattgtggtagggagagggtgctatttaaaagttcactgtataaaaatattagaggaaatgaaaaaatactttattaaatgaattctgacttctattttgtggtagagaaagggaggaattaggacatacagcagaagagagaaacatgtaaaaggaaaac

SEQ ID NO: 386091 - DNA, 583 bp, Homo sapiens
cacatcttgaaataataggtttccttattagtaccttgcatccagctgtgatgtctgaaagaaattgagcttagtttcaaactgggctgactgaatacacgcacatatgaccttttggtgtctacagccaagagtgtttgtaacttcataatagcttcttatccatagtgtttattgataaaattgtatgaaggccttttaaaatgacatataaaaacaggtttccrttttaaatttttttcctcttcatttagaatagaagttaaagcagattatttgagcttacattttcttggaattttgaagacaacttaactgatttctttctgcattagcgacaggagaatggtgacaactaagttttggaagactcagacactgtaacgcaatattatctggcactttttaaaaaagatattgcataattgataggatatatcagaagttaacatggatgtaggaagactttattggaacacaaattaaaacaaaataataaatatatgaccttggaacttttctctagaaaaaaaaagtttaaacagtatttcaacttatagtgattgctggaaaggtgaaactt

SEQ ID NO: 386092 - DNA, 528 bp, Homo sapiens
gctttttacacaataataagagaagatgtaaggtggtatgtgttaaatgaatgcacattmcagaaatagaaaaatgatggattgggataaatctgttgcttaggggtttagaccactccctgcttgccttcatattgtttataaaagctgcttttttgttgttgttttaatttttattagttgccagtacttaaaaactgagagatttttacattaacatccagatttgtgcttcaattgacaattcagatttggatatcctttgcccacattcttaggagaaaacactgtctacagctgagtagattctgttcactttagaattggcatagcttttctgtttgccacagtccccaccactccctcttgtttcccacacaagcattgagtgtcagctgccatttatcatactgcttccctagtttttttctcttgtggtagcggtagggagaaaaatgatctcttatactcatgtctatatcaagtgtgagaaaaatgagaaatatatgtagatactaggcatttaca

SEQ ID NO: 386093 - DNA, 462 bp, Homo sapiens
tgaatgttgtaatatttacagtttctataggacttttatgtagattatccagtttgtgcttcayactgaggcacagatagcctataattatcttcaatgataaataatgtaattaaaatgctgagaaattaaatgacttttcaaataatgatactggaatccagatctccaaatgccattaactaatgaattcaacacatatttagacaaatactcaatatgcatcaagttctatgtcgagagctagggatttgaaagaaagcaaggtctctgccctcatggagcttgcatcctaatgagaattggtagaatgaaaggaaagaaatgtgagaacaagataatgagggaaaactacgagggtaatgagaaaaaacataacctgtcagggtgggtggtgtttacatgtttggatgaggaaggctgctgaaaggagcgaacgtctgagctgagaactggtgtaat

SEQ ID NO: 386094 - DNA, 497 bp, Homo sapiens
ggtgacagacagtaaagcaggagaaggtcatagagaaagtttgcttctgagactgcttcttaagcctttagtttgaagtatagtattctgaatcccaaaatggccatattgctgcttggtgctactgagaagaaaaaaaacctgcaaatcaggaatttggtagtaacaatttagaggtaaaactatatataaagataaaggctgtgccagttatcaacttattgttccctcaactccaaatacatccttcatttcctgctgtatgaaaaataagggttctttaaatattttttcctttgctagytagatgatgttaagctttgtcaagagggctctaagggcactgcatgagaaaggttttctttccaggttctggtgtgttcactggcagcctcctgcagcacttgcagcttctctagtaccaagcacctacagcacagaagattccaacacacctgactcctgctgtgtatgggattcagctacacccaggggcc

SEQ ID NO: 386095 - DNA, 445 bp, Homo sapiens
cctactagtatttgaccctaaatcagctgtactttttaccatcaatgggccttttgagagcattgtgactcccayggttattgtgtgtatgtgtgtgtttgtatgtttgtgagatataaaaacgagattatccttctccaaaccatccaacacatctcttggaagacttgtacatactctatttgttacatgctttataattctgaatatagtctgtaattatttaccaaggctataaccttaagtttatgtatcagagatttaatttcattgctttgttcaaagaagtcaagattataatagtttttaatgtagatggagagtaattatctgtgaggtactggcgttctcacagttgacattttgtgttataaaaggaaaaacagtctgaaattactgatgatctttttctacttaaaccagcaaaatgttttacttggatatt

SEQ ID NO: 386096 - DNA, 445 bp, Homo sapiens
cctactagtatttgaccctaaatcagctgtactttttaccatcaatgggccttttgagagcattgtgactcccacggttattgtgtgtatgtgtgtgtttgtatgtttgtgagatataaaaaygagattatccttctccaaaccatccaacacatctcttggaagacttgtacatactctatttgttacatgctttataattctgaatatagtctgtaattatttaccaaggctataaccttaagtttatgtatcagagatttaatttcattgctttgttcaaagaagtcaagattataatagtttttaatgtagatggagagtaattatctgtgaggtactggcgttctcacagttgacattttgtgttataaaaggaaaaacagtctgaaattactgatgatctttttctacttaaaccagcaaaatgttttacttggatatt

SEQ ID NO: 386097 - DNA, 639 bp, Homo sapiens
tatcactatatccatttcattacacttttataggcttaaagtatttttaactgtgcaaagaaatatagtgtgatgacacagtcccatctatgaggacaagttatacacctatttttatgtttgtggtccattttaaaaatctatatttggggataaataaaaggaagcactacattatttgcttattacagaacatacggaacttcttatcccaaaaatgttattcgagttggaattatgaaaagtttaagggcttagatgacttcacaaattgaccccattacaagttatttaaaagataatattcctaatcttgaatcattacaaagataatatcatcagctatctccccaaactgtacatttgtcatctattgtcattaaccaaaaggaatcattgtatyttagttgaaaagaatggtaacgattttcattctcaacttttatatgctactgataggaaaaatatataattttcagaaggttatataattttaccagtgtcaaaaaaatcaccagagcagcataggaatttttttatattcacgtaaattgaatttaaaatctagatggactatgtcgctaaatcagcaagcatgtttcaaaacaaaatggaaataaaattcatagatctcagcag

SEQ ID NO: 386098 - DNA, 542 bp, Homo sapiens
atttgattttaagatgagacaaagcttgtatatttgttcagaaagcttatatatttgttcattgaaaagatctggtaaaaaaaaaaaaaaaggaggaaatgatgaagcaagagaaaagagatatgctgcagtaatggccttggttaggccagagggatacagacttaagagcaaatagtaggggttggagggtgggtgagtggagggtgttgccatagctagacacacatttcctccacagtgaaggaggaaggcagagtgtatgtacgcagatgcagagggttgaagggatgcgaagacagaaagacaggaaattcttttctgattatttctcttccgtgaaacaaaattatagcttaaaatgaatagaaggaaggaagaagtgttgaagatttgaagagaaaagagatcctctcctctcctgtctactaagcaaccggaatcaactccctccttgctcaaattaatagaaaagggtagggmactctcctctcttagctaattatacacaccattgctcccttacataatcgaaggctgac

SEQ ID NO: 386099 - DNA, 480 bp, Homo sapiens
tctgagtcctccctgatccccacccaactggtgtcttcaccttcattctsaaacaccaccaatgagcttacgtgcgttttagtagagagcccacagaaatttgatagaaggcttggctctgagtctgcattatgccaccaaataacagctagattgtaggtgaattattttgattataatttcttctctacatgtttcgaagagttttgtgatgagaacataaatacttagaggtgctttttaatgtagtgccatataaataaaagacaccattattcctgaggcacagcccatattcccttctcaaaaatcttaaatgattgcctcttgcctaaattccaacctttttaaaaaatcattgaaggtctctgatctcccacctatatacgtatgtatacgtatgtggatgttccagttattacagttgtaaaataaaatgtcccaaaacctagtagcccaagacagcctataaacatacgt

SEQ ID NO: 386100 - DNA, 577 bp, Homo sapiens
tagattatgacacttgtccagaataaattattatgtaaccctgaaatgtgatattgataatcagtgcctatgagtatggggaatgctcgtgttttaaagtttttataatggacgtattaaactacatcctcagaatgagattaactgtgcaaaaacaattgcatrgaaaactattagaagaaatagatcaagatataataatgattatctttgagagatggacttatagtggtcatatttcttttttccttctgaatcttagctttttcttcaattatcatgcattatacttactcagaaaaataaaataatttgaaaaaggcatttaaaatatgtaatatcagttttaaagttgaaattgaggaaaaatttcaggctttaagcttttaaaatatttacgttgtgtttgattacaatgttcccaaaagctttgtgagttggggcattagtgcagtttttcagatgaaataccctgtgatgtaacaccggtgaatgacagccactgttaataatgtgaattatgcaacactatgttgaacacaaagaacatcaactttaaacaacaggtggagttatt

SEQ ID NO: 386101 - DNA, 580 bp, Homo sapiens
agtaacagttataatgaacatacttgtgcctatatattcagctgtttactaacagtaaaatgatcggattagaggtcttttgctacacgaatgatagaattgctcttcagaagggtttgcatttctgaccttgccacagtgtgtgaggtgagggcctgcttccttgcaggtgttagattattatattcagaggaaaatctgtgtawactaaaagtagcattttgttttaatggtattttaatggataatgtctgtctttcttttttttttaaatagccacggtcttactctaacccaggctggaatgcagtcgcacaaacatggcttactgcagccttgacctcctgggctcaagcggttcatccgcctcagcctcccatgtagctgggatcacaggcgtgccaccatgcctggctaattttttgattttttgtagagacagagcttccctgtgttccccaggctgcccttgaactcccgggctccctctcactttggcctcccaaagtgctgggattgcaggcaggagccactgtgcttggctggataatgttgttttttaatggtgttgtgtttataa

SEQ ID NO: 386102 - DNA, 549 bp, Homo sapiens
gccatatactgtgtgactatctgcatggacctttatttaaagcatttctgcaaataattttttaaagttttttttaaatgtgtgataatttgtgcttttaaaagtatcttacacttttcacttatttgtacctttaaaaaaatcttttttttttttaaaccaaaggtttgcagtatcttcagagtctgaattttgagcggatagtgatgagccagctaaatcccctgaagatttgcctgccctcagtggttaacttttttgctgcaatcacaaagtaagttatttacgctttcttgatgggagttatttaaaatatttttatttatgtttatctagtattgtaagagtgttaaatttctatgaaattagtaacattataaaaggccaggcrtggtggctgacacctgtaatctcaacattttgggaggctgaggtgggaggattgcttgaggccaggagttaaaagaccagcctgagcaacatagtgagaccctatctctacaaaaaaattttaaaaattagctgggtgtggttgcctgtgcctgtagt

SEQ ID NO: 386103 - DNA, 564 bp, Homo sapiens
cagctacttggaaggctggggtaaaaagattgctgcagcccagggttcaaggctgcagtgagctatgatcatgcctctggaccccagtctgggtgacagagyaagaccccatctctaagaaaaaaaaaaagaaaagaaaaaatatgagtgaacaggaccaagctattctaaagacagtcttttctttcccctgaactttttgattatttaagccaataaattccttcttttgcttaacccagtttgatttgaggttcttgttaattgcagcaaagtcctaaccaaacacttaaaacagcaaacctctgaaagttgctttaaggcttgattttgagagcccattggctttttgggttttggcaaattagtgtagggtttatgccttcctgaccatatctttgacatttttgtcattctctgatgtccttttgtgatcacgagtccctttttatatgcgttctaggattttaaatatctaagcaaacccctagcctggatccaggatttctttcattttaaaatgtctttttttcatgataaaagtatttcattgtaccacacatc

SEQ ID NO: 386104 - DNA, 564 bp, Homo sapiens
cagctacttggaaggctggggtaaaaagattgctgcagcccagggttcaaggctgcagtgagctatgatcatgcctctggaccccagtctgggtgacagagtaagaccccatctctaagaaaaaaaaaaagaaaagaamaaatatgagtgaacaggaccaagctattctaaagacagtcttttctttcccctgaactttttgattatttaagccaataaattccttcttttgcttaacccagtttgatttgaggttcttgttaattgcagcaaagtcctaaccaaacacttaaaacagcaaacctctgaaagttgctttaaggcttgattttgagagcccattggctttttgggttttggcaaattagtgtagggtttatgccttcctgaccatatctttgacatttttgtcattctctgatgtccttttgtgatcacgagtccctttttatatgcgttctaggattttaaatatctaagcaaacccctagcctggatccaggatttctttcattttaaaatgtctttttttcatgataaaagtatttcattgtaccacacatc

SEQ ID NO: 386105 - DNA, 564 bp, Homo sapiens
cagctacttggaaggctggggtaaaaagattgctgcagcccagggttcaaggctgcagtgagctatgatcatgcctctggaccccagtctgggtgacagagtaagaccccatctctaagaaaaaaaaaaagaaaagaaaaaatatgagtgaacaggaccaagctattctaaagwcagtcttttctttcccctgaactttttgattatttaagccaataaattccttcttttgcttaacccagtttgatttgaggttcttgttaattgcagcaaagtcctaaccaaacacttaaaacagcaaacctctgaaagttgctttaaggcttgattttgagagcccattggctttttgggttttggcaaattagtgtagggtttatgccttcctgaccatatctttgacatttttgtcattctctgatgtccttttgtgatcacgagtccctttttatatgcgttctaggattttaaatatctaagcaaacccctagcctggatccaggatttctttcattttaaaatgtctttttttcatgataaaagtatttcattgtaccacacatc

SEQ ID NO: 386106 - DNA, 564 bp, Homo sapiens
cagctacttggaaggctggggtaaaaagattgctgcagcccagggttcaaggctgcagtgagctatgatcatgcctctggaccccagtctgggtgacagagtaagaccccatctctaagaaaaaaaaaaagaaaagaaaaaatatgagtgaacaggaccaagctattctaaagacagtcttttctttcccctgaactttttgattatttaagccaataaattccttcttttgcttaacccagtttgatttgaggttcttgttaattgcagcaaagtcctaaccaaacacttaaaacagcaaacctctgaaagttgctttaaggcttgattttgagagcccattggctttttgggttttggcaaattagtgtagggtttatgccttcctgaccayatctttgacatttttgtcattctctgatgtccttttgtgatcacgagtccctttttatatgcgttctaggattttaaatatctaagcaaacccctagcctggatccaggatttctttcattttaaaatgtctttttttcatgataaaagtatttcattgtaccacacatc

SEQ ID NO: 386107 - DNA, 558 bp, Homo sapiens
gggtgccaggagatggagggagtggtgccagaccagagtattcagagatcccaccctccacccatggctcggtcctattttattgacattcattcattgtcacatacttgctgagtgcctgctatccaccaggtactgtactgggcacagcaggaggaacagacaccctggaaaggggtgaggaggtacagggtgctggaagttggaaggggagtgactgggaatgtcccaccttagagaacactagaggagccctttgctctcagtcacsctagtctgtcccatgggttaaaatcctggaaagagacagagaaggggatggatgatatccccagaggcctcccccaccacagtttctcttcgccagagacactgagtggccaagagactgtgtctcgttcctggtggggtcaacatgaaagaggatcattcttcccactttccagagggaggacagaggatggaggggcaggattcactcatgtgctctatagatcagagcctgaagttccagattttgatctcaacatctctcatgcatccaagtgaccggcacaa

SEQ ID NO: 386108 - DNA, 416 bp, Homo sapiens
cgtcatgctagcttcaaaatttactgcaaaactctatagtaaacaaaacaaaatagtactggcatgagaactgacacatagaccaatggaacagaatagaaagcccagaaataaatctttgcatttacaaataacttattttcaacaaagacagcaagaacatacactgaggaagggacaatctcttcaataaatggtccagagaaaatagaataactacatacagaagaataaaactatactcctatctctcaccaaatacaaaagtcaaatcagaatagattaaagacttaaatctaggaactgaacctatgaaactactagaaaaaaaaacattggagagatgmgctaggatattggtataaaccaagattttttgtgtgagactgcattaccacagtcaaccaaacaaaagt

SEQ ID NO: 386109 - DNA, 602 bp, Homo sapiens
tttctgcttagggatcctgtcctatcttatctcttggtatcactggacccagttctgcartggggaactatcctagcctacagaggagaaataatgcttgtgatgcttgtgacccttttgctttggtaagtcaaacaggtttcaagcccctgtaagagccttttatttttactcaaaatggaaatcttgctgattaatattcaattatgtctctggaacatctgcacacatacatgcacatatacacatacaagtaccacccctcctcccttgcacatactttttcgaaatattccattgatttattttaagcccagtagaaagtggtcactataaattttaataactgtcatttaaatatatgacattaaatatatgtcatttaaatatatgtcatttaaatctataatatagtcataatatcagaaattagaaaatatatagaaatccaatataagagacaaatgggtggatagatagatgatagatatagttttgcaatgctaagtatgaagacaataataataaaaagcatggagatggattggaactatatagagaagcctgaactttaagtgacaggagccactgaaaggttttaa

SEQ ID NO: 386110 - DNA, 221 bp, Homo sapiens
gaaatacacttccaccagagaacccagcaatccacaccatggagggaaggccttaacacttcccagcactgaagctgatttagggagtggtggggaatatataaaaaggagcagcagtggggagtgctttgcatgcaatccctgtctccagcatgaatggagaaaagccattcctgattcaaccttgcwggaatcttgtggaagcctgccagctaattcag

SEQ ID NO: 386111 - DNA, 552 bp, Homo sapiens
aaagaatgtgaggcaatctaaaaaaagaaaaacaaatagtaacctgcttgcagagaaaaaatttatacatggaagagcttcrctagacattcagcaatctatcaactacagccaagctatagaatcactgattgatatggtttatttgtttgcacaattgttgcttgttcgatttccttttttatctaattttgtccccaggttttttttttccccaaaatgatgtcctaagaaacatatattgtgtgcagtaatgatacactgatatttatcatcatttgcataataattagcagtgggaagaagtatcttggtctcctgcgaatattttatcttgttagcactcaatattaactacttgaccttgcctagcttataagatcaaatagagcaaaggccatctctttcagtgaccacattaatcccagggcacactacatcacttgcatatgatagaccttagcaatcatctttggattgtactaatataaataaatgttgaaaactcacactatctacactgtagtgaacacacgaatgtgtacattgtaa

SEQ ID NO: 386112 - DNA, 552 bp, Homo sapiens
aaagaatgtgaggcaatctaaaaaaagaaaaacaaatagtaacctgcttgcagagaaaaaatttatacatggaagagcttcactagacattcagcaatctatcaactacagccaagctatagaatcactgattgatatggtttatttgtttgcacaattgttgcttgttcgatttccttttttatctaattttgtccccaggttttttttttccccaaaatgatgtcctaagaaacatatattgtgtgcagtaatgatacactgatatttatcatcatttgcataataattagcagtgggaagaagtatcttggtctcctgcgaatattttatcttgttagcactcaatattaactacttgaccttgcctagcttataagatcaaatagagcaaaggccatctctttcagtgaccrcattaatcccagggcacactacatcacttgcatatgatagaccttagcaatcatctttggattgtactaatataaataaatgttgaaaactcacactatctacactgtagtgaacacacgaatgtgtacattgtaa

SEQ ID NO: 386113 - DNA, 515 bp, Homo sapiens
ccactaggctcagcaaattacctgggctgtactgccgcaaggcttcacagacagcccccattacttcaatcaagcccaaatttcatcctcatctgttacctatctcggcataattctcataaaaacacacgtgctctccctgctgatcgtgtctgattaatcttccaaayctcaatcccttacaaaacaacaactcctttccttcctaagcatggttagtgtggtcagaatccttacacaagagccaggaccgcaccctgtagcctttctgtccaaacaacttgaccttactgttttagcctagccctcatgtctgtgtgcagcggctgctgctgctttaatacttttagaggccctaaaaatcacaaactatgctcaactcactctctacatttctcataacttccaaaatctattttcttcctcatacctgacgcatatactttcggctccccagctccttcagctgtactcactctttgttaagtcccacaattaccattgttcctggcccg

SEQ ID NO: 386114 - DNA, 595 bp, Homo sapiens
gtaaagtatgagtctggggtttttcttggtccattttgttttatcccttccaacagctatgagtgactggatatagatgtgggtttggatgggagtgaagatggccttgagggattaggacaagctggctagcccggagttaccatcttttcatgtaggcacttactgacatgcacatcttttmgtttggtttttagcggttgccacatcaccttgctggaaaccattacttctgtcaggtctctggccttgtgcttcatgagtttgtccctacaaccttgagtctggctgtaatgctttggcagctctgcatactttggtggtcatttgatctccctgatacaagtattgtcctgggtgcttaactaaccctcattcttcatataacttcacccactacatctgattggtaagttttcgtcttaaatactcctcaaatccactcacctttactaccttatttctgattgcaattattcacttggatcattatagtagatttcaaattgctccttctacctccagacatgaagatcctgaatccacgtatcgaaatgcaatacctggatactcaacgtgtatagaataaaatact

SEQ ID NO: 386115 - DNA, 659 bp, Homo sapiens
tgttactaagttgcctccacttctttagtatgacaggaaacaaactctaccaaagagactcagaatagacaagcttaagtttattctacccactttgttcctgttctactgcataggaaattttctctccactagttcccctgaaaagtggtaactctcagttatacttatgtgtttcacattatattgaatgctcttttacatttactaatatakctccccttttcttttgctcccctttttttcctttgttttatagaatccatcatcaccatgtcctctgtattttcctagtgcctgaatgccacctttgccttctcagaacaaccattccttttccaaaactgtatagctaaatgttttaaaaaacaaaatgtaaatgttttaaaaaaacaaaattgaagttgctgaaagactcccccttatacctgactccaagaaaagtggcgaattcatctgggctttcactgtggctacagtgaccttaatggcttgaagtgattttccagcattgtagctcaaaaaagatctgtcgctagtccattccagagccctttataaaagtgagctattcattaacccaaaaaaggagaaagacagaatagttagagaaatcacatatttgacctagcagaagctgtctctctggaaaattgctg

SEQ ID NO: 386116 - DNA, 536 bp, Homo sapiens
gtagtgcattggaaaagaaatccacaaattctttgctgtacctcttatcaatagattgtttatttctccatctgttaaattttgacttggcaatacgacttctaccattatatcatagtaaacatgactgaagaagaagttgaaaattggagcttgcccactcttcatgcagggaactcttcaacaatcatgtgaagaagctccagctagcctcctagaagawgagaaactacataaagaaaggccccatttatcttagctcgcccaatagtcccagctgacattccatatatttaagcccagccatcctgaactgtctagccctacatgagctggcccaggctagaacttgccagccaatttatagaattccaagcaaataattaatgtttattgtgttaattcactaagtttagggtggtttgttatatattaaaaaactgatacaaatggaagttgcttttattagatgaatcacataaaaatatatgcttcctttttacctttccagcactcccatactcaagtatagtgtt

SEQ ID NO: 386117 - DNA, 536 bp, Homo sapiens
gtagtgcattggaaaagaaatccacaaattctttgctgtacctcttatcaatagattgtttatttctccatctgttaaattttgacttggcaatacgacttctaccattatatcatagtaaacatgactgaagaagaagttgaaaattggagcttgcccactcttcatgcagggaactcttcaacaatcatgtgaagaagctccagctagcctcctagaagaagagaaactacataaagaaaggccccatttatcttagctcgcccaatagtcccagctgacattccatatatttaagcccagccatcctgaactgtctagccctacatgagctggcccaggctagaacttsccagccaatttatagaattccaagcaaataattaatgtttattgtgttaattcactaagtttagggtggtttgttatatattaaaaaactgatacaaatggaagttgcttttattagatgaatcacataaaaatatatgcttcctttttacctttccagcactcccatactcaagtatagtgtt

SEQ ID NO: 386118 - DNA, 441 bp, Homo sapiens
cctcctttttaaaatcattcaatgcattccagcaaaaccaaggtgttgcggaatgcatggagcttgattgcccaagagggaagcattaatcaccatgatcctgatgcttagcttgttttctctaccaatttaagaacttagcaacaaaaccctagcaatccaggtgttttagtgaaatatcattcttagtcatccatgttgcgaggwaaaacaatcagtgtgttctaataagccctgcagaaacactcttttgtagtgtaacccccatgctggtttttttttttttttttttttttttttttggctcagacaagctctaataatacttccccatttcttgatgcttgctgaggggccacttcacatggctcttcagacatgacaactgccagtgccttcaagacataacttcaacccaccccatttgaaaacatattgctg

SEQ ID NO: 386119 - DNA, 597 bp, Homo sapiens
ttggggacttgtctgccctgtatcaaaattacctaagaaccaatgtgtgatggtgaaataaaattttgtacaaaattttatacactccctccagattgatgcagtggccatcaggggcaatgctttcatgrtatctggtaactcacatgttcttctggaatgttgccacttccccatcaagaggtagcatccccttctcttccccttgcatttggccaggcttgtgactcattcatagcccctataagttttgagtctattcattgctcactggaacactcagttttggagaccgcagctattttataagcaatatgagagccttgaggacaccatgctgtgaggaaactcaaaccatgaaaacatctatgaagaaaaagcgacaatagttcaggcccagctctagccaccatttgacttcaacttgataaaaaaattgagacaaaacttttgttaagctccttccaaaatcctcacccacagaaaccactagaaataataaaattattattattgttttaagcctccaagttatttattaggccacagttgtgcctggaagagatattcacaagtatttctggcaaaatttttaag

SEQ ID NO: 386120 - DNA, 621 bp, Homo sapiens
atatcctggaccatataaatctcaacaattttaatcaaattgtaatcatacaagatgtgttctgtaaaaagtaactttaaaaataaatgacagaaagatttccagaaaaaatgccaaatgtttgaatattgaagagcagaattctaaatggyggaatagagaaaaagaggaagtcataaagaaaattagaacatagtttgaatttaaagaaaatgaaaacacaatatatcaaaagttgtaggatgtagcaaaagtagtgtttaaggaaatttgaaaacattaaatgcttatattaggaaagaaatgaagtctcaaataaataatctaaactgctactttgaaactacaaaatgaagagcaaattaaacccaaagcaagaagaaaaaagggaataaagagtagaacaaaaatccataaaaggaaaataaaccatttaaaatcattttgaagtagtatatatagacacgtgttaatttctaaagaacacagaattatgtatttggtgacctcaatcatcttttaaaaatttctagaagaaaatcaaattaaggactgaaaagaaatgcctcaaaatgctaaagagttatattaaggaattataggcaatattttctcttttta

SEQ ID NO: 386121 - DNA, 621 bp, Homo sapiens
atatcctggaccatataaatctcaacaattttaatcaaattgtaatcatacaagatgtgttctgtaaaaagtaactttaaaaataaatgacagaaagatttccagaaaaaatgccaaatgtttgaatattgaagagcagaattctaaatggcggaatagagaaaaagaggaagtcataaagaaaattagaacatagtttgaatttaaagaaaatgaaaacacaatatatcaaaagttgtaggatgtagcaaaagtagtgtttaaggaaatttgaaaacattaaatgcttatattaggaaagaaatgaagtctcaaataaataatctaaactgctactttgaaactacaaaatgaagagcaaattaaacccaaagcaagaagaaaaaagggaataaagagtagaacaaaaatccataaaaggaaaataaaccatttaaaatcattttgaagtagtatatatagacacgtgttaatttctaaagaacacagaattatgtatttggtgacctcaatcatcttttaaaaatttctagaagaaaakcaaattaaggactgaaaagaaatgcctcaaaatgctaaagagttatattaaggaattataggcaatattttctcttttta

SEQ ID NO: 386122 - DNA, 619 bp, Homo sapiens
ggttgcacctgcaattacgcatttgcagatataactaattgccaaaatttcatccatggagaatccagcatttggttctcttcccacagttataaagggttctggtggttaatggatcacaaggtctcataaactacacttcaaattgtaggatattagcatttatcatattcaaaactctatttaattgcttgataaatattaatatatgtggttgtttaataatcatcttattttcataataatacacagtattttgaggggcatgagcctcttaagggtgtcagcagatttgaatggtcaaagcacatctcacctgcctcatgcttttagaaatcctgacgatgaaataaaacagcagggcagagaagtttaaatcttcaaacttgctgaaaagtgcctascagcagtatcccaactctcaaaccgctgaaaccatattaagaagaaactgacaagtggggcaaaaacgtcacatagaggccatttttagcacatttaagacctaccaagaacttaactttggggacatatttaggtttatacagcttttattataaattacttttttacaggtgaaaaaggaagaaaaaagtgcatttaacagagcattgcctgc

SEQ ID NO: 386123 - DNA, 520 bp, Homo sapiens
atataattgagtaattactgtcttttaggcactttactgagcaatttacctacttttttattgattaacatatcctatgaaggagactccatgatccatatttaatataggaagagctaagactcaaagagattacacagtacgttcaaggtcacaaatttaatatgtttcagagccagggatttgagtctagacagactggaggtttgatgaaaggtcagtctcacattcwatgggctctatagatttcataattgtatgacaattagcccattgatagttatatccattatcttacatatgtattgttataatcatacctagttattgttataacgatgcctagttataacaacacgtatgtatatgcattgcacatgtctaaactattgaaatattgaaatatgtattgtacatgtctaaacatatgaaataactaggtatagttataacaatacatatgtatattgcattgtatatgtctaaactactgtacatattgtatatgactaaactactt

SEQ ID NO: 386124 - DNA, 564 bp, Homo sapiens
tcagtctcacattcaatgggctctatagatttcataattgtatgacaattagcccattgatagttatatccattatcttacatatgtattgttataatcatacctagttattgttataacgatgcctagttataacaacacgtatgtatatgcattgcacatgtctaaactattgaaatattgaaatatgtattgtacatgtctaaacatatgaaataactaggtatagttataacaatacatatgtatattgcattgtatatgtctaaactactgtacatattgtatatgactaaactacttacactttggagctyttacagatgagtgagataatatatactagtgtgtatgtatatttatgtccatgtcagaacctaatctaaatctatttaactatatcttaattatgtccatctattttgcagattcaaaaataattatcaactcctagatcaaagagctagtaagtgatctgcctgggagtaaacactaatattgttcattcaggacgtacaatagatgtcagaatgaagggtatgtcttggcagtcacacgtaaaag

SEQ ID NO: 386125 - DNA, 618 bp, Homo sapiens
aagaccaaaatgtggctattatccctgccagggccaaccagccagccaactccaaaatcatcctggtgttgccttactcaatatcttcaccttgtaataattacaaatattttgcctttttttttttttttttttttttttgagatggagtctcactctgtcaccctggctggagtacaatggcgcgatctcatttcactgcaacctctgcatccctggttcaagcgattctcctgcctcagcctcctgagtagctgggattacaggcatgcaccaccacgtctggctaatttttgtattttttagtagagacggggtttcaycatgttggtcaggctggtcttaaactcctgacctcgtgatctgcctgcctcggtcccccaaagtgctgggattacaggtgtgagccactgtgccaggcaccttgctcttagtaaattaacaaaattaatgaaagaaaattctgatattaattcagtagccactcatgctaaggacagagttgggcatcatctagacacaaatagttttcatcactgattctctcaacaaccttgcaagataagaattattgtctcttttttatagaagaatatactcagactttcaaagatgaag

SEQ ID NO: 386126 - DNA, 524 bp, Homo sapiens
tatgcatctatttttgtctatctcaaatatatagaaatacttggaggaaggaatgagagaatcgagctttttcctatattcagaattatatagtgagcatctgttatgtactgaatcagtgccattatattactgatacggttgaatgtgcaaagaaaggttttatctgtgtatttgttaacgggtggtattaatatatgatcactgaaatcagtatttcccattgatagggtctgatttgccaagtacagctagtaattcttcatcttgtcattgttttctgcaaatgccccaccccctacctttctacctccatcttctargtttgctagatttcccaaaagcttattcttcttgaaaggggaagttctgttccactcacctcaatccttagcctcttctccacaggggagtatggtgacgtcagaccctgtgctgttaattgggtattactggttttcagaggtcactccctgccgcagtgatgaaaactcttaccttagatttaacttcgcaagactatt

SEQ ID NO: 386127 - DNA, 534 bp, Homo sapiens
tactctcaattagtattcttgaagaaatggctgaaaagtcacatgaatggattttcttctatgtctgggtagctgtggtagcagtatattttccgactgtagccatgcaaacaggaaggatgtgtccaaatattcacaggctatttgagctagaaaacatcgaaaaagtaatttagtaccccttctcttattttacaaaggaaggaaggtacaattagaaaggatacaaggtttacccaaagtcactagctacttcatatgtaaacatgtcaacacatcaacaattctattacttacattarttgaaaatactgtattggctctctgttgttgctgtgactaattattacaaatttagtggcttaaaatgaaacaaatgcattatcttataattctgtcagttagaagtctaacacaggtctcacgggaccaagataaaagtgtctgactgggttgcgtttctttctagcgcctctggggaaaatctggatccttgctttgtcagccttctaaaagaccccatacatttcttgg

SEQ ID NO: 386128 - DNA, 534 bp, Homo sapiens
tactctcaattagtattcttgaagaaatggctgaaaagtcacatgaatggattttcttctatgtctgggtagctgtggtagcagtatattttccgactgtagccatgcaaacaggaaggatgtgtccaaatattcacaggctatttgagctagaaaacatcgaaaaagtaatttagtaccccttctcttattttacaaaggaaggaaggtacaattagaaaggatacaaggtttacccaaagtcactagctacttcatatgtaaacatgtcaacacatcaacaattctattacttacattagttgaaaatactgtattggctctctsttgttgctgtgactaattattacaaatttagtggcttaaaatgaaacaaatgcattatcttataattctgtcagttagaagtctaacacaggtctcacgggaccaagataaaagtgtctgactgggttgcgtttctttctagcgcctctggggaaaatctggatccttgctttgtcagccttctaaaagaccccatacatttcttgg

SEQ ID NO: 386129 - DNA, 534 bp, Homo sapiens
tactctcaattagtattcttgaagaaatggctgaaaagtcacatgaatggattttcttctatgtctgggtagctgtggtagcagtatattttccgactgtagccatgcaaacaggaaggatgtgtccaaatattcacaggctatttgagctagaaaacatcgaaaaagtaatttagtaccccttctcttattttacaaaggaaggaaggtacaattagaaaggatacaaggtttacccaaagtcactagctacttcatatgtaaacatgtcaacacatcaacaattctattacttacattagttgaaaatactgtattggctctctgttgttgctgtgactaattattacaaatttagtggcttaaaatraaacaaatgcattatcttataattctgtcagttagaagtctaacacaggtctcacgggaccaagataaaagtgtctgactgggttgcgtttctttctagcgcctctggggaaaatctggatccttgctttgtcagccttctaaaagaccccatacatttcttgg

SEQ ID NO: 386130 - DNA, 617 bp, Homo sapiens
catatcatttccattataattaacttaagttcacccacctgcatgcacatacacaccttggcctaatttggtcatccacatttctgtccctaagtctttgaatatttcattacacaatatttcaataggcagccttgtgcacaaaaatcggaatactcagttaagatatgagcgtgttttctcatcagcactggctctctaacctcagattttaatatgtttaggaatccctttagatgttatatcctagaggagaaatataatacactacatttttattactcaaagtgaggtctgcagaccaccagcagcaacacatgggagctagttagaaatacagaatttcattcaacayctgtacacctggacttattgaatcagaatctgttttaacactacccccaggtcattcttatgcacattaaaggctttaaaatgaaatacacatttagtttttgggaaatcagccaatcatcaatcaacccctgtgtgggtcaaatcatgcttttttgctctctgtacccagccagagtcacttttgaataccacccaattttaaaaaagggtcaaggaggctagtgtttggaaaagccctagtgaggttttggaaggaaaca

SEQ ID NO: 386131 - DNA, 641 bp, Homo sapiens
attattgcattgttgtgtgcacagatacataaaacatgacacttggggtattcttagttttctctgaggttcagggctactgtaatgatgaccaatacgtattgagaatttactatatgccagaggctgtgttaaatgcttctaatatacacaacaatactattatgttagtaccgatattagtttttctattctttatttttaatcagaaaattagggaaaatgctacataatataaagtcagatattaagtggctgagctgaaatataaaaccagacacctggttctacctcccatgggcttaaccagtatgctctactgatctttgattatatctctagataattctgtttataagagcattatgattctgcagcatgtttataatagttaatgtttttccgaggtggaagaactcttgaggtcagcctaytttgcaaattaaattgaagtactgagaggagaattggataggaagtttaagggaggtattatataattttcaatataggaatatgagcactttaaaaatgtcagaactatacatcacgtagaaattcaaataacaataaaattaatgaagagctatgtgataattactgctaaatatattaaagcctaacaagagtaacttgaatgg

SEQ ID NO: 386132 - DNA, 578 bp, Homo sapiens
atgccttactaatttgtatcaggtggtacatgattttgatttattccataattggtgacaataattttgatcacttcatgaaggaagtgtttgccctgcatctccatcatagttttttttctttttgcacttaacactttatgaacagatacttagagactatgtaagtatcttattcctcatgaaactattaacccaaaattttaacatccattgaagtttcttggctgaattaatgattactatgagagctgccaagtggtgattttcttaattccatcattctatctacagtcattggttagcattcttctgcaaggaaaattttctcttcacattaatttgcttgtgtatttatttacattagctttgacttttcgatttctgttttatttaatgaattataacaggttgagttatttatcctgatgctcagattatctgacacttggtcacgatgtgtccttggggctgagttttgtgtcctactgacatgcctccatcattctttgagtgcattctcaccttttggcccaacrcgctgtttgaggctcattttgtactttttctagcccagc

SEQ ID NO: 386133 - DNA, 615 bp, Homo sapiens
atgtgttattttgggtggcctttccttacatacagttggcccttgaacaatgcaggggttagggttataaccccttgcagagttgaattccatgyatagtttttgacttcctaaaaacttaactaccaatagcctactgttgaccagaagtcttatcaataacataagcagttaattgacacatggttttttatgttgtgtgtattctgtactacattcttacaataaagtaagctaaatagaaggcaatgttgtcaagaaaatcataagggtccaagtgcagtggctcacgcctgtaatcccagcactttgggatgctgaggcgggcggatcacctgaggtcaggagttcaagaccagcctggccaacatggtgaaaccctgtctctactaaaaatacaaaaattagccgggtgtggtggcacagagctgtcgtcccagctacttgggaggctgaggcaggagaatcacttgaacccaggaggcagaggttgcaatgagccgagatcacgccactgctcttcagcctgggcaatagagcgagactccctctccaaaaaaaaaaaaaaaatcataagaaaggtaaaatatacttactattcatcacgtggaagtt

SEQ ID NO: 386134 - DNA, 615 bp, Homo sapiens
atgtgttattttgggtggcctttccttacatacagttggcccttgaacaatgcaggggttagggttataaccccttgcagagttgaattccatgtatagtttttgacttcctaaaaacttaactaccaatagcctactgttgaccagaagtcttatcaataacataagcagttaattgacacatggttttttatgttgtgtgtattctgtactacattcttacaataaagtaagctaaatagaaggcaatgttgtcaagaaaatcataagggtccaagtgcagtggctcacgcctgtaatcccagcactttgggatgctgaggcgggcggatcacctgaggtcaggagttcaagaccagcctggccaacatggtgaaaccctgtctctactaaaaatacaaaaattagccgggtgtggtggcrcagagctgtcgtcccagctacttgggaggctgaggcaggagaatcacttgaacccaggaggcagaggttgcaatgagccgagatcacgccactgctcttcagcctgggcaatagagcgagactccctctccaaaaaaaaaaaaaaaatcataagaaaggtaaaatatacttactattcatcacgtggaagtt

SEQ ID NO: 386135 - DNA, 542 bp, Homo sapiens
gagttggtcttgctgtctcagggatggcagaggctgaacagaatccacacgtaagtggaccctgcatataaatcaaatctgtgttgctcaaaggtcagttgtacctagctcaaggcagctaagtgggaactttcaagttaaggctgtttttcaagcgtatgaccaacattatctcttagttaaaccaacagaaaacccacaccagtgggatatttcagaggtgtctaacccattttaatcacactttccttttttttctaacagaaattcactttttaaaactacatttatttaaaaaaaaaccttctactgtttwctgttctgcttcttatcttgtttcatgttttttcaactctcatttctatattttctctaattgttctcatcaaatacatttaataaaatttattgaatacctgcaataacagatagtgaagtctcatagataaaagctgtctttgcagatagaaagactttgtgcttaagagttcactctctcgaggtcttgttgtaaatccctgctactttccttggtcagagca

SEQ ID NO: 386136 - DNA, 590 bp, Homo sapiens
cctccacatatgcaactgacgttgcctagacaactctaacttttatttacccttccagcttcagattatcattgcttactccaggtcggttaaaacttcatattatatggccgggcacggtggcttacacctataataccagcactttgggatgccaaggcaggcagatcacaaggtcaggagttcaagaccagcctggccaatatggtgaaaccctgtctctactaaaaatacaaaaattagcagggcgtggtggtgggcrcctgtagtcccagctactcaggaggctgaggcaggataatcgcttgaacccagaaggcagaggttgcagtgagccgagatggcaccactgcactccagcctgggtgacagagcaagactctgtctcaaaaaaaaacaaaccaaaccagaacaaaaaaaacccaaaaaacctcatattcttctggattttccttcatacaattaattgattgattaattactgtattgctatttctactctcccataaggtctctgtaggtgaaacttgtgcttatattgttccttgttgtttttcggggcctatcacaggactggctggatgcatggc

SEQ ID NO: 386137 - DNA, 565 bp, Homo sapiens
cgcacattttctcagtttgaattcctaccacttcaattactgagagtttattttgttttattttattttaaggctatgcagatatatctaattgcaggtggatatttatcttttttgttttatcatctgctttttcaataattgacctaggatggagaaaaggaagttcttaaagtagatgcttaactgtgcattgtactatttgaaaaactttgcaataggaaactagttcattcattgtcaggtgaaatcaaatktacagaatcaaaattttagtttagtggagtgtgtgtgtgtgtgtgtgtgtgtgtgcgcgcgcgcgtgtgtgtgttagactggacttacatttgttttgctgttgttggcaggttagacaaatgttctttgtgtagacatgggctgcctgctttccaaaatcacactgggttattggagactacacgtgtttattcctcagaactgttcataagctccttttaattttgatgcacatcttcatgtaggtataattccaattatgagcctgccaatgactgattttcttgataagctttagaagtgaatc

SEQ ID NO: 386138 - DNA, 570 bp, Homo sapiens
tcttggcaaccacagcatcactaccagttcacctacattatccagatctcacattactcctggaaaagaattcacagtcaaaaccagtttggagggcgagggggaagggatagcattaggagttatacctaatgttaaatgacgagttaatgggtgcagcacaccaacatggcacatgtatacatacgtacctaacctgcatgttgtgcgcctgtaccctaaaacttaaagcataataataataataawaaaccggtttgaagtaagaaggatttctctccccatgactctttaacagagcacatagcttgaagctagtgcaactttctaggcaggaagggagaagatcgctatgtaaatcattatcactgacaagttaagcctccagtcaaaagtggaatgtatagcttgtgtatttaccttgggctacttgtctccatgaggtagcctgaaaagaaatacttagagcaggttgatatccacacatacacacccttattgtactgaagggccggtctcctgttgccttggattagctgaattttagggcttaaattattcttaggactc

SEQ ID NO: 386139 - DNA, 603 bp, Homo sapiens
atagactttaagggcctagataaacaactagtatatgggatctcttcgatggcatgtgcaaaatgatacaggcagggcttcaaagaaatatgcattacgttcttttctcaatagaacatctttattttatttcaaacagtgtaccataaggcaggattgcggaatattgtgagaattcctggcacatcagcaaagtggactctgagagactttaagttaaggtggcttggaaataacattaaaattatgactttatgacttttttagagaaaatctgaatcttaggataaaggagaagaattattcttttttaaaaaaacactcctcagaaaaggattatacttaaacacacacatacacacacacacacacacacatacacacaatattctgtggtcatgaaatacttgtttgaagtgtattaacctcatatatgaaagaaaacaaaatgctaaactactcaatatttcaggactgtttaaattgtagacctgggccaggcatggtgtttcatgcctgtaatcccagcgctttgagaggctgagtgaggtcggagtattgcttgagcccrggagttcgagaccagctttggcaatgtagcaa

SEQ ID NO: 386140 - DNA, 468 bp, Homo sapiens
cagtttggacatcgtttatccaatattagaagctaagagttcagatgtcttatgggaatgctatgggcaggcgtgatcttaaataatattcttcccttgacttacatataaggaaacttatcttgattcattcactttacctccccaaatctctcatggggattctagaagatctttctcccgaggtgtattgttcaattttagacttgaaaagtgcttcactataggtatcacatttgaactgatttcaattgcccttaacctcagactcasacttttatagataagaatttatcatattgacagttcagccatcatattttagcccacacaaatcatggggagaaatcgtttctctttcaattttgttgggaagaagtctttgaggtaaatggtcttggagaaatgttgaataatatctccttattatagtactgtttcccctacaatttttaagatttgtaatac

SEQ ID NO: 386141 - DNA, 457 bp, Homo sapiens
gtacccattcccatttgcatggtaagaccagcatagttcaggatgcctgtgttcacttaataaaatattccacaatctaacagatgtctactgaaactcatcatatgcctttatccttttccaaaagcttttttttccatagaacactaaatatattttttcactttattaatgtatttctttatatgtttctgctgttcatagccttttgggttattacagacaaatgtcagacccatttctagatgcattggtcaagttattactctttctagcctcagattatttatttcagaatgggactaatcagacctacactataaaactcttgaggttgttcatacattcaaaaggtttattgtaggcacagggttagtgatcactagatgatgagtctgacracgcaaacctgatggacaagtctaagggaagcatgtgaactaaggtgcatttcaat

SEQ ID NO: 386142 - DNA, 604 bp, Homo sapiens
attacttttgtattttcagctatttagacttgaattttctgttacttggagaaagtagcttttgaagtcagaatcaactctgtttgtaaaagcttataaaaaccttaactgagctttgcatttttctctatgtaatggttatgcttttctctctgagtggagatcattatgcagactgcttcttttaagaacctgggtaaaatagttgctggcacctacaggatcaactgctctttcaaactcaaaagacaataggaaaaattaggtccattattacctagcattcttaggtcattccatggaaagattttgattagccttgattgggtcatattcctgctcatggtccaattacattttcatggagaaggttattctgaaaactctgggaaccaggcccaattaaacacacacacacacacacacacacacacacacacacacacmcccacaatgtgttcccagaaaaaaaaagacaatttttcttgctaagagaagaagagaggtacatgcattctagctacacagtagatctcaacacgactctatccaacttttcactggccctgccatttcccttaggagtaatacaagatgattacac

SEQ ID NO: 386143 - DNA, 559 bp, Homo sapiens
agtcatattcttagagagtttttccctatcagttcttctaaaatgtaattgttcctcctttaatatttcataccctttgtctatgcttgactgtttttcttcctgataatcattatctaacatactctataccttattatgtttattatttgtctcttctaggrtgcaagttccgcaaagaaaaggatttttgagtcctttggtctttgctctgtattcccagaacctagaaccctgcctgcatataggaactgctcagtaaatactttacatgaaaaaataaatgaataatttacctacataatggaagaatgtataatagtcatataagctcagtggcatttttcaataaaggaactttcatgttctctctttcatatgagtattttatagaccacctgggtagttaacaattttttttatgtattgattttgaaagtctttctttgaggtagtgggcatgaagaaaatgttaacttgtttaagcaactctctttcaaaaagctgcagaattacctctgtggagactgtctttcttaccactgtcataaagcaagac

SEQ ID NO: 386144 - DNA, 591 bp, Homo sapiens
atttacatgctattgtactctcagatggcaacggtgataatggaactgtgtatttgggggcacttactgattaagaatatcccagcagttaaacatttgccatggagagaacccaatagttttgaattttccagaagccctagaagatgcatctttacaagatactaggcactgtaattgagctggtttgtatttttacagactatcagaaacatccttcctgctaggatttccctgtttaaagttatccagagttttgtgtgaccacttttaaatgaccttatgataaactctttcttgtaaatggtaattaaaaaaaagaaagaaaaaattaagaaagtagatgaagtttatgtctatgaggttttaagagaaaaatttcagtcaaactaaatttaacagaatttaattgaccaaagcacgattcagaaatcaggcagctctctgaaccagaggctcaaagagactccwctgcagccatgtagtacaaggtttatgaacagaaaaggacggtggcatacagaaaacagaattgatgtacacaaacagcgggattggctacagcttgatgtttgctttatttgaacatgg

SEQ ID NO: 386145 - DNA, 513 bp, Homo sapiens
cagttcaggctgcctgggaagtccaagatctgggcaccaacacatttggtgtctggttatgggttactttctggttcatagatggcaccttctgacaagttctctctgtgtccccacatggtggaaggattgagagtggatccttttatattagtgcactaatcccattcaggagagtgagtcagcccacgttacctaatcacctcccaaaggccctacctcctaccatcctcacatggggatttaaatttcaacataggaatattagggagacataaaaacacagacaatagcaggatgcaaatgaagatcctccttgaattgttacctaggtattctaagtsatctctttgtatccatttgctctgattcccaatatgtgctctacacttaatcatagaggggatataatttgatttgcattttgtgaaaattattcgagacagcacaacacataaattattttttattgcccataggagataacattccgaggatccctaataaacattg

SEQ ID NO: 386146 - DNA, 493 bp, Homo sapiens
tatttgagaacagagccctaatagctctgtaagttgaccaataacaattcartgttgacatttaaatatatattaaaaccatttaacatttattttaatcttagacataacttgtaatactctagaataatgaatgaagctttttaaagaatgagttaaaacaaacatgtagaacaagaaaaaaatcacattcatatattaagtctgaaaaggaatgtgttatttcatttagaggaaaaaatgttttttactttccctcagatttacactgtctgaaacaaattctgctctattttactttccacagactcacatatatagggggagaaaattcaacctagaatgagaactccttgaaggcagggaccatgtattattcatcattcctgtgtgtaacttctctggcaaatgataggaatgcaatacaggtttgatgaatccatgtgactgaaaagaagtttaatctatccctgaatggtataggtacaaaaat

SEQ ID NO: 386147 - DNA, 553 bp, Homo sapiens
tactttaatttctgtttttgcattattgacagacatccttgaacttgagaagccttgtttaaaaaaatgagaaaaccagaaccatgcctgttgcattggtcttatttatttatttattttggagatagggtctaactatgcagcacagactggtgtgaaaatcctggcctcaagtaattcttctgcctccagctcttaaagtgctggcattacaggcatgagycaccacaccccgcctgctcctatttattgtgcatttgttgatattaatatctctcaaaatgtaagtgatttacactgatttaatatgtttaattctcataaaaacctaataagttagctgccaaaattattcctgattttaaaagaagaggtgaaagcttaaataatttgaaacaggtgattcagctaataatcaatacaggcaatattgaaacaactaaactgtgtatctaacaggcaatgccacctcccccagcagtatttagaagggaacaactgagaacccttagaggtatattttttctgttaaacgtatctgaattcaaagcag

SEQ ID NO: 386148 - DNA, 504 bp, Homo sapiens
gagtgttgttttaaaaaatagagactcgccaaggcgggcggatcacgaagtcaggagattgagaccatcctrgctaacacggtgaaaccgcatctctcctaaaaataaaaaaaaaaattagccgagcgtggtggtgggcccctgtagtcctagctactcgggaggctgaggcaggagaatggtgtgaacccgggaggtggagcttgtagtgagctgagatcatgccactgcactccagcctgggcgacagagagagactctgtctcaaaaaaaaaaaaaattgagactcacagtattaatttgtatgaaaatataaccagccaaagcactagtaaagaatgtagctgaggcatgagaagaaatttgggaaactattagatggaaattaaaatgactgtgtcaggagggggccagctaagctgaaacaggaggaggttgccggctggagatttgttacaggcagagcattagaagaagaaagaggctagagtaaggataggaaga

SEQ ID NO: 386149 - DNA, 533 bp, Homo sapiens
gtccacatgcaccttaaagtatagagtgtactactttgaggggtacacagttctctgcttccaatcttcctcttgatcatgccctcctcacaggttttgaagtctctctaatcgtagattttctcttcaatccattagcaatctttcctatctcctagaaaaattagtcctgaatatacataggacatggagaggcaatagcattccttatgcaatacatttttttgcttgcctttttcaaaaactcrtaatttgcttaacaaggctttttggaaaatgtgttacctgctaactaaataaactcagaaaaggaataaaatttctatcagtataaaacccaaagaagtaatcttggagttggctttctcccatcatccacattcataccattaataagtgctattatatctaccattatactgaatagaattctttccatctttattctgctgcaattcaccttctctcacaagactaccacagtagttcctgtttccaatcttgctccctgaagagggctgttattaaaaagc

SEQ ID NO: 386150 - DNA, 498 bp, Homo sapiens
gccaaattgaatttcttgttcgccgtattgttcttggatgaataagtgggccctccatgtaaggttagagcagagataagtctgtccccaagagtggtacacgggctttctggagcccagctcacacacaggacacgacctctacatttaatttctgaagctcccttgggaaaatgtctccacttgtgccatccagggacatttggccacccctctgcaggttcccaaacccaccggtgaagacaaagaggaactgaagacaccaagagtctggtcactgctactcagtgtgtggtcctgcaccagcaacatcaaaaacacctgagggcttgttagaaatttccatcctcaggctcacccccagaccrctgaatccaaaattctgggggtggagcccagaaatctgtgttttctctagccctccaggagaccctgctgtcaccagccttgtccagcaccagcctttgcagtttcccttgatggaattcaattcttgaa

SEQ ID NO: 386151 - DNA, 556 bp, Homo sapiens
tgctactccttccctaactcctttcggaacagaagagagtgtaatttggttcattcagttattaaaacagtatctaacctatcatcctgcattgaagatccaagagaatctggctctaataccttcttgtcttgtttctaccacttcccttccatcatcctatgttcttctaagctcagtgatctaaagatccctgaaaayggaggtcagtccctaccccagcagcatgtttgttaaagccagttgtgtgacctttgacaggttcctttcttgagacagggttttgctctgttgcccaggctggagtgcagtggcgcaatcactgcgtactgcagccttgtgctcccaggctcaagcaaccaacctgcctcagcctcctgaatagctagggcctcaggcatgtgctaccacacccagctaatttttttcttaatttttttgtagagatggcatctcagtattttgcccaggctgatctctaactcctggcctcaagtgatcctcctgccccagcctcccaaagcgctgggattacaggcatgagccactgcgtctg

SEQ ID NO: 386152 - DNA, 548 bp, Homo sapiens
tcaggctagaaggggctgcaggaagtagctagaatggctcatgaaaacagcaagggagcaagcggggcctgcagacaactgagacaaagatgactgatggataagtctaataaaatagctaaggcccagagaagaaacaggtgagactcttgggaaaattaagatatttaaaagcaaccatgtatacaggagattgcgggaaaaaaatcacacatgcaggcctaggtaagacatatattcagaaaaggccttggaagactttaagcctttatgctaggctgattccaaagctcagaacatgtcctgctaattagtgaaggccttatccacaaatctccaaagactgagagaggtagctgatttttttgaatgcccaattttcaacaaaagatcacaaagcatacaaagaaacaggaaaacatagcccattcaaaagmacaaagtaaatcttcaggaacagtccctgagaaacacaggtatcagacttagcaggtgaagactttaaaacaagtaccttaaacatgctcaaagaaaacacaaagaactaa

SEQ ID NO: 386153 - DNA, 393 bp, Homo sapiens
actcctgtttatggggaaaatatcctgggccagattaattaacatagtcattatcttggcagttttaaatgytaacacaagatgagaaagaaagaggaaatctggcccaatcaggactgggacgtcaatgtgacttagcattgcaagtagcggcttttgcttcaggaattaaaagtgcatcctgcaagtgctactttagtttcacttttcatcaaaggaaaaatattttccatgtgagctattttatgtacttttcctattccttccatccaggaagaagtatccgtcagaaagaaagtggtcatgtaaatcttctccttagaacgttttttaaaaaatactatgataaaaaaaaaacctgacttgttcatatcatggtcctttctccaatga

SEQ ID NO: 386154 - DNA, 648 bp, Homo sapiens
gctgcatagtattccatggtgtatatgtgccacattttcttaatccagtctatcattgttgacatttgggttggttccaagtctttgctattgtgaatggtaccgcagtaaacatacatgtgcatatagctgaatagtacttcgttgcatatatgtgccacagtttctttatccattcctctgttggacacttaggttgctttcaaatcttgactattgtaactcgtgctgcaataatcatgggagtcaagatatctctttgaaaactgatttcctttcttttggatatatacccagcagtgggattactggatcatatggcaggtctgtttttagtatttgaggaaactccaaactattcttcatagtggttatactaattgacatttctgtcaacagtgtgcaagggttcctttttctccagatccttgctagcgttggttatatagtcttttagataaaagccattgtatctggggtgacatgatagatacctcawgttgtgatttgtatttctctgatggccagtgatgttgagcacctttccatatacctacttgcaacttgtagtcttcctttgggaaatatatatttaggtctttagcccactttttaattagattattagatttagtcctatggagtggt

SEQ ID NO: 386155 - DNA, 601 bp, Homo sapiens
tgtgacactctttttcaggaatgtccttttccattgtgttaaaccttcataactcagctttagcagatatctattcttttggcctaaatagtacttattcattctgattttttttaatrtacttctgttccccagttctgagttcttatggttggcaaagaacaaactccactttgggttcaaaggaaaataaagcaattcagttttccaatattgttggacatgttcttaaataaacatgagggctatgagatcgtggggcaatggaaattattgtgatgttcacgaaaatacatccatcaggaaagtggttacagaatgaatcatcacatctccttggctacaaggattgggttagatatgggcatatagttatattagcatcaatactcctcaaatcaagcactttggagaactattcagaagaaagggttcctgatttttccgtaactgtaggaagttcagatacaaacatagggctctttggtatcaccccttgtaatgtgaccaaaaagaaaaaaaaaagcataacaggagaagatagaaataatgactgcatggagaagtggacttctctgaaatatcatatgggcatatacat

SEQ ID NO: 386156 - DNA, 589 bp, Homo sapiens
aagtaaagtgcatcagcaatcttggatcctcaaaagcctatttttcttactttcctgggtcttgtaaatgtgtttacctagagttgaccgaggagttcattcatattcttatgctttttatatcaaacactgtgacagattttaagacatcagatactttccttatcaaatgttatattgctgctctacacattgaagaagcaagygtgcccccaagtccatcgctaccctgtaggcaagagagaagtagacagcactaaagtcagttgcaagggagccacagattgggaaatgggagacctcagctcctcagtccttccagcctctcactaattaacctcttcctaattagaaatgccatttttaattaccatcattttcctccttaaatgtgctgaaagctaactctgtaaggctctggggttccgttatgttacaacagctgtaaatcacctaagtgattaatatggcctcttctgatgcccctggaggcccactctccctggagagcaaccatgtcaaacacagagctcagcatcatgggatggagcacatgtttttcaggtttcacttaatagaatgatctaaa

SEQ ID NO: 386157 - DNA, 563 bp, Homo sapiens
ctcatgaaagagaatatggtagagaagtaactataggtccagcattcagtaaattacctgacacatagtcacatagtcaataattagcaaatcacattccctggagagaaggaaagaagagtaagatacaaactaacaatctgtatcaatcactggagtaaaaagaataatggcctccttttccctcatgtacacatcctaacctctggaacctgtgaatatgtcatgttacatagaaaaggtaagtgaatttgctaattgacgtattttggatgtttgtcttctgcaaatctcacgttgaaatgtggtccacaatgttggaggtggggccttgggggagtgtttggctcatagaggcaaatcagctccctcaaagatagcttggtgacccccacatggkaatgagtgagttctcattctatgagttcatgaaagagctgattgcttaaaggaacctggcaccctgtccccacttttccttgttccctctttcgccatatgacatgctcactccccctttgccttccaccatgatcgtaagcttcttgagaccctcactagaa

SEQ ID NO: 386158 - DNA, 396 bp, Homo sapiens
cttgttttattttaacattttcccaaaatagttaacacaattataaccaaggaacggtttcaataattttattttctaagattttattatgaaaagatgtcaaagaaaagttgaaaaaaattttacagtgaacacacctgaacctaccacctgaattctattaatattttattatacttgtattagcacatctatgcatctttctactataggttctaatatataattatttttctcttttcactttgtagtttttccatgtagcttcaatttcttaactatcatttataatgtttgcctagtgctgattctttcttgtaagcaaagtaaaatattatttttaaatattatcataaatgatgtattgaatttaraaatgattatatttatgaatag

SEQ ID NO: 386159 - DNA, 538 bp, Homo sapiens
tagttctggttggctaaacatttgaactttctttagataagatgggcacgtaagagagaggggaaaggggaaggggtgtctgtaatgagctagagagctagtctttttttcaaataaggaaaggaatgtgagttggtattgataacacctggtactgtagcatgtctggrcacataacaaaggcagaaacgaagaaagaggagaaaagggaaaggggggggggtactagaattaaagaataaaggattgaccagactctttgaagagaaacctcattatatcccacagttttccccttcttttttttataattcagttcctttggttgtaggactgaggttcccatatccttgcagtctgtatctcctagggtactttctcaagtccttgcctatgagcctctccatctcagggccaacacatcaaatccttctcatgcttagaatcattctgatttcaccttctgctgcatggagctaaataagacacagccagtgccctgtaggagcctatagcccagagggcaagacaggcaggt

SEQ ID NO: 386160 - DNA, 538 bp, Homo sapiens
tagttctggttggctaaacatttgaactttctttagataagatgggcacgtaagagagaggggaaaggggaaggggtgtctgtaatgagctagagagctagtctttttttcaaataaggaaaggaatgtgagttggtattgataacacctggtactgtagcatgtctgggcacataacaaaggcagaaacgaagaaagaggagaaaagggaaaggggggggggtactagaattaaagaataaaggattgaycagactctttgaagagaaacctcattatatcccacagttttccccttcttttttttataattcagttcctttggttgtaggactgaggttcccatatccttgcagtctgtatctcctagggtactttctcaagtccttgcctatgagcctctccatctcagggccaacacatcaaatccttctcatgcttagaatcattctgatttcaccttctgctgcatggagctaaataagacacagccagtgccctgtaggagcctatagcccagagggcaagacaggcaggt

SEQ ID NO: 386161 - DNA, 553 bp, Homo sapiens
ttctgctggttgtaatgcgwctgtctttttagctgatcttgacaccccaaagacacaaagctactaggatggtaggctccctgggaattcttctctgctccttcaaataaagctgtgttctgcctctcagcttccataaccagcttgttcttatccttgtcacagcctatattggtctgcactctaatcagctatgcacctgtctgtctccttcatgggatggagatgacttgagaaaagggacccccatcacgtagcacaatgcctagtcacacagcaggtgctcaacagatgttgggaaactgacttaaccatctctatctctttcttcccgcagtgcatttgtcaacttagcatcttcattgttttggatccttgagggacattgaactgctgtgaagggagtgagtgctgtggtacacatgctaattcaactttgccctattgttggacagtggaatgatttcctttttttcccattgtaaataatgctatgatgagacacggatgaataaaaccttttctgcatttcagattattccctaaggctcac

SEQ ID NO: 386162 - DNA, 532 bp, Homo sapiens
catgacacttctgaagatcccaggttgtctcacttttatgccctagagacagattcaggccctaccatggccacgaaagtcagaagtgtataaaattccagttagacaggaggaatgagcttttgacatctgttgcacaaaagtttaagtatgtgaagagacggctatgtctatyagcttgacttaatcattccacaatgtacacatatatcaaaacatcacactgttcctccaaaatatctacaattattatttctccattttttatttattatgttttgagatgaagtctcactctgtcacccaggttggagtgcactggcgcgatctcagcttactacaacccccacctcccaggttcaggcgattctcctgccttggcccaccgagtagctaggattacaggcacctgccaccacatgtgactaatttttgtatttttaatagagacgaggttttaccatgttggccaggctggtctcaaagtcctgacctcaggtgatccaccctcctcggcctcccgaagtgctga

SEQ ID NO: 386163 - DNA, 532 bp, Homo sapiens
catgacacttctgaagatcccaggttgtctcacttttatgccctagagacagattcaggccctaccatggccacgaaagtcagaagtgtataaaattccagttagacaggaggaatgagcttttgacatctgttgcacaaaagtttaagtatgtgaagagacggctatgtctatcagcttgacttaatcattccacaatgtayacatatatcaaaacatcacactgttcctccaaaatatctacaattattatttctccattttttatttattatgttttgagatgaagtctcactctgtcacccaggttggagtgcactggcgcgatctcagcttactacaacccccacctcccaggttcaggcgattctcctgccttggcccaccgagtagctaggattacaggcacctgccaccacatgtgactaatttttgtatttttaatagagacgaggttttaccatgttggccaggctggtctcaaagtcctgacctcaggtgatccaccctcctcggcctcccgaagtgctga

SEQ ID NO: 386164 - DNA, 584 bp, Homo sapiens
ccgccttgtcttacatcctgttctccctcactcactgcttttatccatccctagaacaagctcatctctttccagccctggggcctttgctcatgctgtctccccatccctgcccttccctacaataatcccgtgactgactacttctcaacctgcgtgtttccccttaaatcttctctcatgagagagatctccctgaccacmttcgcaaaggtaggttcccacccctgtagatcctaacacaacgcatggtatgtcctaaaagcacttatggtcagatatagtggctcatgcctataatctcagcactttggaaagccaaggtgggaggatcacttgggatcaggagttcaagaccagcctggacaacatagcaagacgccatctctacaaaaaataatttaggccaggtgtggtggcacgcatctgtaatctcaacacttcaggaggccaaggagggaggatcacttgagcccaggagtttgaggccagcctggccaacattgggagactccatttctacaaaaaaaaaaaaaaattagctggatgtggtggtgcatgctgtggtctcaggtactcaggag

SEQ ID NO: 386165 - DNA, 603 bp, Homo sapiens
gaacgcaggtgacctctagaagctggaaaaggcaaggaaacagattctcctctagagcctccagagggaacgcagccctgctgaaatcttgattttagcccattaagaccacttcagactcttgacctccagaacgataagaaaataaattagcccagcacagtggctgatatctgtaatcccagcactttgggaggctgaggtaggaggatggtttgagcccaggagttcaagaccagcctgggcaacatgatgagatcctatctctacaaaaaaaaaaatgtttaaaattagctgggtgtggtggtgtgccctgtagtcctgcctactcaggaggctaggatgggaggatcgcttgaggctgggagttagttcaaggctgcagtgagcagtgatgatgccactgcactccagcctgtgtcacagagcgagaccctctctcaaaacaaagaaagaaagaaagaaagaaagaaagaaagaaagaaagaaagaaagaragagaaagaaagaaagaaagaaagaaagaaagaaagagagagaaaaggaaagaagaaaggaagaaaggaaaaaaatatgttttgttttaggccactaagtttgtaa

SEQ ID NO: 386166 - DNA, 603 bp, Homo sapiens
gaacgcaggtgacctctagaagctggaaaaggcaaggaaacagattctcctctagagcctccagagggaacgcagccctgctgaaatcttgattttagcccattaagaccacttcagactcttgacctccagaacgataagaaaataaattagcccagcacagtggctgatatctgtaatcccagcactttgggaggctgaggtaggaggatggtttgagcccaggagttcaagaccagcctgggcaacatgatgagatcctatctctacaaaaaaaaaaatgtttaaaattagctgggtgtggtggtgtgccctgtagtcctgcctactcaggaggctaggatgggaggatcgcttgaggctgggagttagttcaaggctgcagtgagcagtgatgatgccactgcactccagcctgtgtcacagagcgagaccctctctcaaaacaaagaaagaaagaaagaaagaaagaaagaaagaaagaaagaaagaaagaaasagaaagaaagaaagaaagaaagaaagaaagaaagagagagaaaaggaaagaagaaaggaagaaaggaaaaaaatatgttttgttttaggccactaagtttgtaa

SEQ ID NO: 386167 - DNA, 603 bp, Homo sapiens
gaacgcaggtgacctctagaagctggaaaaggcaaggaaacagattctcctctagagcctccagagggaacgcagccctgctgaaatcttgattttagcccattaagaccacttcagactcttgacctccagaacgataagaaaataaattagcccagcacagtggctgatatctgtaatcccagcactttgggaggctgaggtaggaggatggtttgagcccaggagttcaagaccagcctgggcaacatgatgagatcctatctctacaaaaaaaaaaatgtttaaaattagctgggtgtggtggtgtgccctgtagtcctgcctactcaggaggctaggatgggaggatcgcttgaggctgggagttagttcaaggctgcagtgagcagtgatgatgccactgcactccagcctgtgtcacagagcgagaccctctctcaaaacaaagaaagaaagaaagaaagaaagaaagaaagaaagaaagaaagaaagaaagagaaagaaagaaagaaagaaagaaagaaagaragagagagaaaaggaaagaagaaaggaagaaaggaaaaaaatatgttttgttttaggccactaagtttgtaa

SEQ ID NO: 386168 - DNA, 567 bp, Homo sapiens
tccagccacccatgtgtttactgattgtctatgtctgctttcacagtatcagggcagagtcgaattgtttcaacagagactgcatggcccacaaggcctgaaatgtttactctctggctctgtgcagagaaagagtgctgaccagatctagatccagccaaatggcaccatgcacttggtccctcacacacatcctggcctttaccataacctggtttggccctggggggtctgtcgatttgcaaagtcctggctcatttctgcccatagtaatttttccccacctggaaggtccacctccagtgccaccgaatttggcattctttcagcaaacatttatggaaatctggcaggtgcctggcatgttgtgtgctggggagaggtccttgctctcagggagctggtgctggagttgctgacctggcccccgttcagaagcacctctagarcttcatcgtgagagctcttggcctttcattttattattgtcatgtcttattggccttgaggccaggtgcctgcctcctatttctgtagcacttggcacaatgcccagcacacagggaa

SEQ ID NO: 386169 - DNA, 567 bp, Homo sapiens
tccagccacccatgtgtttactgattgtctatgtctgctttcacagtatcagggcagagtcgaattgtttcaacagagactgcatggcccacaaggcctgaaatgtttactctctggctctgtgcagagaaagagtgctgaccagatctagatccagccaaatggcaccatgcacttggtccctcacacacatcctggcctttaccataacctggtttggccctggggggtctgtcgatttgcaaagtcctggctcatttctgcccatagtaatttttccccacctggaaggtccacctccagtgccaccgaatttggcattctttcagcaaacatttatggaaatctggcaggtgcctggcatgttgtgtgctggggagaggtccttgctctcagggagctggtgctggagttgctgacctggcccccgttcagaagcacctctagaacttcatcktgagagctcttggcctttcattttattattgtcatgtcttattggccttgaggccaggtgcctgcctcctatttctgtagcacttggcacaatgcccagcacacagggaa

SEQ ID NO: 386170 - DNA, 534 bp, Homo sapiens
ctgaccatattatccattcttgggtacacggctttgacctgcaagatcccctttctgttccacactctggccacagcagacactcggcaaaactagtcctgtactgattattctaaatatataccaggcttttggcttggggacagtgcatgtattatgcctctccattgattcttgctcagtcctcacagattgactattatcgtttctgcagagcccataattgtccccygacttagaagtggtctcctgtgccttagaacttggaacaagtgcttgccacaggtccgtagaggtcctacctcccttaacaaacttcttaacttcttaacaaccatgtactcaacctcttttttttttttttttttggagacagggtcttgctctgtcacccaggctggagtgcaatggcacgttcacagctcactgcaaccttgacctcgtgggctcaagtgatcctcccacctgagcctccctagtagctccttcaggcatgtaccacgatgcctggctaatttttgtactttttgtgga

SEQ ID NO: 386171 - DNA, 534 bp, Homo sapiens
ctgaccatattatccattcttgggtacacggctttgacctgcaagatcccctttctgttccacactctggccacagcagacactcggcaaaactagtcctgtactgattattctaaatatataccaggcttttggcttggggacagtgcatgtattatgcctctccattgattcttgctcagtcctcacagattgactattatcgtttctgcagagcccataattgtcccccgacttagaagtggtctcctgtgccttagaacttrgaacaagtgcttgccacaggtccgtagaggtcctacctcccttaacaaacttcttaacttcttaacaaccatgtactcaacctcttttttttttttttttttggagacagggtcttgctctgtcacccaggctggagtgcaatggcacgttcacagctcactgcaaccttgacctcgtgggctcaagtgatcctcccacctgagcctccctagtagctccttcaggcatgtaccacgatgcctggctaatttttgtactttttgtgga

SEQ ID NO: 386172 - DNA, 546 bp, Homo sapiens
gaggctttgactttttgtagatattgcacatgaaatacacataactttgttttgacttataatgagcacagcgagttctgagtaagagatggtactggaagctccttgaggaccgagcttacccatttctctacctgtcaatccatctcccataaattccctgagtgcttgcttatctgtagtaacagtgggaaaacatcagtaccattctctttttaaaattcttcagtgcccatcttggtttctatgtgcaagtgagatactttcccctctgaggactctgagactgggttttagatgaggctcttgggtctgggccagcattttcacctctttctggaggaacattgcactggggctttgtggtgggtcggaaaagtgggcctgtaacttactgctcacaaaagggtcaggatgtgctctgtgtgctgaggacatcagaaggagagccatgtgtctctgtcctcacggtgttcctggatcataagtggggaaaacggacatktaagcgagtggccgtaaaacaatacaagaggcactgtagca

SEQ ID NO: 386173 - DNA, 591 bp, Homo sapiens
acacttgtacattgatatatttattagtgttttgcttttcactaatccagcatagttgtgaccccacccctgagacctaaaggaaggagacacctcatagggggtctcargaatctctgatgaaccttaggactaattataattctttcatttattataacttcatgccaggtattttatctgcctcacctctaatcctctcaataaccttgcatgtttttattcatcccgtattacaaatgagaaagctaaggtttgggtgcttaagaaattttccccaagttttttttgtggtggagccagcttggagctagggcaatagacttcagagtctcagctccatcctctccatggttcagaaagttctctagttctgtaagagacagccaacatcccccaagggcttgtgctcattggaatggctctcgggtccactcctccctttgtatccccaggtcacctcactagagcagacctccatcagtcagtgtttacccaccttccagagcctccttcctggactcttgcccccggattccccacccatagcactctcacactgccatcgcccaactcaggatcccaagaatg

SEQ ID NO: 386174 - DNA, 569 bp, Homo sapiens
gagtacacttgtacattgatatatttattagtgttttgcttttcactaatccagcatagttgtgaccccacccctgagacctaaaggaaggagacacctcatagggggtctcaggaatctctgatgaaccttaggactaattataattctttcatttattataayttcatgccaggtattttatctgcctcacctctaatcctctcaataaccttgcatgtttttattcatcccgtattacaaatgagaaagctaaggtttgggtgcttaagaaattttccccaagttttttttgtggtggagccagcttggagctagggcaatagacttcagagtctcagctccatcctctccatggttcagaaagttctctagttctgtaagagacagccaacatcccccaagggcttgtgctcattggaatggctctcgggtccactcctccctttgtatccccaggtcacctcactagagcagacctccatcagtcagtgtttacccaccttccagagcctccttcctggactcttgcccccggattccccacccatagcactctcacactgcca

SEQ ID NO: 386175 - DNA, 569 bp, Homo sapiens
gagtacacttgtacattgatatatttattagtgttttgcttttcactaatccagcatagttgtgaccccacccctgagacctaaaggaaggagacacctcatagggggtctcaggaatctctgatgaaccttaggactaattataattctttcatttattataacttcatgccaggtattttatctgcctcacctctaatcctctcaataaccttgcatgtttttattcatcccrtattacaaatgagaaagctaaggtttgggtgcttaagaaattttccccaagttttttttgtggtggagccagcttggagctagggcaatagacttcagagtctcagctccatcctctccatggttcagaaagttctctagttctgtaagagacagccaacatcccccaagggcttgtgctcattggaatggctctcgggtccactcctccctttgtatccccaggtcacctcactagagcagacctccatcagtcagtgtttacccaccttccagagcctccttcctggactcttgcccccggattccccacccatagcactctcacactgcca

SEQ ID NO: 386176 - DNA, 579 bp, Homo sapiens
tctactggggaggacacaatattagccagattttcacacatctgtcttcgcacagtgcatctctctctatcataatagctcctttccttacctagggattggcaccaccatctatgtggtcctgaatgccagaaatatccttaactcttcccttttccttaccaaagtccccaaatctaccttctagtctggttgacctactccagatatctcttggcatcatttctccccattccccctgctgtcctcccagtcctgacctccaccctatctcctgccagtcaggttcatccactctggccctcatctagtctccacacttcagctagatcatctttctaagataaaactctcaycttaccacctcctatgtcttctccacacaaggacaccaataaaaatatttcccatactatccattggtcttagaataaatgatggtggcttctcaccaagaccctcaagaccccacctgcccctgtggccctgtttctcatgcactatttcccacttgccacacaccagcctctggacctgtttcagacccttactctcactcttgtttctcgctttaaagca

SEQ ID NO: 386177 - DNA, 567 bp, Homo sapiens
catggttatggagggcaggarggcagaatagaagaagctctaggcttggtgtcaaaagctctggggacatcttggttccgtcatttttaagctgcatgactttgagcaaatcacttcttcattcatttgttttttcacaaggggctcaggaaaaaaagcatgtgattcagtgcaaagcaaaggcaaaattggaaaagcttgcttgtgagtaagcacgtaatgcacacataaacaccagaacatcaatcagtcagcatttattaaacttctactctgaaaccagtattactacaataatgacattatgaaaacaacccagagaactctttccacatggactggctatgggagcaggtgagagagagctaatgtttccctaatggcagtaaagagaactccagatcagaaccacaaaatcaatgcctcctatatggcctctcttgagcccctagttggcagagcccctttggccatctttgattattctaagtgtgactcttccacccatgacttctgtggccacagataagagtattgcatctagttggaattcttaaaagcatccta

SEQ ID NO: 386178 - DNA, 635 bp, Homo sapiens
tagttgctatggcatccagattactacttaaatcattctagggagaggcatcccaaagggcataaggtgagtctcaaatgtgctatcatttgtgctccttcattacaaagtttcttacaattgccagtgagctaatcctcccaacaggactgatgaggcagatcaatactaatatcccctttagagctcaatattattatctactttaaggctcattatgttatcagccaattactccatctttaaagtctcatcaayatccctcatagcaataccccattttgtgattgtaagtctgtgttacctgtgacacactggacctgttctcacaagagaggcaagaactagggtaagtggtacatgagacaccgtggggttgaatattatcagcatgcagagttgctcaaatgtgaagactctaagcaaaggcactggggagcaatccagagaacagaaccacctgcctactcactgggtgaccttgagaaagtcacttctttctgggatcctgtttgtgcacctgcagaatggggatacctaaaatttcgatctctccttcttatcttttctcttttacagagttgttaggctaaaatgagaccatagctgtgaatatcctttggcaggaaatgcag

SEQ ID NO: 386179 - DNA, 635 bp, Homo sapiens
tagttgctatggcatccagattactacttaaatcattctagggagaggcatcccaaagggcataaggtgagtctcaaatgtgctatcatttgtgctccttcattacaaagtttcttacaattgccagtgagctaatcctcccaacaggactgatgaggcagatcaatactaatatcccctttagagctcaatattattatctactttaaggctcattatgttatcagccaattactccatctttaaagtctcatcaacatccctcatagcaataccccattttgtgattgtaagtctgtgttacctgtgacacactggacctgttctcacaagagaggcaagaactagggtaagtggtacatgagacaccgtggggttgaatattatcagcatgcagagttgctcaaatgtgaagactctaagcaaaggcactggggagcaatccagagaacagaaccacctgcctactcactgggtgaccttgagaaagtcacttctttctgggatcctgtttgtgcacctgcagaatggggatacctaaaatttcgatctctccttcttatcttttctcttttacagagttgttaggctaaaatgagrccatagctgtgaatatcctttggcaggaaatgcag

SEQ ID NO: 386180 - DNA, 538 bp, Homo sapiens
cctaccttcactgactctgaaaacccacatgggccacacacacatagttatgtgatcatgttctcttgcaaggaaagttcaggtaccatttcataagaaacataaatattgaagatcttaaccacattgccaactggagcaacccagtcctgtcctccatatttattctagaggtttccatgtatatatggcttagtcaaaagtcatgtgaccttttcaggatagtaccttaaagtctcccaaattcctaagtgggaattttagattcaatgcctctattgaatctaggacatgtagatgctcggaccttaggggcagtaaatgtggcctctccatacaaagtccaatgtggtgcttcctgtgtgaagcaacatgagccccccatctttcttggataggcacggaacatggatttaacttagtaaagatgayattcttgcaggaaacaggagtgggaaagggcaagagggtcctcttgggctatcagtccttgggccctggcattgcatcccttcccagcccccagcctgaaactgaa

SEQ ID NO: 386181 - DNA, 609 bp, Homo sapiens
gcattagctgaatttttttagtccaccagactaggttataaccttgatggactctctgaatatgtcatggacctcaaggcataatattgatggggactgcagatatagcgtatatctgtgtgtatgtatatatcatattgattttaattcctattcaaggggcttgatgtctatttcgtttgttggaygaaaggtactccaggttaatactgtggtttcaaggtgagatggaaaccctgggactgggagtctgagatccaactgggtgggtccttgcttgaccatgtacttgaccttgaactgttttataatcccatcaagccccagttttctaacctgcagatgatgggccaagactaaatgatctctaagtttcagctgaactctaaccttctaattttttctttttataaaacccttcaagatatgcaatggatggaaagatcaatggaacctcaagtgacatcactttagttcaatgcctcttctattgacctggtcaaaacctgtttctctggttgtgtgacaggggatatctacaaagagagtatatgagacttttttgcccggcccacagcctctttcctgaactctgcccttcatccccat

SEQ ID NO: 386182 - DNA, 609 bp, Homo sapiens
gcattagctgaatttttttagtccaccagactaggttataaccttgatggactctctgaatatgtcatggacctcaaggcataatattgatggggactgcagatatagcgtatatctgtgtgtatgtatatatcatattgattttaattcctattcaaggggcttgatgtctatttcgtttgttggatgaaaggtactccaggttaatactgtggtttcaaggtgagatggaaaccctgggactgggagtctgagatccaactgggtgggtccttgcttgaccatgtacttgaccttgaactgttttataatcccatcaagccccagttttctaacctgcagatgatgggccaagactaaatgatctctaagtttcagctgaactctaaccttctaattttttctttttataaaacccttcaagatatgcaatggatggaaagatcaatggaacctcaagtgacatcactttagttcaatgcctcttctaytgacctggtcaaaacctgtttctctggttgtgtgacaggggatatctacaaagagagtatatgagacttttttgcccggcccacagcctctttcctgaactctgcccttcatccccat

SEQ ID NO: 386183 - DNA, 528 bp, Homo sapiens
agtttctttacttacactttcttcttctcccattcactccttacattactgcctgagttatgttttaagagacatctttttaaagacacatttggaagaatgcattaacgtctccattttttcacctctccctgaacctacaccctttgcctcagcctttgcagttcctaccgaaaagagggaggatattactcacaccttgattttgggactgaccatgtgacttgttttagccatcagaatggggtgaaagtgatgatgtgttagttcccagcctaggctttaagaagcctagggacattccctcttgcttacgtgtgcttctgctattgctaggagaggaagataccttggctagtccacgggttctagaaaaaagatgagagacacatggagcaaaacctccctaagatgccctaactaaccytggcctagagcagagctccagtcaaccagcagatgcatgagtgagcccagctgagactagattagccaacagccttgagcagtgtcccagctgatttgtaa

SEQ ID NO: 386184 - DNA, 522 bp, Homo sapiens
gcagttgtaagaaataatacgaagagatcccatgtaccatttacctcattttcctcaatggtaacatcttgtaaaatgacagtacaatatcacaaccagtatatgagaatctatacagtcaaaatagccaacacttccgtcatcaccacatgaaatccctcatgttccctattgcagccacaacaatttcctgccttcatcccaccattaacccctagaaaccactaatctgttttccatttctataattttgtcatttctagattttgtatcagtgaaatcatrcagtgtgaaacaatgagattagcttttgtcactcagcgtaattctcaggaaattcatccacattgttgcatgtatcaacagttctctcctttttattgctgaatagtataccatggtatggatgtattatagtttgtttaatcattcaccctttgaagaacaagaacatctaggttgtttccagtttttggctattacgaataaaactgctataaacatttatatacaggtttttgt

SEQ ID NO: 386185 - DNA, 641 bp, Homo sapiens
cccctgtacaaaaatcaactgaaaatggatcaaaaacctaaatggaagacctaaaactataaaactactagaataaaacataggagaaatgcttcagagttttgatctgggaaaagattttatgaataaaactttaaaagcatagacaacaaaagaaaaaataaacaaatgggattatatcaaactaaagtttctgcacaacaaaggaaacaatcaataaagtgaaaagacaacctacagagtgggaggaaatatttggaaactctccatccaacaggggattaatatccagaatatgtaatgaactcaaacatctcaacagcaaaaatccaaacaatccaattaaaaaataggcaaataatttgaacagacatttctcaaaagaaaacacacagatggccaacaggtgtatgaaaaaatcctcrgtatcactaatcatcagggaattgcaaatcaaaaccacaatgaagtattatctcatcccagttagaagggctattatcaaagacaaaaaataacaaatgttggtgaggatgtggagaaaagggtgctcttatatgcttttggtgggaacataaactagtagagtcactatggagaacaatacagaggttccttaaaacactaaaattagaactacc

SEQ ID NO: 386186 - DNA, 540 bp, Homo sapiens
ttatgggtcaattttaaaaattaataaaaaataaatttagttgttctgctgtatgatcttggataagagcagagtgggattttgaagtcagatacacttgtttttgaatcccaacactgtgactttaagaatttactcacttctgcatctctcatttctgatagaaaatagagacaatgagaatccctaccttaacagatattaagatggttaactgggcagcaaaatggcatatccggtatagtgcctggcaccaacaataatagcttccttcccactttgggacagcacagagtacatgattctctgctacgtgaaagctcatctgacatctctatttagagggagggagagaacyaagccgagctccaaccaggcctcttccttgtccagtcctgatcctgaccctgcagtcctgaatcaactgtctccttcccagctcatttgatggaacattacaattttaaattgtcagtcatcagcacatttaaatgtcccaggactagaaaaacaccagaaggaattattgaaagctttatt

SEQ ID NO: 386187 - DNA, 540 bp, Homo sapiens
ttatgggtcaattttaaaaattaataaaaaataaatttagttgttctgctgtatgatcttggataagagcagagtgggattttgaagtcagatacacttgtttttgaatcccaacactgtgactttaagaatttactcacttctgcatctctcatttctgatagaaaatagagacaatgagaatccctaccttaacagatattaagatggttaactgggcagcaaaatggcatatccggtatagtgcctggcaccaacaataatagcttccttcccactttgggacagcacagagtacatgattctctgctacgtgaaagctcatctgacatctctatttagagggagggagagaaccaagccgagctccaaccaggcctcttccttgtccrgtcctgatcctgaccctgcagtcctgaatcaactgtctccttcccagctcatttgatggaacattacaattttaaattgtcagtcatcagcacatttaaatgtcccaggactagaaaaacaccagaaggaattattgaaagctttatt

SEQ ID NO: 386188 - DNA, 547 bp, Homo sapiens
aatagaaagggaatttaattcacttttctctgtctattttatgccaagaggacaataataaacagggatatagaatgcctaagtaattaatgagacagacrtgattaatccatgtaactgaagaacacagaataagttttttgttttttcaaaagctgtgaaaacattcatagaaagtgatcatatattaactcataaagaaatatttaataaattccaaaaaatagacatagtatggataacattgtgtaactataattcattaaaactaaacactgataacaaaagagaaagcaaaaactccttccatctggaaattataaaggatctcttaatgctcagagaggaaatacaaataaaaatggaagattgttttaggaaaaaacagtaatgcaagtactctttatcagaatttgtgggataatatgggttgagttgtgtacccaaatcatatgttgaagtcctaaccctcattatctcaaactgtaatcttatttggagataaggtctttacagaggtaatcgagttaaaatgaagtcattagaa

SEQ ID NO: 386189 - DNA, 607 bp, Homo sapiens
ttttgtttctgattttacatatttgggtattttctcctttttcttggttaatatagctaatgatttctcaattttgtttgtccttttcaaaaaaattcttgttttggtgatctttggaatttttggctcatttcatttatttctgctacaatctttggtatttatttctttccactaaatttggggttgggcttattctttcttttctagttccttgagatgcatcattaggttgtttagttaaagtctttctaatttttttatgtagacattcattgctataaatttgtctcttaataatgctttttctgtgtctcatacattttgagatgttgtgtcttattttcatttgtttcaaggatttttaaaattttatccttaattttctccttcatccattggtcattcaggagcatgtttaatttctatgtattagtatagtttaamatgttcctctattgttgatttccagttttagtccattgtgttcagattagatacttggtatgattttgattttttaaaaaaatttgtgatacttggattgtgtcctaacatatagtcaatcctggaaaatattcattcctacttttcattggagtgtgtt

SEQ ID NO: 386190 - DNA, 611 bp, Homo sapiens
taaaattggaagcagccatactgcagtagcaaatctaggcattttatttaccaagatatttgagttatagccctaagttttataaactcaaggtgaagtggagaagaaaagttataatttattgaatacttactatatactaggcactgtgctaagtaagcctgygagtacacataactgcattgagacctcccagcacccctatgagtagttcttcttaacatccacattttacagattgtaagattgaggcccaaagaagttaaaataacttgacaaaagccacacagataaaaagcagaagagctaagattcagtcaagatagaaccccaaagtcatacccaaataattataataaagtaataagtggcataccacagaaacagcagaagacgtgagaaagggagtggagatcaggtaagctttcacacagaaggtagcaaataggctgggctttaaagcatgggtagacatccaccaggtatttgagttggtggaaaatgcatgtgccgtgccctaatgaaagaaaagggttctgtccagaagaatcagagggttgaatgtcatgggattatagggcatgcagcagaaagtgatgagaaatcactgc

SEQ ID NO: 386191 - DNA, 611 bp, Homo sapiens
taaaattggaagcagccatactgcagtagcaaatctaggcattttatttaccaagatatttgagttatagccctaagttttataaactcaaggtgaagtggagaagaaaagttataatttattgaatacttactatatactaggcactgtgctaagtaagcctgcgagtacacataactgcattgagacctcccagcacccctatgagtagttcttcttaacatccacattttacagattgtaagattgaggcccaaagaagttaaaataacttgacaaaagccacacagataaaaagcagaagagctaagattcagtcaagatagaaccccaaagtcatacccaaataattataataaagtaataagtggcataccacagaaacagcagaakacgtgagaaagggagtggagatcaggtaagctttcacacagaaggtagcaaataggctgggctttaaagcatgggtagacatccaccaggtatttgagttggtggaaaatgcatgtgccgtgccctaatgaaagaaaagggttctgtccagaagaatcagagggttgaatgtcatgggattatagggcatgcagcagaaagtgatgagaaatcactgc

SEQ ID NO: 386192 - DNA, 611 bp, Homo sapiens
taaaattggaagcagccatactgcagtagcaaatctaggcattttatttaccaagatatttgagttatagccctaagttttataaactcaaggtgaagtggagaagaaaagttataatttattgaatacttactatatactaggcactgtgctaagtaagcctgcgagtacacataactgcattgagacctcccagcacccctatgagtagttcttcttaacatccacattttacagattgtaagattgaggcccaaagaagttaaaataacttgacaaaagccacacagataaaaagcagaagagctaagattcagtcaagatagaaccccaaagtcatacccaaataattataataaagtaataagtggcataccacagaaacagcagaagacgtgagaaagggagtggagatcaggtaagctttcacacagaaggtagcaaataggctgggctttaaagcatgggtagacatccaccaggtatttgagttggtggaaaatgsatgtgccgtgccctaatgaaagaaaagggttctgtccagaagaatcagagggttgaatgtcatgggattatagggcatgcagcagaaagtgatgagaaatcactgc

SEQ ID NO: 386193 - DNA, 611 bp, Homo sapiens
taaaattggaagcagccatactgcagtagcaaatctaggcattttatttaccaagatatttgagttatagccctaagttttataaactcaaggtgaagtggagaagaaaagttataatttattgaatacttactatatactaggcactgtgctaagtaagcctgcgagtacacataactgcattgagacctcccagcacccctatgagtagttcttcttaacatccacattttacagattgtaagattgaggcccaaagaagttaaaataacttgacaaaagccacacagataaaaagcagaagagctaagattcagtcaagatagaaccccaaagtcatacccaaataattataataaagtaataagtggcataccacagaaacagcagaagacgtgagaaagggagtggagatcaggtaagctttcacacagaaggtagcaaataggctgggctttaaagcatgggtagacatccaccaggtatttgagttggtggaaaatgcatgtgccgtgccctaatgaaagraaagggttctgtccagaagaatcagagggttgaatgtcatgggattatagggcatgcagcagaaagtgatgagaaatcactgc

SEQ ID NO: 386194 - DNA, 609 bp, Homo sapiens
aagctttcacacagaaggtagcaaataggctgggctttaaagcatgggtagacatccaccaggtatttgagttggtggaaaatgcatgtgccgtgccctaatgaaagaaaagggttctgtccagaagaatcagagggttgaatgtcatgggattatagggcatgcagcagaaagtgatgagaaatcactgcccttaagaaggaggaggctgtggcaggtgacggaaagccctgttaccataaaagaaagcttaggctttgcttttagggactgrggagccctaagcaagatgtggtctgattgaacttgagatctagaaagaacagtttggtggcaaagtggagaagacaggcttgatcatggaggccaagggactaaacaaaaaagtctcaggacaagcaggtactgccaacccaagaagaaggccaggagggcccatgtgaatggaagagtgtaagttgagtctgaagtggtctcagctaccactgatcaattctggcaggcactaccatgttggagaatgggcctagaaatagagactttaaaatctttaaattttttaatatcttgattttttaaaatcaagtattcctttcaattcttgctatc

SEQ ID NO: 386195 - DNA, 375 bp, Homo sapiens
gtaggtgtagactaactctttatctgttttgtaaataaagttttatcggaacacagacacacccgttcatttacatatggtctatggttactttcaaaccagtgacacagttgagtacttgcaacagagattgcatagcccataaagcctgaaatatttactctctgtcactggatcagccatttgacattttgtggcaaattgtctgaaggatcctactggttctcatggrgttcactgcaaatattagtgactcttaaaatctatagctttatttggacctctttccaaagctcaaaaatcataatttcaacattctgggggcatctccacctgctgtcccaatattctacaggatttccaagctcaatatcc

SEQ ID NO: 386196 - DNA, 574 bp, Homo sapiens
tacaacagtaaaattgaatcccccttcccggaagaaatgtaagcccttgtaacagatgagaaatctaaaccttcgtgccctagcttaatagttttcagaaaccaacaaactccttgaaaggttgaagaggaaaggaggaaaaaactcagcttgcctctccgcttaaaggaagagtgcttcctgctggcagctgtaaacattcatggagcaccctgagggcttcaaccccagcagggcatcttgggcagggacagagccccccagagcccgggaggggccaggtctagcttccccagggccttrcccattcaccagtgggtgacaggaccacaggagacctgagtcacccttgttaatcgtgctcagatcattggcccattacaaatctccctcaaccggaataaaatgtggcctctaaaaggatgtagacaaaggcagcagctcacatcagaacagcatttataaaatgagcccaggtgaaaagcccagaacccatgcccaacacaggatgataacagagatgtaaaacatatttaaggaggaattaagattgaaaagaaaaatgaacacaact

SEQ ID NO: 386197 - DNA, 574 bp, Homo sapiens
tacaacagtaaaattgaatcccccttcccggaagaaatgtaagcccttgtaacagatgagaaatctaaaccttcgtgccctagcttaatagttttcagaaaccaacaaactccttgaaaggttgaagaggaaaggaggaaaaaactcagcttgcctctccgcttaaaggaagagtgcttcctgctggcagctgtaaacattcatggagcaccctgagggcttcaaccccagcagggcatcttgggcagggacagagccccccagagcccgggaggggccaggtctagcttccccagggccttgcccattcaccagtgggtgacaggaccacaggagacctgagtcacccttgttaatcgtgctcagatcattggcccattacaaatctccctcaaccggaataaaatgtggcctctaaaaggatgtagacaaaggcrgcagctcacatcagaacagcatttataaaatgagcccaggtgaaaagcccagaacccatgcccaacacaggatgataacagagatgtaaaacatatttaaggaggaattaagattgaaaagaaaaatgaacacaact

SEQ ID NO: 386198 - DNA, 487 bp, Homo sapiens
gtcatatagagaagtacttgatgaatttttccaaagtgaatacattcctatcaccagcagccagagtcataattaggatattatcagctcctcagaagctccacacccaactgttaaattaaactaaatttggcctgaggatatctccgtacttgagtctttayataatgaactgcaaacctatcttagcaggtaagctcactgaaagcctaactcaggagtatactcttgtaacaaacagctgagtctcagccaatcacagcagccaagcttcagtcaatcacaggcgccccaccgatcaggccacgttcaaataaggcaaatgctgagctgtaaccaatggaactgcctctgtacctcactttcctattctgtccataaatgctgcctgaccccattgcaggctggaattctctgaatctgttctggttttgagggctgtctgatcattattttgtgtgcaaattgttctttgctcgacaaaact

SEQ ID NO: 386199 - DNA, 453 bp, Homo sapiens
gaggcatcccatccatccttcctgwggacacgtgaggcagggctagcgtcagtgttgagcagtcctgtgtgtgcttgtgggcctatcggcctccacatctgcaccccctgcacacctgttctcatccctgcacacctgttcccatccccgcacccacacctccctgcacacctgctctcatccctgcacacctgttcccatccccgcacccacgcctccctgcacaccggttcacattcccgcaccaacacctccctgcacacctgttcccatccccgcaccaacacctccctgcacacctgttcccatccctgcacccacacctccctgcacacctgctctcatccctgcacacctccctgcacacctgctctcatccctgcacacctgttctcatccctgcacccacacctccctgcacacctgctctcatccctgcacacctccctgcac

SEQ ID NO: 386200 - DNA, 574 bp, Homo sapiens
gtttttcttcacctgagaatctatttccccttcaatttggaaggatatttttactggatataaaatttgtggttgacacttcttttctctcaatcacttgaaaaatattgtgctactcttttctgtcctctctggtttcagataaaaaatccacaggcaattgaattgatgttctccaacaggtaaaatgttatttctctttagcttctttcaagattttttacttgtctttacttttcagaagtttgcttacaatgtgtcttagtgcagatttatctgggtttactctgagttttagtcagcttcttgaatctcttaggttatgcctttcaccatatttgggaaattttcagccactactttcttatacattttttcagaccaacacgctttttcttcattttctgacattctgacaatgtaaatattagatttctaaaatattataccacaggtcctggagctctgtttgttgttttttaaaatctattttctttctgttgtttaaattgaataatttcttttgttctatcttcaagcmaactcattatttcatctgtcatatttattctgc

SEQ ID NO: 386201 - DNA, 463 bp, Homo sapiens
gagtaattgactgtagggtgtgccatgggccctatagtctccagttgtctaaggtaacaatgtcccttgagtgaatgaagcaatcttcccagcaccctagtttagtaattccctgaaacagatttatctacatttcagaaggtgccctgtaccacctgactcagctgggtgcatttgaccagttttgcccccatctgtaaatatccctcagtccccayggagctgtagaggtgagtgatgaagcagtgacagctctgggtaggaactcagcttaatttcaagttccagaccctctccatcctcaggttcttcttctgtaaaatgaagatccctttgcggtgaaacgttttgcagctctggaatctgagggtgtaggaggagctacagaagaggggtataggactcacctgaataaaggtggcatctgtgattactgtgggcgagggtgagagggaagaggata

SEQ ID NO: 386202 - DNA, 463 bp, Homo sapiens
gagtaattgactgtagggtgtgccatgggccctatagtctccagttgtctaaggtaacaatgtcccttgagtgaatgaagcaatcttcccagcaccctagtttagtaattccctgaaacagatttatctacatttcagaaggtgccctgtaccacctgactcagctgggtgcatttgaccagttttgcccccatctgtaaatatccctcagtccccatggagctgtagaggtgagtgatgaagcagtgacagctctgggtaggaactcagctyaatttcaagttccagaccctctccatcctcaggttcttcttctgtaaaatgaagatccctttgcggtgaaacgttttgcagctctggaatctgagggtgtaggaggagctacagaagaggggtataggactcacctgaataaaggtggcatctgtgattactgtgggcgagggtgagagggaagaggata

SEQ ID NO: 386203 - DNA, 532 bp, Homo sapiens
tatctgatggtctctgcaggtccccactgcgggtgtttgttgtatttagtttaataagtatgtatatagtgctttttattacttatacatgtgtgtgtttaattctcataacaaccacataaggttagtaatatttttatcttcatattatagagaaggaaactgagatgcaggagagtttacaatacttgcctaaggttaccagcaactggtgtaagaggtagcagactcwggatttaaactcaagctgtttgtctctggaacaccatttctttttccatattaaaataacataagaaatgagggatctggatttagctccatgaaggcctcgtgaagtctttctgttccactttgcaagcttctttctttaagatctcatggtccaagaaggctgctggagctccatccattgcatccacattccaggcagaaaaaaagtggtaatgggaggagaaagataaaagtcaggcttatcagatgagtcaactctttgagatattttcttggaagacctacacaataaatagtt

SEQ ID NO: 386204 - DNA, 512 bp, Homo sapiens
tttaagacccagcctcagaaattatgcagtaatgcttccaccacatcccatgggtcaaaggaagtctcagaatgatcccaagttcaagaaaccaccttctaatgagagaaacagcatagaatttgggtctctccaccacaatgctcatacagaaccctccaaagccactaccactgccaggaatgaccctgtccaccagcttgagtcctttctctctctgcattagagattttcatgggaagcaccagactaaagaatcactcattattgcatcggctctagcactatttccccacaggaccccaagccttttcaactctgaaagcctgtaccatagatttcaccacctataccctgctgcacctgctcttgtttagcaaattccctcccatgactgtgagtttctgccctctcttttttgcattcagtcgacctcttaccccctgcccccaccactgtygcagtgtctcttaaaactgtgcattacttacttagacttagtcccctgatag

SEQ ID NO: 386205 - DNA, 519 bp, Homo sapiens
cagccctgagcaggcgagggccgggaggtggatctctctgaaagtgaccgtagtggtgccatgaagagtggggccaggaaaaacaagctcgggccatccccaagagatgggctcggcccccaccctgcacgccatgtccctagcttacctctttctttccctccctaaaattctgattttgttttattttaacccaaagcagataatctagctcctctcagcctgtcagcattcgctgcctgggaggttttcctggggtccatggggcctgaggggtgggaagggcaggagctgctgggaatgagttgcaatcaggcctgaaacccatatcstggaagcaggtggccctagactcgcctgccttccctgcacatgcccgggagtcggttcttccagtagcccctccttctgcacttccccttcccttccctccatcctggagcctttcagatgacaaagccagtagagtcctcagtgccccgcctctgccactcgctcctgaacctgtagggtcccaga

SEQ ID NO: 386206 - DNA, 402 bp, Homo sapiens
ccatctccctggtttgatactcagaattgccacttgcaggtcctatgaccccagcaagtgccttaattgccgtgggcctcagtattcttgctataaaaaagcaccttccttgtaggttgttrgggagggttaaatgaattaacacatgcaaagcccttgaagcaatgccagcaaataggaaggctgtcagggggttggcccttgttatgtttctggaggggaagcagcccttttgtaactgtgaggacacacacaccagaacgcagcagagaaaaagtgcagggccctgatcacgtggctaagcagttgcaccctctgtgaactcccttgaactccctacctccagattcctgttggaacagacaaaaggcttgttagttagaacctcttattagttagatt

SEQ ID NO: 386207 - DNA, 540 bp, Homo sapiens
ttgcccagcccctttcagacaaaaggaagagcgcggtggggatgatcagagggaaccctgactcaattcatggtgtgcgtgcgtgcgtgcgtgcgtgtgtgtgtgtgtgtgtgtgtgtgtgtgattgattgattgatttttaactagaggggaaaaattcctaagaaaatgggcaaaaattacagattgtcccatttttgtccagtattatcattggaaagggaggaagatgaagaaagagccagtgtttgtggagtttgtttcaggctagaaatagaaaaaggctgcagttgattaaggaggtggccagagaagcaaagtttgttgaacgctgaagatcaccttgtaaaggtggagttcctcaggctttactccsggagccctccctggggagcaagagaaggcagggtcagtgctgagccatcccgggtgtgtggacctgctacgctaggtctggtctggacggtgctgatgggaccggggatgacagagccaggaggggccagaatgaaagtcgcagaaaaccagaaacaggctaca

SEQ ID NO: 386208 - DNA, 540 bp, Homo sapiens
ttgcccagcccctttcagacaaaaggaagagcgcggtggggatgatcagagggaaccctgactcaattcatggtgtgcgtgcgtgcgtgcgtgcgtgtgtgtgtgtgtgtgtgtgtgtgtgtgattgattgattgatttttaactagaggggaaaaattcctaagaaaatgggcaaaaattacagattgtcccatttttgtccagtattatcattggaaagggaggaagatgaagaaagagccagtgtttgtggagtttgtttcaggctagaaatagaaaaaggctgcagttgattaaggaggtggccagagaagcaaagtttgttgaacgctgaagatcaccttgtaaaggtggagttcctcaggctttactccgggagccctccctggggagcaagagaaggcagggtcagtgctgagccatcccgggtgtgtggacctgctacgctaggtctggtctggacggtgctgwtgggaccggggatgacagagccaggaggggccagaatgaaagtcgcagaaaaccagaaacaggctaca

SEQ ID NO: 386209 - DNA, 577 bp, Homo sapiens
tgagacatgtttcactctcctatatttcagttacttgctaaggatcaaagcataaataatatttaagattcaagaagagatcctggggaccttcgaaaaatatagggctacattttaatttattgtccaaggtcatgtagatttactagaaacagagtaatcctcatccagtagtctttaaccagaaacctccataacttcttccttgatggcaaatagaacttcacacaataaaggcaaataagggatactttctcagcctcccttgaagtaaggcatattcacattaacatgtgaaaaggattttagaaattctgttgtagagaaaacattctgatgaagtttaacccaagttttctcacaattaatggatcaagaaacaccattgtcatatgacaccaataaatatcccacaaaactgagattctggatttcaccctttgaaaaagattgttgtcaatccatgagatgataggagcaaaatcacactaaggtgcaaaaaccacatacacatctaktttaaaatccaaataatttaaacatcttaagttgtcactgtgtactaaatttttacaaa

SEQ ID NO: 386210 - DNA, 540 bp, Homo sapiens
aaattatcaagagttgaaaggaaaagacagtatccctctggcaccctgatctatgtcttgctttggtggttgggaaagagggactggcataatgagaacaaacacaatctatgtcaccaggagtattagtgtgaaaaggagatcggagccagctattcagggatatttaactaacattttccagggagctcgagtcttttcagagattcwgttgctaagtagttgtgtatagatttatttcatatcacactggcttttataatctcatgtgtccaagttgaacagtaaaacgtctttaaaaatcaagcactctataaaagggatcttttgtggggaagtttttgcttaattattgatcattgaatatttcatcttcagcatttaaaaggaatcctagagttattgaagtctgaccttctgtttgtaggtcagttgcctgagaacccaagaggttttctgaaaaatagttatttcacttttggaaatcagataggaggctataacaaagcctgcctctggccttgcactctttgaattcag

SEQ ID NO: 386211 - DNA, 474 bp, Homo sapiens
atttcctgtttcctgttggttgttttgggcatgtgtctatgtctttgctttgaaggattgaagttatgtattccagttttctttatctgccttgttttgttcttttattgggtatatttgcttggcgaatctttgacgctatgtcactgcctttttggctctagattgtgcctgtagcccagattcacctcagatttagtaagtgatcaaagtgctacttgtcctgaatgggggtggtcccaaagggattattccagcagtacagggagacygtctagggctttatgcccaggggacctatggaaagaacctcctacactgtggtgctgctgaacagccactctgatgtacatctactttggccaaattacggagcaaatttttcaagaccagcatgctagtcttgctcctcactttgactctgtctgtccccagggaaacgtcttccttcaggcagtcacagtgttgcccagg

SEQ ID NO: 386212 - DNA, 474 bp, Homo sapiens
atttcctgtttcctgttggttgttttgggcatgtgtctatgtctttgctttgaaggattgaagttatgtattccagttttctttatctgccttgttttgttcttttattgggtatatttgcttggcgaatctttgacgctatgtcactgcctttttggctctagattgtgcctgtagcccagattcacctcagatttagtaagtgatcaaagtgctacttgtcctgaatgggggtggtcccaaagggattattccagcagtacagggagactgtctagggctttatgcccaggggacctatggaaagaacctcctacactgtggtgctgctgaacagccactctgatgtacatctactttggccaaattacggagcaaawttttcaagaccagcatgctagtcttgctcctcactttgactctgtctgtccccagggaaacgtcttccttcaggcagtcacagtgttgcccagg

SEQ ID NO: 386213 - DNA, 531 bp, Homo sapiens
ggttgatagggtgatatcaagatcccttgaggcaaaggttgatagggtgatatcaagatcccttgaggcacttcagataaatctgagatttaggagtggtaataatcaaacactttggttagcatgttgttccattcacatggattctgactrtctctttctttcagatctgagcagaggcaattaggtagagtggatgaaatgactattaggacaagtaaagaaaaaatacaaaatgcatgaagaaatggagtaagacaggaagaaattagaagaaggatgtcagggagggtgtcataggatcattcagagaaagaagaaaatacaacgtatgacaattcagtagccctctaaccatccagaaggaaaacggaaaacaaccagcacttgggcctctcctccccttgattggctcaagagaggcactgctgactgatcatgtcgctattacctactaggccaagaacacatctcaattaatattcaattagttttctcatgcagatgaaattcagtttgcataggtcatgt

SEQ ID NO: 386214 - DNA, 593 bp, Homo sapiens
gtgcatatgtgtgctttctttgtgatttttcattttagtattcttccaatgcgcacaagctaattttttgctgctctcaatgcaaaattaagaataactttttacagttctttcattatgtttctaggctatatctaatttccctctttagaattttcttccaggtttgttgctgcttttgtttttccccatgtatttggatgttgattgcttctagggaacatcccctctgcttaccagcacaattaagccttccctgacactatggtcggtaatttgcctatgaccataaagccataaagccactgcagatcatctgtcttcttccttcaaggtcaaatggcaatctatacaaactgtcactgcctgcacaattccagtcataccaagctgaaatttgtctcacgccttcgctgacattgttccaygttttcactgttggaagcctatggtttaccttatcctaaatgatctttctgcagcatttgacacagctcactagctcctacttgtagaaaacaacagatctgaaatctttgtcataaatattgttgtaaacactgtttgttttaaatatgcaataagtaatttgg

SEQ ID NO: 386215 - DNA, 589 bp, Homo sapiens
atcccatggcacgcaaagccccaaatagtcagactcttccacatttttccagcgacaggtgcagtttgatcattgtcttactctgcttcagccatacttttttgtttttccgatttgtacacctgttccatgctctctttctcagggggccttctcacatactgtttttgtctttctgaaaawatcataactaaacttttcacctaaataagttatcttaattttatttagaccttatcttacttttcactttctcaggtgttagtccaagctgcaccattttgtaaggcccccaccatttcacagaccctggtcagagtgaaacattccacaggggtttgggctgtgagaaacatctttcctaacaacctgatcacagccacaggaacatccttttttatttttatttttatttgttttgagatggagtttctctcttgtcacccaggctggagtgcaatggcacgatctcagctcattgcaacctccgcctcccaggttcaagcaaccctcctgcctcagtctcccaagtctctgggattacaggtgcctgccaccatagccggctaatttttgtacttttagtaaa

SEQ ID NO: 386216 - DNA, 533 bp, Homo sapiens
ctctggtgagaatttgcttaagaaatgaatccatcactcaacacaaggaaacttaaaacaacaacaaaaatatcttgcattatagtaactaggacagacagcaagtagtgattcacaggaagtatttatttgatgctaaaggaggcattttaaatgtagacttactttggaagttagtatttccagcaccaaagagaagctaaataaaaaggctccagtacaccayacctgggcagagtgatgcatagagatagggaagaagattagccaaagattgcagcagcctaagaatgaaggcagacaaaaaaaactcaaaaccacatagaatgaggcattctcttagaaataagtgattagcagtatttttcagaacacattagaataagactgaatatccttaactcacagaaaatagactctcaaggtaaattatgaaaatgtgctaaaataatatagactttgaaattaatggattttggtacgaatactagcttcatttttaggagtggtgtggatttgatcaaattatttaa

SEQ ID NO: 386217 - DNA, 533 bp, Homo sapiens
ctctggtgagaatttgcttaagaaatgaatccatcactcaacacaaggaaacttaaaacaacaacaaaaatatcttgcattatagtaactaggacagacagcaagtagtgattcacaggaagtatttatttgatgctaaaggaggcattttaaatgtagacttactttggaagttagtatttccagcaccaaagagaagctaaataaaaaggctccagtacaccacacctgggcagagtgatgcatagagatagggaagaagattagccaaagattgcagcagcctaagaatgaaggcagacaaaaaaaactcaaaaccacatagaatgagscattctcttagaaataagtgattagcagtatttttcagaacacattagaataagactgaatatccttaactcacagaaaatagactctcaaggtaaattatgaaaatgtgctaaaataatatagactttgaaattaatggattttggtacgaatactagcttcatttttaggagtggtgtggatttgatcaaattatttaa

SEQ ID NO: 386218 - DNA, 607 bp, Homo sapiens
gattagcagtatttttcagaacacattagaataagactgaatatccttaactcacagaaaatagactctcaaggtaaattatgaaaatgtgctaaaataatatagactttgaaattaatggattttggtacgaatactagcttcatttttaggagtggtgtggatttgatcaaattawttaatgtctctgagttcatttctttgcattgaaatggagatgataatatctaattcagagttattgtggagattaaatgagatattgcatgtataactttgtgccacatgcctaaaacatcaataatgtacactaaatattgactgttattcatatcgtagtaagagactgagtaataacagaaaatttatgccaataactgttttgtaccaaaaatatactatatttgcacaagagacaatgagtagaaagaaggaaaagaggaaaccaaagagaatcttgatagagaaattttatttttgttggtcatttttggatggaagtagaaatataccagccatgaagtaaaatctgaatattgtcagggaagttttcacagaggagccctaaaaaggcataagcacaaacctggaaaacaaggtacaatta

SEQ ID NO: 386219 - DNA, 533 bp, Homo sapiens
actgtattttaaatgtcgtcctcccctcactagttgactcttagagaaaagggcacaatggactaattgagcactgcttacttactaggcaagcataggtaatataggtgccaaggggctacattgatacaaactggagaaaggagcttgagaatcttcccagcaccgtatagggcttatggcttcttgtgtgttatgtcactaaatatcttaccacccaatagcaggaaaattaactggatattttccatttgctcttccaaattctattcttcatccttctctatcctgtttcgtgcccccaagaagctaaactgcatgtactgcctcatgggcacccttacccrctagcttctgagtttgggtaattcagaatgccaggagattagagtgagggaagagagtaaggttgagatattagatattcagcttccacttaaccagtcactttggcaaaatccttttgtgaaaggctgctgctctgggtacgtggtcctctccacacacctactcactccctgctcacattaagt

SEQ ID NO: 386220 - DNA, 557 bp, Homo sapiens
tgacctatattggactggcaaagcttaatatcaagcaaacagccagtgtgggagctggttttgtcctaccttgctgctggtatttgcagaaaagtaccacatattatgtgtggacagtgagagcagtttgaaagtcaattacagtttttaaaaattggaatcatttgctcatcgagctcatcagagttttgaacaagtccctggccttcctcacaacagccaaagccaggtcttttggaaaacattttattttcatgctcagcgtaataagaagagaaaagtcgtgttttgcagatgaaatggtgctgataataaaaagtaggtcacactttctctctctgtctccatcactctttactttctctgaaagacaaaggagtgtttccaagacatgaatcaagcaggtcaggtacctgacctggrtgttctttgcactctgagtaaaattaggaacattttcactcaaagctgacatttaacaagggcagggaacttggaaacaataactgctttctacgtgactgacaaggagggctgggttggggatgcaggcagca

SEQ ID NO: 386221 - DNA, 580 bp, Homo sapiens
ctctgtctcttggcaaaatgatatacattgatcaggcaagaaacccagctccaggccctgctaggcaacaaagtcaatgaacttccatgttccaagccaaaaggtcagggaaggtgcatgtttccacccatgacataatgcaaaagacagtgaggaagcctcagcttttgggagggtgtaagagagcgtgggctttggagttcatggacagagtttccaaccccagctagggcactcaatcactgtgtgcatctgagcctccacctgtgaatacttcagagacaggcgggggaacgtgggtgcaggttaaccaagagcaagcaggtgcaggcacctggaacatggtagctagagagttaatcagtttccctccaaaatttgtggaacataaagagtaggatagaaggtatatacattttacatttcgcamccattttgcagaaccagggtgaacttcccattcatttccacacaagaaaccaccaagactcttagagaggagaaagcagttcccgggctcctccagtttctctaaacacgtgtgagaaaggacagagcaagcagaggttgaatgtaagtt

SEQ ID NO: 386222 - DNA, 593 bp, Homo sapiens
agggggtggggttgcttttaaactttgtttgaaaaatggagcttgctgccatcatatcatcatcaaaaatggaacttgtctatccacaaatatttatttaaaagtcagactaatggcagaatggaaagaatcccagctttggagttaaaatatctcacttaaaacttgtcttcgctgcaggctacttggttgtacttgagtaatttactcaagattctcttcagcccagtttcctatctgtaaaatccttccactgttgttaggaggatargaaagccagtattggtaaaaacatatatcagagtccttttgactgtttagaaagtgttaatttactccacgattatccattcaacatttattagttggcttctgtgtgggagagtaaccattaataccttgaataagtttataatctggtcattctgtagagcttcctatatgatgtcttctgtttaagtatttctgtaataccttatagacatctcttttagactactagtgattgttggtgtcaacatatgtgtgaaaatgcatatatcctttattaggctctagcacacagtgtgctctcaatgtttgtcttttcaaat

SEQ ID NO: 386223 - DNA, 608 bp, Homo sapiens
gaaaaaggattattgtttattcatcttataagccaccctcttgaaaagttacggcctttatagccagtataatctgtattacactgaggtaacagaataaaaagcaaattccttctgttgggccttgccttatccagtaatagtgttcagctttgactttttttgtaggtcacataattgagtccagtattcttaaataacaccttgtctttatatcgataagcatttaaaatattcgatttattgttactcttgtaccttcattgtactggaagaagaattttctctcaaagaagaattttctctctcattccataaaacccaagttgcagagaaaaatatgtagacattcaattgcagakaaatgtgtcattttctgtaactttaaactgtatattgaatgaattcagcaatgttttcattttcattttggctttttggcaaatattaacaggctcaagtttgtccatgtactatcatctatgtaaaaatctcaaaacattcttataataatcatttgaaatatatatagtgtaatgttaaatttatgtctgagaccacatttattttttcactttttgtatttagttctttacacatgacctaac

SEQ ID NO: 386224 - DNA, 576 bp, Homo sapiens
tgatactgatatttaaaaattattaagtggaactaatagttatgtttagaaaataatatatttccaaatgtactaattaatcatttataattatttatagaaacaatactttatcattacatgtgctttcctcaaaatagtatattaaaaattaaaaagttgattttatgtaattataggtagtatttgatatgtcatatataaaagtttatatgactaaaattgtgtttaagggccaggcacggtggcttatgcctgtaatcccagcactttgggaggccgaggtgggtggattacgaggtcaagagatagatcgagaccatcctggccaacatggtgaaaccccgtctctactaaaagtacagaaatttgttgggtgtggtggcgtgtgcctgtcrtcccaggtactctggaggctgaggcaggagaatcgcttgaacccaggaggcggaggttgcagtgagccgagatggcaccactgcattccagcctggtgacagagccagactccgtctcaaaaaaaaaaaaaaattgtgtttaagtttttagctctttaatgggcagatgtttagacaa

SEQ ID NO: 386225 - DNA, 534 bp, Homo sapiens
tctcttttttctgtttgataaatatatgtaaacgctgccaaagagaagtatggtagaaacatagaataattataagctgaattttcatattaatatagaacacgcactaataattgcctcatatttgcttttyattaggaaaaacaaaaagatttactaatttcaacatacaaattaatgtcaagatacagaatcttttgtaaatctcaatatacattttacattgagtaacccagtcatattaattgtggtaatagtaatgtgatacattactattagaaatgagtaatagtaatgtgatgcattactattagaaaggagtaatgaggaagctgggtggcaaaaagacacgaagtcatttagagaaatcccggaagctctccagcaaaggctgggaaagttgcccagtgagcccttcactcacaatagaggaagaataggtcagagattggcaggtgccaagggaaggacaacattgtatttaaaccacaatattgacataataattaagctttccaaataggatatttgttt

SEQ ID NO: 386226 - DNA, 614 bp, Homo sapiens
atgaacttttatctctgtctccattcctagacaaatctagaaaaactgcttatcataagatagacttttgtcagataatataataaattctcagggttgcaacttcttggatagatatttctcttttggagttacaaaaacgtcctatcatgtcaaccattctatataccagcaatgttatgtgactgtgacttaacattcggtttttcattttattcatttggaaaaatattatataataactatcctgttgacttaataagatraatgtttgacataaacactgcaattacttcatgaaaaagataatgatgttcttctagacaaaaaatatatgtgtccatgaccaaataacagctctgtttcttgaacagattttcctggaaaatcacaagccacctactcagaacatggagcaccatacgcattactttttaaaagttaaatttgctgagattttctgattctcctacctcactgcgaactctcagtactaacagttaataagataattttgatctattttggccctttttactatctgcgaaatctttccttgcactgcctcttcatcttttatatctggattgaaactgaccgtgatattgtccata

SEQ ID NO: 386227 - DNA, 606 bp, Homo sapiens
agaataatttaaattatttttgtatgtaagacaacattttaagactataaaataaatagaaggtaatcatttaattttttttcactaacagtggcagagttaatgcacwgtcaagaattgccaggctcagatctaggagagaaaaggcatttacagagataggagctgcttttgccctggagtcgtttgttattttagataggacatctaaccagtttagtgaaactttggctaaagacttgaaaacctaaggaagcaagagttggaaattaggtccaataagttgtgaggacccggtttgggcaaagatactaaaagttattagtatactaaattagtaaaagggaatcagaattcaagcaatttaccatatgcaggctggctgttattcacctgagtggcccagaaaatttcaaactctgaatttttattaacgtaattcagaattttgactgcccttatccttttggcaaaaacaattgacaatcatttgagagaaaacattattcaggcatctaaagacagaccaaatcagtttttcatataccacattttgtacatccactcaaagaaatgaggttcgatgaagagaagacactgtgagaa

SEQ ID NO: 386228 - DNA, 606 bp, Homo sapiens
agaataatttaaattatttttgtatgtaagacaacattttaagactataaaataaatagaaggtaatcatttaattttttttcactaacagtggcagagttaatgcacagtcaagaattgccaggctcagatctaggagagaaaaggcatttacagagataggagctgcttttgccctggagtcgtttgttattttagataggacatctaaccagtttagtgaaactttggctaaagacttgaaaacctaaggaagcaagagttggaaattaggtccaataagttgtgaggacccggtttgggcaaagatactaaaagttattagtatactaaattagtaaaagggaatcagaattcaagcaatttaccayatgcaggctggctgttattcacctgagtggcccagaaaatttcaaactctgaatttttattaacgtaattcagaattttgactgcccttatccttttggcaaaaacaattgacaatcatttgagagaaaacattattcaggcatctaaagacagaccaaatcagtttttcatataccacattttgtacatccactcaaagaaatgaggttcgatgaagagaagacactgtgagaa

SEQ ID NO: 386229 - DNA, 445 bp, Homo sapiens
gagtcactgaggatatgtaataaaatctaatataaattgaagacaagtgatgaaaataatgacacagaaaatattaaaagctaattgctaagaattttctaaaattaatgaaatatattaacctacaatttcaggacagcaaattccccgtaatgaaactgcagagaaccaagaacaaatagaagtgaatacagcctcaatgtggtctaagaaactaaccactagccaagaattttctgtacaacaaaaatatattttaaaaataaatataacattaaaatattttcagacaaataaaaactaatataattttttaatgagcagatacaccctaaamaaattccaaagactattaattaagaaagaagaaaaaggaaaatggtcatgagcaaatcttttcaaagatgtagggatgaatggagagcagcaagaatgataaatatta

SEQ ID NO: 386230 - DNA, 524 bp, Homo sapiens
atattaagacaataaaacaaagaaactgactaatctaacaatgccttggaggtattaaatatacaattgaggctcaattcaagtacaagtacatgtggaaaggggtaatataattaaggtccttgcattttccagaagaatggtaaaagtaccaagaagtattaaattatgataagtcaaaaagtatattgtaatttctagtaaatcactaaaaggagagtaaaagactgtataaattccaaatcaaaaggaacaagttgaccatttaagagaaacctacattcatcaaaaaaaggcaagacatgcagataaaagggaacaaaaagcagttaacacaaataaatgaattggtaggagagtcacagtgactattaytgagggtaaattgtgattgaggaaatgctaggtaggagattctagattgttgaggatactttacttattgatttggatatttaattcataaatttttatttcataactacttttaagcattatattcatatttcattacattgttacag

SEQ ID NO: 386231 - DNA, 634 bp, Homo sapiens
gaacaattaccatcagttttccacctacccctgtttaccctacttgtgacactggaacatttttgctttgctttgtctgtggctcattgttacacttcatctagtactagaggggcactggagaaggatagggctctacttcctagttcctgagtgctcctcttagcttgttcttacggtgcatagtagccaaaagtggacatcaccttgctggggacagagcacctcacctgtggcacctcaggaagcagcttcccagtaagttttatcagtgtagtgcctcggtaatctctgctacctagaagaccacaaccataccttctccaacgaggtctagatatcaattctggtaggtcgagggttctttcagatttgtttcttccttgagtrctttcctaaagtgctagagggagcagtggcagctccctatatctgctatccctatattttttagagttctcttaccctttaatagataattccctataataattagttacattaaacttcccctattcaaattaccatgtagtttcagtctcctagttggagagtcattggtaatagtgttttccaaggctctgcattatttagttcctggtattgctctgaaattttcaactacatgctcccc

SEQ ID NO: 386232 - DNA, 634 bp, Homo sapiens
gaacaattaccatcagttttccacctacccctgtttaccctacttgtgacactggaacatttttgctttgctttgtctgtggctcattgttacacttcatctagtactagaggggcactggagaaggatagggctctacttcctagttcctgagtgctcctcttagcttgttcttacggtgcatagtagccaaaagtggacatcaccttgctggggacagagcacctcacctgtggcacctcaggaagcagcttcccagtaagttttatcagtgtagtgcctcggtaatctctgctacctagaagaccacaaccataccttctccaacgaggtctagatatcaattctggtaggtcgagggttctttcagatttgtttcttccttgagtgctttcctaaagtgctagagrgagcagtggcagctccctatatctgctatccctatattttttagagttctcttaccctttaatagataattccctataataattagttacattaaacttcccctattcaaattaccatgtagtttcagtctcctagttggagagtcattggtaatagtgttttccaaggctctgcattatttagttcctggtattgctctgaaattttcaactacatgctcccc

SEQ ID NO: 386233 - DNA, 541 bp, Homo sapiens
ttgttcatgataaaaactcaattttatttacattaacactcactctcaaactcaattcaaagtgtagttcaatttgtttatatttcagtgggcttcaggtggtctatgcttcatgacccatgagctcccatcctggtgctggggcagggaagagtcagagctccataagtggmcgcctgtggccagttttcttctttgactaaggctgaccgatgaggtctccgctggctttcatgatggcatacttcaggaggttcttctgaagtctgtgggggggcctcccctactaatgtttcttgatacagaaaatggaactctattttggcttcttgcagctattctttttcctctccagctctcatcaaatgaggtacatctgacatacaatacaatacatgcatacatacctacattcatatatgaatgcatacatggatagatttttttaaactacttaacaaaaatcagatgatcaatggaagtgaagaatatggctatatagtctttcaaggaagacacatattcactaacttggtgaatg

SEQ ID NO: 386234 - DNA, 541 bp, Homo sapiens
ttgttcatgataaaaactcaattttatttacattaacactcactctcaaactcaattcaaagtgtagttcaatttgtttatatttcagtgggcttcaggtggtctatgcttcatgacccatgagctcccatcctggtgctggggcagggaagagtcagagctccataagtggccgcctgtggccagttttcttctttgactaaggctgaccgatgagstctccgctggctttcatgatggcatacttcaggaggttcttctgaagtctgtgggggggcctcccctactaatgtttcttgatacagaaaatggaactctattttggcttcttgcagctattctttttcctctccagctctcatcaaatgaggtacatctgacatacaatacaatacatgcatacatacctacattcatatatgaatgcatacatggatagatttttttaaactacttaacaaaaatcagatgatcaatggaagtgaagaatatggctatatagtctttcaaggaagacacatattcactaacttggtgaatg

SEQ ID NO: 386235 - DNA, 584 bp, Homo sapiens
tttaattgggcaggaagttgctgaaaatacctcactgtaaatgctragcttcaatttcatagagttagaagaaataaaaatgtcatcccttcaatgattggcattgagtaaccaatcctcatctgtcaccttgcctaaacttaaatttttatagctcagttttgctgagctgtctttatttattctattcattatgtacttcaagttctttaaaaaaattactctttctgcctataatgccaattttaactttcatagcttgctaaagctttcttattcctaaagacccatcttagattacttcttttataataacttctcataagaagtatcttataagaagatacttctcttcttttgactattcaagcttaccaattactccttaactctctatctgcttcaatcatcatatttattacattacattgaaactactgtttgcatgtttgccactctcaatacacagtggactccttaaggtacagatggtgattttttcatctttgtagcctttacttaggttgtgcatattgtctcatgtatgaaaagcttcaaaaaatgtttatctaaccactaaatga

SEQ ID NO: 386236 - DNA, 602 bp, Homo sapiens
catagaacaatccttactgacagacaaactcactaaaaagaccagagacctaggtgaaagtagcatgggatccaagaaacctttattattatagtgaagattattgccaagtattaatagattattcatcaacctttattattgtaattgtttggttatagttacataattcattactaaacataaaatcatttcctggtcaatgctacagacacacacacagaaaaaaatcattgttcagctctatattccttatcatttttttgtgtgtgtgtgtgacagagttttgctctgtcacccaggctggaatgcaatggcacgatctctgcaacctctgcctcctgggttcaacctctcctcctctgtagtggctcactgcaacctctgtctcctgggttcaagcgattctcccacctcagcctctcgagtagctgggattacaggagtgcaccaccacatctggctaattatttgtatttttagtagagacaggatttcaccatgttggtcaagctggtcttgaactcctgatctgaaatgrtccacctgcctgagtctcccaaagttctgggtttacaggcatgagccactacgcctggctt

SEQ ID NO: 386237 - DNA, 628 bp, Homo sapiens
atgatataacaagtaaaactaacaaaaatgtagtaagcactaacaattatagatagaaaacacagataaatattatatacacattatatatatattatatatatatatataatatatatatatatatatatattcatccaggaaatcaaatataaattgatatttaacagtgaagggcttygtccaaaaggagtaatttgattctagatattgatatagtctaccaatcatatgtatattttcagtaaatcatatgcatatgatatatataatacatgatcatacatacataatcatatatatgtatgagggttcctgaataagagaaacaatcaccattaacagaaacatagcattattgtaatatatgtaaaattatctgaaatttcaaaaagttcttgaaaccatataagcttttaaaggatagacctagtatctgggaaaattgaactacgtagccaagagaaaaatatgtccagtaaaatgactgatctttaaatataaataaataaatagataaataaataaataaatggtttgaacgtctaggcaaaaaggctacgtcacttgtgaaagaaaaataccagatccatatcctcataggtttttcaagaagaaaatatacatg

SEQ ID NO: 386238 - DNA, 638 bp, Homo sapiens
atcacatcactgagtttatgttctactttcagaagtattcagcacctatgtagtctgcttgtggtaattcttcaaggcaaaacatagggttaaaattaaagttctgatttgtcataaatatttcttttctcatgtaaataaatatataggcagactcagtaacctttaaatatttgcatgtgatctagctatagttttatctttcaaatatatatgtatgttaatgacctttaatatttcaaaggttttagaatataacaaaatttgtcaaacatcaaaaatgatgtcattttaaaattcyatttaaatttttatgctgtaatcactgcgatcagattttatgtctctaaaaaaattaatgtagcatttgttaattctcatctgaaacatacatgtcatattttaaatctaatatgtattttaatagcatgtatgtggcatatagacatagacgaaaggatgttctctatgtttatttccacttagtgttttaaataatgacattatcataaaacatgccatgaaatgttctgacattgcgaatactcattttgaaatatgctattaaaatttaaattaatatgatttaataagtttgtaattctgccaaaggctctctcacacattctccctaagat

SEQ ID NO: 386239 - DNA, 589 bp, Homo sapiens
atggaatgtgttcatcccatgaacacacattccatttcagagcaaagacatggaattgcgtccggaatttattccttctagtgggttgttcgtctcactaacttcaagactgaagctgcagacctttgcagtgagtgttacagctcttaaaggcggcgcatccagagttgtttgttcctccaggtgggttcgtggtctcgctgacttcaggaatgaagctgcagactctcgtggtgagtattacagctcatgaaggtaatgcggacccaaagagtagcaagatttactgtgaagagcgaaagaacaaagcttccacagcgcggaagggkacccaagcaggttgccactgctggcacagtggccagcttttattcccttatttggccccacccacatcctgctaattggtccattttacagagagctgactggtccattttacagagtgatgattgatccattttacagagtgttgattggtgtgtttacaatcctttagctagacacagagcactgattggtgcttttttacagagcgctgattagtgcatttacaatcctttagctagacacagagtgctaaatggtg

SEQ ID NO: 386240 - DNA, 430 bp, Homo sapiens
aaacaaacatgagaggggtttttggccgagttaggttagaggtccactcttctacagactaagagtttattattattattattattttattttactttaagttctggtatacatgtgctgaacatacaggtttgctacataagtacacatgtgacatggtggtttgctgcacctatgaacccaacatctaggttttaagctccacatgcattaggtatttgtcctaatgctctcctcccctttgcccccaccccccaacaagccctggtgtgtgatcatcccctccctgtgtccatgtgttctcattgttcaacgcccatttatgagtgagaacatgrggtgtttgattttctgttcctctggcagtttgctgaggatgacggtttccagtttcatccatgtccctgcaatgacatgaactcattctttt

SEQ ID NO: 386241 - DNA, 462 bp, Homo sapiens
gacaactgcgataagattaatggagaaaatattaattatttcatcatatgcactatctttttccatgaaaaaaacctgagaattataaagattaacttattccccaaactcaaataaataaagtagtggctgaaatgaaacctctttgattgtgaaagatataataaaagatcacaacgtatatagacatttacaaataatggactawttcaaaatattacattgagctgagtgttagtctcaaagtaaatcatttttataacaatatatgatacatataaatataggcagaatatcatccaaacagtaaaagtgtatggtttattttgttttatattaattatggtgcttttgctgtcttgactatattcttttttttttttttttgagatggagtctcattctgtcgcccaggctggagtgcagtggcgctatctcggctcactgcaagctccgcctcct

SEQ ID NO: 386242 - DNA, 462 bp, Homo sapiens
gacaactgcgataagattaatggagaaaatattaattatttcatcatatgcactatctttttccatgaaaaaaacctgagaattataaagattaacttattccccaaactcaaataaataaagtagtggctgaaatgaaacctctttgattgtgaaagatataataaaagatcacaacgtatatagacatttacaaataatggactatttcaaaatattacattgagctgagtgttagtctcaaagtaaatcatttttataacaatatatgatacatataaatayaggcagaatatcatccaaacagtaaaagtgtatggtttattttgttttatattaattatggtgcttttgctgtcttgactatattcttttttttttttttttgagatggagtctcattctgtcgcccaggctggagtgcagtggcgctatctcggctcactgcaagctccgcctcct

SEQ ID NO: 386243 - DNA, 592 bp, Homo sapiens
gaagttcagaaatgttgctgttttatgagttttctaaaaaaaaaaaaaaacaaaacaaacaaaaaaccttaaatktagctactccacaacttttattttagtgagaagatgaggcattttcatcaatatatttttaaaattatattaatttcacttcataaaaatatatttgtaccatttctttctaatagctaatattcttgaaactaaaatgtactttacatgtaactattactgcactgcatggttctatattcagtgatacatgtaatgtaaccacctctgcttccgtaggaaaataatttcagaggaaaaaaaaacacatgaaagaaattatcaaggacataaggacataaaaagagaaccaataaaatcccaggcacaactaattactcgaggagtaaaattatgatgattattccctaatgcaacatgcttatttttttcatgaacaatttgtgttttaatgaaaagagacattatttatagcagacattagactagagttgaatatgtactttaaacactctcagttgctccttaattttgaatgtactgctttatgcagctgagtgttttttcctgttttccc

SEQ ID NO: 386244 - DNA, 596 bp, Homo sapiens
tatgcaaagacaaatgaaatggttctaaatttttaaaataataatgtttagatgcccgcagcagtcctcttatctcattatttctatccttgttacagaagtggggatatgcgatctcagaatatttctttttcttttcttttttcttttttcttttttttttttttttttttttgagacggagtctcgctctatcgcccaggctggagtgcagtggcacgatctcggctcactgcaagctccaamtctcgggttcacgccattctcctgcctcagcctccggagtagctgggactgcaggcacccgccaccacacccggctaatttttttgtatttttagtagagacgggatttcaccgtgttagccaggatggtctagatctcctgacctcgtgatccacccgcctcggcctcccaaagtgctgggattacagctgtgagccaccgcgcccgacccaatctcagaatatttctaagaactaaccattgagcttaaaggagaaaataattttaagtaagattaaactttctaattacccagattatggttttgtctttcctagggcattcaatggatgtagagagcagtaagttc

SEQ ID NO: 386245 - DNA, 534 bp, Homo sapiens
tctcgttgagtgtgccaagaatgcaaggccctggatggtgttcatctcaggcttgtgttttgtagccaccagccttgagggatgaggtaaggcaccctggacaacagcaggcttgtttccatggtgaattgcttaatctcactgtacctctcctgtaatgcactccactacgtgtataagcatccattatgggctcaattttctacccycaaaattctgaagttgaaatcctaaccacccttacctcagaaggcaatcatgtttggagataggatttttaaacaggtgatgaagtgaaaatgaagtcattagggtgggccctcatccaataggactggtgtcctcagagaagaggaaatttggacataggcagggtgaagtgaagacacagagggaagacattcagagggaagatgaagggaagacacaggaagaagacagccagccacctataaactcaggagagacgcatgaacagttccttcctcatggccctcagaaggaattaaccctacagacaccttgatctcagat

SEQ ID NO: 386246 - DNA, 563 bp, Homo sapiens
aagacaaaagtctaagacagtggaggagatatgcatatgaggaaggaaggaccctggcactgaattatcagatggactcagctgatgtctttaagtttcacatacgctgagcccctaatcagtggtttgagacaagcattatatttggtcacagtgggtatatgctacrtccagaatgggaagaaagttcagaatcctgtggagactgtagacactcaactctacaataatgaggtggaggttatgaggatgctagagctctagagaagctctttctttgtgtcactaaccacaccacagcaagatatggtaaaaaaaattattcaagttactagtttaatggaagagccagagtggctacaggaaaggctccatgaaaatatccagctggcatggaggaaataaacattcagccactggagtagttatggtgccatgctcaagagttggtagagaaaggcgttctctctgattgacttacaaaagacaatctttcttcacatagaggactagaaagttctatcagtactgaccttttcctgtttagtcttatattttgaagc

SEQ ID NO: 386247 - DNA, 496 bp, Homo sapiens
ttttgaaagtagagctgctatggcttcttggtggactaagatgggggaaaacagaattaacaaggatgatgcctggatttcttactcaagcattcaagtagaggatgwtatcattcaccaaaatgctgaagacaggagaagcagactctgggaaataggaatcaagagttaaggctagagttagaaatctttattcactactgaactcaaaagagagtgtaaaaccttgtctctatttcttcatatccaatccacaccccaaaccactcatttgtttccatctcctccacgctactcaaactgttgctaatcacagtcaccagtgaccttcatattggtcacttttctgtcccctttttagcttcttagtagcagtcaaaacttttaatcagttccttgttcttaaaatgcttaagatatactacctgacttcaggaacttgtatataagtaggggggcattgtcagctccgtgatgtccagtggtaagctgaaat

SEQ ID NO: 386248 - DNA, 496 bp, Homo sapiens
ttttgaaagtagagctgctatggcttcttggtggactaagatgggggaaaacagaattaacaaggatgatgcctggatttcttactcaagcattcaagtagaggatgatatcattcaccaaaatgctgaagacaggagaagcagactctgggaaataggaatcaagagttaaggctagagttagaaatctttattcactactgaactcaaaagagagtgtaaaaccttgtctctatttcttcatatccaatccacaccccaaaccactcatttgtttccatctcctccacgctactcaaactgttgctaatcacagtcaccagtgaccttcatattggtcacttttctgtcccctttttagcttcttagtagcagtcaaaacttttaatcagttccttgttcttaaaatgcttaagatatactacctgacttcaggaacttgtatataastaggggggcattgtcagctccgtgatgtccagtggtaagctgaaat

SEQ ID NO: 386249 - DNA, 550 bp, Homo sapiens
ttttgccatgttaattgtgactttagtgtgtctcctaatttcatttatcccatgccctccattaatatgttactttctcccagagattatctgctattcctaccatgtataaataggtatttttgttcttgaaataccacattacttagtttatgtttgcatttttttcattactactgtaatatytgagagcatctatatagggaaagaaacaactgtttctctctatatccatttcataacactctaataccaaatgtatggattttccacaccgagtgattctccagttctctgtggatgaccgagtaggtgtcctatgatttaatacaattctggcactagctatctggagttagcacagacccccctctccagccaacaacagattaagggctcagtcccacaagactgtcccccaattcaaatgccggtcacaagtcccaggttgtagttctaatcaactaattataatttggggaggtcccacaaatccttccttgagttcaataatttgctagcacaactcacagaactcaggggaacgttt

SEQ ID NO: 386250 - DNA, 536 bp, Homo sapiens
atatggtgtacacagaaaattcatggcattgtggtagatataaactgaaccaccttatgaccaccttatgagtatattaaatataaaatgattaaacactacaaataaaaggcagagactgtaaattgaataaaaactgcagcctaattgtgttctttttataataaatgccctttcagtgtaaagacctacagacagcaaaatatgaaaaatgatatataccatgaaaacctgaatcataaataaactggagtggtaatatttataacagacaaagttgatttcaggacaagaaataatacaaaaacaaaaaggacacttcataagaaaaagggtccagtcacgaagacataacaatgctcaatgtgttgcacctaataacagcaattgtgaaatatgaagcaaaactttagaacttagttcttgacagaactaaagagagaartagataagtccacaattagagatggaaatttcttcatttttctcttactattgttataaatcttccaaaaacaaaatgtaaaagaacacat

SEQ ID NO: 386251 - DNA, 619 bp, Homo sapiens
ttcaacattcatggataggaagactcaatattgtcaagatgtcagttcttcccaacttgatgtatatattcaatacaatactaatcaaaatcctacagagttattttgtggatattgacaaactagttctaaagtttatatgtagagacaaaagacccagaatagccaacgcagtactgaaggagaagaacaaagccagaggactggcactacttaacgtcaagacttaccgtaaagcgacagtaatcacgacagtgtggtatttgtgaaagaatagacctctaccaatagttcagtggaataaaatagagggcctagaaatagacccacataaatatagtcaactgacctttgacaaagcagaaaacaaaaggtactggaacaactggacaaccacatgcaaaaaaaaaaaaaaatgaatctagacacagaccttacaccctttaaaaaaaatggatcacagacctaaatgtaaaatacaaaactgtaaaactcctagaggatgggataggaaaaaaatctagatgaccttttagatacaacaccraaagcataatccatgaaaaaaagaactgataagctggacttcattaaaattgaaattttcttgttgtgagag

SEQ ID NO: 386252 - DNA, 619 bp, Homo sapiens
ttcaacattcatggataggaagactcaatattgtcaagatgtcagttcttcccaacttgatgtatatattcaatacaatactaatcaaaatcctacagagttattttgtggatattgacaaactagttctaaagtttatatgtagagacaaaagacccagaatagccaacgcagtactgaaggagaagaacaaagccagaggactggcactacttaacgtcaagacttaccgtaaagcgacagtaatcacgacagtgtggtatttgtgaaagaatagacctctaccaatagttcagtggaataaaatagagggcctagaaatagacccacataaatatagtcaactgacctttgacaaagcagaaaacaaaaggtactggaacaactggacaaccacatgcaaaaaaaaaaaaaaatgaatctagacacagaccttacaccctttaaaaaaaatggatcacagacctaaatgtaaaatacaaaactgtaaaactcctagaggatgggataggaaaaaaatctagatgaccttttagatacaacaccaaaagcataatccatgaaaaaaagaactgataagctggacttcattaaaaytgaaattttcttgttgtgagag

SEQ ID NO: 386253 - DNA, 651 bp, Homo sapiens
ctcagcagcggcattagattctcataggagcgtgaaccctattgtgggcggcgcatgaaatctcrgttgcgcacttcttatgagaatctaactaatgcctgatgatctcaggtagaatagtttcacctgaaaccatctccccgaacagcccccactccctccatccatggaataattgtcttccacaaaactggtccctagtgccaaaaaggaagggatggctgcaatagagtatgaatattatatgctatcaggtgtccaattgctataaacagactgttctttaatagtctgaaatttgacatcaatttttttctctttgagctcttattttcatttccacagacttttattctaatgtaatgtatttcgtgtagaaaatattttataggttttgtcaccatacttctatgtacaataagttacatatataaattgacatttaatttttaaaattttcctgtggcaataagtctctaaatattggattttttctgcttgggttataattacaattatctttagaccataattgataaaaaaataagatgtaataaattttaagaaataattattatgcagaagtaaaattttgttggaaatgtatgtctccatggccaaaagcgagtctaagtttttctagttaggtca

SEQ ID NO: 386254 - DNA, 411 bp, Homo sapiens
agttgctgagatgatcagtcaagatgtaagaagtaaagagatttacagatatgcataatagttgtaatcatggtcattttaaaggatttttattatcaattttggtttttcgaggtacaaaaattttattttaagtaaacaagttgatgattatttatctgaaataatttctcattggaattaagcaggcatagttattctatgtactaaaataaaagtacatagaatttcagaaagcaaacagcgaaatcaaactaccagcggaaatgcaacatttgctttggaaaagtatcaaccagtgtcaaatataaaaacccaaacagtagaatttgcttcatccatctgtacttcaaatagctgagttagctagcrgaggcaaacaggagtgcttttcgtagatgacatagcaag

SEQ ID NO: 386255 - DNA, 476 bp, Homo sapiens
gttcataactatcaggctttactgtaggttaggcagctaagcttcgaaataggagggagagatgtcttctaaatgcatcactttttttctaaacttgtgaaattgggagacatgaaagtattaaatctgtttgaataataattcctgtcatttattaacttctgcccttggtgactcatcctcaggttgtacaagatacatatgatacgtcagcccctctctctcmaggctgttttatttctttgtagtgaaggcttgcagttacgcatcttaaaatgtttacaatttctctaaataactgagactgtctaaagacgagaagaagatgaaaggttctaaatatgttctgggttctcttggcaaagacgagtcctagttctggagccagacagcctggatgtcttgacttggccgctcccaggtctgtgtcctctggcgattttccaacattgttgactcttgtgttcctatctgta

SEQ ID NO: 386256 - DNA, 656 bp, Homo sapiens
  misc_feature (1)...(656): n = A,T,C or G
aataaaatatatatatatagaattacttgaggtaaatgaaaaaatgcctgagcccaactccagtccaattaaataggatttagtctaatatgcagttgatatagaggttatcaactatttacctgctggaagatagttratttcagcgtattttataggactggcttcccccctccctcaacaccctacattttatgtctacctgaaacctcagaagttgacctttggaaatagggtctttgtagatgtaatgagttaagatgaaatcatgctgtatcagagcgggccctagtccaatgacaggtatcctttgaagaagagaaaacagagacacagccacataccangaaaaaaggccatatgaagccagagacagagattggggtgatgcatctaccagccaaagagtgccaaggactggcagcagtgctggagccaggagaggggcatggaacagaccctctcctagagcccaagagacagcatggttctgtgcacatcttgactttggacttctggcctccagaaccaggagcgaatcaatttctattttctgaaaccacccagtttctggtatattgtttcatcagccctaggaaatgaatactcctatcagtttcacataaaacaaagattaataaaacaacaaggaagat

SEQ ID NO: 386257 - DNA, 599 bp, Homo sapiens
aagtgctgtgcatgcctgccgacctctgcccttcttggagagcaggtgccctggctctgccagcccttggaagatgtctgtgctgctggtggcagcagctgctctatgcatgggatctggagggctctgtggggacccacatgtgtccactttcctgcccactctgccccactccccttccctcactctgcccgcctgggcctatacttccccttcccacagcaacctagcagaagctttgcttctccatgtgttttctgagaaatccaggctatgaaaagatatagggaaactttataagattttctcagaataaggacaaaagacttaaagataatctcactcaaagagataccctaaaaaccaagaactgcacttgaagaatgcaattggggayaaagtcacaaataccctgcagtgccacaacctttcctcttcaaatatttccttctatttccccttccttcacctaaccatgaaggggaaagggcagacttcagaaaacagaaaagacaggctggaaaacagagagtgagatatatgggcagaagtataaggagctggaggcgaaagcaaaagccccaaaggcagcaagaccc

SEQ ID NO: 386258 - DNA, 560 bp, Homo sapiens
cacagagaaattctgagggtggaaggaaggtgggagtcgagcagcaggtcatggagggagcacttagatctccttcccacccagcctcccagacccctggggctgcctggaggaaccrgagatctggggatctggatgctcctcttaaagcttgcacgattctcttgtgttcagccccactggctcccctggcttagaaacacctgagtctttcctggtctctaaggtgtgagttgcccctccctgaatgctcctgtctcccgccttcctcacccttagtgtgagattccagtttctctgctgaactaagtcaattattgtctatatttattgatttggactgatatccacattctgagtaaaaattaaaatcagattataaaactgggcatatgattccattggtgtaaaacaccccgaatttatgtatatacaatcatcctcaggagatgaccataatctggtgattcattctaggaccctccttggataccaaaatccacagatgtttaagtccctgatataaaatgatatagtatttgagccaggcgtggtggctc

SEQ ID NO: 386259 - DNA, 581 bp, Homo sapiens
ggcaagggtcctggttgtgtgcatggaggtgaaatctggcttttcatgagcctgattccttccatttctttcaggaaaaagaggagcaaagccatcaaatttccagatctggcttgcaaaatttctggaaagacatgctgctaccaaggttttgggtgagcatgtggtcatttctgccttgccaacttcactttccccattaggacrgaagtggttgtcagccttctatgcgagttggacagcacagtctgcacgtgctcttgctctgtctctgtggagtgcacctgggcagcagagataccccagcctctggcactgcacttgccttacaagttgaaggtagagacaagacacacattcatttcttttaaaaacatcatgctaagtccagaggttggcacccttccctggagaggcctgaacgccctgccctcccactgccaagtctttcttttctctttcctgtggcccttcttgatccaggtctgctctaactggaaagccaggtccccagagatgagccctgtggtgctgaggaggtgggagtcaagggaaatgccccccatctccaaagccagggg

SEQ ID NO: 386260 - DNA, 438 bp, Homo sapiens
gcattggcagctttcatgtggtgttggtcccgggggttggcagaggacaagaattgaggttcgagaacctccatctagatttcaaaggatgtatggaaacacatggatgtccargcagatgtgtattgtggggcacagccctcatgaagaacctctgctagggcagtgtggaagggaaatgtggggtcagagccctcagacagagtccctactagggtacttcctggtggagctgtgataagagggccactgtcctccagaacccagaatggtagattcactgacagcttgcaccgtgtgcctagaaaagccacacactcaatgccagccatgaaggcagctgggacggggctgtatcctgcacagccacaagggcagagctgtccaaggctgtgggagcccatctcttgcatcagtgtaacctggatgtggcttgta

SEQ ID NO: 386261 - DNA, 490 bp, Homo sapiens
cctaacctgtatttctcctcaaattgttccctgtggacagccaaacagaactacttgccaatcttcacattcttcttgaaatttttaaaatctatgcctgtacacacaaagtttccttttcttagaatttcatccccctattcctccctgcccatcacccagcaaggcctggttcaaatgtcaacagcccctctttaaagtcttccgcaaccaccaccacggccttcctccctcagcaatgcagtccccatcagtgctcctaacrtatctaagaaaattttcatggaagttcactatattttttttgtattgtggttgtcagggtattttaattttaattacttttttttttaaaggaagtcatctcagcctatggacagatagatccagtatagttgctagctacatggtggacctgggagccagacccactggattcaaatccccctctcctccttatagctgagtgatattgggcaagttatttagc

SEQ ID NO: 386262 - DNA, 589 bp, Homo sapiens
tacccatatcatatctaaacccactccctgtagatcaacatagctagctattgcagcaaggtggccaagcggccaactgctagaagctgctctgaaattccacctctgtcattcatttgctatgtgtcagacacattgctcaccctctttgcatttcatttcctctttggtaacatggggataaataacagtatcaaccctgtagaactgtagggagaaacaaaagaaaccctgtaagtccactgctcatcatagagtcagaaaaaaagaagggtttgatcaatgttaactgtttttcaaaattcttgccatttccaaattgcacttaatctcacctccctcatgcctctttcctaaattctgcttgtttctcttaactcctaaatatttatgctcacgtcaaaccacttaacattcaatagcatacccttagcaggaagttcccccagcctttttcttttttcttttttgagatagggcctstctctgttgcccaggctggagtgcagtgccatgatcttggctcactgcaacctccacctcccaggctcaagcaatcctcccaagtagttatgactataggtgtgtg

SEQ ID NO: 386263 - DNA, 571 bp, Homo sapiens
ctcagataaatagccagtcaattcagtaaaacattcagaaaatgccaagttgccccatttgtggagatgtggtctgtccggaacattgaccttaatctgaaagactcccaactcttttccaagcagtagagtccagtatcaaactatactggaacagagattttgttgaaatgtgtaaccaaagaaaagtttctaaggcattgcatggttcattaactaaagagtgaaaagaaaactgtaggaagtatgaataaatatawacacacaaagaaattcttgattccagtaataagctaaattcattttgaggtggccatagacatcttttggtagcaatgacaaaaaccacagggcaatttaaaaatgagtactgaaactaaaattgtcttccatggaattacatgagaacaaagaaaatgttttcttctgaatgtggatttggtcaagctactagagatgattgggaataatacctcaattcctgaagaaaggatgcaggacttaaacaaaactttatatgtcctctgaatggatcatctactctgagttctgaaataaagtttagtgagaa

SEQ ID NO: 386264 - DNA, 568 bp, Homo sapiens
gagtgaaggtgtaaagttttcttgcaatcaaaattaagttaacagtataaaatagcctgttataactaagattttttgtaagtttcctagtaaccagaagcaaaaacctatagtagatatacaaaagataaaaaggaatcaaagcataacactagagaaaaaccacttaatcacagaggaagacagctagagaggaagaaagaaacaaaaggtctaccaaacaaccagaaaacaattaacaaaatgccaatagtaagtccttacttaccagtaactatcttgaatgaacattgattaaattctccaataaaaagaacacagtgtgtggggcatgatggctcatgcctgtaatcccagccctttgggaggccgaggtggggggatcatgaggtcaagagatcgagaccatcctgaacaacatggtgaaaccctgtctctactaaaaatacaaaaattagctgggcatggtggcgtgcacctgtaatccmagctacacaggtggctgaggcaggagaatcgcttgaacctgggaggcagaggttgcagggagctgagattgtgccactgc

SEQ ID NO: 386265 - DNA, 568 bp, Homo sapiens
gagtgaaggtgtaaagttttcttgcaatcaaaattaagttaacagtataaaatagcctgttataactaagattttttgtaagtttcctagtaaccagaagcaaaaacctatagtagatatacaaaagataaaaaggaatcaaagcataacactagagaaaaaccacttaatcacagaggaagacagctagagaggaagaaagaaacaaaaggtctaccaaacaaccagaaaacaattaacaaaatgccaatagtaagtccttacttaccagtaactatcttgaatgaacattgattaaattctccaataaaaagaacacagtgtgtggggcatgatggctcatgcctgtaatcccagccctttgggaggccgaggtggggggatcatgaggtcaagagatcgagaccatcctgaacaacatggtgaaaccctgtctctactaaaaatacaaaaattagctgggcatggtggcgtgcacctgtaatccaagctacacaggtggctgaggcaggagaatygcttgaacctgggaggcagaggttgcagggagctgagattgtgccactgc

SEQ ID NO: 386266 - DNA, 366 bp, Homo sapiens
tgggaccacaggtgcacactaccactcccagctaatttttgtatttttactagatggggtttcaccatgttggccaggctggtctcaaattcctgagctcaagggatccaccccccttgacctcccaaaatgttgggattacaggcgtgagccactgcacccagccagaaatctgaaaacctgctgatcccaakcatttcatataagggataactcaatctgtatagcttcaaacctgtatagtacagacatagtttcaccatgttggccaggatggtctccatctcttgacctcatgattcaccagccttggcctcccaaagtgctgggattataggcatgagccacctcacctggcctcaaata

SEQ ID NO: 386267 - DNA, 598 bp, Homo sapiens
aatgaaaccttataatcataggtatgcatgtataggaaaaagcagtgtgtgtatatgtatttgaagatcagtactatctgggcttcagggggtcttggtgtgtatcccccaaggacaaggtgggactactatactgggyattgcagtctttgccctctatagtcttacagacctgaggttaaatcctatcactgtctaaccataaaactacaaaattatcctcctggagcctcagttttcatataggtaaaaaggagataaaacataccttcctcatagggcagctatgaggcttatattagctaacgtatgcctaggattcaataaaagttagctctcatgttcactctacttactttccaagaaacataccaaagccattgtttctttcctcaagccctttgcccttaccttcagtgcttttttttgttaccaaaaactttatgctctttataaaatttaatttttatttttttgccttaagctatgatgtttgaatgttaccaaaaactttaaatctatcatttattaaaataatttggtttcattaaataacttttttaaaaacatacattttaaaaatttcaatagtttttag

SEQ ID NO: 386268 - DNA, 652 bp, Homo sapiens
agagaaaaggagagcaaactgataaattcagggagaactatgggagtgcataatgtgtaggaaatcaatatcctttcatcccatcattctatgagatgctggggtgcatgcagaccccgccacataagtgtttcccttcagccctctctggttcatagccttcttattttgaagatattttcaatatttaatcatttctagtgggaaattctctccacctttcaagtagggatatttggactagtaggtttcctcagagaacttttctccttcatatttttgaaggccatgttaacatagtagaatattaggctttcaccaaactgaaatgtcttcatgacacatcatttcctgccttagctgctctaatagtccagggtggagtgctctcctgttgtactcaccatgactgcctgactgcccaattcctttggagcatattcagatgggaatttgttcactgtatcagactttctttactttcccccatgtgtactgtgttctcatccattataatgaatttctgtrgcttgtcctcatgagatggaaataagtgagtttcttattcttctgcttacctatgaaaactggtgtaggcattttttctttccttatctgcccatagttatctggtccctcttaagtaatcgaa

SEQ ID NO: 386269 - DNA, 590 bp, Homo sapiens
ttttcatcacatccatgccaacacctattatttgttgattttttaattatggccattcttgcaggagtaaggtggtattgcatcgtggttttgatatgcatttctctgatcatttgtgctgttgagcactttttcatatgtttgttggccatttgtatattttctattgagaattgtctattcatgtccttagcccactttttgatggggttgtttgttttttttcttgctgatttgtttgagttccttgtagattctggatattagtcctttgtcagatgcatagtttgcaggtattttctcccactctgtgggttgtctgttcactctgctgattatttcttttgctgtgcagaagcattttagtttaattaagtcccatctatttatctttgcttttgttgcatttgcttttgggttcttggtcatgaagtctttgcctaagccaatatctagaaggggttatcttctattacacaatctttatgrtttcaggtcttagatttaagtctttgatccatcttgagttgatttttgtttaaggtgcgagatgaggatccagtttcattctcctacatgtggctagccga

SEQ ID NO: 386270 - DNA, 512 bp, Homo sapiens
taccttaaaaatccactttctctttaagtttcattagtgctatttatgcttggtttataaaaattaattagtgcccttaggaagaagacctatgttaaccccttttggggtagtttgtgcaatttacttgatttcttggtgattattattgtcttccttttatgtctctaggtattttttagtacatggatccatttgctctgttctagttatgctttaaagacctcagtcaatttgcaagataatggctcaaattaagtatttgaccagaacccagaggaaactaaccaggccacaactcatattagccattaccttggcctctttcctacctagggaacatgacatgttcggttttcctttgtcacacatggggattagaaggggaaaggagagaagtacattgttctggaggattgtattattgttcccaaatactagctcscttagtgatgagaaatttatatgtccttgcttgttgccatgtgagttgttgtgcctccttgaaggtg

SEQ ID NO: 386271 - DNA, 491 bp, Homo sapiens
tagtacctggtttcaacttcatattgctgaaagaggtactcaagagatagaaaaaacagacctaaatcactaacgccaccctttccccacccctggcaggagcagcttggtgcagagaatgtctctgggcgctgggggagaggaaacacagcaattgtgaggcattgaactcagtgctgtcctatcagagcaaaagggaaaacccgaacaaactcagctgacacccgcccacagagggagcatttaaaccagtcctagctagaggggtatygccaatacaagcgggcgaaacttgagtgccaacaaacctcaccaccgagggccaaggtgctctcaatctctaagtaaacttgataggcagtctgagccataaggactgcagtttgtaagcaagtccttgggcttaactaggcccagagacagtacactgcgggcgggggtgctgagacatactgagacaccagctggggcagctaagagagtgctagcat

SEQ ID NO: 386272 - DNA, 491 bp, Homo sapiens
tagtacctggtttcaacttcatattgctgaaagaggtactcaagagatagaaaaaacagacctaaatcactaacgccaccctttccccacccctggcaggagcagcttggtgcagagaatgtctctgggcgctgggggagaggaaacacagcaattgtgaggcattgaactcagtgctgtcctatcagagcaaaagggaaaacccgaacaaactcagctgacacccgcccacagagggagcatttaaaccagtcctagctagaggggtattgccaatacaagcgggcgaaacttgagtgccaacaaacctcaccaccgagggccaaggtgctctcaatctctaagtaaacttgataggcagtctgrgccataaggactgcagtttgtaagcaagtccttgggcttaactaggcccagagacagtacactgcgggcgggggtgctgagacatactgagacaccagctggggcagctaagagagtgctagcat

SEQ ID NO: 386273 - DNA, 522 bp, Homo sapiens
ggtacaagtgattttttgttatattaatgaattatatagtggtgaattatgagattttagtgcacccctcacccaagtagtgtacattgtacctaatgtgtagttttttcaatccctagccccttcttaccctcccctcttctgagtctctgaagtccgygatctcattctgtatgcctttgcatactagtagcttagctcccacttataagtaagaacatatggtttttggttttccactcctgtgttacttagagaataatggcctccagctccatccaagttgctggaaaggacattatttcattccttttaatggatgagtagtattccatggtgtatatgtaccacattttctttatccactcatttgttgacaggtatgtagggtggttccacatctttgcaattgtgaattttaccgctataaatatatgcgtgcaagtgtctttttaatataatgacttattttcttttgggtagatacccagtagtgagattgctggattgaatggtagatct

SEQ ID NO: 386274 - DNA, 522 bp, Homo sapiens
ggtacaagtgattttttgttatattaatgaattatatagtggtgaattatgagattttagtgcacccctcacccaagtagtgtacattgtacctaatgtgtagttttttcaatccctagccccttcttaccctcccctcttctgagtctctgaagtccgcgatctcattctgtatgcctttgcatactagtagcttagctcccacttataagtaagaacatatggtttttggttttccactcctgtgttacttagagaataatggcctccagctccatccaagttgctggaaaggacattatttcattccttttaatggatgagtagtattccatggtgtatatrtaccacattttctttatccactcatttgttgacaggtatgtagggtggttccacatctttgcaattgtgaattttaccgctataaatatatgcgtgcaagtgtctttttaatataatgacttattttcttttgggtagatacccagtagtgagattgctggattgaatggtagatct

SEQ ID NO: 386275 - DNA, 533 bp, Homo sapiens
ccaactctttgaaatctctctccctccctatatgtatagagataaatgtgtgtgtgtaaatatacatgcatatacatatgtatatatacacacatatacagacacacatacattatatatacacacaatagcatttgtgtgtgtgtgtgtrtatatatatatagagagagagagagacatagagacacacacacagagagagagagggagatggaaatggacttggagatggagagagatgaagatggagagagatagagagacatggagatagagatggaaatggagagagatggagatggaaatggacttggagatggagagagatggagatggacttggaaatggaaatggagatgaggtggagatggagaggatatagaaagatgcacaaatcctacgggctctgtttctctggaagatcctgactaacacagtgctaacaaggaccttcctctacttctccctgagtatacttgagatgtaactattcacaaaacttttcttaaaaacaatgaaaatgttttacaact

SEQ ID NO: 386276 - DNA, 599 bp, Homo sapiens
gtccaaatctttcttatccatatttgatatcaaggttttcatctcacataaaggcattttgcatctaagtcacttgagacagtactttaacgacccacatacaatgytgctgtagtgcattctatccaaaggcataatgcatatttctatcacatttgataatttttaaaaatctctggctgaagattcaagattactcaattaaaaaatatactgtttactgtatttgctttttaaataaaagcatttattttaaaactttttaaacctatataaaagttacaagaagagtacaattgatgattctaggtagagggtacataggtattataaacatgtagccacaattgctttgtctatttgtctctccaaatatgcataataagaagtatttataattgttttaaccacaacatataccatgaccaaaagcagaacaatggggtcagagccatggtacatttcctcttccctttctgacaggcatcaccgcactaggggctggcaattttagctcccattttgtttcctttttcttttaccatctgaagttatccaatccactttcctagggaagaaactgcttttgatcacaaaag

SEQ ID NO: 386277 - DNA, 661 bp, Homo sapiens
tagctttcattgccatcttggtttggtgggttttggctggtttcattacagcatcctgattcatcagcaaggtctttatgacctgtaacttgtgacctcctatctcatcctgtgactaagaatgcctaacctcctggaaatgcaccctagcaggtctcatccttattttacccagcccctgttcaagatgragtcactttggttcacatgcctctgatagtatctaagtcttgtgaaaggatttggcattgttgatgtggggctagtgaaaaccaagggaggaaagagcacttgtcttacagtgttttattcattaactcaccttatgtatatgtgtagatgtagatacagctatggatgtagatttatatagagaaatatagcaactcttaggtatggcactatgatagttattaaagggtattttaaaaattgttgctttccagagtttaaaataatgttagcaaaacaagataattatatagtcttttggatgtttattcatactttttgggtagtgtgaatatagagaacaaatgtatcatggtttaaaacatcagaatttgattttttttctctaaaaattatatactagcaaatactattgttcttaattcaacagattaaattatcataaacactgactatgcttgaaaaatag

SEQ ID NO: 386278 - DNA, 608 bp, Homo sapiens
ttgtgggacattcagtctctgtcccaaacattcaactcggcctttgtagcacaagcagccatagacaatacctaaataaattagtgtagctgagtttcaataaaactttatttacaaaatcaggcagagggacagatttagcctagagactatagtttgctgactcatgatacagacaatatttaaaaataatagctcatatttattgagaatttattatatttcaggcatgatcaagtttataaaatatttattaagctatgtcttactgtagccctataatttattattatcttcatttaaaaaatatagcccttttgggaggctgaggcaggcagatcacgaggtcaggagattgagaccatcctggctaacacggtgaaatcctgtctccaccaaaaaatacaaaaaattagccaggcgtggtggcaggcrcctgtagttccagctactcaggaggctgaggcaggagaatggcatgaacctggagggcggagcttgcagtgaaccaagatagagccactgcactccagagtgggtgacagagcgagactccatctcaaaaaaaaaaaaaaaatagccctttttgttatgcataaaatagcaaa

SEQ ID NO: 386279 - DNA, 634 bp, Homo sapiens
cccttttgtgaagtaagatacgttaatatcctataaaacaattatatacatgctgttttaatcaatgaattagttaagaaatgtggctccatgggtctgcctataccagaacaagtgcctactaagaaggaataataaaaacaagtcatttgaaagagggcaaaagctttgtatataaagattcatagctcctgaaacataattagcttgtctttcagctgtttcccttgtatcaaaattcagcccttattattttcaataatatataaattaagatgctatgagattacataaggtaatatattagaattaattcatatgaagttcccagtttctcttaaaaccattgtcattgggtttccaaatatgaaaatgatgtgctcagttgccttttaggataagccctgatatttgctatttttacaggaaagtagtggaaatatttatgtcagcattttagttgccaactctcacagaaaaatagcttctatttctgtgttattaaccatattacattggaatgtttaaaaamtcctaacttctaactaagaatttgtgaataatagtagaaactgacttttaggtgaaacaattttggagttatttactagtttgatcacagaataaatatgct

SEQ ID NO: 386280 - DNA, 637 bp, Homo sapiens
ccatttcatgcctaataacaatgccattttgagcttatctgcagaaatagggtaatatgtaaattttactgtttcagagagctgatctcatctaaatgcagaaaaccctagtcgtataccttgtctctttttctaaactttaatcaatgtgtttcaattctccagacagagctgactgattcagcggacctgatttatacctttacctctccttaggatgtttgggtggcaattcaatgggggaactggggagagtctgtgctattatatcatgattaaaaaccgtgcaatttgtcaacagtttcttctcacctccaaatacagataccgtactcctacacacaaaactctgtttcaccacaatccccaacacaaaatcgcttctcaactttttatggacagcctactgggtgctttccggtgatttttttttttcaacacttgccccttgattttcattttaccagtttccacttagctaacatayggggtaatgggaaggaagcacacagtggggtttgtaacagaatctgctttagaaatggcctcatttaccctgcactcttgaatttaattggctcagtggatgctcgattccataattctaaaatatttgactcattagtctatgccccca

SEQ ID NO: 386281 - DNA, 616 bp, Homo sapiens
aaatggaggttcttgccctttggtcaacaagctttggcttcacatttttcctctgactctgtctaccctttaaaaggatctgtgcaaagctaccatttgatttaagaaatactgctcagcatggcttacagataataaactttactagggaacccagggggttgatctttccctggaaacctgctctttaaaagttttgcagtgttttgttggagagccatagagtttgtacttgttcctctagatacaatctttctctaaataaccacccaataatgtgtggttagagatgagtgacaggatgtaatgagaacatttgtttgctccaccactggctttttttcctaaggaagaaatataaaactaaataattcatgtaacatgactgactcccacactattgattatagtcattatcatcaatttgctgccccaccagccatcctaycggtattacttacagattgtggtattatttgctgctaggattctattttttaaagtaagtataaacaacacaagaaaaattttagcacctcagagagtcactctcctcttgaaagtcacataagctgcatctcatttttaattaatcagatgccaaaagttgatgcta

SEQ ID NO: 386282 - DNA, 638 bp, Homo sapiens
gtattctaatatttgtgacaagttattttcttacccacaaaattatcactaaggtacgatttcagcaatctcaactgaagatgatttaggaatttaaagagatcacaaaaccatcacctcaacaagaacaacaaacccaaggtgttatttattcccagctcttgccctgagggtgatcaggttagggtagtagtactggcttctgtgcttccacggctgaagaattgtcttatagtctgctatggtttaaatgtgtctgccctaaagcatgtgttagaaacttaatccctactgcaacagtgttgggaggtgggaactaatgaaaagtgattaggctcatgagggctccgccctcaccagtggattaatactattaccttgggagttggttgatttcaggagttggttagttatgaatggatgagtttggcccccttatatctcttgctctctctttgcccttctgccatgggatgacactgcaagcagacacttgtcaaatgccagaccctcaattgtggatttcccagccccctgaactgtaaaaaataaacttctgttcatgataaattacccagtctcaggtgttttgttataagaagcacaaaacaaamtgagacacagtcttaacacattcc

SEQ ID NO: 386283 - DNA, 614 bp, Homo sapiens
tggcaagcttcgccccattacttagcatttgtacagcatttttgatttgctaatactttaaaataatttttattctcttggctatcatactttctgctgagtaaccatatttcaaagtactgtattgccttctgattgcctctttacatcactaaggaggagaaatgaggatgtagtgggatatccttgcacagtattagtttgagagttttattcagagttttaatgtttcaactaagtggaaaactttggaataaatggtctcctgtgaagtaaataaccattactttcctgaaatttagatttattattactcttgcgaaactaatgagacttctccagggtactcaactttctaaagctaactttttgctgaatcagacatgtcaataagtcactgatctatggataactttttaggttccgtgccatttttttctcttattttatatcacattatggactctgggtctcttgagatrattatatttcatctttaactaaaacaacaacaacaacaaaacaaaacaaaacaaaaaacctaggtgtatagagtctatgtttggattttgttgggttctctataagtacaatatttcagaaatacagcagct

SEQ ID NO: 386284 - DNA, 685 bp, Homo sapiens
tgtttcaactaagtggaaaactttggaataaatggtctcctgtgaagtaaataaccattactttcctgaaatttagatttattattactcttgcgaaactaatgagacttctccagggtactcaactttctaaagctaactttttgctgaatcagacatgtcaataagtcactgatctatggataactttttaggttccgtgccatttttttctcttattttatatcacattatggactctgggtctcttgagataattatatttcatctttaactaaaacaacaacaacaacaaaacaaaacaaaacaaaaaacctaggtgtatagagtctatgtttggattttgttgggttctctataagtacaatatttcagaaatacagcagctgtgaatcacaatgcctttagcattttttagcrtcatttgcttatatatactcagataacatactaatatatctcaagaattcagaagcagtaaatgacacaatattagaaactgaaaatgcaaaccaacaaccagtacaaattgctgtttgtacaatacaacattattcaccattatgctcaatcataaacccctcaggctgtgcagagtattttacttattagaagcaacacattgattcataacctgcctcaattctattctcttgtcttcatttttttcctgttaccaatgctc

SEQ ID NO: 386285 - DNA, 522 bp, Homo sapiens
aagaattctttagatgtttaagaattagaagcctttagatgtttaatctaaaatgacatgaaaaaggaacaaatgggcagagtacccgccagatctttgatgaaatttttcaggaagcgagagaaatacaaactgcttcttctcaaacttcctaagatatgaaaataccaaagcaaatatacttggcttgtctaagattaggggaatttcagatagagaaaggttctcatgagcctccagcaccagcactgaattccaaaatatctgcttttatttttttttctttttgcaacctttttttttttttttttttaaattcagggagtacaagtgcaggtttgttatgtgggttgtgtattagtcctttctcacacagctgtgaaraaatatgagacactgggtaatttataaaaaaaggaagtttgaatcacagttcctcatggctggggaggcctcaggaaacttacaatcatggtggaaggcacctcttcacagggtggcaggacagagaatgggtgccca

SEQ ID NO: 386286 - DNA, 617 bp, Homo sapiens
gcttaattttttttttttttttttttgagatggagtctcaccctgtcacccagactggagtgccgtggtgcgatcttggctcactgcaacctccccctcctgcttcatgattgtcctgccttagccacctgggtagctgggattataggtgaacgccaccatcctggctgatgtttgtatttttagtagacacagggtataatcatgttggccacgctggtcttgaactcctgacttcaggtgatccacctgccttggcctcccagagtgctgggattacaggtgtgaaccactgcaccaggccaaaggtggccagtttaatcataaactcctcccgggtttaagtgattctccagcctcagcctcccgagtatctcggactacaggcgcccaccaccatgaccggytaatttttgtatttttagtagagacagggtttcaccatgcaggtcaggctggtcgcgaactcctcacctcaggtgatccgcccgtcttggcctttcaaagtgttggaattacaagcatgacccaccacgtcctgcatgttatttttattttaaaagctgcatatatatatatataacatatatatatttgaaaatactgctaacagcata

SEQ ID NO: 386287 - DNA, 487 bp, Homo sapiens
gtattacattaatgtgctacatcggttacrataaatggactaatattggtatattattattaattaaagctcatattttattcatatttccttcctttttacctagcatccttttgctgtgccaggatctcatcctagctaccacattacatttgctttttacgtctccttaggctcagctgtaattcttacccatgttaagttttcttacgacaaaaacaaaaaaaatacttttggaggtgatggatatatttattgccttgattaaacctagaacttatgagtatatccatatacccaaactcattaaatgttattcattaaatatgcactgtcttttgtatatcaattatacctcaataaagctattattttaaagaaagatttaactatttaactacatgaggtagctttgtcatgtgtccatttggctaggctgaaaaacatttcccagaattctccctcttctatgtttcccattagcatg

SEQ ID NO: 386288 - DNA, 552 bp, Homo sapiens
attagtggggttgctgaatcatatggtagttttattcatagttgtttgaagaacctctagactgttttccrtagtagttgaactattttacaatcccactaacagtgcaccagggttccaatttcttcatatctttgtaacacttgttatattttattattttttaatagtagtcctcctaatatatgtaaggtgatacctcattgtagttttgatttgtgtttctctattgattagtgatattgagcatcccttcatatacttgatggtcatttatatatcatattttgagaaatgtatattcaagtcttttgtccatttttaaaattcagattatttgattccttgttgtgtagttgtaggatttctttatacattgtggatattggccccttatcagatatacaatgtgtaaatatgttctcctattttataattgtcttttcactttgttgattatatcttttactgcataaaagtttttgttgtttattttttaagtttgaggtagtccccccttgcctatctttgctgttactctctgtggatttt

SEQ ID NO: 386289 - DNA, 552 bp, Homo sapiens
attagtggggttgctgaatcatatggtagttttattcatagttgtttgaagaacctctagactgttttccatagtagttgaactattttacaatcccactaacagtgcaccagggttccaatttcttcatatctttgtaacacttgttatattttattattttttaatagtagtcctcctaatatatgtaaggtgatacctcattgtagttttgatttgtgtttctctattgattagtgatattgagcatcycttcatatacttgatggtcatttatatatcatattttgagaaatgtatattcaagtcttttgtccatttttaaaattcagattatttgattccttgttgtgtagttgtaggatttctttatacattgtggatattggccccttatcagatatacaatgtgtaaatatgttctcctattttataattgtcttttcactttgttgattatatcttttactgcataaaagtttttgttgtttattttttaagtttgaggtagtccccccttgcctatctttgctgttactctctgtggatttt

SEQ ID NO: 386290 - DNA, 552 bp, Homo sapiens
attagtggggttgctgaatcatatggtagttttattcatagttgtttgaagaacctctagactgttttccatagtagttgaactattttacaatcccactaacagtgcaccagggttccaatttcttcatatctttgtaacacttgttatattttattattttttaatagtagtcctcctaatatatgtaaggtgatacctcattgtagttttgatttgtgtttctctattgattagtgatattgagcatcccttcatatacttgatggtsatttatatatcatattttgagaaatgtatattcaagtcttttgtccatttttaaaattcagattatttgattccttgttgtgtagttgtaggatttctttatacattgtggatattggccccttatcagatatacaatgtgtaaatatgttctcctattttataattgtcttttcactttgttgattatatcttttactgcataaaagtttttgttgtttattttttaagtttgaggtagtccccccttgcctatctttgctgttactctctgtggatttt

SEQ ID NO: 386291 - DNA, 552 bp, Homo sapiens
attagtggggttgctgaatcatatggtagttttattcatagttgtttgaagaacctctagactgttttccatagtagttgaactattttacaatcccactaacagtgcaccagggttccaatttcttcatatctttgtaacacttgttatattttattattttttaatagtagtcctcctaatatatgtaaggtgatacctcattgtagttttgatttgtgtttctctattgattagtgatattgagcatcccttcatatacttgatggtcatttatatatcatattttgagaaatgtatattcaagtcttttgtccatttttaaaattcagattatttgattccttgttgtgkagttgtaggatttctttatacattgtggatattggccccttatcagatatacaatgtgtaaatatgttctcctattttataattgtcttttcactttgttgattatatcttttactgcataaaagtttttgttgtttattttttaagtttgaggtagtccccccttgcctatctttgctgttactctctgtggatttt

SEQ ID NO: 386292 - DNA, 527 bp, Homo sapiens
aatacgtcctgaagagacatatatttcaacaggtcagaaggaattagtgtttggaattttcttcctccttgtgttctgcacaatcartgtcacctactgcatttttaccaagataacacttcttctctgtgctgatttttcactcagaacaggtgctggccaaggagagctatcacacttctgcagaagccgtgccaccacattcttgcaagtaaggtagagcagcaaagcctgtgaatgttaaagtagccctgaggtccagcacagttcctgttggcagtgaattgtccaaaagcacaagtggtttgatgtccctgtcagtccttcttcagaaaaactggaatataaataactgcaaggaatccttcctgttggtcatcaagataactctccatggtgcaaggaaactactgcctttcctagttcatttgaaggcatttgcattattttatgtctctgtatttgtcttctagagggtactgggcatctgtattaataaaacacatagtcagcatgaccaagtatgt

SEQ ID NO: 386293 - DNA, 527 bp, Homo sapiens
aatacgtcctgaagagacatatatttcaacaggtcagaaggaattagtgtttggaattttcttcctccttgtgttctgcacaatcagtgtcacctactgcatttttaccaagataacacttcttctctgtgctgatttttcactcagaacaggtgctggccaaggagagctatcacacttctgcagaagcygtgccaccacattcttgcaagtaaggtagagcagcaaagcctgtgaatgttaaagtagccctgaggtccagcacagttcctgttggcagtgaattgtccaaaagcacaagtggtttgatgtccctgtcagtccttcttcagaaaaactggaatataaataactgcaaggaatccttcctgttggtcatcaagataactctccatggtgcaaggaaactactgcctttcctagttcatttgaaggcatttgcattattttatgtctctgtatttgtcttctagagggtactgggcatctgtattaataaaacacatagtcagcatgaccaagtatgt

SEQ ID NO: 386294 - DNA, 527 bp, Homo sapiens
aatacgtcctgaagagacatatatttcaacaggtcagaaggaattagtgtttggaattttcttcctccttgtgttctgcacaatcagtgtcacctactgcatttttaccaagataacacttcttctctgtgctgatttttcactcagaacaggtgctggccaaggagagctatcacacttctgcagaagccgtgccaccacattcttgcaagtaaggtagagcagcaaagcctgtgaatgttaaagtagccctgaggtccagcacagttcctgttggcagtgaattgtccaaaagcacaagtggtttgatgtccctrtcagtccttcttcagaaaaactggaatataaataactgcaaggaatccttcctgttggtcatcaagataactctccatggtgcaaggaaactactgcctttcctagttcatttgaaggcatttgcattattttatgtctctgtatttgtcttctagagggtactgggcatctgtattaataaaacacatagtcagcatgaccaagtatgt

SEQ ID NO: 386295 - DNA, 578 bp, Homo sapiens
ccagaagatacaaaatacgtcctgaagagacatatatttcaacaggtcagaaggaattagtgtttggaattttcttcctccttgtgttctgcacaatcagtgtcacctactgcatttttaccaagataacacttcttctctgtgctgatttttcactcagaacaggtgctggccaaggagagctatcacacttctgcagaagccgtgccaccacattcttgcaagtaaggtagagcagcaaagcctgtgaatgttaaagtagccctgaggtccagcacagttcctgttggcagtgaattgtccaaaagcacaagtggtttgatgtccctgtcagtccttcttcagaaaaactggaatataaataactgcaaggaatccttcctgttggtcatcaagataactctscatggtgcaaggaaactactgcctttcctagttcatttgaaggcatttgcattattttatgtctctgtatttgtcttctagagggtactgggcatctgtattaataaaacacatagtcagcatgaccaagtatgtagacacagaacatctaatcaaagaggtcaaagaaagaa

SEQ ID NO: 386296 - DNA, 533 bp, Homo sapiens
gccaggtggagataattgaataatgagggcagcttcccccatactgttctcctggtagtraataagtctcacgagatctgatggttttgtaaatgggagttcccctgtacaaaccctctcttgcctgctgccatggaagaagtgacttgcttcccctgtactttctgccttgatggtgaggcctccccagccatgtggaactgtgagtcaattaaacctttttcctttacaaattaccgagtcctgggtcttaaattatcaggaatattgcaagctggttgttagatacttagtagttgaaatcgtccctgatgagactattgatatcacagaaattagcaaattaggaaacctacgaattggagccccccctcatccagtggtgcttaaacatgtactattgctattgtacattgctgttactgggactcagcagtgtgagaacaaacgaatacagaagcttattgaggagtcagcgtttctttgggtaggaaagtggcctgtactacagcagtagcgcctgagtgcaggcc

SEQ ID NO: 386297 - DNA, 533 bp, Homo sapiens
gccaggtggagataattgaataatgagggcagcttcccccatactgttctcctggtagtaaataagtctcacgagatctgatggttttgtaaatgggagttcccctgtacaaaccctctcttgcctgctgccatggaagaagtgacttgcttcccctgtactttctgccttgatggtgaggcctccccagccatgtggaactgtgagtcaattaaacctttttcctttacaaattaccgagtcctgggtcttaaattatcaggaatattgcaagctggttgttagatacttagtagttgaaatcgtccctgatgagactattgatatcacagaaattagcaaattaggaaacctacgaattggagccccccctcayccagtggtgcttaaacatgtactattgctattgtacattgctgttactgggactcagcagtgtgagaacaaacgaatacagaagcttattgaggagtcagcgtttctttgggtaggaaagtggcctgtactacagcagtagcgcctgagtgcaggcc

SEQ ID NO: 386298 - DNA, 514 bp, Homo sapiens
tagcaaattaggaaacctacgaattggagccccccctcatccagtggtgcttaaacatgtactattgctattgtacattgctgttactgggactcagcagtgtgagaacaaacgaatacagaagcttattgaggagtcagcgtttctttgggwaggaaagtggcctgtactacagcagtagcgcctgagtgcaggccattctgatagtctgtgctgaactcctactccaggcatgtgcctggatgaaacatctcacaaagggaatgaattggtcagtgacatactagtacatgtttaagcaccatggtgtgtgaggagggctctaatttatagatttgctgatttctgcgatatcaatactcccatcatggccaatttcagctactaagtatctaagaaccagcttgcaaaattcctgatgatttaataatcatctcttagcagccaacacaaacaagctccagaaccccacaaagtgttctctgtgtaagtttaatataacaggaaaaaataa

SEQ ID NO: 386299 - DNA, 514 bp, Homo sapiens
tagcaaattaggaaacctacgaattggagccccccctcatccagtggtgcttaaacatgtactattgctattgtacattgctgttactgggactcagcagtgtgagaacaaacgaatacagaagcttattgaggagtcagcgtttctttgggtaggaaagtggcctgtactacagcagtagcgcctgagtgcaggccattctgatagtctgtgctgaactcctactccaggcatgtgcctggatgaaacatctcacaaagggaatgaattggtcagtgacatactagtacatgtttaagcaccatggtgtgtgaggagggctctaatttatagatttgctgatttctgcgatatcaatactcccatcatggccaatttcagctactaagtatctaagaaccagcttgcaaaattcctgatgatttaataatcatctcttagcagccaayacaaacaagctccagaaccccacaaagtgttctctgtgtaagtttaatataacaggaaaaaataa

SEQ ID NO: 386300 - DNA, 622 bp, Homo sapiens
tttaggaaataatgacaagtaaaaaggccatacatgttcagtacagatgccattttttcaactacctttaatctgtggttggttgaatccactaatacagaacctacagatacagagatccaactttatatacttcctaaaattttgaagggcatttttaaagaagtaaataaggcagtcaaaactaggaacagttggaaaataacactaattcaatggaaataagccagaaattcatcagatgttaaaacctacagacatggaaaagcttatatggataatgagtaggcaccagggttagactttcctttcagttagttctaaattctaggggaagtttaaactaaagggaagaaattaagaaaatagtaaacacaaactgayatctgaacatttttaaaatgaaagtgaaacattaccaattcatgcatccttgctgagcgggctctcactctgaagatcatttctaactttctttggcctggtagattttcttaaatgttatcctcaattaggttacactgttattttttaaaacttacctttataaaagcatagccaacaccattatctgtaaaaaagagaccaagtgaatcctcagatttatacacattcacttctt

SEQ ID NO: 386301 - DNA, 590 bp, Homo sapiens
atatatatttgtaaactaatgaaggacacagcccaattatggactattacttctattaatatccttaaaaagaaaaagcctgtttttgtaattaatgtttcaaaagctttctagtgagcaccaaattataactttgtatgttcctaaatgaccgaatatatttcaaatgtatatgctaaattacacagactacataaataaataggcaaatgaacttttctttttaatatttaaatggagtcttgctatgttgcccaggctggtcttgaatacctaggctcaagcaatccttctgccttagcctcccaaagtgctagtattataggtgtgagccaccacacttggccagcaaatgagctgtaaaagaatttaatctagtcttggaaattgagaaacaggggatatcaatggcatactggagaaaaatggcactgagaataagaattccctttccagcttcctttttttgagacagtctccctctgccacrttgcccaggctggagtgcagtggcatgatgtcagctcattgcaacctccacctcccaggttcaagcgattctcctgccttagcctcccaagtagctgcga

SEQ ID NO: 386302 - DNA, 515 bp, Homo sapiens
ggggaggaaataactcttagctgaaattcaaataaattttattatgagtaattggaaatacagaaatggaaaatggaaagaggaaaaggaggtggggtgatagagggggaagaataaatttaataataagaatatgtakgtgctccatgagcaagcaactactgtgtgtctggcttagtcctcaatattttacatgcattatctcatctgtgtatacttagaggaaaccctctggcatggactccagattactccacatctccaaggttatggtgaataaacattgaagagacaagaacaaatgtggacagtaagctaatttaacactagttctacaataacatacatatggaaaaactgcacgaggtttaacgcacagccacattcaaagtcacacattttaatcttcaagcactgtatgcaaaactgaaaaatagtaatagtaattggttgacatacaagcctttgatgactcagagttcaacaaataatttctgttatacagacccaaaata

SEQ ID NO: 386303 - DNA, 533 bp, Homo sapiens
tcaggtgatgtgcctgccttggcctcccaaagtgctggaattacaggcatgagccactgtgcccagcccctaaaaatatatttaaaaaaaagaaaagaaaatatattttgatggctttgaaaaatawacatgtatgcacatacaccacttaatgcaaattaattttctaatttctaacttacttataaaaacaattattagacaattcttggctgttgcctcagagatgtatttaagtggcccatttatttctatcccagaagcacactttgtactgaaatagcaataataaagaggatacttacctaaaggtctatggattctaacaggctacacatagatactatgtacagtctcctaaaacattaagattacactgaatgcttagaaatgaaagccattgaataactctcctctacattatatttgtggtcactgatgataaccatacaattaagaaacaatatgaaaataaaatttagtcagatacttttttttttgagagacagagtcttgctctgtctctcaggctg

SEQ ID NO: 386304 - DNA, 665 bp, Homo sapiens
ttctgtcagcacttctttccctagggccgaggcacaggctgttgggaggaagacagatcctttctgccttttccatttccctttctctctacctgagcttcatcaaatagcaaaaactaggggtttgcttgtttattgaaaatgtcagttaaaataggctcttgtaaagaatgatatatgtrtatataaacattttattttaatttaaaacatagatgtgaatagtgaacagcattcgttatttgggtgatgggtacacgaaaagcccagacttcaccactagcagcatatgcatgtaagaaaccggcactcgtactcccgacatgaaaactaaaaatcaatgtttaggttcatagcaaaactgaacagaaagtacagaaagttcccatttctatgttttaaaacatagaagtgtacattcttttatcactcttaatgtaaaaggcctttgagtagaggacacaaattggaattctaagatgtctgtcttatgtaatcacaaccttaatgcatatgtgtgggttctatttcattaaaaaaaaacagatatgtgaaatgatggctgtttaaaaatattttttcttttcaatcatggttcactgcagtctcaaactcccaggcttagatgatcttcacaccatagtctcctgagtagcttggactac

SEQ ID NO: 386305 - DNA, 665 bp, Homo sapiens
ttctgtcagcacttctttccctagggccgaggcacaggctgttgggaggaagacagatcctttctgccttttccatttccctttctctctacctgagcttcatcaaatagcaaaaactaggggtttgcttgtttattgaaaatgtcagttaaaataggctcttgtaaagaatgatatatgtatatataaacattttattttaatttaaaacatagatgtgaatagtgaacagcattcgttatttgggtgatgggtacacraaaagcccagacttcaccactagcagcatatgcatgtaagaaaccggcactcgtactcccgacatgaaaactaaaaatcaatgtttaggttcatagcaaaactgaacagaaagtacagaaagttcccatttctatgttttaaaacatagaagtgtacattcttttatcactcttaatgtaaaaggcctttgagtagaggacacaaattggaattctaagatgtctgtcttatgtaatcacaaccttaatgcatatgtgtgggttctatttcattaaaaaaaaacagatatgtgaaatgatggctgtttaaaaatattttttcttttcaatcatggttcactgcagtctcaaactcccaggcttagatgatcttcacaccatagtctcctgagtagcttggactac

SEQ ID NO: 386306 - DNA, 665 bp, Homo sapiens
ttctgtcagcacttctttccctagggccgaggcacaggctgttgggaggaagacagatcctttctgccttttccatttccctttctctctacctgagcttcatcaaatagcaaaaactaggggtttgcttgtttattgaaaatgtcagttaaaataggctcttgtaaagaatgatatatgtatatataaacattttattttaatttaaaacatagatgtgaatagtgaacagcattcgttatttgggtgatgggtacacgaaaagcccagacttcaccactagcagcatatgcatgtaagaaaccggcactcgtrctcccgacatgaaaactaaaaatcaatgtttaggttcatagcaaaactgaacagaaagtacagaaagttcccatttctatgttttaaaacatagaagtgtacattcttttatcactcttaatgtaaaaggcctttgagtagaggacacaaattggaattctaagatgtctgtcttatgtaatcacaaccttaatgcatatgtgtgggttctatttcattaaaaaaaaacagatatgtgaaatgatggctgtttaaaaatattttttcttttcaatcatggttcactgcagtctcaaactcccaggcttagatgatcttcacaccatagtctcctgagtagcttggactac

SEQ ID NO: 386307 - DNA, 665 bp, Homo sapiens
ttctgtcagcacttctttccctagggccgaggcacaggctgttgggaggaagacagatcctttctgccttttccatttccctttctctctacctgagcttcatcaaatagcaaaaactaggggtttgcttgtttattgaaaatgtcagttaaaataggctcttgtaaagaatgatatatgtatatataaacattttattttaatttaaaacatagatgtgaatagtgaacagcattcgttatttgggtgatgggtacacgaaaagcccagacttcaccactagcagcatatgcatgtaagaaaccggcactcgtactcccgacatgaaaactaaaaatcaatgtttaggttcatagcaaaactgaacagaaagtacagaaagttcccatttctatgttttaaaacatagaagtgtacattctyttatcactcttaatgtaaaaggcctttgagtagaggacacaaattggaattctaagatgtctgtcttatgtaatcacaaccttaatgcatatgtgtgggttctatttcattaaaaaaaaacagatatgtgaaatgatggctgtttaaaaatattttttcttttcaatcatggttcactgcagtctcaaactcccaggcttagatgatcttcacaccatagtctcctgagtagcttggactac

SEQ ID NO: 386308 - DNA, 547 bp, Homo sapiens
aaatatgttcctttattatgtaaaaaagtcacttccctctatacatgaatttccaggagagaatccatgacctgatgagtgaagagaagacatcctatctaagacatacacaccttctttttcacttagcattgatcgcatttttaaaaactctctcatttgtatgtcctgtatgtcagtgggcctatttgtgttcaataaaaaaattatagcaagttaaggccaggcacattggctcaagcctataatcctagcattttgggaggccgaggctggtgaatcctttgagtccagaagtttgagaacagcctgaacaagatggcgagacctcgtctctgcataaaatacaaaaactagttgggcatggtggcacatgtctatagtctcarctactggggtggctgaggtgggaggattacttgagccaggaagattgaggctacagtgatctatgattgcaccactgcactgtccataaaagatgccgtctgttggtgatgcccttccaggagaactatctcttttttttttgagatggagtgttgct

SEQ ID NO: 386309 - DNA, 551 bp, Homo sapiens
ctgcctttatttgcttcctatcttctaagaccagggagggtcacagtgatggagggggtaaaacccttcaatggtaagccaaagaattagtgtctatctcagctctgcttctgcctgttttctccagatgtttacctattctctttcatggtaaccgccgaagagcccagaggaacaataccartatcccactgatttattttatatcttaaaaaattactcaggtcctgcagtactgagctcatgttcaaattaagtttgctgaaaatctaatttgggatgagtaatttaatttggctactacaattaaaagtggtgcagtatttgtgttttagaggaaaatcgtattagattcacctaatcttattagtggactatcatatttagattgcattctatctggaacagatacatactagattgatttctttcataaatcatttgggagaccaaagggactagacttctccctgctccttgaccacccacccgacgcaggtcagtgcagtcagtgaatgcaaaagaggcctcactgagaagcccactgcaca

SEQ ID NO: 386310 - DNA, 549 bp, Homo sapiens
tcttcctgtaccagaggtcacagctattggttgactagagctatgtaagaatgtgagattttagatttaaaaataagagcaataaagagtttctgaaagattttgttttggaggacatagaaggtgcatacttgaagcggtcagtccttgtttatctgtactattgtctgacaccagataagaccaagttttggttaccattggttggaagctagcatagtgtcagacacattgcagacaccaaaatgttacttgaatgcacaaaagaaggtctaactcagaattaagtgatgcttcattatatcagatgagtccaaaattaagtacacaagaagatccacagaaatgaagaaaatattagaacttctatttatgtttatttttatctcatttgtatatatatttagcattatattatattcccacaatattacacatggataatttaacacaaatgaataggcatgtattgaatgtgcttattgaaaatagttctrctgatgacatggtatcatcaaagtcctgtttcaccacattattgccccaaaa

SEQ ID NO: 386311 - DNA, 631 bp, Homo sapiens
acatgaggggaaatatgaaatattctgagctaatagraaatgtatatataataccaagtggaattgctgtttcaaaggtttataaagtatcattacccattggagcatttatctggtatttgagagccagagtatgaagtaatgtaaataaaatgtctcatatttgtgtatgacttcagcttttaactcaaagatatatcagtcctgtttatgataatgaaagattgaaaataacttgaacactcattaatatatgttagttaaataataaaacacatataaggcagtactatgcagacagtaaaatgttataagtctttacccattaatttttaaaaatgcctacaatatatttctaggaaaagaagacgggattcaaagtacgctgtgtagtcttatttcacttaaatatatacatatgtatgtgtgtatacatatatacatatgtgtgtatacatatatacatgtgtgtatgtataaaaacacacttgcacccactattatatttaatatgtatatgtatacatttgtatgttgcaaaactgttaatggtggttatctctgggtggtgagattatgagtactttctgtgggatacttctttttagttctattttttgatgttttaatg

SEQ ID NO: 386312 - DNA, 548 bp, Homo sapiens
aatctttctctcttttagcatgtctaagtttaggataaacactgcctgtacctagctgttatcattaatgctctaagatttaaaccactgaaaaatacacggaactagatcttaaacacacacatattttaaaatctactgtctgactaggataacattactccttttagtgtctttaatttgtctttttaaatggtcactatttgtaactttcaatagtttcccaaaagcagtttggtctaaatcagtgtgttgtgtcctgtcaagagtgttttgccatcsttttagctccatttatctttccaggcagagtctctttaaacattgttgtggagaaaaattagcaagataaggttaaaatcattggttgtaattttatgaattgtataatgtacccgattcagtctggcatcagtgtgagttttcatgcattacaggcttcccaacttcctccagtttgtctttgcaaaatgggctttggtccaggctgtctgtctgctaaaaagtggttcaattttgaggcccgataagatgagttttaattaaat

SEQ ID NO: 386313 - DNA, 595 bp, Homo sapiens
acatggtctccaaagagcagcaggacaagtgtgggttggttggaaaatggagggacagtcgtaaatgtacgtgtccttccatcagggatgacagtgctgttctctgggccattttctttttgaaggccacattgcctagagtgcattggtagtgaaatttaggtctttttgactttcattggactttgctttatttatttattttttttgcraagaaatcatatgacaaatgtttcttcactgtttattatataaaggacactggatgagggaccaggaacacagagccacacacggtcctattctctcaaccaagaatcacatactgaattttatttggggtccagcaagtattaaagaaggatatttggagaatgttaataaaatatctctgagcggcttgtagtcttggtaagaaagtgaaaaattacattcagaaaattacaggtgaacaatgtaagaaaaaatacagattgactactgtctttggtagctctagtatttaaatctcagggtttggagcaggaaaaaagactatatgcatcacactatgcaggcaggccattttaggagatttttaaaaagtgtaatctct

SEQ ID NO: 386314 - DNA, 595 bp, Homo sapiens
acatggtctccaaagagcagcaggacaagtgtgggttggttggaaaatggagggacagtcgtaaatgtacgtgtccttccatcagggatgacagtgctgttctctgggccattttctttttgaaggccacattgcctagagtgcattggtagtgaaatttaggtctttttgactttcattggactttgctttatttatttattttttttgcaaagaaatcatatgacaaatgtttcttcactgtttattatataaaggacactggatgagggaccaggaacacagagccacacacggtcctattctctcaaccaagaatcacatactgaattttatttggggtccagcaartattaaagaaggatatttggagaatgttaataaaatatctctgagcggcttgtagtcttggtaagaaagtgaaaaattacattcagaaaattacaggtgaacaatgtaagaaaaaatacagattgactactgtctttggtagctctagtatttaaatctcagggtttggagcaggaaaaaagactatatgcatcacactatgcaggcaggccattttaggagatttttaaaaagtgtaatctct

SEQ ID NO: 386315 - DNA, 684 bp, Homo sapiens
aaaactctcaaactgcttttaatctcttccatttatcttgaaacctttttaaaagaagaaagagaagaaaagagaaagtcagtggtgcttctagtataaaagctgtgaaaagcttgcaccctaaagcctatattattgcagatacagtaaggggcagttttcttcctatctcagcaaagctagaaaacaatattctagactcatagcagtcagcaaacttttcctgtaaaggtctatacagtaaaaatttcaggcttcgtgggacatacagtctctgctgcaagtactggtcttgccattgctgtgcaaaagacgccatagactttaagtaaatgcaaaagcttgactcataaaactttatttacaaaaacaggcagctgtccagatttgcaagcagtgcctctcaaacttgaatgggcataggaatcactccaaggatcttgtgaaaatgcagatttagattctgtaggtgtgcactgggacctgattttgcaactctaacaaccttccagatgcaatgctgwtgttgctggtaactagactcaagagagcacacagataaaggcaaccaggaaaatgtttctgatccccaaactactatacttacatcatttgactgcttaaatggggtgctagcttctcaaaagcagtcaacaagctcatactaagaatgtatttaacgtt

SEQ ID NO: 386316 - DNA, 684 bp, Homo sapiens
aaaactctcaaactgcttttaatctcttccatttatcttgaaacctttttaaaagaagaaagagaagaaaagagaaagtcagtggtgcttctagtataaaagctgtgaaaagcttgcaccctaaagcctatattattgcagatacagtaaggggcagttttcttcctatctcagcaaagctagaaaacaatattctagactcatagcagtcagcaaacttttcctgtaaaggtctatacagtaaaaatttcaggcttcgtgggacatacagtctctgctgcaagtactggtcttgccattgctgtgcaaaagacgccatagactttaagtaaatgcaaaagcttgactcataaaactttatttacaaaaacaggcagctgtccagatttgcaagcagtgcctctcaaacttgaatgggcataggaatcactccaaggatcttgtgaaaatgcagatttagattctgtaggtgtgcactgggacctgattttgcaactctaacaaccttccagatgcaatgctgatgttgctggtaactagactcaagagagcacacagataaaggcaaccaggaaaatgtttctgatccccaaactactatacttacatcatttgactgcttaaatggggtgctagcttctcaaaagcagtcaacaagctcataytaagaatgtatttaacgtt

SEQ ID NO: 386317 - DNA, 607 bp, Homo sapiens
ttccttgtgcatactggcaatcatcaaatgtatagagcgagtctaccatgactgggagttaggaaggtgatgacaaatatggtgagcctccttccttatggagctaacactctcatcctttgtgatcttcttatatgattttgattatgaaattctatttttaactaattgatttttagatcatagaatttatatctctctttagtttgccattgtgaacttctttaaaacacctatcatagtctcctccgcatcatagcaattgtactatctgtttctctctagattttgaagtgctgtccagatgggaaatctgtcaagcatttttgcattcacccctttttccataaccayccatggaaaattatatgctcaatatatgtttatatactaaatgaatcaatgcatgaatgaataactgcagaatgaatggatttttgttagcaaaaaaatgccttcaagttcaggttgtaataaaatgttttccaaaatctctgtggactaaatatggtggatagatcactaaatgaattaaataaaggtctccagagacttaacaatgaagataacaaacactatacatgcaaagcattttcattaatgtaac

SEQ ID NO: 386318 - DNA, 604 bp, Homo sapiens
taatctgtgaaaataggtttggggccttgaaatgtttcccttttgtcagttggcgtgatacattctatcagtagaggacactagagagacatttcrggaggttttctccctggttccagtgtgctcaatcagcaggctcttgcagcacaacccacttctccagcaagggccacttcttcaacatctgtcccttgtgactgcagaaccaggcttctgcaacatatgtaacttctccagcgccagactcctaaaatgtaggtggcttttccagcatctggttcttgaagtatgagtagcatcttcagtgcctgactcctgcaaagtgtagcagacagcagcacccccagccagccagggagaagggaatgagatcactttcccaaggctgttacatgctctctgatatatagcttcctccagtaacccccttgggcagttttgtagcaaactggctccagtgaggcatctccagtgaaaagttttcccggcaccctaacgggtggatatacaagttctgctggtccagcaacacagtgacttctctgacattcagcaagccaaagccaagtccaccagctgacctagggggtgggagctcttcctt

SEQ ID NO: 386319 - DNA, 592 bp, Homo sapiens
tttccagcatctggttcttgaagtatgagtagcatcttcagtgcctgactcctgcaaagtgtagcagacagcagcacccccagccagccarggagaagggaatgagatcactttcccaaggctgttacatgctctctgatatatagcttcctccagtaacccccttgggcagttttgtagcaaactggctccagtgaggcatctccagtgaaaagttttcccggcaccctaacgggtggatatacaagttctgctggtccagcaacacagtgacttctctgacattcagcaagccaaagccaagtccaccagctgacctagggggtgggagctcttccttggatgctctatctcagccctaggggtattatctgcttcttttatctgtattcttgcattctttagagttccctgtacttcttcctggacaatcccttggtatgccaatcttgtgttacagttatcaattctttatgtgaaactgtccctgttcaaattactgtgtggttttgtatcctgatttgaccctgacagaaacattctggcttctatgaatcattgcaaaataacttatattggaaggattagggct

SEQ ID NO: 386320 - DNA, 592 bp, Homo sapiens
tttccagcatctggttcttgaagtatgagtagcatcttcagtgcctgactcctgcaaagtgtagcagacagcagcacccccagccagccagggagaagggaatgagatcactttcccaaggctgttacatgctctctgatatatagcttcctccagtaacccccttgggcagttttgtagcaaactggctccagtgaggcatctccagtgaaaagttttccsggcaccctaacgggtggatatacaagttctgctggtccagcaacacagtgacttctctgacattcagcaagccaaagccaagtccaccagctgacctagggggtgggagctcttccttggatgctctatctcagccctaggggtattatctgcttcttttatctgtattcttgcattctttagagttccctgtacttcttcctggacaatcccttggtatgccaatcttgtgttacagttatcaattctttatgtgaaactgtccctgttcaaattactgtgtggttttgtatcctgatttgaccctgacagaaacattctggcttctatgaatcattgcaaaataacttatattggaaggattagggct

SEQ ID NO: 386321 - DNA, 605 bp, Homo sapiens
aagaaattagagagtattatgtgtttaaatgccaaaaatccaagaaatatgttgaaacataggtacactgccaggaaagaatgtgaatggcttggaagtcaacttatttagtgttagggagtccagtacyatagctggtttcctgtctctcaattagacagacactagcttaaactgataatatttctggtacataaccattatttggctgtgtccataataattaacacagactttttgttatcatacctcaaggcaaacatgatattagttgcctattgctgtgtaacaaattaccacaaattaaggggcttgaaacaacatccctttattagctcatagttctgtaagatagaaggtatggtgtctgggttctcttctcagggaatcacagtgttgattccctttcagggaatgctgaaatcaaagtgttgcctagaatgagttttcttccagagtccctagagaataatccactgttaagcccatttttgtggctggcagaatttagttccttgcagttataggactagagctctcattgttttgctggctgtcagtggctctcagttcctagaggccatccacattccttgccacatggt

SEQ ID NO: 386322 - DNA, 568 bp, Homo sapiens
ttttgtcagataacctctctcactcatattttcaattcaatcaactcaagatcctaactactattaaggactcgacgtttgcctcctctaagaaatttgccttaactatttacatccgtctcccatcctatttgctgaacttttaggtaggcagcaaacttaaacacacacacacacacacacacacacacacacacacatatgcacacattaagtaaccattttttcacttttaatttctcttcagattctagtgatttcatcttctatttactaaaaataattatctgttcatattacttttaatacagtaatgttcacaaatgaaatattctgtgttgaatccttgttgagaagtgaatgaacaagttacccaggcttcaaaaatgacaaaatgattttgtgtgtgttcccttctcstggtcagtgatgttaatagtttacaatagtgagtaagaataaagaactagtctttttgtttttttttttaacttagttttcaggtttcctttattcaaatggattatttccacattgagagaggtacgaaaactaatttctgttaggt

SEQ ID NO: 386323 - DNA, 591 bp, Homo sapiens
acaacaacattaaataaacaaacttacaaaaattasctgggcatggtggtgcacacctgtaatcccagctgctcaggaggctgagtcaggagaatcacttgaacttgggcggcggaggttggagtgaacagaaattgtgccattgcactccagcctgggcaacagagtgagactccacctcgagaaaaaaaaaaaaaaactatgtctctgtgtggtggctagcataatctgtacaatacatagttagtcattttattggctaaacataaaatcttagaattattagaaatactttacaatttgatttgatattaagcaacttggatgggacttgcattcaataggttgctaaaatacttttttctatacttttataaaactttgtttcttgatattggaaattttaggcttcaatttattaattattggtggattagagaaaatcttagggagactagagacgtcacgttcaaaatgttgaagaaagaaagggctgacatgatcttatggttcttctatggcaagatggagttgaatgcagtagattgactttagccaagaaggctcaagcaagtatatttggcttctgtc

SEQ ID NO: 386324 - DNA, 610 bp, Homo sapiens
aatacaacataggggaaccatagttggtggttaggtgactaaaattccactaagagtttttatgaaattaatatacagatgttagcttattttgagaaggcaatagtgatacctcccatttatcaatcaacatcattttatgatgtccacattttgcactgagccaaacattttgaggcattaggacctaaagtttatctrtagatttccagtgaagttgctctgcaataaacctgaagtgcaactcggaaaatcgtgtttaaaggtttaatcttgtcgaaaaaaaggaatcagtcattttgcaggcatgactgcaatctctatacaattattggtacattttgttattaatgttactaagagttaataactattggacacccactatgtgcacagtaatgtctcaatttgtaagacagctagataaaacaaaggtatttaattccattcgtacagataatgtccttgaaaataataagcaaaagacttttagatgtctttttgctattgctgtttcctttggagtcaggctgcataagcaacagtttctacacatttcagtcctttcctttttattgataaattatcccagagttaaaattattcctag

SEQ ID NO: 386325 - DNA, 610 bp, Homo sapiens
aatacaacataggggaaccatagttggtggttaggtgactaaaattccactaagagtttttatgaaattaatatacagatgttagcttattttgagaaggcaatagtgatacctcccatttatcaatcaacatcattttatgatgtccacattttgcactgagccaaacattttgaggcattaggacctaaagtttatctatagatttccagtgaagttgctctgcaataaacctgaagtgcaactcggaaaatcgtgtttaaaggtttaaycttgtcgaaaaaaaggaatcagtcattttgcaggcatgactgcaatctctatacaattattggtacattttgttattaatgttactaagagttaataactattggacacccactatgtgcacagtaatgtctcaatttgtaagacagctagataaaacaaaggtatttaattccattcgtacagataatgtccttgaaaataataagcaaaagacttttagatgtctttttgctattgctgtttcctttggagtcaggctgcataagcaacagtttctacacatttcagtcctttcctttttattgataaattatcccagagttaaaattattcctag

SEQ ID NO: 386326 - DNA, 520 bp, Homo sapiens
ccattttaaaaggttaacattttcttgaaaatagtacttttaaaagaaataaatagaatttgaaattatacctgtttgaatctgaagcttcatttatctttgtratttttgaggcagtggatattgttttgctaattgcatttagaaatcatgtgtcattttagttttgacatttaatatacataaataatgtccaaagggtagaagtaatttaatctgaaaaatccttatctactttccagttctaataacataattaaagaagtacaaaataccacatataaaatgtatgcttagtttataaagtaagtttccatgttcatggctagtgttccctaaaattcaaagtacattaaaaattctaaaaatataccagaaaacagtggtagactatattagatatgttcacaactaacatattttctttttaccccaaaacatgacagataaaatttcacatgctttaactttctaattctcatcttattgatctataatagacataaatgctgacaataaa

SEQ ID NO: 386327 - DNA, 430 bp, Homo sapiens
agatgactagcagctgtaggagamacagaagatcagccagaatagaggtgaattcaagaacactgcagggatatatttgtgatattaagtcattaaaaaacccattaaggatcccaagagagaatgggccatctgaagcatctgccaagtcccacagcgttaagctacatcacccaacatgaccaatcaagtgagaactttcctgttcttcccttttctttcccttctttatgtttttccttaaattaaaaaaataatgaaattttactcccagaatgtgcttaatctttcccgtctttaaaactagaaggatcaggcactgcagttaaccaggtacaggaggagaagagttggaggagaaaagcaagaagaaatcaactagagaagacccaagatagggaaatggagacacctcaattctaagttttaa

SEQ ID NO: 386328 - DNA, 434 bp, Homo sapiens
cacctccccgcattcaaaaaaatgtggacaattgtaaacatccagtaagctacatattcagtgaaaccagcagacagcagcgaccccaaattataacttatattgggaaacagacagggagtggtactagacttacaaggaatgaagaacagtgacctgttcagagggggacaccagtgacatcccatcctatttttcctacttaaacccagaaaccstcaggcattagaatcttcagatatctcagaaggcatagatgatgcacagggcttgcttaaaagcctacatataaaacactctccaagctccctccaggttctaacactccaggaaaatcttcctcccctcctcccctcaggttcaggaagtttatgatctgggggatttgggtggatgggtgaacagcaggcaccaggcacaaagtatgacactat

SEQ ID NO: 386329 - DNA, 574 bp, Homo sapiens
agcactaaaaccacaggccttctatgttggcaaatagtgaatgcatctagtgctcttaaaataggagagggataagagggaaaaaattatataggcctatggaagaaaaattggtccacatgttaaaagacatggatgaaaagcaggcactgaaagtcatcctctgcaggaacctaaagaaaagttaagtgttagagaatatttgccagcttcaaccaacttatgaaaacagagtcaaagactaaagaataaaagaggctaaaataagaggaccagatatacatagaaacaataaggtcagagatgttaggcaaaaagagaaaaaaagctaagattacaatagaagaattaaaattcattatgsatgtagtatttggctatttcaagttgaattagtgatgaacatcatactttagaataaaaaaaaattcaaaaagcacagcctcccccacccacacaaatcaaagaattagtctgatctcagatatttaatttgtaatactaattgataatcatgacttaataactattaagagaaaaaggttgtgaacctggtattctagacatactctag

SEQ ID NO: 386330 - DNA, 573 bp, Homo sapiens
aattcctgtttgtgttttcggtttactggagtggactgctctacagatttaacacctgccagtttccaaaattgcgtaagccagttctttaaaataaattcacccttcccccaacatctatctcattggttctctttccttggagaaccctgacttacatagagtgattgcatagtattaatacttccattatgtattatcgaactgctctgaagcagaatgaacaaaaaagtaccttattccatatatacatatcctttcattgtcattaacactggttattctcagtggtttttacaaaagatgtacacacatcttyagtcttaattcaactgaaattttatttgctactgaaaaaatttatagattaatatagggggaattgacttttaatatactgagtcttagcattcaagaacatgctttgtctctcaatttattaaaaaatttttaattgaccttaagaagagttttgtaacttttccagtttccagttattggctaagcatatttctaattattttatatttttagtctgattaggattttcttttaccttattatttattaatt

SEQ ID NO: 386331 - DNA, 648 bp, Homo sapiens
tggttttaagaacaaaaacagagggttcccagagaagatattcttcctcaagactgcaacatcaattcctgtttgtgttttcggtttactggagtggactgctctacagatttaacacctgccagtttccaaaattgcgtaagccagttctttaaaataaattcacccttcccccaacatctatctcattggttctctttccttggagaaccctgacttacatagagtgattgcatagtattaatacttccattatgtattatcgaactgctctgaagcagaatgaacaaaaaagtaccttattccatatatacatatcctttcattgtcattaacactggttattctcagtggtttttacaaaagatgtacacacatcttcagtcttaattcaactgaaattttatttgctactgaaaaaatttatagattaatatagggggaattgacttttaatatacygagtcttagcattcaagaacatgctttgtctctcaatttattaaaaaatttttaattgaccttaagaagagttttgtaacttttccagtttccagttattggctaagcatatttctaattattttatatttttagtctgattaggattttcttttaccttattatttattaatttttaaagactat

SEQ ID NO: 386332 - DNA, 575 bp, Homo sapiens
tgatgggcatttgggttgttatcactttttgcctattatgaataatgttgttatgaacattcacatacaagtttttatatgaatatatatttttatttctcttggatctacctaggaatgaatttatcagctgggattttaataggcaaaaaaacctacagatataaatgtagctatctgtaggtctgtttctccagggtggttcaatttctcaaactgctatgtgacaggggtaagtctggctgctgactttctagagctgggtggaagctgaacctttccagagtaggtgggtaaatcaacttcctatgcagagactgctagctgttttaccaatgtccatccctctctctttccttaagaacagagtcctmtattattgggcccaccaatatatccaggtataaagtttcccaggttcccttagaaaaaggtggcaatgagacagaagtcaaagtcaactaggtatggtttcagagagattgctttaaagggagataactcagctggaaagcatgtgtctttttatgggcccatcttttctggtatctaaaacaaatatgttatggttggag

SEQ ID NO: 386333 - DNA, 624 bp, Homo sapiens
ttggattttatttttaccatcttactgtattttctatttttttccccatttttttctgattttcttttttttaaaatcaggttaatcaggtttaaaaaattccattttcttctgtattgcttttgaaaatattttttaatattttcaaatatttcaataaaaatactctatttttactcttctagtagttgtccttaacattttaacacgtatacttaaagcctaaagttaatcacgatttctatccttttctcgaataattcaacaatcttaaaatacttcaattccaattacccacttcctatctctgacatattaatgttgtccactatttcagttttaccttatcacgactgtgattatgaattctcaggatgtttttccccctcccacctcacctaccagtccaggttaagataattaagatttgtctatatttgtcaatgagagwtttttctaacttcaactctcactgaaggtgtaactcattcagaggcccagtcctatggggaagaatgacataggcctttcagttctaattctttactttgttagacccttggcccatctcctatattatagccattaaaacttaactctaatattctaaaattggtaaatgcc

SEQ ID NO: 386334 - DNA, 571 bp, Homo sapiens
ctttatgaagttttaacttggtctattctcatccccttctgcccagctctacagcagcctcaaaaacatgatagcttgggaaaaaaaaaaaaaccagccacttaacagccatgaragggggaaaaaggttcggagctcccctaaaatactatccccagaaaattattactattttacctgtctcccctcagggcttgtctctatttaacctgattcaaatctcacttagtaaaaagtcttatccccaagatgtttgtcaaaaacaatcagtggcaatggtttaaaactgcaggggcctagggcagcaataccagttggggcaagcaagaagttggccaaaaaacttaaaagaaaaagctggatatttatacagccatagaggactttaaaaaggtcctacatattcttggtaatctagaaggccataaacatgtacaagtccatgagtctgtccagaaaagacctgaaaaggacctatgctctcacctctgacctttaggctctgtgcaagcagaaagtgaagactaaaaaacagttgtaaatttctggccaatgcattggaggtgcaccc

SEQ ID NO: 386335 - DNA, 571 bp, Homo sapiens
ctttatgaagttttaacttggtctattctcatccccttctgcccagctctacagcagcctcaaaaacatgatagcttgggaaaaaaaaaaaaaccagccacttaacagccatgaaagggggaaaaaggttcggagctcccctaaaatactatccccagaaaattattactattttacctgtctcccctcagggcttgtctctatttaacctgattcaratctcacttagtaaaaagtcttatccccaagatgtttgtcaaaaacaatcagtggcaatggtttaaaactgcaggggcctagggcagcaataccagttggggcaagcaagaagttggccaaaaaacttaaaagaaaaagctggatatttatacagccatagaggactttaaaaaggtcctacatattcttggtaatctagaaggccataaacatgtacaagtccatgagtctgtccagaaaagacctgaaaaggacctatgctctcacctctgacctttaggctctgtgcaagcagaaagtgaagactaaaaaacagttgtaaatttctggccaatgcattggaggtgcaccc

SEQ ID NO: 386336 - DNA, 571 bp, Homo sapiens
ctttatgaagttttaacttggtctattctcatccccttctgcccagctctacagcagcctcaaaaacatgatagcttgggaaaaaaaaaaaaaccagccacttaacagccatgaaagggggaaaaaggttcggagctcccctaaaatactatccccagaaaattattactattttacctgtctcccctcagggcttgtctctatttaacctgattcaaatctcacttagtaaaaagtcttatccccaagatgtttgtcaaaaacaatcagtggcaatggtttaaaactgcagkggcctagggcagcaataccagttggggcaagcaagaagttggccaaaaaacttaaaagaaaaagctggatatttatacagccatagaggactttaaaaaggtcctacatattcttggtaatctagaaggccataaacatgtacaagtccatgagtctgtccagaaaagacctgaaaaggacctatgctctcacctctgacctttaggctctgtgcaagcagaaagtgaagactaaaaaacagttgtaaatttctggccaatgcattggaggtgcaccc

SEQ ID NO: 386337 - DNA, 571 bp, Homo sapiens
ctttatgaagttttaacttggtctattctcatccccttctgcccagctctacagcagcctcaaaaacatgatagcttgggaaaaaaaaaaaaaccagccacttaacagccatgaaagggggaaaaaggttcggagctcccctaaaatactatccccagaaaattattactattttacctgtctcccctcagggcttgtctctatttaacctgattcaaatctcacttagtaaaaagtcttatccccaagatgtttgtcaaaaacaatcagtggcaatggtttaaaactgcaggggcctagggcagcaataccagttggggcaagcaagaagttggccaaaaaacttaaaagaaaaagctggatatttatacagccatagaggactttraaaaggtcctacatattcttggtaatctagaaggccataaacatgtacaagtccatgagtctgtccagaaaagacctgaaaaggacctatgctctcacctctgacctttaggctctgtgcaagcagaaagtgaagactaaaaaacagttgtaaatttctggccaatgcattggaggtgcaccc

SEQ ID NO: 386338 - DNA, 620 bp, Homo sapiens
tgcttccctccatactaactggcatcgtagtttagtgctctgccttttgggggtctggagggaggatggttgaaactttggtgtgggtgcactgcttacttggtggcaggtatctctctggatgacactaactcagaatcttgttgcatgctggaaatggrgagcatgctttactaaagaatctgaccacaggtgttagagctggaactgacagattttcagatgataggtaagatccagagcaggttacaggtcagggagaacacattttgcacctttaacataagcttatacggggttaaaaataccattctgaagatgtgtcttgtggaattgggtgtatgctctcagtatacaggctgattgttcctgtcatatttgatggcccttaatatggagaaaactgttctgttgatttattctcacactaacagctctcctttttggtcactgcattaattttagtcagttactttcttgcttctaaagaatctttttatcttaatggcagatcatttttagttagaagtaacacatatcctctcccatctgggtactgacagagtttggaaaagccattatctttatagtttaagagacagcttgatgttattgttaca

SEQ ID NO: 386339 - DNA, 534 bp, Homo sapiens
attgtctctatattcaaaaacaytgtttttactcctgatcctgaaataatggaaatcacaaacaagatatataaactcagattgttttacaccatcacttgtcactattttacatggtgtcacaaactaactgcattcattattaatttgcattaagagctgcattagtctttcaaatgccaacagcttttcctctgaacattttcttttctgcttatgaattactgttctggtttttacagtctgggcaggtttccattaaatcctttttgtttcatgggttcttgtgtgatgtaatactaagtcatttgctaaattactatgttctattataatatggtattgtatattttaatatatctttttatagatttttatattgtatttattcctttgaagaggaatagacagagagagatgtattgttttatttttttttttttttcattgggctggagctgtgttataatatagacagtactggtaggagttaggcaaaaaaaaaaaaaaaaaattggtgtgccatagaaaagg

SEQ ID NO: 386340 - DNA, 565 bp, Homo sapiens
tatgtatgagtagacactgaccaagatcttgtctcaataagattttaaatgtaaagattttcatcttttacctattgtcctctgaattccgcccatatcattctcaccttagtttaatggccctgccttgatgcaatttgaaataagctgctaaggagataacacccttaatctattcattgctggtgcgcttacccagtctggtttagaaccgtttaacaaaggcttagaatcataatgtctatgattattacctcttagctcctagttttactgacttccatgtctggaattaccagcacttctttttcgtacatatggattatatgaactaaatgtattgtttcttccctcacyactgaaaatctattcaatatatggagttacaattcaaagtattttacaacccagaaaatatggccattccgtatgtggtgtgtatttcagaggtgctctgcaagctccatgaggacaggcgtgaagttcaggctacatgcctggtacgtaatagacgctctgacagacatttgctgaatgaataagttagtcactacggcgtttgtgg

SEQ ID NO: 386341 - DNA, 565 bp, Homo sapiens
tatgtatgagtagacactgaccaagatcttgtctcaataagattttaaatgtaaagattttcatcttttacctattgtcctctgaattccgcccatatcattctcaccttagtttaatggccctgccttgatgcaatttgaaataagctgctaaggagataacacccttaatctattcattgctggtgcgcttacccagtctggtttagaaccgtttaacaaaggcttagaatcataatgtctatgattattacctcttagctcctagttttactgacttccatgtctggaattaccagcacttctttttcgtacatatggattatatgaactaaatgtattgtttcttccctcactactgaaaatctattcaatatatggagttacaattcaaagtattttacaacccagaaaatatggccattccgtatgtggtgtgtatttcagaggtgctctgcaagctccatgaggacaggcrtgaagttcaggctacatgcctggtacgtaatagacgctctgacagacatttgctgaatgaataagttagtcactacggcgtttgtgg

SEQ ID NO: 386342 - DNA, 575 bp, Homo sapiens
tttcaccattaagtttatattatagataaaataaatttttccagaatttagggtattttttttttaacctggaagagtcctttaacaatcagtgaagggatgaatttatggtaaggtatgtttaatactcaaacaattatccttgagttttggtacacaagatgtgtgtatacacataactcagttcttttagtatggatgtctaagcagcattcactggcaggcaactkgtatttccacatctgaattcttctttaaactttaaaatgaagaaaatgatagttgcctcatgtaaagttgctagtgcaaaaatggctatataataagcattaatgtttacatctgtaagttatttctcctgtagcatagaaggagctaaagtgtgtggtgttaatagctatttgtgtatgaccaagagtaaggattaaaattaaaagggagagaagaacacttctgtccatgctccctgattggggaggccatgaaggcaacctaacagcttcatactaatgaatggcctggtatagtactgagatgacccatattggaggggaaaatacactgaatataccatc

SEQ ID NO: 386343 - DNA, 617 bp, Homo sapiens
gcctcttgcacactattcttgtgtgccttgtttggttagcttctacacatggagtcactcygcatgtggtgtcctgcctcccattgtttgcctggtagctggacctggctcacattttatccactctggaacaactcccttgaccacctttcttgacaccttttccagcagaggtaagccatctgcttctgaccacctttgtgccacacttcacactatgctgcaaggtttccttttcccactagattggtgctctgtgtcattttgcctttttcattttcttatggccaaagcagagcccagtaccaaattaatgtgtctactttaaattactttgctttttttttggtctcattttcttcttggttacaaacactttataaacagagaaactgcctaaaatggttacactctttactgagctcccaaatgtataaacccaagagctatttatctgagaaagaagtcgtgttcttactattttctgtttcatttagcatctttttcttttttagttttggtttgcattccaactgtttattattcatgtcataggtcctttttactttcttttcaggatcttaaatactaagatattagtatacttattaaagaaa

SEQ ID NO: 386344 - DNA, 571 bp, Homo sapiens
cgacatgagaattggtataacttttgattatatctggctcttgggcttatggagattggatcaagtgttacacttagcattttagaagcccaatggaaacaatcactcatgtctctggaagaagtacttgaaaatgtttattgagctgtggtcagggaaatcagttatttacaattttctcctatgtgcacttgcatccttagtctgagacagtgataatagcccttcagtctcaaagcaaggttttaaaatgatgatggtttactttgcttctgaatgacaattctgagtcatttaaacaacctcaaatggactttagagattaatttcacattccaaagatctgactttttcaatttaagttcatttccagcattacaaaaggggggaacaacttatctaccttacttttatttttaaagacaatagcaaaagaaraaaacctagtatgttaattattgttaaacacaatattaaactaagtaagtttaagtaatcactagtatctaccttccaaagagaatacaaggctgtttaaaatgtactctcagaatacttggtaatcactagt

SEQ ID NO: 386345 - DNA, 524 bp, Homo sapiens
cctcccacaacacgtggggattatgggagctagagttcaagatgagatttgggtggggacacagccaaaccatatcagagtagaaggaagataacagagtggtgctgtgctcttcaaataattattggtgtctcctttcaycacgttgacttcccaccaaaaacctggcacacaaaccagacatcatcctgttttctgctagtctcacaggccatatgaaagcaggcactttgtcactaataagggaattaggattactgggggagagacagggggatattgtagagtgatcaatccttcatgtttgcctgggaccctctaggctttaacatagaaagtctagtgtcccaggaaactctcagttcctttgaaaaccatacagttaactcctctcacctacctggagtggtcttacagaaaattcaattatgcatggattcatatacatactttttttttacaacttcaaaatgtctagattgcatctgcacaaatatcagttattcagttataaaaccagaaag

SEQ ID NO: 386346 - DNA, 597 bp, Homo sapiens
atttgagaactcctgcaatcactgtccctagagaactgagcacctctactgcccttccggccaccagaagaacctgtggccaccagytcatagtagttgctttcatcttccaaatctctgcttggcagaagctcggtcatgtgaagaatctagatgcaagggaaactgagaaatgtagtctttttcatgacaaacagaaggttgagtcattttgaatgagccaatttcccagtcttccaccaaacctccacaacaacaaatttgttgttaagggcaaaccaatttatggttgtcctactgtcttggtaagtagtttcattgtctgtataagatcttgtttcctagaaatacttttaatttaatatccatttttatctagtactagtattgctaggccagctttttgttgttgttgttgttgtcactaattttctggtatgtcttttttcatgcctttatttgtaatttttctgtgttattttgtttgaggtacataacttataaacagatatatacctgcatttttgaaaagcctatctaaaagtcttatcctttagtaggtgagtttaaatctgacaatttatctctgacatttta

SEQ ID NO: 386347 - DNA, 597 bp, Homo sapiens
atttgagaactcctgcaatcactgtccctagagaactgagcacctctactgcccttccggccaccagaagaacctgtggccaccagctcatagtagttgctttcatcttccaaatctctgcttggcagaagctcggtcatgtgaagaatctagatgcaagggaaactgagaaatgtagtcttttycatgacaaacagaaggttgagtcattttgaatgagccaatttcccagtcttccaccaaacctccacaacaacaaatttgttgttaagggcaaaccaatttatggttgtcctactgtcttggtaagtagtttcattgtctgtataagatcttgtttcctagaaatacttttaatttaatatccatttttatctagtactagtattgctaggccagctttttgttgttgttgttgttgtcactaattttctggtatgtcttttttcatgcctttatttgtaatttttctgtgttattttgtttgaggtacataacttataaacagatatatacctgcatttttgaaaagcctatctaaaagtcttatcctttagtaggtgagtttaaatctgacaatttatctctgacatttta

SEQ ID NO: 386348 - DNA, 602 bp, Homo sapiens
atgtcatattttttacagttaagtgattatgtgtaaataagtgttagaaaatgattacttattgttagcatataaattcagagtcaggaatgttggtgatgccatgcaaccacagactgtccacatgggtggccaagatagtgacacctttgctttttgatgtacaccttggctttcaatgtacacaaattttgtttcatamataaaattgtttaaaatattataaaaatttatcatcaggctatgtgtataagttatatgcaaaaaattgttaaaaatacataaacgaatattgtgtttaggcttggcctcatcacaaaataccttattatgtatataaaaagattccaaaataaaaaaaagtctaaaattcaaaatacttctggtcccaagcattttggataagggctactcaatctgtaatatctcattgtagctttaaatttactttccttgatgataataatgttgaacaccttttaaatattctaatcatatatttgaatttagaccactgatagtttaggcagaagtttgatcttattcatatttctagagatacctcttgttgctccatggagaattggctgtagggaaataca

SEQ ID NO: 386349 - DNA, 602 bp, Homo sapiens
atgtcatattttttacagttaagtgattatgtgtaaataagtgttagaaaatgattacttattgttagcatataaattcagagtcaggaatgttggtgatgccatgcaaccacagactgtccacatgggtggccaagatagtgacacctttgctttttgatgtacaccttggctttcaatgtacacaaattttgtttcatacataaaattgtttaaaatattataaaaatttatcatcaggctatgtgtataagttatatgcaaaaaattgttaaaaatacataaacgaatattgtgtttaggcttggcctcatcacaaaataccttattatgtatataaaaagattccaaaataaaaaaaagtctaaaattcaaaatacttctggtcccaagcattttggataagggctactcaatctgtaatatctcattgtagctttaaatttactttccttgatgataataatgttgaacaccttttaaatattctaatcatatatttgaatttagaccaytgatagtttaggcagaagtttgatcttattcatatttctagagatacctcttgttgctccatggagaattggctgtagggaaataca

SEQ ID NO: 386350 - DNA, 546 bp, Homo sapiens
gtgtagtgttacttcctaccattaaggcaggataaaaagaaatacaatagtttcactaaaaacgaaggttttgttcatttttttctcttcatttctctgtttactgctgcatgacaagtagagaaaagacgaagcatgttagaatccatggcagagtctgctatgtatcttggctctggtagactatcaaaacctcaattaactcattttcaaaataccgctatgatagaagtttctctccctcaaggaacccgattcacttatagttactaatctgcaaaaaggcacagggagactttcatgaagaaaaaagatacatatggtaaacaaacctatgtattattttctttacaaaatacacaagctaaagctttgaatgaaacaccaggtgggggttggcaaratattttaaatatttccaaaagctcagtaaaaatgttattgacattaaaacaaaagttcctgatcttgcttttggcttgcattgctatgttgactaaatgccctaattaggggttatatatgtctaattggggattacatatg

SEQ ID NO: 386351 - DNA, 565 bp, Homo sapiens
tagaggaagagaaacttgtggaaaagttctttttttttcttttttttttcttaaagaagggcagccaaggtagtaacctaaaaatagtgcccaggcatatgagagttgtcctacgaggttaaagaacacactgttccactgtatggctttggccctgagtggccagggaggtcaacttgaccctgccatgttggtttgacttactaagacacaggaatcaytgttttccttgaccagggtctcacaccctggaggaatgttaagtaagagaaagaacctctttcctgaatattgacatgtaaaagaccaaagtaatttttctgaacttctgcaattctgagaactctccaaggaatttacagtgattttagtgcttgtcagcatttttccatgaggactttcatacatttgactctttagttcacaggttcccattgattgtgagcaagatatttatctctttagcccttggggatccagctgagagcaatctcttgcatttttttacccgtgtatgtacagatatcatttcttgtgtatgccatgacttgaaaaagtttgggaa

SEQ ID NO: 386352 - DNA, 482 bp, Homo sapiens
gagaaaaccaatttatagatgtatcagagctctaagggattctctttcacttccttgggactcccaagcagaggaattaatagattaggagggtcttttggggggttggtttaaattttcagggcgatagaggctaacttctcgttggccttcatgaattttcaatatatcatcttttcgctgacttatccctgtttgatttctgagtttggattaataactatgttttttaacttcaacattctcacaaacaatttctgcataaaacttcttctttaaagcttaaaaagaaaaaaaaatctacctaatggagcactgaactagaacacaaaatacttgggttctaggcctggttctgccatcaactagcagtgtgtgagtttgggcaagttttttcatcatctrtccaggcctgctttgctcgtttgtcaaagagggatggctttgcagatggctaagtttccttcaggctctgacatctg

SEQ ID NO: 386353 - DNA, 584 bp, Homo sapiens
ttattcatgattattctcttttctccttttatcctcctaccataaatcctaactctgcctcatggggtgaagtaaaaattgaggaaagaagtagatcagaagctttgaagagtttttttccaggtgatggtaggaccagccactgggaaggagtcatattcagcagacataggaaagaaaaaagagttcctgaagattccattatttatctgtaactaatatatgaaagtttgactgggtttttctgaacattcacataatgcaaatacataacatggaatgcatttctgctttacatctattatccctggagaaagaagatgaatgaatgcatactaagttatgaaatgggtcataattaatgtgagatatatgtaaatgtattatttatgaatgaataaataagcactacttgctgaaatcctaaaagctggcaagaatcaytagaatccttaggaatattagctctggcttaattcaaacagaataatcaacccttgatgtcaggggtactagttaaactatttttcagagttcctgaaactcttgaaatctaaatatttccagtatttttcaatggattt

SEQ ID NO: 386354 - DNA, 601 bp, Homo sapiens
tccaaagaagcttcataacgaaatgactggggagttgtaaaccaaacaattcacagtgttctcaaaggcctggaagtcatttgacttctttccagctagagaagtgtgtccttaatgacacctaataacacagcttccaaatacatgaagtgaaaactaatagaactgtgaggaaaaatagacaaatccacaattatagtcagaggtttcaatacttccctcttgataatcaatagaacaagtagacaagaaatcagtaaggacagaagacttgaacaacactaccaaccaacttgatgtaattgacatttgtagtctactctacccaacaacagcagaatacacattcttttcaaatacacatagaataatcattgagatagaccatattctaggccattaaacaagtgtcaataaattgaaatcattcagagtataatatctgaccacaggggaatttaattaggaatcaaaaatagatacctgaaaaattcctaattattggaaattacactacacamttctaaataatttatgcagcagagaaaaaaatacaagggaaattaggaaacatcttgaaaataataaaaatgaaaatatg

SEQ ID NO: 386355 - DNA, 581 bp, Homo sapiens
ctctagaggaatgagaatgaacttccagttgaatgcatatttaaaattgctgctggggcacacactgctggaactgtaggggacggtggtgcaaagaacttgagcccctaccccctgatgtccctctgcgtggcccttttcttaaccccctttgtgctctgacttgctttgtaaggagagagaaagagagaccacctctttcattcaactatgtatttacagaatacactggggaaggttttgtgggactttggtactatttttctaacttcctgtgagtctataattatttcaaaatgaaaaagttttcaaaagtatatttagttgtggatatacatttatgtgattcagagttggttttctatattgttcaacgtaaaatattgtgaaaaaccccaaactatacatacaagaatataggttgagatatgttactttagttattgcagatttatcagaagcacgtggataacataaacatcagaaatcaacattgcakatattgacccagagatgagaatagtactagttgccattactgagcatcattatgtgctagcctcagtgctggtcgtttttat

SEQ ID NO: 386356 - DNA, 593 bp, Homo sapiens
cttctttttgtttacctcatctaatcagcttttatgtcatcaaattaatcactgctgatccattgatataggtcatttatatacattaaaaacagtacaggcccaatgacttttgtgtacggatcactaaatagttaccacacagagctttcagttactgtgttctktcataaggataaaagtaagaatcccttttatatattgcaaattatttccctgtggctaaacaaaaacagaatatctatgttatagagagagctactcaacgtcactttgtcatatttctgtgacacccactcctccccacagtccatcctccaagaatctgaaatcactccacaaatagattaggcctgaggcttagggttatggttagctcaaatgtaagcgctaatagtatcatctaaacagttgattttaagttgtcggagggccagaaaaatactatactcatttctgattcttccgtgcatagtacagccctcagaagagagtacaggctcaagagtataactgaactcaactcttctcagtctatgcagaggatgatgatacatgcagtgggtgggtttaaaggattcccttgacctctg

SEQ ID NO: 386357 - DNA, 546 bp, Homo sapiens
taaattatgaaatactatttcctggcatttaaaactccaaaatggtctcctttaaagtatttagaccttatctttcactattcctttacatgtaacttaaggattagtcaaactgaacccccagctagggccccagtcagcttcatggtctcctccctcagcttttcctctacatcatatgtcctttccaaactattcaagtcctattttcctactttaagacttcacccaaatgctccttatgccataaaaccttcctgactcttccaaagctgatgtaacatttctcttctttgacacatcatagtattttactgatattttcaaagacgtgctttattttgmtgagtcagtgggttttgttttgtttttttttaatttcataaaccaacccttgaccctaaattcccctggccacagaccatggcctgtgtctttatatttcccaaaagtacagtacctaggacaggatatattcatttattcacaattatttaaagttccactgtgcgtcagacaatgtgatagatgctgttcaataaatac

SEQ ID NO: 386358 - DNA, 611 bp, Homo sapiens
aaaacttcttacatcccaagaactgagcagaaagcttagacatttgtccaccaacacaacagtagactttattaccaggtgaaaacactacagtgctcagttaaggagccaagcctcgaattccatatatccttaatgataaatcccacttttgcccaacaaagttaggtttttcagcatatccactgttgagctgtttwaaaaaaaaaaagaaaaaaaaaaaacatacagaaatgcctatccagccattaaggaatttgttctcagatcactaaaaccaaaaagcgacagtaggtatgatgtctctgcctgccatcttcaccttgagagcaagtcttttgaggcccttactttgatcattttgttaaatgaagagattagatcatgacgttcaacctttttgtacaaaggacctgttttacaagattttcttctcatattttctaagattttttttcctgattaaattcattcccttacattttattattcagaggcatataaatgccaatcttcatgtgactgccttcttataaattaaatccaggggctttccttgacaactctatcttagccaccactcccaacccttacaaaatctacaaaattga

SEQ ID NO: 386359 - DNA, 501 bp, Homo sapiens
aagactgattttttttttaaatttggttgcttgaataaatctgggctgcaaaggaggagatgttgcatcatgtcctttcctttctcgtgtagacgcctgtgtacattatgcaggtttattttctcacctacagggaagggtattctgtggcaacctgttgccatgctgcgatttcctttaaaaaaaaaaacaacaacaacaaaataaaacaaaaaaacggtttactttcttcctacactttgaaacctttaacctcaaaattttatttttaaatrccatgagccctcaaagtcagattaaaagaggtgatagttcctcccggcatgcattccccaaatctgtgttgtagaatgtaaatgaagataaaagatggaatcataatcatccctcttaaaaaaaaaaaaaaaagaactctcaaaactaacattggtcaaaagatgcaaacattccgttataaaattagtaagttctagggatccaatgtgcagcatagtgactata

SEQ ID NO: 386360 - DNA, 569 bp, Homo sapiens
ccttcggcaggacaaggttaggggagttccaggaatagctagcaggccagtgtggttgaagctaaaccaggaaagaaagaaaaaaagaaaggtagaaaataagatcaaaggtagcaaggagcagatcatgggtctgatgaacagttatatgctttctacagagagcttacagttctacaaacttagggcatgagtcaaatgatgctaatgacacaattttatcctgctcacagggtaccttaaaggagaagttatgttctaccaatctctttattcctggtggctaacacacaattggcacttgaatattcaagatcagagtcagggtatttttcttatgacacagggtttacttacaacaccagtaaattatcatgtagctagtacctctaaaattaagtttaataacagtgataagaggcatcataaccctgtactggaggttaacaaggaatctaataagttcactctcaacactggcatcagaggatgaatgtgatagttgcatcttagtattgagctcccatgtcaaattatgtagacrtaagaccctaaattcacctctaatc

SEQ ID NO: 386361 - DNA, 617 bp, Homo sapiens
ccaacagtgctggaggaattttgttgctgataaattgaattgtattgcacctgttttcttaaaaagtgcayggttgggacagaccatgtagcaccttccacttaattcctattacttatttggaggtagcagcacatgggtggttttattcttttcatttaactttgtaaaccattcagggtgtattttatgttaagggtaagacagggatttaaatagaaaaaaacagcccaattattattgttattattattgagacagagtcttgctctgttgcccaggctggagtgcagtggcacaatcttggctcactgcaacctccacctcccaggttcaagtgattctcctgcctcaacctctcgagtatggattacaggcacacgccaccatgcctggctaatttttgtatttttagtagagatgggggttttacaatgttggccaggctgctctcgaactcacggcctcaagtgatccacctgcctaagcctcccaaagtgctgggattacaggtgtaagccactgtgtctggccaaaactagccaattatatcagaaccatttcataagtgtattaggttcttctacagtggaatctcaatatttctgaacaaatga

SEQ ID NO: 386362 - DNA, 620 bp, Homo sapiens
gcaaacccttgaggcctaactcagggtaataagaggccaccagtaccccaggagtgccaggctgtgcccaactgaggccattacttttctgtggctcaaytaaattacatttattgacccgtactcttttcaaggtgaagtactatggattgtcaaaggccattgggataaatttttttattttgtcatgtctgagcccatgtacatgcttatttttttttttaaaaaagaagaagtttggtcaagaagagataaaataactgcacgaacaccatatgttatctattctaagcatattttttctccacaatttaaggtttctgaaatcaagataagtcataatataaatgtatacagctaaaaggaatagggtgtttttctcccgaaatatcattattaaaatgatctgctttttaaaattcagtggtgtcttctgttgatagagatgtaaattagtacactattatggaaaaacagtatgaaggttcctaaaagaattaaaaataaaactaccatttgatccagcaatcctactactgggcatatatccaaagaaaattacatgtcaaaaggatatctgcactctcatgttgattgcagcattattcacaatagccaag

SEQ ID NO: 386363 - DNA, 620 bp, Homo sapiens
gcaaacccttgaggcctaactcagggtaataagaggccaccagtaccccaggagtgccaggctgtgcccaactgaggccattacttttctgtggctcaattaaattacatttattgacccgtactcttttcaaggtgaagtactatggattgtcaaaggccattgggataaatttttttattttgtcatgtctgagcccatgtacatgcttatttttttttttaaaaaagaagaagtttggtcaagaagagataaaataactgcacgaacaccatatgttatctattctaagcatattttttctccacaatttaaggtttctgaaatcaagataagtcataatataaatgtatacagctaaaaggaatagggtgtttttctcccraaatatcattattaaaatgatctgctttttaaaattcagtggtgtcttctgttgatagagatgtaaattagtacactattatggaaaaacagtatgaaggttcctaaaagaattaaaaataaaactaccatttgatccagcaatcctactactgggcatatatccaaagaaaattacatgtcaaaaggatatctgcactctcatgttgattgcagcattattcacaatagccaag

SEQ ID NO: 386364 - DNA, 620 bp, Homo sapiens
gcaaacccttgaggcctaactcagggtaataagaggccaccagtaccccaggagtgccaggctgtgcccaactgaggccattacttttctgtggctcaattaaattacatttattgacccgtactcttttcaaggtgaagtactatggattgtcaaaggccattgggataaatttttttattttgtcatgtctgagcccatgtacatgcttatttttttttttaaaaaagaagaagtttggtcaagaagagataaaataactgcacgaacaccatatgttatctattctaagcatattttttctccacaatttaaggtttctgaaatcaagataagtcataatataaatgtatacagctaaaaggaatagggtgtttttctcccgaaatatcattattaaaatgatctgctttttaaaattcagtggtgtcttctgttgatagagatgtraattagtacactattatggaaaaacagtatgaaggttcctaaaagaattaaaaataaaactaccatttgatccagcaatcctactactgggcatatatccaaagaaaattacatgtcaaaaggatatctgcactctcatgttgattgcagcattattcacaatagccaag

SEQ ID NO: 386365 - DNA, 620 bp, Homo sapiens
gcaaacccttgaggcctaactcagggtaataagaggccaccagtaccccaggagtgccaggctgtgcccaactgaggccattacttttctgtggctcaattaaattacatttattgacccgtactcttttcaaggtgaagtactatggattgtcaaaggccattgggataaatttttttattttgtcatgtctgagcccatgtacatgcttatttttttttttaaaaaagaagaagtttggtcaagaagagataaaataactgcacgaacaccatatgttatctattctaagcatattttttctccacaatttaaggtttctgaaatcaagataagtcataatataaatgtatacagctaaaaggaatagggtgtttttctcccgaaatatcattattaaaatgatctgctttttaaaattcagtggtgtcttctgttgatagagatgtaaattagtacactattatggaaaaacagtatgaaggttcctaaaagaattaaaaataaaactaccatttgatccagcaatcctactactgggcatatatccaaagaaaattacatgtcraaaggatatctgcactctcatgttgattgcagcattattcacaatagccaag

SEQ ID NO: 386366 - DNA, 616 bp, Homo sapiens
ctactggctgtgtgaccttaagaaaatgcacaggggttacctctctgtttcttcatctgtaaaatggagataataactgtatccacttcatacagttgttgtgaggattagatgagtttttgcctgtaaagtgcttaagcagtacctgacagatggtaaacacacaatagattagcaaatattcttctttgatcacttcaatttagtaaagatttttttgagcaactactatgcggcagaccctatatgtaagttatttcatttgattcttgtaacagtcctgtgaacctcttcttatcccattttgcagttaagaaaactaaggctcagagtattaacttgttttgagaaagcagacgagctgcaacctcgactgagcctttggctctgttctgtcaggtcttctattccacaaaattacaggcatctcartgtatactggggagtggacaaggaagggtgcgaacctttgttgatgattattttgcactgggaagattttgcctaatgcctctctgcatataacacttgaaggaaggtatttgctggcttgaaagcaagaggataaacgaaaaaagagaagaggaagaggtaattttctagatgatgctcctcc

SEQ ID NO: 386367 - DNA, 594 bp, Homo sapiens
tctgttttgggctatggcaggagagaattgcgtggcaggtcctgggcttgctgggagagacccagtggatcttgagcaggaggcgaggaacatggatgtagactcaggaaaccttgcaggtgactggagacctttcacagcctctgcagtcctaaagtcagcaggcagtccccatggagatgaggggcattagaggtagaatgctaatacctgggggaatatggctgtgttaggattctccagtgaaacagaaccaataggatatatgtgtgggtgtgcatgcttacacatattacatgtgtttatgtataggtacacrtacttaatatatacaggcacatataagaaatagttaaggaattggctcacatgattatggaggctgagaagttccaagatctgcaattgggaaggtggagacccaggaatgctaatatatggttccagtctgagtctgaagacctgagaaccaggaaagctgatggtgtgagtttcagtctgcacattggcaggcttgagacccaagaagagtctgacctggctggaaaagaccaatgtcccagctcaaagcaatcaggcaggaggcattccctc

SEQ ID NO: 386368 - DNA, 595 bp, Homo sapiens
acaacaattactgagagaactgaaaccctgaatgcattaggcttatggaaaaggctgaagatgagagaaaaaggggtgtgaaggaagagagagttggcacatggcaaggggaaaatctcartcccatttttctaactgtcttggtttttttcttctcaagtagagaactgatcttcaaattagaaacactagaacatatgtaattttaaaaaaccgaagttcaaaaccaagaggaaaaaggaaggtattcctcactaccatgtgtccaggcctgaatcactggcttctgggttcctgaaaaatatgattgcaaaatagtgattggtcatcttttgcaaaatcatgagggatggagaagaaacaaaaagattgcaaaaataaaatattgcagtttttagaaagggggcaaacctgcatcaggaattaccaactagtgaatttgtcattgctcctgggcagaattctagaagagatcattaagcagatggtctgtgagaacttggaaaaggaaatcatgaacactgagagctagtcctaaaaaaccagttacccaagtatgttcaggaaatctgccttacagctgttgcgcaaatta

SEQ ID NO: 386369 - DNA, 595 bp, Homo sapiens
acaacaattactgagagaactgaaaccctgaatgcattaggcttatggaaaaggctgaagatgagagaaaaaggggtgtgaaggaagagagagttggcacatggcaaggggaaaatctcaatcccatttttctaactgtcttggtttttttcttctcaagtagagaactgatcttcaaattagaaacactagaacatatgtaattttaaaaaaccgaagttcaaaaccaagaggaaaaaggaaggtattcctcactaccatgtgtccaggcctgaatcactggcttctgggttcctgaaaaatatgattgcaaaatagtgattggtcatcttttgcaaaatcatgagggatggagaagaaacaaaaagattgcaaaaataaaatattgcagtttttagaaagggggcaaacctgsatcaggaattaccaactagtgaatttgtcattgctcctgggcagaattctagaagagatcattaagcagatggtctgtgagaacttggaaaaggaaatcatgaacactgagagctagtcctaaaaaaccagttacccaagtatgttcaggaaatctgccttacagctgttgcgcaaatta

SEQ ID NO: 386370 - DNA, 595 bp, Homo sapiens
acaacaattactgagagaactgaaaccctgaatgcattaggcttatggaaaaggctgaagatgagagaaaaaggggtgtgaaggaagagagagttggcacatggcaaggggaaaatctcaatcccatttttctaactgtcttggtttttttcttctcaagtagagaactgatcttcaaattagaaacactagaacatatgtaattttaaaaaaccgaagttcaaaaccaagaggaaaaaggaaggtattcctcactaccatgtgtccaggcctgaatcactggcttctgggttcctgaaaaatatgattgcaaaatagtgattggtcatcttttgcaaaatcatgagggatggagaagaaacaaaaagattgcaaaaataaaatattgcagtttttagaaagggggcaaacctgcatcaggaattaccaactagtgaatttgtcattgctcctgggcagaattctagaagagatcattaagcagatggtctgtgagaacttggaaaaggaaatcatgawcactgagagctagtcctaaaaaaccagttacccaagtatgttcaggaaatctgccttacagctgttgcgcaaatta

SEQ ID NO: 386371 - DNA, 623 bp, Homo sapiens
acattaatttgcggatttattagtttgttgatgaatgaggtcgcatggaaaaactttctgcctcttggttatgttggtggaaacttttctaagctttaactagctgactttttggttagctagagattatttacttttaataacaacacgctaagtttctgaaatcagatatagcagagcagtctccagagagctgtggtccaaaggcagtggctgcatccatgtacagttctcatcagattttctgaaaagatgctttatctgttaaggttaagttaaccttggcttactgccrttcctctgttccttccacatctctgtgtcttgtgggcatgccagtttgcattcaaatctgctgtatcagttttaaatccagttctcagtccttagggtattacataagaataagttaactaaagaatccaagaagttttacgtatgatgctgaactaactggatctgacttccttggggaaaatgaatagccaggcagatcacattatagatgagcattaatgacagctggaacacctccctcccttctaagcaggcaaggaacctcccatgtgccaatcactgtgctggcactggggataccaagatgtgttccttgttccttcaag

SEQ ID NO: 386372 - DNA, 658 bp, Homo sapiens
tggaattctcttttagcatcatctgaactttgtacttagttacatacagataaatgcaaagggattgaccgttgactacgtgctctgggatgagagcagttaaacagcaccgggagtgatgctaaccttagccttggggtaggaaaaaagcattgtcatttactaaggagacccttcatcacaattctgtatattgattagggggctacaaaatatgaatacacatggagtctggtttagactcagtgtgtgatattggttatcctgggtgattatttgttatggcaaccttgatactcaagtaaatgcaactttgaggattctgaagaggcattctttatgttaatgtcattcycccaggagtctaacacacacaactggggttttagaagcctaggatctagccctgcctctcactggaaccctgagtgacgttatgtaggtcccagcgttctcatctataaaatgaaaagaatcgtcaaaatcagcatttcctaaatgtgttctgtaaaacatttatcagccaaaatgtttcatgttaaaactacctgatttaagttgctgagaaggtctgatgataaaaaacatgttgtttaacccagaatttcccaaactaatttcacaatggaatcatattttttccatgtaatatgtgtta

SEQ ID NO: 386373 - DNA, 658 bp, Homo sapiens
tggaattctcttttagcatcatctgaactttgtacttagttacatacagataaatgcaaagggattgaccgttgactacgtgctctgggatgagagcagttaaacagcaccgggagtgatgctaaccttagccttggggtaggaaaaaagcattgtcatttactaaggagacccttcatcacaattctgtatattgattagggggctacaaaatatgaatacacatggagtctggtttagactcagtgtgtgatattggttatcctgggtgattatttgttatggcaaccttgatactcaagtaaatgcaactttgaggattctgaagaggcattctttatgttaatgtcattcccccaggagtctaacacacacaactggggttttagaagcctagratctagccctgcctctcactggaaccctgagtgacgttatgtaggtcccagcgttctcatctataaaatgaaaagaatcgtcaaaatcagcatttcctaaatgtgttctgtaaaacatttatcagccaaaatgtttcatgttaaaactacctgatttaagttgctgagaaggtctgatgataaaaaacatgttgtttaacccagaatttcccaaactaatttcacaatggaatcatattttttccatgtaatatgtgtta

SEQ ID NO: 386374 - DNA, 658 bp, Homo sapiens
tggaattctcttttagcatcatctgaactttgtacttagttacatacagataaatgcaaagggattgaccgttgactacgtgctctgggatgagagcagttaaacagcaccgggagtgatgctaaccttagccttggggtaggaaaaaagcattgtcatttactaaggagacccttcatcacaattctgtatattgattagggggctacaaaatatgaatacacatggagtctggtttagactcagtgtgtgatattggttatcctgggtgattatttgttatggcaaccttgatactcaagtaaatgcaactttgaggattctgaagaggcattctttatgttaatgtcattcccccaggagtctaacacacacaactggggttttagaagcctaggatctagccctgcctctcactggaaccctgagtgacgttatgtaggtcccagcgttctcatctataaaatgaaaagaatcgtcaaaatcagcatttcctaaatgtgttctgtaaaacatttatcagccaaaatgtttcatgttaaaactacctgatttaagttgctgagaaggtctgatgwtaaaaaacatgttgtttaacccagaatttcccaaactaatttcacaatggaatcatattttttccatgtaatatgtgtta

SEQ ID NO: 386375 - DNA, 592 bp, Homo sapiens
gtaagtaatgtagtgacagggtagcaaaacaggagaacaggctgcaggagaaggctgcttatctacttcccatccctggagatcctaataacaagaactaagaagccccagacacagagggtttggacagggcctcgccagaagcccaggtggaatcagaaaatttgtcaggtttggccgggcgcgggggcaggggcagagaggcacagaggcaggaagtccacggcatgtcaggcaatgcaagtggtcccgtagggagggacctgaccaggacgagtcagcattttatcttgagggactgaaagcaagtaataccaaaacattttcatccttcaaaatttcactctagatatagtatggaggatagatccagcagcaatgagagaaagtgatactctaggtggaaaatatgagggcttgagtgaagacaatggcaataacatggagaagagatggattcgaaggatcgtcagggggcagaaagcacagggtttgcttgtctgtggtgggggcgggggtggggatatgtgcaggatgagtyttaaaatatctgattcaggtgactgaatggagaatggcatcctataggaaa

SEQ ID NO: 386376 - DNA, 573 bp, Homo sapiens
ggtgctcagcctgtggacatgtggaaccgagagaggctcatgaagcaaatctctaataccacaccctttccttcccctagattcattgtcttctaggagagacacaattaaaacagggccagggcaggatttcccatggagactgacaattgattctataccagaaaactactcttaaggtttcatcctgactgtagtagacctgtgataagttacatgtcttgttgctttggagattgaatgcttccttccaccgccacaacactattgtgtggattacacatttgcaaatagtttctctctagtacttagcagtgacttcgaattcaaatgcctccctgataaaatcatatcatgaatatgcatcaagcccactcttagataaataataattacttggcaattgatacgctgcaaaatwaaagtattatgttctgtattcaatgggaaacttgtggaaatgaaatgagtctgagaatggacccgtgctgcagtgcttagtctttgtgctcctgtcaactgtcacactagggaggggattctcagactgctgtgccatcattaactacagga

SEQ ID NO: 386377 - DNA, 626 bp, Homo sapiens
ttatttgacaaagagaaatgattttttttctccaaatataagaagccattaatgacattccccctctctgttgctgttttgggaacacctgcaaatcctcctagcatcacragatatccttttgtttcatggtaagactttttaaaaagactccgataacttgagagctgtgtcccattgactctactctcctgaaacctggctgcaaaagtcatccatgagccttgcatctcaggcccaggtcaggagagaccgtgttacaagaaggtcttcttcaaaccctgagtcatagcagatcctgttatggccaggacgccggatgcctcctcaaggtggaaaggtggaaaggatatctctggctggatgattcagtccactcaagagccaggacaagagtaagcagaagacataacagagagcaataagtgctccctggagaagtctgctccccgccattctagaatgcagaaaacctaagtggtcaacagtctggtcaagcagatttagaatgttgatgcaggctgcctttccagatcctttaccaattcttccaagccccaactgccccgtctcctaagatcttcatgcactcatcaggccctgaccctgcctctcgcctcaggatt

SEQ ID NO: 386378 - DNA, 626 bp, Homo sapiens
ttatttgacaaagagaaatgattttttttctccaaatataagaagccattaatgacattccccctctctgttgctgttttgggaacacctgcaaatcctcctagcatcacgagatatccttttgtttcatggtaagactttttaaaaagactccgataacttgagagctgtgtcccattgactctactctcctgaaacctggctgcaaaagtcatccatgagccttgcatctcaggcccaggtcaggagagaccgtgttacaagaaggtcttcttcaaaccctgagtcatagcagatcctgttatggccaggacgccrgatgcctcctcaaggtggaaaggtggaaaggatatctctggctggatgattcagtccactcaagagccaggacaagagtaagcagaagacataacagagagcaataagtgctccctggagaagtctgctccccgccattctagaatgcagaaaacctaagtggtcaacagtctggtcaagcagatttagaatgttgatgcaggctgcctttccagatcctttaccaattcttccaagccccaactgccccgtctcctaagatcttcatgcactcatcaggccctgaccctgcctctcgcctcaggatt

SEQ ID NO: 386379 - DNA, 626 bp, Homo sapiens
ttatttgacaaagagaaatgattttttttctccaaatataagaagccattaatgacattccccctctctgttgctgttttgggaacacctgcaaatcctcctagcatcacgagatatccttttgtttcatggtaagactttttaaaaagactccgataacttgagagctgtgtcccattgactctactctcctgaaacctggctgcaaaagtcatccatgagccttgcatctcaggcccaggtcaggagagaccgtgttacaagaaggtcttcttcaaaccctgagtcatagcagatcctgttatggccaggacgccggatgcctcctcaaggtggaaaggtggaaaggatatctctggctggatgattcagtccactcaagagccaggacaagagtaagcagaagacataacagagagcaataagtgctccctggagaagtctgctccccgccattctagaatgcagaaaacctaagtggtcaacagtctggtcaagcagatttagaatgttgatgcaggctgcctttccagatcctttaccaattcttccaagccccaactgccccstctcctaagatcttcatgcactcatcaggccctgaccctgcctctcgcctcaggatt

SEQ ID NO: 386380 - DNA, 576 bp, Homo sapiens
ctatggttaatcgtctacggcaaagctcrttactagtttactaaaccttaggtatgactttattctgcctaccactgtcctaccagtgtccactatacagaaaccttcctctactttcttctctgactcttgggaattttgctcccccaggtatctttacaaaaggtaaaaaaggtaaatgttttaggttgtaacaataaaatatggtaagtccaaatgatatgtagagattaagtgtttaattccattactttcttctcttacatgaattaacccagatatctcatactgaataaatatctgcaaagactgagttagtcttttcccgtcggtttcattcccagggtacagattaaaatacagttccccctttaaaatacagttatatagaaaattctaaattcactactgagtttgttcctataacatctcaggttttcctaaggaggacgtgttacaaattccatcatctctgtaaatcacagatacttcctttaaccagcttttaagatgatattaaaaatttaaagatcctcaaacaaatgtccctgatctatgggattagacaggggtagg

SEQ ID NO: 386381 - DNA, 569 bp, Homo sapiens
ggaccccaatggaccaggggatgctgtgtcctaggatggatccactcacagtgactccttaggctctgcaacctggaccagacttacatctagacagccttaaatcctatgagcaatagcatctcctgccatccctgctgggcagccttgtgcagataactgaccttcatggcctctataggacccctgggatattctgagaagatctggggagtgctgaaaaaaggatgccaggctgggtgcagtggctcgcgcctgtaatcccagcacttggggaggccgaggcaggcagatcacgaggtcaggatatgaagaccagcctgatcgacatagtgaaaccccgtctcaactgaaaatacaaaaaattagctgggcgtggtggcgcatgcctgtagtgctagctactctggaggctgaggcaggagaattgcttgaacccgggaggcagaggttgcagtgaactgaggtcacaccatggcactccagcctgagcaacaagagcrgaactccatctaaaaaaaaaaaaagaggaagttgtggtcatgggctagtgcttggatggatttgaa

SEQ ID NO: 386382 - DNA, 522 bp, Homo sapiens
ccttggggtgttccatggtggtttcttcctgcctgggcgccaccctttccccagttcaggccctccctggaggactagtttgtgtattggyatcctccccagtggacccaaaccagcgcatacttggtgtgtggagatgggagacaaaggacagatctaggagccttgaaggatcaccagccaccgaccctccatcagggccaactgggcaggaaagggaacattgcagacctgatttcccgacgatgtcaccctgtcctccctccttgcttcttgctctgctaactcaactctgccttcctctttttcattcttctactctgccctatatggaggacaaatggacaccaggggtgctaaccttattggtgcctgccccagcctaccccaggtgccagcagactctcgtgcacaggaggctcccacagttatggagccaggaaagaatttctctgcactggatggactgtatattgagattaaaaattatattccttatattcctgcttatatcaatgctct

SEQ ID NO: 386383 - DNA, 538 bp, Homo sapiens
agtctttggtagtattttactaatgaagtatacaataagggcatttcacttagtctgactggtcaaagcgttggaggtggtatctacagaagaagtaaaatatataatcttgccttcagtgagatgaaagagtagaacctgtgtcacatccttcagttgtataatacacaggttcattacctgcattgctcctcccaagtcttaatatattcactacattactgagaaagctgggtcagaagctcccttcagcctggcttggggctcagtggttttccttgtataactctattgtacaaaaagattggcaaatgaagttcatttggtgttatatatcccgacttaccccaatccatgtggtaactaagctacagtacggtcagtttgtgcacttgcccgcagcacaaaaaagaaaagctaaatttatttatttattgtgatcacctttattccttagtttaggtagggactgtttgtttacttcaatccaacaatgtaattcagttraaagcattttatttttttctattttccaaaa

SEQ ID NO: 386384 - DNA, 590 bp, Homo sapiens
agagttgcacaattacccaataatcaggaattccacccagagctgccatgacttaactaaggggacccttgttcctagttttcataaatgtctagtctctgaggacaaaagaatggagttcatctaaaggtaaactgtcttgctgagtttaaaaaagcagtgtgtaattagaaaaaacaaggaactaaatagcttccatctaactctcaaatcaccttaccatttttaatttcaatctttaagagtaacagtttttcagtctatgataaaagtattattgtttttcttatttaaaagatcccagggtactagtatctgaaaagaaaatattacttattcaatactctcatagagctattatatttaaaattatgcattcgttttatgctgccttttgtaatttcataagaaagcaactaaatgcagtggtatttattttacggggaaaggattaccaaaatctgtggaatttagaatataagttgtttatctaacttccctatgatgaaaaccccaaaattytgttcaggaggcagatatttaaaatatgagcaatatataagacaatctaggtgatatagtatttgaaa

SEQ ID NO: 386385 - DNA, 568 bp, Homo sapiens
ttggaaagtttagtctcagcttcaatctaatttctaaaactactgagcacaaagtgtatctacgcattgtgatggattacaaagatagtcccctgccctgctaaagcctttaatacatatatatagcaaaaatcctataaaaaggtgccttggcagtaaagcaaattagggcatgaaataattggcaattggctcttatgtgctgcctagactccttcctcaaaatactgggggaaggacatgattagaattaaagctcgtatcttctgaggatgattgagtaaatgcaggagggaaggcaaggttgacagaagatggcaagcaactgagttttagaaaatggaaaagcagaagagtatccctgcattcctaaacttctctcagccagtattccctggatccagctgacaaaagaggaatcaccaaagagaagattcctgaaattgctaccatygtcctggcagttccagccaaaaacagcaggcggaatcatgcccactgaaatgtaagtttttatggaccctgtccagtgggtgtcaccaaactatagccaagatttagaagggtt

SEQ ID NO: 386386 - DNA, 623 bp, Homo sapiens
tgcaatttctcttctaactattgtgtaagtattaatgtatttaatcttcataacaataccatmatattggtgcaatttttatgttcattttataattgagagatgttaggcaacttgcctaaggtcacacagttatagccagaattcaaaaacaggatccacactactacactacatcaactctctggacaattgctttttctctcaacacttccctgtaataggggaagcattccaatggcgtttgagctgtgtccagaggtggaatcatcactcatttaaaaaagacactttaatttttctcgtgaggcaatgaagggaagagttttatcttttgttctctagttcacctttccctcttttatttcatcactccaaaaacattaaaaattgcctagaaaacaatactgaatcataaaaaggcagcctaaagaatgggtctagcaatctgctcagtctgctatgcaaatcctaggccctgatgaggttagtgttacataaggtgactgtatgagtttcgaggtttccacaacattagccaaattattagtttttctcctcttctacaactcttgtacaatgtcttcctgaatgaagtcaggaccacccaccaccacaagctt

SEQ ID NO: 386387 - DNA, 350 bp, Homo sapiens
ccagggcagagtacatggccagggtaaagaatactaggttttgttgtttgtttaaacctgagctctccratcgcgctgctttggtcagatacttccagtggtgtcacaaagggaaatgtgatcttttgtcttgcctttcctcctctgcctgccagggaaaaatatatttacatatgttagtttttattttcctagcaacgaaagagtagaactattttacaaaccaaacacaatgtaaacacttttgttcaaggggaaccagataatcataggtcatgacttctttagtaaaaacagaactgtatattatgtacaactcattagtcatgagttccataagtatgtgcaag

SEQ ID NO: 386388 - DNA, 586 bp, Homo sapiens
ttcttttacttgcttgtcatatgttcttttaaaagtcaataatcatattcatacacttacaatccttctggatttctggactcgtaggaaaaaaataaaataaatatttaccgttcattttatttaaaaaaaaaaaaagtagggccgcagtaattgacagcatttgaaaagataaggaagcacataccccagttcttctctatacttttcaaagttgtaaatttgataaagaaagatttagataaaatccagcaaacatttattggtacctactgtgtgccagcctttaagtttattacttttaagcctaacgaaaacaaaatcaaccttggtttagtttagagaagtgaggtttagtattaaaatagaattaacatgcagaccagcagggattctttaagacagggatccccaacccccaggtcacagactaggaccagtccattgcctgttaggaaccaggcaacagcagcaggaggtgagtggtaggagaccgagcgaagctttayctgtatttacagccgctccccattgctttcattaatgtcttagctctgcttcctgttagatcagtggcagcattaga

SEQ ID NO: 386389 - DNA, 568 bp, Homo sapiens
aatataacaagagtgatatatgaaaagtccacaactaatatcagacttaacaagaacagaaagcttgtctctacaatcaggaatgaggcaagaatgccactctcaccacttctttcagaatattactagaagttctctccagagcaactgtgccagaaaaagaaactgatgacatcaaaaacagaaagaactaaaatattccgactccatcttacatgatcgtatatatgtattcatrtatacacataatcttatacatagacaacactaaagtctatagacacatagacaaatgatcttagacaacattagagactccagaaaaagcactgttagaacaaataaattcatttagtaaagttgcaggatacaaaatcaaccagcaaaaatcagtttcatttctgtatactagcaaaaaactatctgaaaaggtaattaggcaaacagtgtcatttacaggtgcaccacaaagaataaaatatgtaagaataaactaaggaggtgaaagacttgtttacaaaaaaacactgcattgatgagagaaattttaaaaaacacagcaaataga

SEQ ID NO: 386390 - DNA, 438 bp, Homo sapiens
ttgagcccctgcagctgttttgctgccctgagaatgcagtgccctttgttcactgtcttcctcccctctgtagctctgatgtcaacaggcagtggttacaggcaactctgttcccccaaaacctcattggcttggccttatatgttacattttaggtcactcccactcactttgccataccagctctgtattatgtgtacaaaattccatgtcttattaatgcccccagaattaaaacatccagttggtaaaacagtaccagacacatattaggcactccattcaaaagcatttggtgaagaatttgcattccatcaayaagttctgaacaagtttggcattaccaaagatgaggacatgaaatggtaaaagatgatggtaccatcagaggtgaaatatgggttctttcatgttgagtttaacgatctgtatgcatat

SEQ ID NO: 386391 - DNA, 631 bp, Homo sapiens
attacatattatctagatctttaccacttcctttactctcatctttaaacatgattatataatggctatggttacatgtagccggcattcagtaattagaaaactatgaagcttacaagttaccggatgttttgatgttagaaatagctgcttcatagcactttcgtgaagtgccacttctttgctctccactaaatttacttaaggttaaagtccagctttctggtgcatattcacacaaaaaaacaaaaacaaaaacaaaaacaatgtttttttcagcagtattattgcatccaagtttttaggatccttcataagaaaatctgcattaaagtaaaaacatcttgaattcaagatgcttttaaatgataaagaattattaccataaagttacaatacaatgtcacattaatcaacattacacaaacatcttagaagcatgctgttcccgcgatagcctaatctgacttcaaggaagaactcttacamataaagatagaatgcactgacaaaattcacccataaaccagaaggtacaagtgtgtgaactactttacaacacagccaaaagagcaacttagagcaaactgctgaaggaaccccaggtggagtaattaggatacatggtatc

SEQ ID NO: 386392 - DNA, 543 bp, Homo sapiens
ggaggttgacgggatccagatcagcatatcttactaggttagtatttaatgaactggccagtatcagagtgatttggaggtgccaattaaaatgtgaggagcactgcaattttgtgtccagggttaagttaaaactatgtaatctttttataagcttgaaacattttctrtaggttaagtctagcaaaaatattaatgccatgtaacctaacttttttttcatagaaaaaatgtccagatttctttccaccaagaagcctgatatttgtagagttgttgttgttgactctgatctggatgctggagatgaaaagatacatgcgaggcagacccatgtcaaccttcagaggagccatattctagggatttcttgacagtgtgcttgtactaatattgtatttattgctttcaaactaaaatgaatactataatagacttaacacaattgtgaagacacgcaaagagggcaaggcttcttaattctgaaagtgtcaaagaaggatttattataaagaaaggtgactttaggttagatgttaagga

SEQ ID NO: 386393 - DNA, 528 bp, Homo sapiens
tgtactatgacctaaagtactatgaatttgtgtgccaacacattggataacctacccactccatattcttagcacaatagattataatttgtttccccaaatataaataatgtcttctatgttctatatatatatatatatatatatatatatatatatatatawacctgttcaaattagaattcaaaatatcacctacatacaggcagataagaaatgctaaaatgaatttatacatagatacaaaacctagtgaaactggtcagaatccacaaggcaataatcaattgcatggcactggacatttctggaaaaatacttttacagaaaaaaagcatttgcattactatcacttccctacaaattatagacttgtaatgtaattcaaaaacagtgaaaggcagagataacctggaagacagcactagacaggacagtaagtaaaatctttaatggtttttctttttttaaaatctatttcaaagaacttcacaattttttctgacagttcagtattgtcagagttta

SEQ ID NO: 386394 - DNA, 528 bp, Homo sapiens
tgtactatgacctaaagtactatgaatttgtgtgccaacacattggataacctacccactccatattcttagcacaatagattataatttgtttccccaaatataaataatgtcttctatgttctatatatatatatatatatatatatatatatatatatataaacctgttcaaattagaattcaaaatatcacctacatacaggcagataagaaatgctaaaatgaatttatacatagatacaaaacctagtgaaactggtcagaatccacraggcaataatcaattgcatggcactggacatttctggaaaaatacttttacagaaaaaaagcatttgcattactatcacttccctacaaattatagacttgtaatgtaattcaaaaacagtgaaaggcagagataacctggaagacagcactagacaggacagtaagtaaaatctttaatggtttttctttttttaaaatctatttcaaagaacttcacaattttttctgacagttcagtattgtcagagttta

SEQ ID NO: 386395 - DNA, 475 bp, Homo sapiens
aactgacttacctatggtaaatgggctgtttttagtcttgagggcagtccatcactgggaggtatccacaaggtaggaagagacccctacacaattagatgccccttgaacaaagatcagcaaacttttcctgaaaagaaacagattataaatattttaggctttgtgagccatgtaatctctgttgcaactacccaaatctgttattttaggccaaagcagccatagacaatatgtaaatgaatgagtgtgtctgtattcctataaacctstttacaagaacaaatggtattctagatttggcccatggtctctgctagaataaaagtcccacatttggtttttatcctactagtattcctggttattttaggcattgtcctttctagaattcactatgggtatctgccactgcttgagaaagctgctgagaatcaacactgcaatatattgtggaaatatgctttgggggcac

SEQ ID NO: 386396 - DNA, 525 bp, Homo sapiens
tccctgtatgcaaaaggctgcttgatggcagttgccttcagtaaaagagtggagccaaaacaaggtgttcaagtatggatgggaggaggagagtggggtgaccaggtaataaatatcccatcctcattgccacccagctgtctgatctcctgtcggtacctcccactgggcaaacccaactggaaaacagaagagtaggagcccttgaatgctgtctacacaagtaagcagcacatatagggctcttgagcatgtggagaaagccggcagstgcattggtggggtggggcaggggacgcagaaggaagatattcaacacgtgtgctctattatcttgaatcaaagggaaattaataagcagaaatccaaataaaggaaagtatacagtaacaataaaagtccttctctacatccccagggatatagtttcacatggatccatccaaacagacaaaaataagagcatcttgtctcaatttgagcacgtgctgaaatctctccttctaacacgaaatcattatgaat

SEQ ID NO: 386397 - DNA, 525 bp, Homo sapiens
tccctgtatgcaaaaggctgcttgatggcagttgccttcagtaaaagagtggagccaaaacaaggtgttcaagtatggatgggaggaggagagtggggtgaccaggtaataaatatcccatcctcattgccacccagctgtctgatctcctgtcggtacctcccactgggcaaacccaactggaaaacagaagagtaggagcccttgaatgctgtctacacaagtaagcagcacatatagggctcttgagcatgtggagaaagccggcagctgcattggtggggtggggcaggggacgmagaaggaagatattcaacacgtgtgctctattatcttgaatcaaagggaaattaataagcagaaatccaaataaaggaaagtatacagtaacaataaaagtccttctctacatccccagggatatagtttcacatggatccatccaaacagacaaaaataagagcatcttgtctcaatttgagcacgtgctgaaatctctccttctaacacgaaatcattatgaat

SEQ ID NO: 386398 - DNA, 658 bp, Homo sapiens
ggtcagtcaatatttcactatatcctgaaaattgtccactgttccaattcagagaaggtatggggctgtattaataatgagacaggattcaggtcctgaaagactgaagcttaggttctagcagctgttayccaatttgggtctgaaaggaaaagtgaggagaaagaggtgtgggcccagatcttactagggtcagtgaaataaattcagtcattcaccttctttcactaattgagggcattttcacgcatataagacctcagaaactttacacccaccttctttgaaaaaattactaaggacttatttcagcaagaagaaaactaaatccgggaggaaataattataagaaatatggtgagcaaagtaatcatttttaaaatattgccaaattgaagagttatgtatgtgtgtgttaaataaacaatctagaaataaaatctgataagatgtcaacatgggagttagctgggggagaaggaaggacagtataaaaggaaatgaatacatgctaaatttattgtgttattgaggaggctaggacataatccagactttttctcaaagaatgtgtaagtttctgtgtgtgagttaaaaatatacacaggctaaaactaaaagaatagatgaataagtaactatcaaaacagaagaagga

SEQ ID NO: 386399 - DNA, 658 bp, Homo sapiens
ggtcagtcaatatttcactatatcctgaaaattgtccactgttccaattcagagaaggtatggggctgtattaataatgagacaggattcaggtcctgaaagactgaagcttaggttctagcagctgttacccaatttgggtctgaaaggaaaagtgaggagaaagaggtgtgggcccagatcttactagggtcagtgaaataaattcagtcattcaccttctttcactaattragggcattttcacgcatataagacctcagaaactttacacccaccttctttgaaaaaattactaaggacttatttcagcaagaagaaaactaaatccgggaggaaataattataagaaatatggtgagcaaagtaatcatttttaaaatattgccaaattgaagagttatgtatgtgtgtgttaaataaacaatctagaaataaaatctgataagatgtcaacatgggagttagctgggggagaaggaaggacagtataaaaggaaatgaatacatgctaaatttattgtgttattgaggaggctaggacataatccagactttttctcaaagaatgtgtaagtttctgtgtgtgagttaaaaatatacacaggctaaaactaaaagaatagatgaataagtaactatcaaaacagaagaagga

SEQ ID NO: 386400 - DNA, 435 bp, Homo sapiens
atacatttttctcatcaccacatggaacacactctaaaatcaaccatataattggacataaaacaatcctcagcaaatgcaaaagaaacaaaatcataccaaacacactttcagaccacagcacaatgaaaataaaagtcaagactaagaaaattgctcaaagccatacgattgcagggaaattaaacaacatgcctctgaatgacttttgggtaaataatgaaattaaggcagaaatcaagattttctttgatgaaaamaaaggtacaatatatcagaatttatgggacacagctaaaacaatgttgagagaaattcatagcactaaatgcacatcaaaaagttagaaagatctcaaaaaaattgaagccaaattgaagaatccagtagtttttttttttgaaaaaacaaaaaaaaagataggtagataggcca

SEQ ID NO: 386401 - DNA, 559 bp, Homo sapiens
cagtctgcttgggctccatctccttgctaytcagtgcaggaagggtatccaggaagaaagccaaggcatctgcggagtggagcccatcattgcccctctctcaattctctaggtcctctaccatctgttgtcccacatgtagaaaccatttttccatgtctctggtagtcgcttgtggccaaaatattggccattgggtggtcagacccgggcttctctccatccacccatcccttttacttttcagcatccctctctgtgctgactctcatctgccttccttccttggatcttctcttgctgggaacctgtatcccttcaggccactggtacttaggaacgagtgtttttctgacaatcggaatatacgtagatatagaaacagatcaattcacctgtccataaataagcacctattctttcctcttgaacccagagagaaaaggcaaacgcaaccttcccttcaggaagtggaagccagaataacggaattccaactggaaagtctccattgacgtttagttggtgttgtggaagggtaatctaagtgtctggtcct

SEQ ID NO: 386402 - DNA, 559 bp, Homo sapiens
cagtctgcttgggctccatctccttgctattcagtgcaggaagggtatccaggaagaaagccaaggcatctgcggagtggagcccatcattgcccctctctcaattctctaggtcctctaccatctgttgtcccacatgtagaaaccatttttccatgtctctggtagtcgcttgtggccaaaatattggccattgggtggtcagrcccgggcttctctccatccacccatcccttttacttttcagcatccctctctgtgctgactctcatctgccttccttccttggatcttctcttgctgggaacctgtatcccttcaggccactggtacttaggaacgagtgtttttctgacaatcggaatatacgtagatatagaaacagatcaattcacctgtccataaataagcacctattctttcctcttgaacccagagagaaaaggcaaacgcaaccttcccttcaggaagtggaagccagaataacggaattccaactggaaagtctccattgacgtttagttggtgttgtggaagggtaatctaagtgtctggtcct

SEQ ID NO: 386403 - DNA, 293 bp, Homo sapiens
ctagaaactgagagttggaggcttgattagacattcaggtgaaatttttaaggcaaaatcactttatagctactgttgtataactttttagtaagcccygttatgaagcacatcatgtctggttgtcctcttttagaaaagctggccacatatattgtttgtcacacttcccatagagagttggagtctctttctcctcccttcagtctgggctaaatcttgtggcctgcttggcctgcagaatgctcacagccagttacaggcccagactccaggaaagccggccaaatgca

SEQ ID NO: 386404 - DNA, 457 bp, Homo sapiens
tgggacaacatgcaggggcaccccacactctctcctttgtgctgcaacaaggtcattaccggtgcctttctaatattcccattaaaagtaccatatgattgccaccagcaaaaatggctctcgatcactaatcctctctgcacatctctcatacttaatagattattactattttttttaaataaaaaatctaaagtagcaaacgcttcttagaaacactgagataacacacacacgtggccgaaaaacgatcagagtattctccttctgcctyctgcccaatccatctctctggaataactggtatgggttttgacgtctgtattgtgggattgtgtattcacatgcaaatgcatctgtatctgtctagtctccgtatctctctcggtaggacttcatattctaatgtgggagttgcaacgaacatgtagttcttcagaaaacacacgtcatccag

SEQ ID NO: 386405 - DNA, 457 bp, Homo sapiens
tgggacaacatgcaggggcaccccacactctctcctttgtgctgcaacaaggtcattaccggtgcctttctaatattcccattaaaagtaccatatgattgccaccagcaaaaatggctctcgatcactaatcctctctgcacatctctcatacttaatagattattactattttttttaaataaaaaatctaaagtagcaaacgcttcttagaaacactgagataacacacacacgtggccgaaaaacgatcagagtattctccttctgccttctrcccaatccatctctctggaataactggtatgggttttgacgtctgtattgtgggattgtgtattcacatgcaaatgcatctgtatctgtctagtctccgtatctctctcggtaggacttcatattctaatgtgggagttgcaacgaacatgtagttcttcagaaaacacacgtcatccag

SEQ ID NO: 386406 - DNA, 583 bp, Homo sapiens
tgtagaccaattcaaatgtcacctctcctgtgaaactgtttctaacaaagcagagccagacaggagaaaaagaggtgataagaagtcaggagtcctggatctgctgataactggctatgtggccttagaaatatccttttgtgggctgggtgcagtggttcacatctgtaatcccaacactttgggaggccaaggcaagtggatcccttgagcccaggagttcaagaccagcctggccaacatggcaaaacactgtctctactaaaaatayagaaaactagtcaggtgtggtggcacatgcctatagtccaagctactcaggagataaggtgggaggataagctgagcctgggaggtcgaggcctcagtaagctgagattgtaccactgcactccagcctgagcaacagagaaagacccagtctcaaagaagaaagaaagacagacagacagaaagaaagaaagaaagaaagaaagaaagaaagaaagaaagaaagaaagaaagaaaaagaaagaaagaaagagagaaatatcctcttgttcatcggtttcatcatctgaaaaaaagttttggcaagattatc

SEQ ID NO: 386407 - DNA, 583 bp, Homo sapiens
tgtagaccaattcaaatgtcacctctcctgtgaaactgtttctaacaaagcagagccagacaggagaaaaagaggtgataagaagtcaggagtcctggatctgctgataactggctatgtggccttagaaatatccttttgtgggctgggtgcagtggttcacatctgtaatcccaacactttgggaggccaaggcaagtggatcccttgagcccaggagttcaagaccagcctggccaacatggcaaaacactgtctctactaaaaatacrgaaaactagtcaggtgtggtggcacatgcctatagtccaagctactcaggagataaggtgggaggataagctgagcctgggaggtcgaggcctcagtaagctgagattgtaccactgcactccagcctgagcaacagagaaagacccagtctcaaagaagaaagaaagacagacagacagaaagaaagaaagaaagaaagaaagaaagaaagaaagaaagaaagaaagaaagaaaaagaaagaaagaaagagagaaatatcctcttgttcatcggtttcatcatctgaaaaaaagttttggcaagattatc

SEQ ID NO: 386408 - DNA, 583 bp, Homo sapiens
tgtagaccaattcaaatgtcacctctcctgtgaaactgtttctaacaaagcagagccagacaggagaaaaagaggtgataagaagtcaggagtcctggatctgctgataactggctatgtggccttagaaatatccttttgtgggctgggtgcagtggttcacatctgtaatcccaacactttgggaggccaaggcaagtggatcccttgagcccaggagttcaagaccagcctggccaacatggcaaaacactgtctctactaaaaatacagaaaactagtcaggtgtggtggcacatgcctatagtccaagctactcaggagataaggtgggaggataagctgagcctgggaggtcgaggcctcagtaagctgagattgtaccactgcactccagcctgagcaacagagaaagacccagtctcaaagaagaaagaaagacagacagamagaaagaaagaaagaaagaaagaaagaaagaaagaaagaaagaaagaaagaaagaaaaagaaagaaagaaagagagaaatatcctcttgttcatcggtttcatcatctgaaaaaaagttttggcaagattatc

SEQ ID NO: 386409 - DNA, 650 bp, Homo sapiens
aacatacttaaaccttaaaaaacctttaaaatgatttaacgggccaggcagggtggctcacacctatgatcccagcactttgggaggcagaggtaggcagattgcttgagcccacgtgtttgagaccatcctgggaaacatggcaaaaccttgtctctacaaaaaaatacacaaaaaatacaaaaattagccaggtgtggtagcacacgcctccagtcccagctgcctgggagtctgatgtgggaggatcacctgagcccagggaagtcgaggctgcagtgagccatgattgtgccactctactccagcctgggtgacagagtgagaccttgtctctaaaaaataaaataaaataaaataatttaacttaaagtataaagaaacatgtgagaaaacaaacttcaaagtcaagtttatcatacagttctttgaatgtcttcatatttttgcatgttgaaataatagttattgaatgcagcagcagttctggtgtcactttctctagtgagctagatcaggcttcccctgcagccatgttgaagaaacttrcaactggcactgatccttcaccatccattcctaagagggtgtctttcaggatgaggagattgagatcattgccaatactcagccacattatgtcaccttta

SEQ ID NO: 386410 - DNA, 661 bp, Homo sapiens
aaagagataaatatcattaagaaagaaccacactgaaatcctggaactgaagaaatcaatgaatgcaatcaagaactttaacaatagactagatgtagcagaagaaataatttctaaacttaaaggcaggtcttttaaataaccgcaccctcccccaccaaaaaaaaaagaataaaaaagaatgaacatgtgggatacaatcaagtgaccaaatattcaaattttgggttttccagaaggagaagagatgagcaaagacatagaaaagctatttaatgaagtaatagcggaaaacttcccatgtctccatgtcttacaagagaaatagatakccagatacagaaagctcaaatataccccaaatagaatcaagcaaaaaggtcttctctgaggtacattatagccaaactgtcaaaagtcagtaataaagacagaattctaaaacagtgagagaaaagcatatagtcacttagaagggaaccctaccagactaacattggatttctcagcagaagtcttacaggccagaagaaaatgagatgatatattcaaagtactgaaggaaaaaaaagactgagaaccaagaaaactatacccagtaaatccatccttcaaaatggagaaataaaatctttccagacaagcaaaaactgaggaaatt

SEQ ID NO: 386411 - DNA, 661 bp, Homo sapiens
aaagagataaatatcattaagaaagaaccacactgaaatcctggaactgaagaaatcaatgaatgcaatcaagaactttaacaatagactagatgtagcagaagaaataatttctaaacttaaaggcaggtcttttaaataaccgcaccctcccccaccaaaaaaaaaagaataaaaaagaatgaacatgtgggatacaatcaagtgaccaaatattcaaattttgggttttccagaaggagaagagatgagcaaagacatagaaaagctatttaatgaagtaatagcggaaaacttcccatgtctccatgtcttacaagagaaatagatatccagatacagaaagctcaaatataccccaaatagaatcaagcaaaaaggycttctctgaggtacattatagccaaactgtcaaaagtcagtaataaagacagaattctaaaacagtgagagaaaagcatatagtcacttagaagggaaccctaccagactaacattggatttctcagcagaagtcttacaggccagaagaaaatgagatgatatattcaaagtactgaaggaaaaaaaagactgagaaccaagaaaactatacccagtaaatccatccttcaaaatggagaaataaaatctttccagacaagcaaaaactgaggaaatt

SEQ ID NO: 386412 - DNA, 661 bp, Homo sapiens
aaagagataaatatcattaagaaagaaccacactgaaatcctggaactgaagaaatcaatgaatgcaatcaagaactttaacaatagactagatgtagcagaagaaataatttctaaacttaaaggcaggtcttttaaataaccgcaccctcccccaccaaaaaaaaaagaataaaaaagaatgaacatgtgggatacaatcaagtgaccaaatattcaaattttgggttttccagaaggagaagagatgagcaaagacatagaaaagctatttaatgaagtaatagcggaaaacttcccatgtctccatgtcttacaagagaaatagatatccagatacagaaagctcaaatataccccaaatagaatcaagcaaaaaggtcttctctgaggtacattatagccaaactgtcaaaagtcagtaataaagacagaattctaaaacagtgagagaaaagcatatagtcacttagaagggaaccytaccagactaacattggatttctcagcagaagtcttacaggccagaagaaaatgagatgatatattcaaagtactgaaggaaaaaaaagactgagaaccaagaaaactatacccagtaaatccatccttcaaaatggagaaataaaatctttccagacaagcaaaaactgaggaaatt

SEQ ID NO: 386413 - DNA, 600 bp, Homo sapiens
atcaaatttggtgactgagtgcaagttgagtaaaaaatgaaaaaagggaccctaaatccctggtgaggggccaatgcagagtccaggagaaagacagagaataactgaaatagagttgtagctgtggaaatggacagatgggacagctaccagcagcaggcgacacattttggtctgtgtaataaatacattttttactgagttcaaaaaagaggcttaagatcctcatagatggagcattgtctttgcaatatgcaaagccatcatttgccatttcttttattttcatgatgaagggaagaatcagctcttttataggaagaacataattttgaatagttgatatatataatctcaaactagaaattataaagtgatcctgtttccttcaataatcttatgaaatttagttttggtatctctcccttacataaggctttgtaagcctctaagttttgtttaaaatytggtgagtgagcaagaacttctgtagctcattaatctccatgcccataatcttcatagcacagcctcagaaatgtgctgaatcctgatatgtcttttgtttcagctcaatggagctcacagctgggccagtgc

SEQ ID NO: 386414 - DNA, 556 bp, Homo sapiens
ggtatctagtttctctagcctcaatattctatgattctcttctggccacttcacctataactgataaaaagaaagctgttgctacaagagtaattccattttctgcttgcaacattgagcggggaggaggaagtgcacttgctggaaataattctgcagtgcttgctgaagatacggytttatttttctatccctacttcctggttcactcacctgtgccacactcatgagatagacattgaaacctatagggccagtactctgagcaaacattagtacctgtacaaatggtttggtccatcttgggagatttatgaatagaaatattttgaaagataaatgtgtcatgttacaggtctgttatctcaagcagtttcatcttcattattttatttaaaacaaaacaaagccaaactgcacaaaacaagaaaataaaaacatgtcagttgatccaataaggatatgttgtctctgcttcattggcagatggaatatgcaatttatttccagcatatgactctttccctattgctatgggcataaaaatgtgtggcat

SEQ ID NO: 386415 - DNA, 556 bp, Homo sapiens
ggtatctagtttctctagcctcaatattctatgattctcttctggccacttcacctataactgataaaaagaaagctgttgctacaagagtaattccattttctgcttgcaacattgagcggggaggaggaagtgcacttgctggaaataattctgcagtgcttgctgaagatacggctttatttttctatccctacttcctggttcactcacctgtgccacactcatgagatagacattgaaacctatagggccagtactctgagcaaacattagtacctgtacaaatggtttggtccatcttgggagatttatgaatagaaataktttgaaagataaatgtgtcatgttacaggtctgttatctcaagcagtttcatcttcattattttatttaaaacaaaacaaagccaaactgcacaaaacaagaaaataaaaacatgtcagttgatccaataaggatatgttgtctctgcttcattggcagatggaatatgcaatttatttccagcatatgactctttccctattgctatgggcataaaaatgtgtggcat

SEQ ID NO: 386416 - DNA, 556 bp, Homo sapiens
ggtatctagtttctctagcctcaatattctatgattctcttctggccacttcacctataactgataaaaagaaagctgttgctacaagagtaattccattttctgcttgcaacattgagcggggaggaggaagtgcacttgctggaaataattctgcagtgcttgctgaagatacggctttatttttctatccctacttcctggttcactcacctgtgccacactcatgagatagacattgaaacctatagggccagtactctgagcaaacattagtacctgtacaaatggtttggtccatcttgggagatttatgaatagaaatattttgaaagataaatgtgtcatgttacaggtctgttatctcaagcagtttcatcttcattattttatttaaaacaaaacaaagccaaactgcacaaaacaagaaaataaaaacatgtcagttgatccaataaggatatgttgtctctgctwcattggcagatggaatatgcaatttatttccagcatatgactctttccctattgctatgggcataaaaatgtgtggcat

SEQ ID NO: 386417 - DNA, 563 bp, Homo sapiens
tagggccagtactctgagcaaacattagtacctgtacaaatggtttggtccatcttgggagatttatgaatagaaatattttgaaagataaatgtgtcatgttacaggtctgttatctcaagcagtttcatcttcattattttatttaaaacaaaacaaagccaaactgcacaaaacaagaaaataaaaacatgtcagttgatccaataaggatatgttgtctctgcttcattggcagatggaatatgcaatttatttccagcatatgactctttccctrttgctatgggcataaaaatgtgtggcatgcttcacacaccaactaagtgctgagaaagaagaatgatgagatggtcattgtattgcttctgaagccaggcgtcctgaccttcaataaactggttttgtgctgcaacttaatagatggtaatgattaaacacactcagtgattcaagttttcctgtgaagcctggatgaaattctaacttgtaaaatctctatacccgcctcactgtgattggggactcctattaacacaacaatctgagtcttaggatttgtt

SEQ ID NO: 386418 - DNA, 578 bp, Homo sapiens
atgattaaacacactcagtgattcaagttttcctgtgaagcctggatgaaattctaacttgtaaaatctctatacccgcctcactgtgattggggactcctattaacacaacaatctgagtcttaggatttgttttgttttgtttattcctcttgttgtatttgaagactaagaggatatttttctcttttgtaaactacagaacttattaaggttcatcatagagatattaataatgcagacaagcaaaaaaattctacagtccgaattagagaaaaatcattgttcaattctggatatgcctccttccgtatttaaaaaataaagacatttatttgaatgttgtgaagttgggcacatccagggyctgtctgtgccacggtactaaattgccactcttccacctttcactttccctggcctgtttccagcggcttgtgacccagagctcagaataaactcgttcacctttcccagcccacttttattcagccatgctcccagcaaccactttcctcttaagccaagggctgaccttcttatctagtccttcctcccgcctttcagtccctcaaagc

SEQ ID NO: 386419 - DNA, 578 bp, Homo sapiens
atgattaaacacactcagtgattcaagttttcctgtgaagcctggatgaaattctaacttgtaaaatctctatacccgcctcactgtgattggggactcctattaacacaacaatctgagtcttaggatttgttttgttttgtttattcctcttgttgtatttgaagactaagaggatatttttctcttttgtaaactacagaacttattaaggttcatcatagagatattaataatgcagacaagcaaaaaaattctacagtccgaattagagaaaaatcattgttcaattctggatatgcctccttccgtatttaaaaaataaagacatttatttgaatgttgtgaagttgggcacatccagggtctgtctgtgccacggtactaaattgccactcttccacctttcactttccctggcctgtttccagcggcttstgacccagagctcagaataaactcgttcacctttcccagcccacttttattcagccatgctcccagcaaccactttcctcttaagccaagggctgaccttcttatctagtccttcctcccgcctttcagtccctcaaagc

SEQ ID NO: 386420 - DNA, 578 bp, Homo sapiens
atgattaaacacactcagtgattcaagttttcctgtgaagcctggatgaaattctaacttgtaaaatctctatacccgcctcactgtgattggggactcctattaacacaacaatctgagtcttaggatttgttttgttttgtttattcctcttgttgtatttgaagactaagaggatatttttctcttttgtaaactacagaacttattaaggttcatcatagagatattaataatgcagacaagcaaaaaaattctacagtccgaattagagaaaaatcattgttcaattctggatatgcctccttccgtatttaaaaaataaagacatttatttgaatgttgtgaagttgggcacatccagggtctgtctgtgccacggtactaaattgccactcttccacctttcactttccctggcctgtttccagcggcttgtgacccagagctcagaataaactcgttcacctttcccagcccacttttattcagccatgcycccagcaaccactttcctcttaagccaagggctgaccttcttatctagtccttcctcccgcctttcagtccctcaaagc

SEQ ID NO: 386421 - DNA, 578 bp, Homo sapiens
atgattaaacacactcagtgattcaagttttcctgtgaagcctggatgaaattctaacttgtaaaatctctatacccgcctcactgtgattggggactcctattaacacaacaatctgagtcttaggatttgttttgttttgtttattcctcttgttgtatttgaagactaagaggatatttttctcttttgtaaactacagaacttattaaggttcatcatagagatattaataatgcagacaagcaaaaaaattctacagtccgaattagagaaaaatcattgttcaattctggatatgcctccttccgtatttaaaaaataaagacatttatttgaatgttgtgaagttgggcacatccagggtctgtctgtgccacggtactaaattgccactcttccacctttcactttccctggcctgtttccagcggcttgtgacccagagctcagaataaactcgttcacctttcccagcccacttttattcagccatgctcccagcaaccactttcctcttaagccawgggctgaccttcttatctagtccttcctcccgcctttcagtccctcaaagc

SEQ ID NO: 386422 - DNA, 602 bp, Homo sapiens
ggtgtgtaggcgagctctattaagtaacaaactccaacggagattttctgttactcttgtgcttggttacctccttgttgaaattgtgagcaactttgagaatagtaatcatgtcagattcttccttttccccctcagtacctgccaacacacagcacccatgagatgcttaacacacgtttggcaaataaataagtagatgaaaaggcagagagggctacaagtattgcacacaatctccagacaacgaaagttaggatggaggtctagaaattgtgacaaagtaatataaggatgaggatagacaattcagagataagaacttagtaaatcagcaatagtcacattaagaaaataggcaaagtttctcagtgactcagtatgcccaagggccttagagaaaaggcacaggaaaatggacaagatgatcttggatgacctttctcatcctactgaatctttggaaccaggaaaagcccagggcaaccaacgtggcacttctsagctgtaccagtgtggttttcccattgaatgtgcctattttgggtaaactccttctgtggaagggatctcagccaatagtcaagactcagaactgccaa

SEQ ID NO: 386423 - DNA, 576 bp, Homo sapiens
ctgggaaagacattcccattcctaagaaatagacacagagaaaacagttgtttccatcctttagacactgtcctatctggatgtgacttcctagatgttgcttctggaatatctgctacagccatcctgctccagtgggaggaggaagcccagggagagatgagcaggagataagctgctgagtggatgtgctgaagagctggagaagtgggagattcagataatgaaaaacttgatattgaggggactacaaaactgaccgtctaaaccagaacacttccamgagtgaaaagggatgctactaataaataaactgaggccgggcatggtggctcacagctgtaatcctagcattttgggaggccgaggcaggcggattgcctgagctcaggagttcaagaccagcctgggcaacacggtgaaaccctgtctctactaaaatacaaaaaattagccgggcatggctgcgtgcacctgtaatcccagctacttaggaggctgagacaggaccccagcggcggaggctgcagtgagcagagatcgggccactgcactccagcctgggtggcagagcaa

SEQ ID NO: 386424 - DNA, 599 bp, Homo sapiens
catagataaagcaaagtgtatggatgcctggggaggatactggtctttcacatcatctggatagttagtgacaaagactaacacctggatagtctgtcttccatctcggcccactcctgctaaggcaggacttgccattctccatccttcaaggtacacaggtccacatccattcatccccaacagttcttacctgcctcccttggtctcggaagaactctccagtattctcaataacctgttcatctgacagctgggaatagggctgttcttgacaaaaggtgaaagtctcccacaaagtaaccccaaaggcccacacatcacttgctgtagtgaacttgccctatttaagtaaagaaaagaatgggaaatcagaataacctgtgcacaacaacaccctgttaaatttcataatctgcagctataccccttcccccaccacaggcaaggaattctgaaaatgccaagatgtgcatggagtatttagaaacagcccattctttcattctcatgatctcagcttggttctgtttctctggggatgagatccaagagctgaaaaaaaygcagccataagctatttgactctgcaactgagt

SEQ ID NO: 386425 - DNA, 433 bp, Homo sapiens
actgacaacagaaaaaaagtggagctttgttttttcttgcattacttttagctcctctgactgccttttacaactaggaatctaggcctcagaatgcaaaacaacagggtgaaggcaaagttttagggtatgaaccgggaattcacctggctactttggatggaaaggtgatgatgcagtagatgtatttggaacccttttatcccaagatacaaagcccaggaattaggtgaagtctgccctcaaagaaaatgaaatatttttacagtatagtaattaagttaaataattaattaatgaaatgattaaactaaaatataaaggacagtatagaataatggaaagactaatgaagtctgccattatcacagcacaatatacaaaaytgaggaagaggacagaagttccagcatttattaatcacattctgtgt

SEQ ID NO: 386426 - DNA, 588 bp, Homo sapiens
ggaaacaagtagtctttcttgcaaaaaacagccatgcaacttcaggggctatacttccaagccsaaatcttccagtatgggctataaagttctcacatcataaaaatcacagtaattttgtagcagaaagggtcccatagattatctaatccaacttaatcttactacaagtgaaaatattaaggaagtataaagagacacgtaacaactccctcactgtcacacaattaatttatgaccaagtcaggattataattagggttgttactcaaaagttaagctaaatacttttttctaagttaactccaaatcattcatcagaactaataacattccaatcatctgttgatttgtataaatgattttcagaaattattgggatgattatttgtttgatttggatgtcactagctaaatggtatttctgagccatgattttgacataagaaactgcctctaattcttccaataacctctcccactggattaatgatgattaggttccagttcctggtgcactgttgcagctggaagatagctgagaactctgcccacaattcaggactatgtatatacaccttcatgtca

SEQ ID NO: 386427 - DNA, 363 bp, Homo sapiens
actatcttcgctgattttctttcttgttccttaatgatatcctgggcaaattctacacatttcttgccattttgtttattaaaaaaaaaaaaagtccattccactttgaagctccagtttcacatataatttaaactcctcactggactccaggargtttggagatgggaaaggaggattatctgctctatcattcttccttctccaacccttggagtggaaaaggcatgatctttttatatacctcctctcccttgtcttttcaacactaaccattttaaggtcatgggctaggagagaatagaggaggcagagatcttcctatataactgccacatttgtgatgctaaggcatgactggta

SEQ ID NO: 386428 - DNA, 569 bp, Homo sapiens
ttattgacagcaatctgtttatatcctgagcacatgttgtgctcttagctctgagaaaagtattatagagactcaaaggagagaaaaatgtgtccctacttagcgctatttagaggagaaagaagtaggtgtgggcttagacatcagggtacatggagggaggagagcatctaaagtctgagaagatgggtgaggatgagaagaggagctttcgcccagtctaagcagcttccccagtgttgcccagactactcatcgtggatgctgttctactttataatcaggataccccaatcttccacttttcgagaaagccccttgagagtaggaactgggcctcattcaccattactcytagcttttagcatagcacctggcatacagtaggattacaggctgaatgaacctacgcatatgtgaattaatgaactggcagggtgtgggaaggaatggccgtgtcctaagttcctaaatcctctccagacctctgagcagtctctttgggagcctttaagaaacagtaaaagaggcttttcttattgggtaaataatgccttatatatgtagac

SEQ ID NO: 386429 - DNA, 491 bp, Homo sapiens
ttattttcaagtgaggaaagagaaaaaaattactcagacttgttcctggtgaagtgcattctctgtttgtatactttttgatggagaaattgatctatagaactgcttaattttttgaggcatttagacagcaatgaaaggtagttctccacaggacaccgaatcaaaaggagagaccagactctggcctcatayccagcctatttgaaacaagctatctagtttctcctgcagacaccttgtcaacaacatgcaacagtgtcaggtgccttgcaggaaaataatatgagtcccaagctagcctgtgctcatccacaatcacaatgaacatgtcaaggaagaatttgcagagactcaagggaagcacaatgggataaggtaatcactttcagtgaaaaactgttttcttgaaaacaggcttggacacaattgaaagctggcttcctgcaaacacaccaagagtctgtaatctagcctatccattatatgtc

SEQ ID NO: 386430 - DNA, 546 bp, Homo sapiens
ctgcctctgccatgatcggctcagccaagatgaacttcaatatgggttgcccataaatggaagatttggtctctttttggttgtttcatcttttgcatgaaggtagggaccacataatggcccatcaaaaaattctgctgcagacaactgcagaagacaaatggaacagcttagaaaagggctgatatgattcagaactttcacgagtaggaaaaatggacacyacacccatttcagttatcaagttcaagaaagtgggcagggggcaaatcaaaccatgatgcaaagatacttccctttcccccgtctttgtaatattctctctctctctctcttttgttttcctttatttttgttcccaaagacttacctccctcaaccagccatttgtcctgactctgtgtataagctgatgctcagctgctggagaagagatacgaagaaccgtccctcattccaagaaatccaccttctgctccttcaacaaggcgacgagtgatgctgtcagtgcctggccatgttcctacggctcaggtcctccctaca

SEQ ID NO: 386431 - DNA, 451 bp, Homo sapiens
gtcaagtcgagcaaggtagaaacaggagtagctagagccattgggaatccattttgaaacaagaaggagttttgaaagggaataggaaagtaagtgtcttgaagtaaaagataaatatggatggagaaagaagaaattctggatgatagagatgataaaaatatttattaagaaatgaagtcaggttcagtgtatgaaatggaaaggaatttttcagaattttaagaaaggggaagttcctcttggaaaagatatagcaaccatyggggaatgaccttttcatttcagaagtggatgaggaaggtggtgtgagcatcaggtatattctggaccatttcaagtgctggtgagaagaaaggaactctttgcctgaactgggcttggttttccaagtgctgctttggaaatgaagacccagagatgcagagcttatggtagttcataaatcttc

SEQ ID NO: 386432 - DNA, 567 bp, Homo sapiens
gttgtgtggctgtcccataaaaaaatcatttctataaagaagggagagggcctgggctgtggaggctcagcattaccgcagtctcgggatgaccgccagcctaagacagactgaattaagtgaagtccagacagcttcagagcaagaccrtctgtctctcctttccccaagattttcattcaagccaagtgatgaaactgctctcttcttcctttttctgcactaaagttgctgctttcaaggtgttatgacttttgaaagatgggctgaactgctagaggtgctcagagagactagaatagagttcaaaatagatgccatttaattttatattttacaaatattttatcactcataggacacagcttgataaccatcataatatgtttttattgatgagtgaatggataggtgtgttttttttaatcatcataagtttatgttttgcatgggctcattctgttctcctggaaatcagaagaacaatagggtacacaatgatcccatctatccctgccaaaccttggccctgtgatttatctaccataccccatgctgaaaaatgtg

SEQ ID NO: 386433 - DNA, 567 bp, Homo sapiens
gttgtgtggctgtcccataaaaaaatcatttctataaagaagggagagggcctgggctgtggaggctcagcattaccgcagtctcgggatgaccgccagcctaagacagactgaattaagtgaagtccagacagcttcagagcaagaccgtctgtctctcctttccccaagattttcattcaagccaagtgatgaaactgctctcttcttcctttttctgcactaaagttgctgctttcaaggtgttatgacttttgaaagatgggctgaactgctagaggtgctcagagagactagaatagagttcamaatagatgccatttaattttatattttacaaatattttatcactcataggacacagcttgataaccatcataatatgtttttattgatgagtgaatggataggtgtgttttttttaatcatcataagtttatgttttgcatgggctcattctgttctcctggaaatcagaagaacaatagggtacacaatgatcccatctatccctgccaaaccttggccctgtgatttatctaccataccccatgctgaaaaatgtg

SEQ ID NO: 386434 - DNA, 433 bp, Homo sapiens
aaaagctctttagtttaattgggtcccagatatttatctttgtttttattgcatttgcttttgggttcttggtcatgaaatccttgcytaaactaatgcatagaagggtttttccaatgttatcttctagaatttttagagtttcaggccttaggtttaagtccttaatccatctagagttgatttttgtataaggtgagagatgaggatccagtttcatactcctgcatgtggttagccaattatcctagcataatttgttgaaaagggtgtccttttcccaatttgtgtttttatttgctttgtcaaagatcagttggctgtaagaatttgggtttatttctgggttctctattctgttccattggtctatgtgcccatttttataccagtaccatgctgttttggtgactatggctttacaatatagttt

SEQ ID NO: 386435 - DNA, 526 bp, Homo sapiens
gtgttacgagaaaatacatttctgttcttataaattacttaaccttaggtatttcattatagcracacgaaacagaatacactgttattttaatttttcacatgtattaaaacttgtttcatggcccacctgtggtctatcttgataaatgttccttgtgcactggaaaagaatgggtatttgtggttgggtataattaacattctataaatgttaattaggtcaagttggttgatagtgttgtttcaatttcctttagccttactaattttctctacactttttcactaacttattgagaaaaggatgttggagccactgacaatagctgtgggtttgttcattcctccatgtaattctattcgtttttgcttcccatattaggtgcaaaatattgtggattttattatggatgaattaatccctttattattaagaaattaccctctttattcctattaatattattggctctgaatactattttatttgggataaatatagctttctctaatttcttttattt

SEQ ID NO: 386436 - DNA, 526 bp, Homo sapiens
gtgttacgagaaaatacatttctgttcttataaattacttaaccttaggtatttcattatagcgacacgaaacagaatacactgttattttaatttttcacatgtattaaaacttgtttcatggcccacctgtggtctatcttgataaatgttccttgtgcactggaaaagaatgggtatttgtggttgggtatarttaacattctataaatgttaattaggtcaagttggttgatagtgttgtttcaatttcctttagccttactaattttctctacactttttcactaacttattgagaaaaggatgttggagccactgacaatagctgtgggtttgttcattcctccatgtaattctattcgtttttgcttcccatattaggtgcaaaatattgtggattttattatggatgaattaatccctttattattaagaaattaccctctttattcctattaatattattggctctgaatactattttatttgggataaatatagctttctctaatttcttttattt

SEQ ID NO: 386437 - DNA, 526 bp, Homo sapiens
gtgttacgagaaaatacatttctgttcttataaattacttaaccttaggtatttcattatagcgacacgaaacagaatacactgttattttaatttttcacatgtattaaaacttgtttcatggcccacctgtggtctatcttgataaatgttccttgtgcactggaaaagaatgggtatttgtggttgggtataattaacattctataaatgttaattaggtcaagttggttgatagtgttgtttcaatttcctttagccttactaattttctctacactttttcamtaacttattgagaaaaggatgttggagccactgacaatagctgtgggtttgttcattcctccatgtaattctattcgtttttgcttcccatattaggtgcaaaatattgtggattttattatggatgaattaatccctttattattaagaaattaccctctttattcctattaatattattggctctgaatactattttatttgggataaatatagctttctctaatttcttttattt

SEQ ID NO: 386438 - DNA, 491 bp, Homo sapiens
ttattttcaagtgaggaaagagaaaaaaattactcagacttgttcctggtgaagtgcattctctgtttgtatactttttgatggagaaattgatctatagaactgcttaattttttgaggcatttagacagcaatgaaaggtagttctccacaggacaccgaatcaaaaggagagaccagactctggcctcatacccagcctatttgaaacaagctatctagtttctcctgcagacaccttgtcaacaacatgcaacagtgtcaggtgccttgcaggaaaataatatgagtcccaagctagcctgtgctcatccacaatcacaatgaacatgtcaaggaagaatttgcagagactcaagggaagcacaatgggataaggtaatcactttcagtgaaaaactgttttcttgaaaacaggcttggacacaattgaaagctggcttcctgcaaacacrccaagagtctgtaatctagcctatccattatatgtc

SEQ ID NO: 386439 - DNA, 567 bp, Homo sapiens
aaattaatcaaaggttaaaatactttcttcaatgcatttccataaaatgctaatgagtatgtcagtttgtagaactaaacattttccccttgataaacaaatcattccttcyaagttaatagatagtaagttcaaatacaccctgctagcctaaagtaagctattagtttacaatagaattccccaaagggatgttacaggttatgtaaaatttgctttaaaaaaaattcatggtgaagtactgaaaacagcaggataaaatatttcacacacatttcttaactgtttcaacttctcacagcctttactttgctgatgtatgctgtacaagtctctgaaagaggggaatgtaatatgaagcatggttcaattttacttgctagaggaactgcttcttgcaaatcttctcaggaaactagtatcccacagaacatattttgaaaaacctggaaggttcacttttagtgaacagatagcacaggaagccaagtgcatggctccccttttaactcacgctactaacagaggccaagatcaatgccggttacttgacttacctgcgataac

SEQ ID NO: 386440 - DNA, 567 bp, Homo sapiens
aaattaatcaaaggttaaaatactttcttcaatgcatttccataaaatgctaatgagtatgtcagtttgtagaactaaacattttccccttgataaacaaatcattccttccaagttaatagatagtaagttcaaatacaccctgctagcctaaagtaagctattagtttacaatagaattccccaaagggatgttacaggttatgtaaaatttgctttaaaaaawattcatggtgaagtactgaaaacagcaggataaaatatttcacacacatttcttaactgtttcaacttctcacagcctttactttgctgatgtatgctgtacaagtctctgaaagaggggaatgtaatatgaagcatggttcaattttacttgctagaggaactgcttcttgcaaatcttctcaggaaactagtatcccacagaacatattttgaaaaacctggaaggttcacttttagtgaacagatagcacaggaagccaagtgcatggctccccttttaactcacgctactaacagaggccaagatcaatgccggttacttgacttacctgcgataac

SEQ ID NO: 386441 - DNA, 521 bp, Homo sapiens
ggtgtagccatttaaataactaaaataaataactacttgagttatctattttttgtkaatttctctttggtaaacgtttattagagtaatatgagattttattatgagagtaaaacatttctcaccttttctcaataaaagcattgaaataaaacaataaaacaggtaaaacagtaagtagtgtcagttgattcaaatttcgatgtctttcaaaaaatgatgcagagtcatatcagaagggaagctggagtcacctctttagctcagagcaacttttctataagatcatcaacctgagggacccgagtcagtagaaaagaacttgtagtgttcaggagagaggagctaggcctgagctggatgtagaagcagacaggactaaattcaagagcataggattttataggaaggagcctgaaggggtcttttcaaaggataaaaggaaacttgcatctattttattattcaatggatagaagacatgaaagagcatgctaaattcaagtaatttcacagagaca

SEQ ID NO: 386442 - DNA, 521 bp, Homo sapiens
ggtgtagccatttaaataactaaaataaataactacttgagttatctattttttgtgaatttctctttggtaaacrtttattagagtaatatgagattttattatgagagtaaaacatttctcaccttttctcaataaaagcattgaaataaaacaataaaacaggtaaaacagtaagtagtgtcagttgattcaaatttcgatgtctttcaaaaaatgatgcagagtcatatcagaagggaagctggagtcacctctttagctcagagcaacttttctataagatcatcaacctgagggacccgagtcagtagaaaagaacttgtagtgttcaggagagaggagctaggcctgagctggatgtagaagcagacaggactaaattcaagagcataggattttataggaaggagcctgaaggggtcttttcaaaggataaaaggaaacttgcatctattttattattcaatggatagaagacatgaaagagcatgctaaattcaagtaatttcacagagaca

SEQ ID NO: 386443 - DNA, 607 bp, Homo sapiens
attcttgagccatttgtcaccttgtgacaattacagggagacagagaggatatattcagtggcaggtcatggttatcatctttttaatacacagtcctgtttgcttcctttgarggctttcttctgaagacctgtcttcctttgacctcctgtatcctcaggtatcctacttttcctactttctccttcctggcctctatttgtatgtcctccattcttctttctaaagtcctaatttgttcaaggaaaaaaaaatcgcaaagccaaataaacacttaattacactgaatgctcctttttacattagttatgttctcagactgactggctaatgaacaatgaattcattcatttattcatgcagaaaacgtttgctgtttgcccctagctgtgatgattaaacttactcatggcattgtatatgcccatgaggaacttgcaaactgcttgagaaaataaaaattgtattaaaatggttgataaagatgctgtctttaacacttgctatggatggtttgtaatcacccttagatatcagttgcatagtaaattcaggatgataacgtgcctcagaataatctcaatagagcaatgagcaatggaaaag

SEQ ID NO: 386444 - DNA, 566 bp, Homo sapiens
ccttgggctcctgcttggaaccaaagcagtcaaaatcagttttcygaaccagagagaaatgcctctacctgatgccatccagataatgcacattctgtgtctgaactgccctcccggtggcattgacctatccttctgcagcagctgctggtggaagatgatgagcttcacctgtgtttgccatgcaggaacatgagcaatacagaagctgtccatgcaactctgctggcctctcaccatacggtcaaggtcaccacgatgcaggtggatggcaacctgcagtcagtgctccaggcctctaaggaactcaagcaaaagtatgcctggacagtcctcatgaaatggtatctctgatttctatttcaagatggcagactgagcactcggtaactgccttttccttccacatcgaatctggaatacacatatgtgagtgcaattacagaagtttggagtggcatcaggggatccgctgtggaggtagaagattctaggaactagaagagaacaaaggaaataaaaaatggtgattggttgggatacaatggaaatagcaggcaggtatg

SEQ ID NO: 386445 - DNA, 608 bp, Homo sapiens
tttaaaaactagctgctgcttttcccccaagattataattccataagcactagtcactgactttatagttaaataaaaccatcctaattctcaaaacagaagagaaaaggtgggaggaactttcagactgctcacagaaggaatatgctgaaaggccaacatgagaaagaagcagcagatcgaaaacgcaagcaagaggaacaaatggaaactgagcagtaagtatttttttttttctaaattttgggttctttttaaaggctagcatggaatttttaaataatagactttcattttccagactttatgaagccttttgaagaagtgacttttcccatgtgttagaaaaatcttcaatatatgatgatgatcttatttcaggcttcattctcttctgagaggatgaaattgactgaggcagtcactctgtgaattayttttgaatttaaacgaagtgcagataggatttaattgatactggctttgcaagaagtgtactcatcctcaaccatttgtttgtataatataatacatatagatagaggggcgataatatactggtagacaaagaatgcaggaaatgcccttattcatcacaccaccaagca

SEQ ID NO: 386446 - DNA, 604 bp, Homo sapiens
taattaataaccaaactttacatcttaaggaactagaaaaataagaacaaactttactaaaaattagatgaagaagagagataatgacaggaagaaaacaaaagaagagataaacaaaagagmccaggaaaacaatgaagagaattaacaaaaccaaaaattggttctttggaaaggttgagaatattgacaagcctttagctggactgacaaaaacaaaacaacaacaaaaaaaaaaacagaaaagaaaataataaaagatgcaaataactaaaatcagaaataaaagtggagacattactatccaccttacagaaataaaaaggctttttagagaatactatgaacaacatgccaacaaacagtatgccaacaaattatataacctacatgaagtataataatccctagaaacacacaaattactaaaactgactcaagaggaaaacgaaaatctgcacaaacctataacacaacaagtaaagagactgaattaaaaaaaaaaagattatgtctccacctgtgaattctaccaaatgtttaaagaagaaataacatcaagttttttcaatcttttccaagaaaaaaaagagaagagaaggaa

SEQ ID NO: 386447 - DNA, 538 bp, Homo sapiens
cactccagcctgggtgacagagcaagactccatctcaaaaaaaaaaagaaagaaaagaaaatgcaaagtaaaatcaaatcaagtgaaagaaaagaaaagtaaataaaaactaaagctgagaatcacttgctgcgtgacctacagtaggtgattgacttctcccagtcttggttttatgacctatcaaagggtatataataaagcccaccttcttattttagtttctttctttgccttccttgtttattcagtgtttttttaatagttgacaaagtgtattcacattcatcacrgtaatgacaatgtcctatatctttaatgctaagacacactgcttttcatattctcttgtttctgaaaccaagatgagtcttacaatcattgtgcacagttaaggcacccaagtttcctattttcctccataaaacaaaagtaatttttaaatccatgacattttagaacatagtatatttctaacagcaacccaagtacgtcacaatagcctatagagtaagtgttattcacattatacatatca

SEQ ID NO: 386448 - DNA, 589 bp, Homo sapiens
aataaatacgttattattatttttccttttgataggttgttggtaacacctgttctctgagttgttcaagctaaatctttataaagcaagtgctgaaatttgggatcttccatcatattatttcatttccaaattaatagactttattcatatagagtcatctctcaattcctgtttttgagaaaatccaactcattttctgaggaaattcttgctcgcccatagaacctgtttttctcaggttcctatttagattacatatttatttatattaaaaataaaagaggacagctttgttccttttcattgattttattattagtcaaacaaatgtaagttcttcagatttttactagaaattataactttacactttctgcagctaaaacttatccaaaattgtgtmtgataactacatgaaagcttttctttcttttttttattattatactttaacttttagggtacatgtgcaggttagatacatatgtatacatgtgccatgttaatgtgctttttttattattatattttaacttttagggtacatgtgcaggttagttacatatgtatacatgtgccatgttgg

SEQ ID NO: 386449 - DNA, 596 bp, Homo sapiens
tccagtatcttctctcactaaatctttgtctttaactacaccaggtgctactatttctaaactgttttttcagattctcyggtgctgaatctctgtttaagcttattcattgtcctaaatgcctttatctgacttactgtgcatcaagtgccttactccaaggtccaattagttaacaatttaccctaaattctctatttagagtttttcttcctctctatgagatgctcaaaaaaattttattttgaccactgtgataggcattataataacttcctaaagatgtctacgtccaatcttccgaacctgtaatatgttaccttattgggcaaaagaattgtacagatgtgattatggttacaggccttaaaatgagaagtttatcctgaattaactgggtgggctcaatctaagcacaaaaagtcttataagtgggagaggaaggcaaatggggaggtcagagagattcaagttaggaaatagaggcaggagagatgcaaagcgtgggagggatttagttcacatttgctttatttaaagagggaggaaggaggccatgtgtcaaagcatatggcaccctctaaaagtgggaaata

SEQ ID NO: 386450 - DNA, 580 bp, Homo sapiens
tgtttatgtgaagattttttataaaataacattggtattttaatactctatttattaagtgaacattgtgaaaatagatagaaatatttctagcatytctaaggcaatggttcttattcaagtactatctaatgagatttaagtggtcaaatgtatattgaattttaaaatttgaagatgcaactgtatgaagatattggctacatttataggctactgctaaatgggatcaagggaggttgtttataaacttttttagtcattcattttaattctatactgaatttaagaatgagcaaagagctaggcagtgtttactgccataaaaaataaaacaaagtattattctgtggacatatttttaattttgcataatttcaaaagataaacattgttcttatgactcattaaataattcagcattactgacaatataaacatgtggtttgattaatttcctattaggacaggatgtcttgaattcagaacatagcctttattattgccagcaaatctagtgccagcattaagccagtgtgtaatgtcaagatcatctctatgaagaactgggtatgagaga

SEQ ID NO: 386451 - DNA, 602 bp, Homo sapiens
gagactgagtgtgttaaaagccaacttctgatatgtaaatatttctggttactgcccatatcagagcaccagcctagccataactttctaacaacctcaactgcccccagatgatgtgtgagtttgcagcctgaccacccataaaaggatcaccctggtccttctaggattccccaagaagagtttgccagcaacacagggaatccttcttattccaggtacattactgcaatatccagggtgtttttacttttactgtgtttttgttgttgttttttggtttttatttgtttcaatgaaagcattgactttaacctaaaatgatacctttgctatgtcaggctcaattggcaagctgcatttttgtacatgaamctcaatggtctcagagtgcctgcaaccagtagaaatgtctttgtaaagcaattttatataattattttctttttttaatcatctgtttccagccagatactcccaaacaggagtgtttctgtgttcttagtgttcttataggcataaggagtaaccgagaaataacaataaatatcactaacctgacatttttctactaaatttccccaactcttccccctaagtag

SEQ ID NO: 386452 - DNA, 602 bp, Homo sapiens
gagactgagtgtgttaaaagccaacttctgatatgtaaatatttctggttactgcccatatcagagcaccagcctagccataactttctaacaacctcaactgcccccagatgatgtgtgagtttgcagcctgaccacccataaaaggatcaccctggtccttctaggattccccaagaagagtttgccagcaacacagggaatccttcttattccaggtacattactgcaatatccagggtgtttttacttttactgtgtttttgttgttgttttttggtttttatttgtttcaatgaaagcattgactttaacctaaaatgatacctttgctatgtcaggctcaattggcaagctgcatttttgtacatgaaactcaatggtctcagagtgcctgcaaccagtagaaatgtctttgtaaagcaattttatataattattttctttttttaatcatctgtttccagccagatactcccaaacaggagtgtttctgtgttcttagtgttcttataggcataaggagtaaccragaaataacaataaatatcactaacctgacatttttctactaaatttccccaactcttccccctaagtag

SEQ ID NO: 386453 - DNA, 426 bp, Homo sapiens
atatatagacttgaggagagtaatacaggagtaagtttaaaaagtctgtttatagattgtgcatttaaaatcwcaagtatgtaatgagtattttcacatttctgtattgcctttatctatttctattgcaagctccccaatgaaagaaataatctgacacttctcttgcttcctcacctccatccttccctccctccctccctctgtcccttcttccatccctccctccttctcttcctccctcacttccttccttttttccttctcttgccttaaagtttttagcactgaacataacattctcgtgaacaaatactcatgaatttaaataaaattgtttccatcacttagtgttccatggtatataaaaactttggattatttttactactgaatatgtaatttttgttcttaaattcatttcat

SEQ ID NO: 386454 - DNA, 426 bp, Homo sapiens
atatatagacttgaggagagtaatacaggagtaagtttaaaaagtctgtttatagattgtgcatttaaaatcacaagtatgtaatgagtattttcacatttctgtattgcctttatctatttctattgcaagctccycaatgaaagaaataatctgacacttctcttgcttcctcacctccatccttccctccctccctccctctgtcccttcttccatccctccctccttctcttcctccctcacttccttccttttttccttctcttgccttaaagtttttagcactgaacataacattctcgtgaacaaatactcatgaatttaaataaaattgtttccatcacttagtgttccatggtatataaaaactttggattatttttactactgaatatgtaatttttgttcttaaattcatttcat

SEQ ID NO: 386455 - DNA, 426 bp, Homo sapiens
atatatagacttgaggagagtaatacaggagtaagtttaaaaagtctgtttatagattgtgcatttaaaatcacaagtatgtaatgagtattttcacatttctgtattgcctttatctatttctattgcaagctccccaatgaaagaaataatctgacacttctcttgcttcctcacctccatccttccctccctccctccctctgtcccttcttccatccctccctccttctcttcctccctcacttccttccttttttccttctcttgccttaaagtttttagcactgaacataacattctsgtgaacaaatactcatgaatttaaataaaattgtttccatcacttagtgttccatggtatataaaaactttggattatttttactactgaatatgtaatttttgttcttaaattcatttcat

SEQ ID NO: 386456 - DNA, 639 bp, Homo sapiens
  misc_feature (1)...(639): n = A,T,C or G
gaggtggctggtcaaaaagaacatgtaagctgtctacaatcatggattaagttgttttgatacaaacctttagtttttgaaaacagctaccttcacaagaatamtaaaataaccattatccagtgaggaagcaactagctcttaatggctacctagagtagaggttggcatgcagaagaaaaatgaaaggggattttaccatggaaccgagcaaacacccatagagtaaatgtcttcacctaaagttgggggtgggggtgcttacaaatagtaatgaagctaagagatcatattttcccaactgtagtcaaagaaaatattcattcccaggagtacacttttataaggtcatattgtgatagcattttaagagatgcacttagcagaggcagttaggaaacttgtacctccagaatatacacagacttctgaaatagcaattaaaaaaaatcaattcaccaccaccacaacaataacactcccctagtcattcttgatcaagaaaactaaataaaattaaaattaaatatttaaacactattataatagaatatatcctgaaaaaaagaaaagtgtggaagggtttcaaattattttcttctcacacttactgaactgctaagtgtnnnnnnnnnnnnn

SEQ ID NO: 386457 - DNA, 632 bp, Homo sapiens
caaccattatcactatatttggtctattttttttccagtcaatcctccaagttgctaacaacattatcattctaaaacattaatctagytatgttactctcatgttttgaccacttactaccacaaggtaaagtgtaaattccttaccttgtcatttatgaatttttattatttgatcatgacctacctttttagaacccaactacagctatttcaaacactttggaatctttattattccaagtaagtcttatgatgtttcaagttttgatgtttttgtagctgatgtctttctgtcttgaataattattgctttcctccaccagatgtatagtcacttaaattctcttttccgtaaaacctcaatgattactcagaagtgagttctcccacttcagctttccagattatttccaaggcacagatatatcatgttcacctttttatctgtaactcattccctcacacatgatatgcatttcaattcatttgtattgagtgatagaatgagtgactgcattttatagagaatgaaatgaagcatcagtgtttagtaacaaaagttaacaaaggagcagaggtacatttgaaacagagatacagttacggatatggtgaatttttttaccaaa

SEQ ID NO: 386458 - DNA, 596 bp, Homo sapiens
aaatgagcactcatcatacctgatttaaacttaatatagctcaaagaagcactgaagagatagaaaaaaayagtcctgaattactgaggctaccctcccatcactagctggcagttgtgacatggtgcaaaaagcatctctgggcactgggggaaacagaacacagcaattatgaggcattgaactcagtgctgtacttctagagcagaaaggaaaacctgaccaaactcaactgatgcccacccacagagggagcatgtaaaccagccctagccagaggggaatcatcaatcccagcaggcaaaacttgaattccaacaaatctcaccaccgagagcttcagtgctctgtatctccaagtaaactttaaaaacagtctaggccataaagactgcaactcttatgggagtcctagtgctgaactaggctcagagacagtacactggggagagggagcatgtgacatactgagacacaaactggagtggccaagggagcactggcattacccctccactaacctcaggctgcatagttcatggctccaaaagagaccccttccttctacttgagaagaggagaggggagagcgggta

SEQ ID NO: 386459 - DNA, 596 bp, Homo sapiens
aaatgagcactcatcatacctgatttaaacttaatatagctcaaagaagcactgaagagatagaaaaaaatagtcstgaattactgaggctaccctcccatcactagctggcagttgtgacatggtgcaaaaagcatctctgggcactgggggaaacagaacacagcaattatgaggcattgaactcagtgctgtacttctagagcagaaaggaaaacctgaccaaactcaactgatgcccacccacagagggagcatgtaaaccagccctagccagaggggaatcatcaatcccagcaggcaaaacttgaattccaacaaatctcaccaccgagagcttcagtgctctgtatctccaagtaaactttaaaaacagtctaggccataaagactgcaactcttatgggagtcctagtgctgaactaggctcagagacagtacactggggagagggagcatgtgacatactgagacacaaactggagtggccaagggagcactggcattacccctccactaacctcaggctgcatagttcatggctccaaaagagaccccttccttctacttgagaagaggagaggggagagcgggta

SEQ ID NO: 386460 - DNA, 596 bp, Homo sapiens
aaatgagcactcatcatacctgatttaaacttaatatagctcaaagaagcactgaagagatagaaaaaaatagtcctgaattactgaggctaccctcccatcactagctggcagttgtgacatggtgcaaaaagcatctctgggcactgggggaaacagaacacagcaattatgaggcattgaactcagtgctgtacttctagagcagaaaggaaaacctgaccaaactcaactgatgcccacccacagagggagcatgtaaaccagccctagccagaggggaatcatcaatcccagcaggcaaaacttgaattccaacaaatctcaccaccgagagcttcagtgctctgtatctccaagtaaactttaaaaacagtctaggccataaagactgcaactcttatgggagtcstagtgctgaactaggctcagagacagtacactggggagagggagcatgtgacatactgagacacaaactggagtggccaagggagcactggcattacccctccactaacctcaggctgcatagttcatggctccaaaagagaccccttccttctacttgagaagaggagaggggagagcgggta

SEQ ID NO: 386461 - DNA, 584 bp, Homo sapiens
cctgttggggagtggggggcaagatgagggagagcattaggacaaatacctaacgcatgtggggcttaaaacctagatgaggtattgatagatgcagcaaaccaccatggcacacgtatacctatgcaacaaaccagtacattctgcacatgtatcccagaacttaaagtaaaataaaaactaaaccaaacaaaaaagaacatgtgaaaatatatatgtacaaagttgttcattagagtattctaaaaattagccaaaaatgaaaaaggaaactaaatatccactaatgggcactccttaaataaagtttcatgttgtcatgtaatgaaatatccaactgattatctgacacttgaatgttcatttcctgttataacatgatataataataataataatagtgttaaatgaaaattctaaaatgttaaacatattaaacaacaaatcccacatttataamatcatttacagtacaattttattcttaaatatattggcagaaaaaatcctaaaatatctgaatgtatgaacaatggagcaattggaaattttgttttgcttatttgcattttttttctgaaaaa

SEQ ID NO: 386462 - DNA, 584 bp, Homo sapiens
cctgttggggagtggggggcaagatgagggagagcattaggacaaatacctaacgcatgtggggcttaaaacctagatgaggtattgatagatgcagcaaaccaccatggcacacgtatacctatgcaacaaaccagtacattctgcacatgtatcccagaacttaaagtaaaataaaaactaaaccaaacaaaaaagaacatgtgaaaatatatatgtacaaagttgttcattagagtattctaaaaattagccaaaaatgaaaaaggaaactaaatatccactaatgggcactccttaaataaagtttcatgttgtcatgtaatgaaatatccaactgattatctgacacttgaatgttcatttcctgttataacatgatataataataataataatagtgttaaatgaaaattctaaaatgttaaacatattaaacaacaaatcccacatttataaaatcatttacagtacaattttattyttaaatatattggcagaaaaaatcctaaaatatctgaatgtatgaacaatggagcaattggaaattttgttttgcttatttgcattttttttctgaaaaa

SEQ ID NO: 386463 - DNA, 660 bp, Homo sapiens
ctatttattactacagaagaaatgcagactggatttaggtagacagccatagagttaattaaaaataagaaaattttggaattataagatgtggataaagaatgttatgctttattcatgagacagaaactcctcagtaatgttatctctgcatgaaaacatttagatcaagattttaagacttggctaacttaccttattcatataatgcctgttattgatttttcagctttatgactctgtttcatgacacygccccagaaacacatgcttttggattttcttagcacatttttaggttttatctattaataatagatacatcaaagccttttattgcgtgttgtgttgtgctggacactcaagcaatggaactgaatgccaggtacacaagttctaagagcatgggcagaaaatcttcaaataaagaaatggcaaataaagtacaaagggactttgaaggccaagggcaaaaagccaagaaatggaaaagaataaaccaagtggaagagaaaaaagaaggataaagtttttctgaacggaagaaaaacatgagaaatcacatattagagacatcagaaaatataagaatgatccccaaatccccactaatataaataaaatgaaattttaattctaccaaatccttactaatcataa

SEQ ID NO: 386464 - DNA, 623 bp, Homo sapiens
gtaaacagtattacttggaaaaaataccctaaataagaatgacctaaatttaatagaagcaaaagtgaaaaaaaaatttctgaatgaagccatttgtaagaagcgttattttatattaaagagtaaatgatttcaagccacaaaaatgtgggttcaaatcctggattataacttaacagttagttttggaaatttatttaaacttgttgatacctagtgttctcaaccctaaaaatagtagctacacatgtccatttgttcaggtctgtgatggggattgtagaatatgtgaaatcgtataacatcatgcctggcacaaaacaatgagaaataataatattagtaataaaagcagtaacaaatatatttatgaacaagcatataaagatcctctacactattttatcaggcaattaccagcaagccatagtaacgttatggacatttttaagcaggaatgaatttatgcagaggwtttattacttacaaaattgtgcaaagggcaagaggtataaaaggcgcattagagaacatttcagggggaaaaacagttttcataatttctgtaaactactagtaatgactcagtaacttacactaaagataaagccaaatttctcatt

SEQ ID NO: 386465 - DNA, 597 bp, Homo sapiens
gggtctttgcaggtgaattcaagttaagatgaggtcatattgaattaggataggcacaaatccaatagaaacggtgcccttataagaaaaggagaagagacagaatgagacacactgaagggacaccatgtgacaacagagacagaaattagagtgatgcatctacaaaacaggaatgccaaggactgccagcaacacacgaagctaagacaaaggaagggaacagattcttccctagtgtcttcagcgacttctggcctctagaactgtgaggaaataaattactgttgttttaagccatcctgtttgctgtttattgcagctcctaggaatctaattcagagggcaacatgatacctttgtttggagaactaccaagctgctatcacatacagtcaatatttatgatttgacaaggctgtttatactttgtttggcagtacttcagaaataggaaattatttcatgcattattttataaataatgatgtaaaaggaatttatattrtttatattgtaagttgaagatagtatccagaatgtcatttaaaataaaatgtgtagagacacaaacttgcatttcattcattattgata

SEQ ID NO: 386466 - DNA, 362 bp, Homo sapiens
ggcccaacttgggctcaagtagaaacattctgcttgtgatttcataaaacatttaaaagcacattttagagttaaaaagagatttagataatccaaatcaccaagtagttactgaaaactttctatgattttggtataaaattttgtgtgtaccctcttaggcacctaggctaacacacaaaacctcatttcttttatagtgtgccccaaatatcrttgggaggcagtctgctatgagcctcttgtgcttctacgtgtcttgctacatatgccaaaatccccagatcctgatcattctttcaccctggccacttatctaaattgtttatgcagctgacagttctgcaaagtgaaataatgcc

SEQ ID NO: 386467 - DNA, 565 bp, Homo sapiens
ggactgggctaaggtaatacgggccagaccaacaacagcatttgctacagtaagacacagttgtaaggtatcactctttarctgttgtcagtgttgttgtgagttgcctgaaaacaagagctatgtggtatttatctgtttctctgcatcaccagccacaacgccttcaacttagaggtgttattaagcacctgtcaaataaatgaaaccaaatgccttattggtggaggatatatgttatagtctggaataaatctgcttgggttcaaatcttaactctgccacttaaaactgcatacttggtcaatttctttaatctcttggtgtccttatctataaagatggcataataatattacctatctcacggagttgtgaaacttagtactcagcaaatacttaatagttgtcagttgttcttggcacaaaaacattagaactgcatagaactccagttctaaaacattcaagaaagaaaactgctcttgatgatttgttctaaattgtttatagtaattgttggtccaaatatgatttacattgtagtaaattacagccatatttt

SEQ ID NO: 386468 - DNA, 554 bp, Homo sapiens
tgtcattattattttgtgtcttgtagaagcagtattagggcttctgtgtctcaggcagtatcacaaatgcaaatttccatggttgatagcagctgaagatgaactcaggactgggctaaggtaatacgggccagaccaacaacagcatttgctacagtaagacacagttgtaaggtatcactctttagctgttgtcagtgttgttgtgagttgcctgaaaacaagagctatgtggtatttatctgtttctctgcatcaccagccacaaygccttcaacttagaggtgttattaagcacctgtcaaataaatgaaaccaaatgccttattggtggaggatatatgttatagtctggaataaatctgcttgggttcaaatcttaactctgccacttaaaactgcatacttggtcaatttctttaatctcttggtgtccttatctataaagatggcataataatattacctatctcacggagttgtgaaacttagtactcagcaaatacttaatagttgtcagttgttcttggcacaaaaacattagaactgcatag

SEQ ID NO: 386469 - DNA, 592 bp, Homo sapiens
agggcaaatccccgagcttggtgtgtagggaagggagggggcctgaacactccctgaggagtagtagaatagcagaaggaacactgagaagtgatttccttgaggatagatttccaygatggaaaggaaatgagacgttctaagaggtgggctagcggcttgtaacctacatggaagaggttaggaaatgacagcagaatagaatgggcctgtgaggctggaaggagatccttggttcaaggactatttgccttgtgtgggaaaggactgataggtggaagtttcagtggggagtagatgggagtgaccagatgagaaggagaaaaactgccgtgaaggatagaagttggaaagctagctgctttttaagctacttatcagcataagcattgccctgagtgatgggatctgatgccttttgatggcccttgcagtgaatgactccagcttcctttgtaagtaaagcggccttgagaagagtttttattaaagagggattgatgatggaggacccttgtgtagtgaggaaacctctttttgcccatataacaacatggttgtgcaggatatggaaagcatatttagagtcagc

SEQ ID NO: 386470 - DNA, 592 bp, Homo sapiens
agggcaaatccccgagcttggtgtgtagggaagggagggggcctgaacactccctgaggagtagtagaatagcagaaggaacactgagaagtgatttccttgaggatagatttccacgatggaaaggaaatgagacgttctaagaggtgggctagcggcttgtaacctacatggaagaggttaggaaatgacagcagaatagaatgggcctgtgaggctggaaggagatccttggttcaaggactatttgccttgtgtgggaaaggactgataggtggaagtttcagtggggagtagatgggagtgaccagatgagaaggagaaaaactgccgtgaaggatagaagttggaaagctagctgctttttaagctacttatcagcataagcattgccctgagtgatgggatcygatgccttttgatggcccttgcagtgaatgactccagcttcctttgtaagtaaagcggccttgagaagagtttttattaaagagggattgatgatggaggacccttgtgtagtgaggaaacctctttttgcccatataacaacatggttgtgcaggatatggaaagcatatttagagtcagc

SEQ ID NO: 386471 - DNA, 560 bp, Homo sapiens
ccaaatgatttatgaagaaacaagagataattttagaatttttatttttgcattaaaaaattatacattgatctcactaattttatgttttcctctccagatgaattttgtttgtgtatatcatgatgatttctattttaactttcatatatatgttttactaaataataacataattttgaaatacttaaatctttttaaccagtatattgtgcgtattttctgcaatctatttatttgcttgatatgttactgaggcttttgtgtgttgacatatgtcaccatagttcattcattttaaccataatgtagtattctgtgatttaaatataattctactgttgatgaacattttaaatgttttttattttaaaacatttttgatttttcacrattgtacgttgttactaacaacatcattataaaatcttttcccacctctctgtaagaggtttttcaatgcaatttcatcaggaattggaatataggtcatagagcataaagtaacttctgctttactgtataacgtttccattacctccaaaatggttttgtcaatg

SEQ ID NO: 386472 - DNA, 546 bp, Homo sapiens
ggggctagagaatgggtgcttcaaattatatcataggagtacccaaactctctttgcatgctgaatcagtttctgggttggggggtcataggactagccatgccggctgtttggtaagagtcatgggtcctggtgaagtcaatcagtcaccagcatgcaaaaatctgaaaaatatctcaaagaccaatgctawgttttgacactaatgatattatctatagtagcaatcggggaagttataaaaatcttgtgatctatggagcagtaaacaattatagaaaggtaagctagggggcaatgactggttattgtttaactatccctatatcttagcagaattcagctttctcacataatcttaaccttgtcgccctttatttgttttaaaaaataaaaggttttggtccccaagcaagaattgagttagtttcaagaaggaactcttatatttgttttaaagttaacaaaggcatttagcttatgaggtgagaagcaagatgaagtcagttaggttagacttctctcactgttacaatttttgcaaag

SEQ ID NO: 386473 - DNA, 534 bp, Homo sapiens
tttgtagttaccatatgattcctaatactctacttacaattaattgcrgtctcaaaatgattttcaagcagatatgattttaaataagtttttaaacaacaacccactcagcacattttcatagcaagcacctctaaacaaatttataaatgtttcaatcttttctaaagtcatttaaatgacttcatgacaaatgcaaattttcctccttgttttttggaaagtaccagtcagaggtagatttgagtgacatctcttttaaaagagaacaaagagaccaacaactcaaataatctaaaaccttcacttgttattgtcacaaagactgcttgagctttaaaaaagtaaagaaccattaatgatacaatataaataattgtgtgggctctgagatgattagttagggaggtggcagaattatcctgtcaaaaataaagtatttttaaatatctaaaaaggaactgtataacatcaatcctaagcatgaaaaccctgacatccaatgctactatgcccagaataataataattaaa

SEQ ID NO: 386474 - DNA, 533 bp, Homo sapiens
agcatgccctggaccaatacttcatcaatctctgctcctaagactctgaccctggctcactstgctcaagcacaactgcctctcggatgttctttggaacatgaacactccacatacctcttttatcagggtctttacactcactgttttctctctctagaattctcttcccacaactatctgtgtagcttatcctcattcccttgggatctttccttaaatgtcacccaaaagaggcattactagaccactttatgtaaaatattacaatcctttttcctgcaaccttcacctttccctgctttatatctattttccccatagcatttattaaacatatacacatacaaatatatacaccatatacagtgatagtatgtacatatagttgtgtatggtatttttaaatttatgattgtttgttgacagtttttttctactaaaatgtaagttctatgaaggcaagaggtttttaatgttttattcattttcatatcctagtgcctagaatagaatctggcatatagtaaatg

SEQ ID NO: 386475 - DNA, 582 bp, Homo sapiens
caagaaagtgaaaaccccaccttaaaatggaaaaaaaagctgaacggatgccttaacagagaagatgtacagatggaaaataagaatggaaaaatatccttaaaatcataaatcatcagagaacagcaaattaaaaaagaatgaggcggggcacagtagctcacccctgtaatcccagcactttgagaggccaaggtgggtggatcacctgaggtcaggagttcgagaccagcctggccaatatggagaaaccctgtctctactaaaaatagaaaaattagccggkcatagtggcgcatgcctgtaatctcagctacttgggaggctgacgcaagagaatcgcttgaacccaagcggtggaagttgcagtgagctgagattgcaccattgcactgcatcctgggcaccaagagagaaactctgtctcaaaccaaaacaaaccaaaaaaacaaggaaaatgcaacacactaacaacaacaaatgctagcaaggatgtgaagtagcaaaaactctcatgcattactgatagaaatgcaaaatgatgcagtcactttagaagatagtttgtcaatttatttaaaa

SEQ ID NO: 386476 - DNA, 582 bp, Homo sapiens
caagaaagtgaaaaccccaccttaaaatggaaaaaaaagctgaacggatgccttaacagagaagatgtacagatggaaaataagaatggaaaaatatccttaaaatcataaatcatcagagaacagcaaattaaaaaagaatgaggcggggcacagtagctcacccctgtaatcccagcactttgagaggccaaggtgggtggatcacctgaggtcaggagttcgagaccagcctggccaatatggagaaaccctgtctctactaaaaatagaaaaattagccggtcatagtggcgcatgcctgtaatctcagctacttgggaggctgacgcaagagaatcgcttgaacccaagcggtggargttgcagtgagctgagattgcaccattgcactgcatcctgggcaccaagagagaaactctgtctcaaaccaaaacaaaccaaaaaaacaaggaaaatgcaacacactaacaacaacaaatgctagcaaggatgtgaagtagcaaaaactctcatgcattactgatagaaatgcaaaatgatgcagtcactttagaagatagtttgtcaatttatttaaaa

SEQ ID NO: 386477 - DNA, 604 bp, Homo sapiens
gtttttttgcaaattaaaggtttgatgcaacctttcttcaagtaagtctatcagtcttagttttccaaaaacatatgctgattttacgtctctgtgtcacattttggtaattctcaacatttcaaactttgtcattattattatatcttttatgrtggcttgtaatcaatgttctactactctaattgttttgggccaccatgaatcaggcccatataaggcagtgaagttaagtgataagtgttatgtgtttttcagttgctctgctcactgtccattctctcatttctctccctttcctcgggcctccctattctccaagatacaacaatattgaaatttgccaactaataactctacaatggcctctaagtgttcttgtaaaagcatgagtcacacatctttcactttaaataaaaaggtagcaatgattaagcttagtgaagaaggcatatcaaaagtcaagacaggctgaaagctaagactcttgtgccaaagagttagtcaagctgtgagtgcaaagaaaaaaaagttctcaaatataattaaaagtggtacacaagtgataagaaaatgaaacagtcttattgctgctatggagaaa

SEQ ID NO: 386478 - DNA, 578 bp, Homo sapiens
ttacattttcatatataatgtaattggaaatatgttttacttttccatcaaatgtatttaaataatgtaattgttattttaaaaactcaactctttaaccttaaaaacaaagcaaatcttagaatacttaaaacgcaaggtttaaaagatcttataaacatccattagcgtataagattttgtttaaataagcccctaaaaacttgttactgaaggttaaaaaraaacatcatctgtactaatatagaagaaagtggtaccatgtgtatccttcttcaatagtgagaaattctgagtcctggaggacaatttgggctgctgagtagtattaatcaaaaccctttacaatgtgcaatcttactttgggaatttgtcccaaggaaagagttataatgttcattgcctttttgtttattacagtgaaaatacaaacccacatcggaaaatccaccagtaaattattagctaaacaatggtatatgcacaaaattcaaatcagtgcagtcattaaatataatatttattgacattgaaagatgttcagatattaaaaattaaataaacaatcaatgacataa

SEQ ID NO: 386479 - DNA, 562 bp, Homo sapiens
agttgttgtttaataggcagagagtttccgttttgcacgatgaaagagtttcagtgattggttgggcaacaatatggatgtatttcatgccacagaactgtacatttaacaatagtcaaaatggtaaattttatgttgtgtgtattttactacaatgatacatattttaaaaggaatcaacaggccaaaaacttcagtaacattatcaattgacaacctctccaaacaatgtgtggaaaaataaggccacttgcctggcccccattctacagtctcttgggtcctggcrtttttctgtcactctctcacatctgcattttaagccaccactacctagctctatcacttcacagttgatcgttttgcatttctggtaagagagtcctattgtctccagtcaactgggggcatgttttatcatcacatgcctcctattcctgtttccccaaactttgatagtcttaggtaattctatccttagagaatggattaccccacaaattactgtcaccatgtcccccagcatatctgaggttatatcacaattttaccctctggatta

SEQ ID NO: 386480 - DNA, 537 bp, Homo sapiens
catttatataatagtggggatcttacaaggtggaagtcaattttggatgaggtcctatatgctaaaatgtaatcctgtgtttatatttaacataattacagtcataatagttattttttaattataacatagcaattgagccataaactaggttctattttgaaatgcattttgaataaagtatgcatatgctgtgtgtgattgacatacacagtgggttgggctggggagcaaattacagtcctcaggccaaatctgtctgcctcctgttttggaaataaagttttattggaamacaggcacacccatttgtttgcatatgatgtatgactgtgttcaaactacagtggtagagtttgaatagttgcaacataaatcatatggccttcaaaaacctaaaatattaagattaggattaactgttaccaaataaaaatatttttctcaaaaagcaagttgaagttatttcttttcctaattcttttacattgatatcacggtaatcaggtcaagtggaaccatggataaaaactgaga

SEQ ID NO: 386481 - DNA, 401 bp, Homo sapiens
tttcattcactgtcctatccccactagactgcaagctaaaagagagccagggttttgtctgttttctttgtctacaaagctccagcaaatagaccagtctctggtacatggtaggtgctcagctgatgaacagaaagttgggctatgctggaagtattcttccctgcttggctaaagacaatggcataaaatcaatgttcctttgtctataaaaatgaaataacatcctacctcatcaagagtakgttgattcaaatctataaagggtcctataaaacagttattttgaaattaatgtaaaaagttatccattcatttaatgagtagattttaatccatgtagctcactgaatttgtctaaatctgacttaaaaattgttttttattacagtctccatttt

SEQ ID NO: 386482 - DNA, 607 bp, Homo sapiens
aacttttttctgacatctattgattatatccatagagattaagaggagacagcaattaagtttaaaatttaatggtgttctgctgctgttaatttactggctgactctatcaatgtgtcaacttggatagaaatctatgcccccaccatccatgtgctagaaaactctatgatgccctttcagctaaaattataataatcacaagcaaccaaataactaagaactagggatcacacaaggtccctgtagagagtgacaacatttgcctatatgagttgcccaatctacatttttaaagaggccacttaaattgaaaatagcaagccttgagagttgttttgtttaccttactactttccaattttggaattcactaaatggtaaacatatcacactcacaacaaaaaggaagcttttcctaccaatgacagctaaaatatgtayattccatggaatttcattttgcttgtcaggcaatggagtctctgatatatgtcataattaaatctggaaaaagcctggttactatcaaaggagataattccacgtaacataaaacagcatattaggtaagcctaaaattatcagtttactctatgacaaggaa

SEQ ID NO: 386483 - DNA, 606 bp, Homo sapiens
tgaacaaatattaaaagcacaacccaagtttaagggtaaaaagcacaacatctttattatagtttctagagcttcaggtatctctgattacacatgagaagtttacctttgtttatcaatttcttttctttcactggggatgatattcatgagtatttgactgggatatcttaaagtgaaagtcttatatgggtaaatagggaattagggaaaaggtggcaatgagctctttgtattgattttatcattcgtttcaaagatgagataatactttctatcaactgcaaatactttcattcagctcccataaaactagtattagtttcatttattttgtcctcacagttaggatttagttatatttattcaattctcagaacttktattttacaaaatgaacagtttagtctgaatcattacttattcttctagtgcgttaaaaaacagaacaaaaatagcatttctttaaaatgagtcactacttaaaaatttttatttatttctctctaagatatagcttctgaactcaagatcaaagtatgggaagaatttttccaataacttcaagtgctcttaatgttataaaacctgtctactattttaaaa

SEQ ID NO: 386484 - DNA, 592 bp, Homo sapiens
taatgctttgcaatgactgtaccacaattcagctcctttttctgtagattgctgtttccttgccctgcctctcccacagatgttgatcctgaagtcgttactcaataaacctcccgaaagtaaatctgttttagagtctgtttcccagggaacctgccccagatattactaagtataactggatttacattcaggtttgccctttcttatggaagtagtgatacagtttaaaaaaaaaaaaagtgggaagcactgtttaaaaatgtctctactccaagcatgaaagattgtttccccagcagttcaaagtgaccttcatatggaatgtttgtacataagacatctggaaatgtcataacagtagttgccaacatgttatttatttcctgttgagaatctaaaaagccactttgrgaaaagtgggatgactaataaacttagaatcagattcctgtgtcttagtactggattctgagttgatgactttggacagactgcttaactttcctgagccctcttagaaattataaaacaatgaacaggtatatggttctcatgaaaaacaagctgcaattctggcttatcaaatgtc

SEQ ID NO: 386485 - DNA, 351 bp, Homo sapiens
cagcactgggggctataattcaacatgagatttgggtggggccataaatccagaccatatcaccagatcattaaaatgtctaatgggttcatcccatgagcttacccatgagtgatagggtaaactatttcaaagtatttcaaatcatggtctatgggacaatgtcatcagaatcacaagatgtttsttaaaacatcttggatctcatttatatgcggactctaaaaaagctgaacacatagaagcagaaagtagaatggtagttaccaggagcttggagaaggaggggactgggaagatgctgatcaaaggataaaaaatttcagttagaaattgaagagatctatcata

SEQ ID NO: 386486 - DNA, 608 bp, Homo sapiens
ggaagatctgaaacagtagctgttatggaccagcaacaacagtaacaaaaacttgtcactaagagctcagatgaggatggaagaactggtccttacatagtgtccaaatggctcaagatttccaacccttcttagaagctcaggaataggcatagaggtaagggattcctctattaatccagagctctgggctatatcaaacaggatacagtggagaactatagatatgggcttccaaattcacagttcttgtacaaggctgtttcagatagctgaccctaaaatctgagagtgggaaggaaggacatcaaggccagctgggatgtgataggctggggaataggttggggacaatggggctcaaaatgctagtaaaatcaagttcagtagaagcaaatgaatagatggggtgaaaggaagaagaattcaaagacagggaagaatatttaagggacttagtacatatgatgatcctgtatttcttatagaaataatgctggagagcctggaaaagctgccactattcttttataattcctgtgtcaactactgtaggttctcayattgtgaagttgcagaatcttcatttaacaacacaattgcagtca

SEQ ID NO: 386487 - DNA, 445 bp, Homo sapiens
gacctggacatatttctctttaacattgtgccaagaatagcacaatgttattgtgctattaagcaacagcctggattaagctgggaacattctaaatcttgtaaccaatcttgtttccctctttgcattgcctgttagaaggcttacagccaaacttgcgatgcattggtggcatatttataggattgcgtgaccttctctcagttccctcccagctttcttttaaacatctcatcctcatttcccctgtcttcttacttctttcatgtctatattacattttatgtttacattgctgtgtgggatttgtccatgtaagttacatttgctcttttataaaatatttatraataaaaagagaaagaacagaaacagttttcagcactatttagagttttctaataaagtgggcaaaatctggacaacagaagtggagctggctgta

SEQ ID NO: 386488 - DNA, 432 bp, Homo sapiens
acttacagtggagacgttgagagtaagggaagccttcctggaagagatagcattaaatcgtgggtaagatgttgatgtctaaaagttaggaaagagtgagctagttttccagaataagagaataaccacccaatgggttcaccttgcccactacctagacagagctgatgtatcaagacaggagaattgcaatggacagagtaattcacacagaggtggctgtgtgggagaccatagttttattaatactcaaatcagtctctccaagcattccagkattggagtttttaaggataatttggtggttaggggctcaagaagtagggagtactggttggtcgggttggagatggaatcaaagggggtcgaagtgagtttttcttgctgtcttcttttcataggtgggatcgcagaactggttaagccagacag

SEQ ID NO: 386489 - DNA, 568 bp, Homo sapiens
tcaaaaaaaaaaaaaaaattcaaggaaatctagtgcctcattcatatttagatctcaggagattggcatcatatggagtgtaayaaaatgtccaccttcacagtctacatcctggaagagatcaccattttgaaccagaccaactgtgaacctctggagataccctacttcttgccaaattcccacagattggtcaccaaagcaggaggtcacaatggactggaatgaaagtgagcaaccagggccagatctaatccttacctcgttcaggcagagaggcctagaagaagaaatcagaatcaaggaccagtgagtggctgctgtgtatttctcatctgtctgtagctatcatccttgcagcccttccttccataacagaatgcaatttccaaagaaaaccaatgaatatagaaatagagctgcccttttacacaggaaaatcctctgactcgaggaaaatagaaaaggggattaacagcactcagggtgtaagaagtcaggggaaaacgtgagaaatcagcaatccgttgatatgaacagtagagtgacatttaagctggccaaggag

SEQ ID NO: 386490 - DNA, 568 bp, Homo sapiens
tcaaaaaaaaaaaaaaaattcaaggaaatctagtgcctcattcatatttagatctcaggagattggcatcatatggagtgtaataaaatgtccaccttcacagtctacatcctggaagagatcaccattttgaaccagaccaactgtgaacctctggagataccctacttcytgccaaattcccacagattggtcaccaaagcaggaggtcacaatggactggaatgaaagtgagcaaccagggccagatctaatccttacctcgttcaggcagagaggcctagaagaagaaatcagaatcaaggaccagtgagtggctgctgtgtatttctcatctgtctgtagctatcatccttgcagcccttccttccataacagaatgcaatttccaaagaaaaccaatgaatatagaaatagagctgcccttttacacaggaaaatcctctgactcgaggaaaatagaaaaggggattaacagcactcagggtgtaagaagtcaggggaaaacgtgagaaatcagcaatccgttgatatgaacagtagagtgacatttaagctggccaaggag

SEQ ID NO: 386491 - DNA, 498 bp, Homo sapiens
ttctgtctagagttgttccatattcttcaataatgagatgtactggtgcttcccaacttctttttctgaaacaagacacaagaaacaaaatgttttagtatgctggggtgtattttacaagcaaatagcagaggctagagggctgatagaaacagtatcatgacatataacctaagtgacgcaaatgcccaagatcctaagatctttctatgagggaactagttccatcccttttctcagaaggttcttttgcattagtccagcctgttttctccactgtgatcccacatgtaggatcttgctttcatcttatgtcacctactctgggatgaccaattcttgaatcatggccgttattatacatcattttcatctggaattctcytactgcttatacttttgcagaaagtgtgatttttgctattgagtttctgaatgattttgcttctctttaacatactccgcaaatactagttgtctgctttaccagttcacagg

SEQ ID NO: 386492 - DNA, 545 bp, Homo sapiens
atagaaaaccattgcaagctacctgagacctattttcctaattttgttcctgtagatacatttcagatgttagaggagggaacatttaggccgtaagatccaattcaggcatcctgtttctctctgagctattaattaaacttgactcctgaaaygccaataaattgcaaagggcttccaacttgctacagttctgtaatatttcaatcaaagtttctttatgatccttgttttattcccacgctcctccaccccaagaacatctgaaagcaattttaaaaactcaacatgcaatgtaagaatgaattactgcaatcagtcaaagagatcacattagttcatgaaaagtagcatggttgaaaaactgcactaggaagatcaaggattcatattaaagagggggttggggcaaaagcaaaatgaatggcttttaataattttaaaacatggttgatacaaggtgtagaagctttttgcttctaaaacaaactggttttcttatgctaaaaccttgttacaaagctgatgccaatctcctgcttgtt

SEQ ID NO: 386493 - DNA, 573 bp, Homo sapiens
cctttctggaaatttctccagaatcattccctatggattcagaaaattctgctattttctaaggacatcataaaatttgagatcaattctcctaccagctctgttatcttgactatctcttttttcaggttttgggggggtttggcttggagcgtttaaatcagcatttaccatcttcaaattcaaagttatctgcacctacttttttcttcgttttcacaagcaaaatgctttctaattgctaaaaaatttgtaccagaaatcacagcacataagtccccatttttctggacatgatattctcttatgaaaaggtgttacrgaaataaagatcccttagagactacagcaaagactaataaaggacgataaagtcctaccgcacccatatagacaagaggaagagttaacagtcacagatgtttagttcttcagcatgtgtgttttatttgggcatagagtgtttttaaattttcagctggcattttaaaatttcataggaaaaaaagtctagataagcagcaagttgtacctggaaagagccagatagtaactattttaggctttttggct

SEQ ID NO: 386494 - DNA, 573 bp, Homo sapiens
cctttctggaaatttctccagaatcattccctatggattcagaaaattctgctattttctaaggacatcataaaatttgagatcaattctcctaccagctctgttatcttgactatctcttttttcaggttttgggggggtttggcttggagcgtttaaatcagcatttaccatcttcaaattcaaagttatctgcacctacttttttcttcgttttcacaagcaaaatgctttctaattgctaaaaaatttgtaccagaaatcacagcacataagtccccatttttctggacatgatattctcttatgaaaaggtgttacagaaataaagatcccttagagactacagcaaagactaataaaggacgataaagtcctacsgcacccatatagacaagaggaagagttaacagtcacagatgtttagttcttcagcatgtgtgttttatttgggcatagagtgtttttaaattttcagctggcattttaaaatttcataggaaaaaaagtctagataagcagcaagttgtacctggaaagagccagatagtaactattttaggctttttggct

SEQ ID NO: 386495 - DNA, 596 bp, Homo sapiens
actaataaaggacgataaagtcctaccgcacccatatagacaagaggaagagttaacagtcacagatgtttagttcttcagcatgtgtgttttatttgggcatagagtgtttttaaattttcagctggcattttaaaatttcataggaaaaaaagtcwagataagcagcaagttgtacctggaaagagccagatagtaactattttaggctttttggcttacaggtttctatcacaaacacttaactctgccatcgtggggagaaagcaaccataagcaatatgcaaatgaatgggggtgtggctgtgtttcaataaaactttatttgtaaaagcaggcaggggatcaggtgtggccattaggtcttagattatgaacatctgatctagattatcaccttccctagtggggatggggaagggagcccagaagatcagcatctctgggtccgtattcaccataatagccttgagccaattaacaacagttcttttttcacacagaagaactttatggtttgccacagtccccactactccctatgaactcccaacccagtttacttcagtcgttagcagtatttatctggcctctgt

SEQ ID NO: 386496 - DNA, 596 bp, Homo sapiens
actaataaaggacgataaagtcctaccgcacccatatagacaagaggaagagttaacagtcacagatgtttagttcttcagcatgtgtgttttatttgggcatagagtgtttttaaattttcagctggcattttaaaatttcataggaaaaaaagtctagataagcagcaagttgtacctggaaagagccagatagtaactattttaggctttttggcttacaggtttctatcacaaacacttaactctgccatcgtggggagaaagcaaccataagcaatatgcaaatgaatgggggtgtggctgtgtttcaataaaactttatttgtaaaagcargcaggggatcaggtgtggccattaggtcttagattatgaacatctgatctagattatcaccttccctagtggggatggggaagggagcccagaagatcagcatctctgggtccgtattcaccataatagccttgagccaattaacaacagttcttttttcacacagaagaactttatggtttgccacagtccccactactccctatgaactcccaacccagtttacttcagtcgttagcagtatttatctggcctctgt

SEQ ID NO: 386497 - DNA, 596 bp, Homo sapiens
actaataaaggacgataaagtcctaccgcacccatatagacaagaggaagagttaacagtcacagatgtttagttcttcagcatgtgtgttttatttgggcatagagtgtttttaaattttcagctggcattttaaaatttcataggaaaaaaagtctagataagcagcaagttgtacctggaaagagccagatagtaactattttaggctttttggcttacaggtttctatcacaaacacttaactctgccatcgtggggagaaagcaaccataagcaatatgcaaatgaatgggggtgtggctgtgtttcaataaaactttatttgtaaaagcaggcaggggatcaggtgtggccattaggtcttagattatgaacatctgatctagattatcaccttccctagtggggatgsggaagggagcccagaagatcagcatctctgggtccgtattcaccataatagccttgagccaattaacaacagttcttttttcacacagaagaactttatggtttgccacagtccccactactccctatgaactcccaacccagtttacttcagtcgttagcagtatttatctggcctctgt

SEQ ID NO: 386498 - DNA, 496 bp, Homo sapiens
caggtgacagcaaccctgtgtgggtaacaacatgtgtggaggctggtartatcaaaaagacaatttgacttgctttgctttggcattgtctgaagtgttagtatagaggttttgaaatctgttgtcagacacttcataggagatgtttgtctctatagagggctctcaatactgtctcctcactcacaaaattctaagttgactaatttacgcaatttcccactgcagattcctttattgccccctctaagtacatgattagcatgactcagttttaagaactatgttacgtaatagagacacacagcttaattactacactatttattgttacttcttgtttggccgtatctaacttttcagccttctgtctcatgcaatttcattgtcctatgggcttccaccaccatggctttctctcaactttttgattaaaacccatggcttttctgcatgctctcttctatgcctgcaatgctgctcacccactagcttg

SEQ ID NO: 386499 - DNA, 560 bp, Homo sapiens
aaattatctccacctggtaacccactaattgaactttttccaaaggatccacttggatctgatgctactctggggagaataggtgacttccattactaactctttgcttgatactaagtacattctttaccaacgtagcttgaggyacttggtattgtcaaatagttaagagattctagatcagagtttgatcctagctgggcaattactggttgttgtataaccttttgcttctttttcctcatctgtcaaatgggcataaggatagtgtctacctcatgaagttgcaatgaggatgaaaagtgtgaaaagtatttataatagcacctggaatggagaaagtcctcaataattattatattattttgtaatcatttaatccacacatatgtattgagccaggcactggggatgcaaagatgaattagtcaatgtccccactctcaaagatacacctaggaggcagggttataaatcagagattaaacgtaagctgggggctaagaacaatgccacagctgtgcaaaatatgaataccaaattacaaaagcatattgttg

SEQ ID NO: 386500 - DNA, 612 bp, Homo sapiens
cctatcatcaccatgaaggaatgaggagccaatgctaccaattctatggtctaccaagaaaagtctgaaagccatattttgatatgaaattttttcattattaaatgtttamagctaatttaatttaatttttaagcactgtgatgaccaaataaaatatatctgtaggccaaactctatttgcaagttgattttcaatgttcactctgtattgttctctagaaaagcatttcccatactgtggtccgtagacccccggtgtttttctatgactcatttagggtcgtgttcaaaattattttcagaaaataataaaacattcttctttttcactgtgttgacatttgcattaatgctacaaaagcgatgataagtagtactgctgtttccttagcacaaaatcaaggcagtggcaccaaaatatactagtagccattgttttatttgctgccatatgcacatggtaaaataaaagaatggccattttcttaaaaatgttattaagaaaccagtgaaaagttattaattttatttaatctaaactcttgagcacatgtaatatttcatgtgacaaaatggcaagtacatatattgtgattgtgaatcaaatgg

SEQ ID NO: 386501 - DNA, 661 bp, Homo sapiens
gacttggtattttgcaacccttttgtgaaacaaaacaaaataaaaagtgagactatcacttccaaggaaaataaccaatagcatttgttgccaatgatagagctcaagmtttcaagtgaaaaattcaaattttgggaaattttagcttgacagatttccaatacttatggacttttctgatgttattggtaatgatatttaaaaaccactacttttattagacagtgaaatatttcaacatttcaaaagtctgcttaattcagtgaaccaatattttccagtgaatagttcatcatattacaaaatcttgcatggatataagaccactcacaggagaagacagaccagtggattttcaggtagccattgataaggtttcagagaaatattgcaactaaattttaagaaactactatattttgagcttttaatacgaaagaaaaatatccatgattatcttaaaagactgttataatcctataatattatcatatcatataacatttccccattttccagctgcatatctatgtaagggcaaattttctttatatgcttcaagcaagacaacatatcataaaagtttggatacagaagaacagagtgaaactaaaactttcttctattaagctagacatttaagagatttaaaaatcataaa

SEQ ID NO: 386502 - DNA, 625 bp, Homo sapiens
aagcccaccaaagacagaggagctctgttctacatcaaactgtatcgatgacctacctcaatagtaaaaaacatttaagaatatgccctcgatttatgtgtacttatttccttagtctacgtacaagcagttctgtacttacatattatgatcagtacataaaaaattaaaacatgcaccaaaaaaatagaaattagcggatatttgctgttgtgtacaatgcacctctatatggagactggtccttgtgggtccctggttataattgcattgctccataaaaggattaaaaaygctgtagaaactccctttcccactgtgattaagtcttgataaattaagcagaattgccttcttatggacccattctatttcaaccagtggttgtttttttgtttttttttgcatcaagtactttccaaaatactcagtggaggcttcggtatcactgagactttcttttataaaagttaaggcagcaaagcctagggaaatccgacttcagagagaatttctgagggagctgcttctctgatattctccattccctcatttctccctgaattcatctgatctctccatgagtgaaagaagaaaccaatgaatgaatcagaaaggagtgctt

SEQ ID NO: 386503 - DNA, 596 bp, Homo sapiens
ctaccttgtggctactgtaaataatgctgctatgcacatgggtgcacaaatgtctcttaraatccctgatttaaatttgtttggatatattcccagaattgaaattgctggatcatacagtaattttaattctttgaggaacctccataactgttttccacagcaggtgtcctattttacattcacaccaacagtgaacaagggtttcaatttctatacatcctcaccaacacttgttatttattttttatagtagccatcctaatggatgtaagaggaaatttggttttttaaacaaatagcttaggtgatttctatgatcaagcacattctagacaatgaatgatcagaaaatttaaaaagaaattgaaggctgatgaaacattacttttataagtttatgacgttttcctgccccattccctggaggcttcatgcacagtggggtgagacagcatctggaatttgtattgaccctttcccagaaatgccaaatggtgtgttgatttggagcttccaattcagaatctgataaccaggagtttattcagtctctgatcttacttgctgtgcttgctgtataatcatggtcttaa

SEQ ID NO: 386504 - DNA, 607 bp, Homo sapiens
gtgcttgctgtataatcatggtcttaatctttctaagtttgagtttcttgaaaattaggactaatgatatcaatttcccagggttgtttgtaagggttaaacataacaccacacctgaagtttatttgtttaattttttttgagacagagtctcgctctgtcacccaagctggcgtgcagtggcacaatctcggctcactgcagcctccacctcctgggctcaagtgattctcctgcctcagcctcccgagtagctgggattacaggtgcacatcaccacacctggctaattggtataagttttagacctgtcacttaaaaccttggtgatcaggatcttaacattgataagcccattttcttctctgtaaaatagggatagtaacaagaactgtctggttcctagtstgctagttgatatctggtatcattctcctcttttttctctgtaggataacccagatgttatgctgaatatcaaatttcacagctgaaaaatatatatcccaatctccctcacaggcaggtgtggcctgaaagttctagatcttaataagcctcccagagaactttcctcctgcctatcatttgctggtaaaaatgcaga

SEQ ID NO: 386505 - DNA, 571 bp, Homo sapiens
aggtgattcagaggcttcctgtatcaccacatggaggagagctacccctacacctgaatcaatttttatgtgaatgagaagtaaatatctattgcatyaagccactgaatcaagaatgtggaggtatacaggactataacatgaaattactgaccctcaatccttatcagctatctgatggagagaaacagtttatagtaaagattgcctgtgagatatttaatctattcttttctgcaggcactaaaatccatttctggtttcagtcagactagttgagtgctgatggctacactgagccattttgtgtatactaccttattgttagcaaagcatcccatacattttgtagatttagaatatagatttcttctcctccctttcctccctgcctccctctttcttttttccttcattcactcactagtagccactacgtgtcataaactctactgggttattgaaatgtgataagaatattagtattgctatagtttgaatgtctcctccaaaactcatgctaaaacttaacagtattgagaggtggggccttcaagagatgactgagtca

SEQ ID NO: 386506 - DNA, 484 bp, Homo sapiens
tagcctgcactaaaatgaatgaacttgaaaaacctgctatgtgaatgaagccaggtgcaaaaggccacatattgtatgattccactgatatgaaatgtccasaataggtaaatccatagagatagaaagcaaactacaggtcaataggggctgtgaggagaggaaaatgatgatgcttaattcgaagagggtttccttttgggatcctgaaaatgttctggaattaacttgtggcaatgacttgacattgtgaatatactcaaagccactgatttgtacactttaaaatacttgaagtcatgagttttagttatgtgaattttaccgaatcgttttttgaaaaatcattcctagtagggaggcctttctgatgaaaacctattaagtttccatttctccaggaaagggcatcattttctaataatattttggaaagagagttaatggaacagcattcatagatttatttttatatttgaacaaa

SEQ ID NO: 386507 - DNA, 634 bp, Homo sapiens
aacaaccgtgcaaagtgggtggttctacatgtcatggatggaggtccatgttgtgtgtggtagactcactttacagatgagaatctgaggctcattaacatgatgtgattatctggagttctcaccaatatcgatggcaaacatggtatcaatgcccaggtttttttatgattccattccacttttcatccacaggtgcctccagagtggtgaacataagacatgaaaggaagtgaaagtcagatcttctaactcttttaggagtggtgggagtgaaggagtagtgmgtttgtgccaagtgatggctaacaaatgccatgtagatagaatgatctgctgtaccagatcgatcaccactgtccaatagtactttctgtagggatggaaatgttctattctgtatcattcaatatggtagccactagccatatgtggctgttttgcacttgaaatgtagctggtatgactgagaaggaactttaattttatttagttttaattaatttaaatttaaatatccacatgtggctagtagttatcttatttgacagccatagtgttagcttttttagcatcaacctcagaagtcatgtccatatcttttctgtggatgtagaccactacctatttcata

SEQ ID NO: 386508 - DNA, 617 bp, Homo sapiens
gtgcaatatctagctgctgttaatggatggtcttcacttgaaggcagctaataaaatggctggaacaaagtgtagtgagctgtcaagtacagtgttctcttggctggaggctggagatatggatctttagataaagtcacatctctctggtactagtcacagatggcctttactctagtaggccacattcctgctacccatgtggtccttccttcctcctctccctctgctctcaacagtatgggtaacaggaaaatactcattcttcaattttaaatctgaataccttaacaggttttgaatttaaactccacatgtttgggcatctctgctccsgttagtgggtgcattagtccattttcatagtcctataaagaaatacccaagactgggtaatgtataaatgaaagaggtataatggactcatagtttcacatggctgaggatggctcataatcctggcagaaggcaaaagaggagcaatggcacaaattacatggtggcagcaagagaacatatgcaggggaattgccctttataaaaccatcagatctcatgagacttattcactatcacaagaacagcatgggaaaacctgcccccattattcagttacc

SEQ ID NO: 386509 - DNA, 619 bp, Homo sapiens
catgtcactgagatactataaatcacatcagtataggatcagttgtgtactctctggccagccagtcttaggcaacacttagctatcttcgggcatcacactatccattaactcggaagacttgaaagacattcctaaaaaacaaatcatagtccacagactctacagcatcatggccccaagtctattgcatggaattctggggactagaggagacaaataaatgttacagttaaaaaggttctaaaaagtttgggaaataytgtgttcaagtttaataagctacttgtctacagaatttctcagagcctttaatacactgtcatgttttggaaggctaagcagaggctatcatacataatccttctcacatatatctcatgttatcctatgaaaaactgttgctgaatttcaaacttccttcaattatcaaacctttttctctaccatggctgtctctaggaaatatgatggtatgtggtcaagaaaattgtatcatgactttttcccaggagcaatcaccagaaggaatttttgcagaagttcttgttctagaatctcatataatgccacttgaaaaaaaaattaaagttacatctgtcaaattttattttgttaa

SEQ ID NO: 386510 - DNA, 574 bp, Homo sapiens
atactatcccatcaagtgacaaaagttatcaaaacggcaatggcccaatacgggcaagactaccaagggctctgacccaagagaaataaaagtttgtgttacctcagtaggtaaagaatcatgttcaactacaatccttaaagaggaaaaatgaaacaggaaatgagcaatggaagaaggtatcaaaaattttagtctcaaaataattgcaagtccgaatgcatttttccttgctttgctagatatatttgtgagcatgtgtgttgtgagcaagctagtcaattttttaaaattctcaacctttcattcccttatgttttatagaagtgcttttagaaactaaattataaatttgtctgtaagataaaggataaaacgatggaataattactaaactggaaaaggcaaacacattccccaaggtggacccagcaacttgggactttttttttgamatggagtcttcctcaattgcccagcctggagggcagtgacgcgatctcggctcactgcaagctccgcctcccgggttcacgtcattctcctgcctcagcctcccgagtagctggtacta

SEQ ID NO: 386511 - DNA, 574 bp, Homo sapiens
atactatcccatcaagtgacaaaagttatcaaaacggcaatggcccaatacgggcaagactaccaagggctctgacccaagagaaataaaagtttgtgttacctcagtaggtaaagaatcatgttcaactacaatccttaaagaggaaaaatgaaacaggaaatgagcaatggaagaaggtatcaaaaattttagtctcaaaataattgcaagtccgaatgcatttttccttgctttgctagatatatttgtgagcatgtgtgttgtgagcaagctagtcaattttttaaaattctcaacctttcattcccttatgttttatagaagtgcttttagaaactaaattataaatttgtctgtaagataaaggataaaacgatggaataattactaaactggaaaaggcaaacacattccccaaggtggacccagcaacttgggactttttttttgacatggagtcttcctcaattgcccagcctggagkgcagtgacgcgatctcggctcactgcaagctccgcctcccgggttcacgtcattctcctgcctcagcctcccgagtagctggtacta

SEQ ID NO: 386512 - DNA, 573 bp, Homo sapiens
cattgcttcattatatccccttctctcactttttttttttttaaatcttgcatgctatattccaggtcaatccctcttttatgtcactgacttattcttcaactttgtccactaccaagtaaactacattttcttgagtgtttgaatttcaaagactgtgtatgtcctttccaagatttctaattggatttgtttcatatcttcctggtcttgcttcatttctgcctatttttgttccattagtccttgcttttctttaatagaacttattcttcatttttatttgggcactaaatacatttatattaaagatttgtcagactgtttcatcccgttaatttctccctgagaaaatttgtgttccatctgcggattttcttgtctgtctttctcagtattacattggkctctttattaagcagatcctgggtaaagaatctgagttcaggtagtttatttggaaggcaacaaaagcaccagtaggagaatggagaggggagacaaggaaggaaagcggccaataaaaggtggatcaccaggccagttactcttgtgtaaaactagaggtgaaac

SEQ ID NO: 386513 - DNA, 591 bp, Homo sapiens
aaacccccactgtaactaaacctcttagaatttaaatcctttccttgaatatattttaggatattattttcaaakcaagaatttttaattatcaaactaaccaatgacatattaaaatgctacccaaatcactcatgctgcactttgcatttttcgctatgcctaaaaatgcatcatctcacttgaccctcacacacattgggaggaagagaaacactgttgccctgtgttttacaaagtatgaaatgaagagctaaacagtcaagttgtttatggacagtcaaccaggtagctaatgtaacctatgacttctgatttataatgtaatggctttttcactctaccatcctgatcctattgccacttctggaccttttcaaaacttcatgtatatctccatatacacctcatctgatattaataacattctaatgattgcagattaagttttggagaaaaatttatctagaagaggtcattccattactctctaaaaaattcttggttatcaccatgtagcttttgtgacacaagatcgttttatgataccccttttctggcttcacccttctcttggattctccacattag

SEQ ID NO: 386514 - DNA, 591 bp, Homo sapiens
aaacccccactgtaactaaacctcttagaatttaaatcctttccttgaatatattttaggatattattttcaaagcaagaatttttaattatcaaactaaccaatgacatattaaaatgctacccaaatcactcatgctgcactttgcatttttcrctatgcctaaaaatgcatcatctcacttgaccctcacacacattgggaggaagagaaacactgttgccctgtgttttacaaagtatgaaatgaagagctaaacagtcaagttgtttatggacagtcaaccaggtagctaatgtaacctatgacttctgatttataatgtaatggctttttcactctaccatcctgatcctattgccacttctggaccttttcaaaacttcatgtatatctccatatacacctcatctgatattaataacattctaatgattgcagattaagttttggagaaaaatttatctagaagaggtcattccattactctctaaaaaattcttggttatcaccatgtagcttttgtgacacaagatcgttttatgataccccttttctggcttcacccttctcttggattctccacattag

SEQ ID NO: 386515 - DNA, 617 bp, Homo sapiens
ttccacacttgaacccagtattctcttcctttcgttctaccctgtactcacagcagacaactcaccaactccttgtgtgcgctgtgtatgtccaacctctgtgcccttgcttgtgggcaacttctttccatttacatggccagatccatctgcaaatgtcctaatcattcactccgttgaaatgatattttccctgattcccccttgccctccaaagaatctctcggcttctctatttttcatcatattaaatataattttattatagccctttcatattgtgtcttcttcattttacatctgatatgtggagagcagagtcacatgagctgtgtgagaasgttaggtccctgcaaattaacactaaatttttttattagatgtaactgggatgaaagactcacagtctgtccaagaactagtaacatttagactttttttttctatcttttaaaaaatattttccaagccaccaggagagagagtgagaaaccatgatttaagtaaaaagggcaagaggaataatactacttagcactagttctaattatgttaagcatagcttagctactagagtctcctttatatggtcactcaagtggacacaagcagagaaa

SEQ ID NO: 386516 - DNA, 630 bp, Homo sapiens
tttttttttggacaaaattagctgatgcaccaatgtcactgtacgtatttcagctatataatgcagtttagtttgctatccaagaaattatttcattcattcatttgtgcattcatttaaagagtattttgggtttctaccatgtcctaaaaaaccaagtcgaacggaggacagagcaataaacacaatagacatgatcattgtcttcattgtgttaaagggtgaactttcccagtctctgaatctgagatttctaaactttcctctgcagcactattttttaatattgaattactctttatacgtcccttgactattttcatatttcacattcttgtgcccagtgctttcttaaaatgatgatatgctctcatactttgtacttaaagtaatttttatcatatctagtttttactgttgtatatgctcaatttttcttctctcatccccaagaagcattttctggctataagaaagataaaatgtctrttcctcagcaggtactcaatacatattactttcaccaccccacctgtaatataaaatactgatctcttcactcctcatgtgctttacagaattcaatgaagaaccattaaagggcgttgggaacagagtttatagtcacat

SEQ ID NO: 386517 - DNA, 580 bp, Homo sapiens
aggcactggccagatagatctggaatgaccagatacagaagtcgtttgattaggggaacctcgcaaatggtrtttatcttgtggcaggtactcaagaagaaaaggagtacggacatgtaagagtggacagggccagtagctgcagctgagtactgagtccagctttcagtggcactgaaatgggccagcagaaagcacaggccacatcaggttccaaagcaaatgagggaaaacaaaacacatgaattggtacaaaccaataagttggtataagacccagggcctgaaggagcagtcaaagaaaagataagttctcccaatgtaggttgataggatatcctgtgttgcagagatagtggagaatggggaaggaggggcagtcaaatgtagcacccttcaaaaaatagattttgagcagtaggaccataagttatggctgaagctcaataaacacttcttccttttaaataaattatacaggctgctaagtgttatctgaggatagagagatgtgcctcactgcctttctcaaagctgggtaagggctcttgcatgagatgtgtgaggtgaccaccacttg

SEQ ID NO: 386518 - DNA, 580 bp, Homo sapiens
aggcactggccagatagatctggaatgaccagatacagaagtcgtttgattaggggaacctcgcaaatggtgtttatcttgtggcaggtactcaagaagaaaaggagtacggacatgtaagagtggacagggccagtagctgcagctgagtactgagtccagctttcagtggcactgaaatgggccagcagaaagcacaggccacatcaggttccaaagcaaatgagggaaaacaaaacacatgaattggtacaaaccartaagttggtataagacccagggcctgaaggagcagtcaaagaaaagataagttctcccaatgtaggttgataggatatcctgtgttgcagagatagtggagaatggggaaggaggggcagtcaaatgtagcacccttcaaaaaatagattttgagcagtaggaccataagttatggctgaagctcaataaacacttcttccttttaaataaattatacaggctgctaagtgttatctgaggatagagagatgtgcctcactgcctttctcaaagctgggtaagggctcttgcatgagatgtgtgaggtgaccaccacttg

SEQ ID NO: 386519 - DNA, 580 bp, Homo sapiens
aggcactggccagatagatctggaatgaccagatacagaagtcgtttgattaggggaacctcgcaaatggtgtttatcttgtggcaggtactcaagaagaaaaggagtacggacatgtaagagtggacagggccagtagctgcagctgagtactgagtccagctttcagtggcactgaaatgggccagcagaaagcacaggccacatcaggttccaaagcaaatgagggaaaacaaaacacatgaattggtacaaaccaataagttggtataagacccagggcctgaaggagcagtcaaagaaaagataagttctcccaatgtaggttgataggatatcctgtgttgcagagatagtggagaatggggaaggaggggcagtcaaatgtagcacccttcaaaaaatagattytgagcagtaggaccataagttatggctgaagctcaataaacacttcttccttttaaataaattatacaggctgctaagtgttatctgaggatagagagatgtgcctcactgcctttctcaaagctgggtaagggctcttgcatgagatgtgtgaggtgaccaccacttg

SEQ ID NO: 386520 - DNA, 604 bp, Homo sapiens
ttattttgatttataagcaattcattcaccatattattctccctgacccgcagtaagcaaataggcatcaagcycatggtttcctagttattaagaatgataatgtctcttacagattatccaatccagacctcttgttatatagacacagttagaaggcccagttactatcccaaggctacatagctaataaaatatacagccagaaggagaattttggtctagagctctttcctgtcctcacaattaaataatcaatttctttacatgtcaaagtcactacatcttacagttcagtgcttacataactttataccatgccttaaataatattcccaaaatacttatttgtattctttatatctgctttgattccagagtacagagagctcttggaggatgtgatagatcatattttccaaagatggtcacaatataatttgctactttacacactcttcttcattgtgattttgtccttacaccattagaagtttatttttccaaccactttgaatctgagtaggccatgtgattgctctattcaataatatacaactgaggttctgcatatggcccttaagtagcccagcaactcctgatc

SEQ ID NO: 386521 - DNA, 639 bp, Homo sapiens
ttctctataattaatgcccttggccttgcctagacagctaatgccactcaaaaattagaagaatcatctttggaaataattcttatcattatataaatggcacattatagtttctttatttttcatccaactcattttttacatgatacagacaaaagttagaggacatcttcagattcttaaggcaacttaatctcaatatttcaaagcaatacataaacatcaaatttgttgtttaagcgttcttcctcaaaggagtctcttaaattcaactaaacaaaaaacccaaagccaatgaatgaagtcaaggcaaaacctctgcatctaacaccatggagggagaaatgtataatcacagtatacttattaatacagtgataagcatggtcaataaatgtaagctttccctaaatcatattggtatgctatttatataaaataatgggggagctatctttttatcttcttttttaataatggaattccaattaacttttttgtccttgatttatacatctatatttttatgtyactctttaaaaccatatatacatgaaggctgcacattatgaaagttaatggtaatattcaaagaacagaatatagttttcgaaggcaacataaagaacaaacctaata

SEQ ID NO: 386522 - DNA, 559 bp, Homo sapiens
aaagttaatggtaatattcaaagaacagaatatagttttcgaaggcaacataaagaacaaacctaataagtacataccgtgagttttactgccacagcatcagactccattcttaatagctttcctgtaagatttccacaggtggcaatatggattatggaagagcagcatatttctaagactattatctcttttcaactctgtcattttaatgaaaatacagttaatgaaggtaatgtgattaaacattgggctttgtcaagtgaaatatagagggaagaaaagcaaatgggggaaagtaaataattctacagccattggccagggtccaagacctccttaaactctctttacagcagaaacacaagagacgacaatttttcctgcattayatttttacattcactatcaattttctgtgacagtcatgaggccactttatccaaaaagttgcaaaatattgacataagagtttcactggataatttcaggtcaaactaagttagtttatttgctttctcactagcttagtagtggagacatgttttaagtgatcaca

SEQ ID NO: 386523 - DNA, 601 bp, Homo sapiens
tattaaacaggtgatcatttaaaatattaacagtatgaatggttgtcagtgttattgagaaactgaagcagatgacagggatggtggcactacagttttgaattggtggcctgtaaaggccttaatgagacgacacttgtataaagaagataaagtgagtcatgtgaatatctaaggaaaagtgtggtagaaggaatgaacagcatgtgaaaaggccctgaagctggaaaatgcctggcacgtttgagaaagggaagaagagcagtgaggttagagcagaatgwggaagaaattagcaggacgtgaagagtgagccagatcatccagggccttgttggctattgtgaatgctttggctttgattctgactgagatgggaaaccattatagagttttgagcagaggtataatatgatctcttatatttttgctggatcatgttgtaggccatgttggaatagactgaatgaggaaaggacagaagtagaaaaatcagtggggaggccatcctgataatcctggagagagatgatggtggttgaacaaggtagtacaggtagaagaaggaagaagcgattagattcaagatgtatttgaagaa

SEQ ID NO: 386524 - DNA, 452 bp, Homo sapiens
tgacactgtgtttacaggatcagatcmtaaagtacagcttatactacattgggccagtttaatctagctctataactcctcatactcttctctttcttttagacccaagaatgtggcccttatgcccgtggaagcttttaattgcctcttttggaaactagttttgattcttcataatcacgtctgtttgaggacacagacgatcaatgtaaggacattcagaaccttctaactgtcaatacattttaattgttttatgttttctccaacatcaaaatcataaagcttctttaacaatgatttattcagcgtatactatatgtcaggcattgtgttaggaggtttagaaaacattatttcatttgattgctacggttttgtgaaatgaacacaattatcacctcttccatagatgagaaaagtaaatttaaatttaaatacaaagtaatgta

SEQ ID NO: 386525 - DNA, 540 bp, Homo sapiens
agctagcctaggtgggggcagggattcttcctcagagcctccaaagaaacacagctattccaacaccttgattttagctcctccataagacccattgcagactttgacctcctaagttgcaaggtaatatatttatkctgtttcaagccaagtctgtggtaattaggtacagcctcaatcagaaaccagtactccataaaaactactttttagggggttaactttattcctcttatgattcattttagcttcgatcttcctcatctttctcaccttcctcactgaacacctaagatcattcagaatcaaagataagcacaatatatttatggccttggtgtttaaagtggagctgaagattactgcaggtatctaaaataaatatttcatcttcaagtatattaaagtgtattttcaaaatatttgcaaccattattttaatgagagagaagcccttagaaaaactgaagtcctttcatacgatgaaaaactctttacgtcaaaaagtgcaagcatttaaaatgtttctgggtcaggcat

SEQ ID NO: 386526 - DNA, 596 bp, Homo sapiens
tcttttcttactgttgactttataactttacctcagctccctgggcctcagcctccttctctgyaagattatagaactgaactagcatacagccagggtccttctggctctaaaattttatccatctatcatccttaatcagagaataatttgatatatatttctatatgcttttttgttctaagctattgttttcattaagtattgtatctatttaatttactgttttaaaaccgctagtaaagcctccttttttaccaaagcgtttaaaaatattgtctctgggatttgtttctttttccattaaatttagataactttgttcattttcataaagttctagaaaatttcatgtatgtcttctgtgttcacgttttctatgaacatcttcattgcacttcagtaggtcagagtaataagaggttttctgtttatccagatttataaaatgagcgtattaaaaggccttgacttgtatttctctatcgtctcttctctactgtttcaagaatactagagaacacacataatgtgactcagcactgttttagcagtaatatatattactaaatggaggatacgttttttgtcctcat

SEQ ID NO: 386527 - DNA, 596 bp, Homo sapiens
tcttttcttactgttgactttataactttacctcagctccctgggcctcagcctccttctctgtaagattatagaactgaactagcatacagccagggtccttctggctctaaaattttatccatctatcatccttaatcagagaataatttgatatatatttctatatgcttttttgttctaagctattgttttcattaagtattgtatctatttaatttactgttttaaaaccgctagtaaagcctccttttttaccaaagcgtttaaaaatattgtctcygggatttgtttctttttccattaaatttagataactttgttcattttcataaagttctagaaaatttcatgtatgtcttctgtgttcacgttttctatgaacatcttcattgcacttcagtaggtcagagtaataagaggttttctgtttatccagatttataaaatgagcgtattaaaaggccttgacttgtatttctctatcgtctcttctctactgtttcaagaatactagagaacacacataatgtgactcagcactgttttagcagtaatatatattactaaatggaggatacgttttttgtcctcat

SEQ ID NO: 386528 - DNA, 590 bp, Homo sapiens
gactgacttcccatatcctgcagcagtctttctcaaagtgagttttgtgtagcacctcccatcaaaatcacctagaaagcttgttagcagatgctaaggaaccacaccagaaattcttaattagaattagtggtagcaggacctagactctgtattgttaacaagctccctatgtgattctttttcacactaaaatttgagagcttctggtctccagattaagtgcaaacacttcagaattgctgataagcaccatctgactggctctggcttatctccctccttccccgcttttttccactcccccaactacactctgctttccaatcacaccaaatttttgcagatgtccctaataccaagctttcttaagtgtcrgagactttgcatgtgtttcgtcttttacctggatgcccttactctatatcatctagcaagttgctgagttgtttatgtgaatatgtgtgttgcatactttgagtcctcagtaaactgaaaatttctcccaggacagtgctagctacatagtcatgggatatcaccattaaaaaaatactactcctagttcaggatgtgtgcaaaaccaaggg

SEQ ID NO: 386529 - DNA, 608 bp, Homo sapiens
ttattgccttgtcaaaccatttgcagtgctaaatctggcaattattattaaaggaaacaatttaaaaattcaagttttcatattattaccaagaaaaaaaatcactgtgtttagtgtcggtgccctaaagatacatttttggagtctctgcgtaaacttcacattaactatataatatttgcaatttaaatttcacagaattggaatttggatatgtgaaagcccgggaacacatatttgcaaatacacacttgcaaatgtcccaagayatgagtgaggcattgaaatgtatggcagtgttcacccattatttatttacttaatttttgtaagctccaccactatatgaggtgcctgtgtatattttgagagaaaatggcttttgtgatttgtttgcctattttatagtcagattttcagtgctgttaccatttgacctggaaaaaaaaatcaaaggtaaggggaaacagatgaaaaggcagagctttcaatgttttttgttgttgttgttgcttctcaaagcatgagaaatgttctatctccattcttcttcgcagacatcacattaaacacacaccatgtagtggagatgctggatgatattcaac

SEQ ID NO: 386530 - DNA, 583 bp, Homo sapiens
ctcacagggaatgagctccacttggtgtcccacacaccatcccagtgctgcagaaacaggaagaaacaaagcacatgggaggcaggagcagagctcctttccttttccagtgtccctccagcatcctctactaacaaagattaacctcatgcccactggcaaggaaggaatgttccaggatcacaagcaggcaatgaagrctggcttcggagatgaaaggcaataagttgataattggcacggctggcttgcctgtcaaatcctaactctttagtaagaaccttctgagatgctgacaacataagcatccaagaaggctctatgaaaagaaagcctaacatacaaaaatttaaccagagaatttatttcagatgttatgttgcgggtactgagagcaatagcaattttttgaactcgaagaaatagattacaagccactatggtatttagatacatttagatagtttttatttagaaaaaaagaatattagatgagaaaatgaggcaagggcggaggaattattttccctagaaaaattgcttgaaaaataaattggagaaaggaaaagagggaatatcatcg

SEQ ID NO: 386531 - DNA, 553 bp, Homo sapiens
acttttataggtgataaaggtaaaatgaatctttagtagtggaattacaggcatcaaaacctggggcagtggggtttacagagaagctcctcaagcccttaaaatcatatcaagtaggtagtcccttttcctacctaagcatgagatatgcactagttccattgctaagatcacatgcagaggtacttagagtcctataatctagcagtcttcacatgggatacatgtacttgggctgtatgccattctaaggtctttgtggcagcaatagttgtaaggaaatcaatttgctggtttccaacatccacgtgaacttttgtctggtaataggcctgtggctgagacacaatgctcgttctcctcttctgcctcctctttaataattgtccttcttctcctgcttttcaaaagaaagttttcccattcactcrtctggccctatggtataaaacgctccagcatgccaaaagaaggaataatgtttaatattgttatctgttaaaccacttgtaatcaaagcactataaattttaaggtcattctctttcttaag

SEQ ID NO: 386532 - DNA, 331 bp, Homo sapiens
agtctggttcagtaggacactgaattttctgttttcatctttcgtttcccacaccatccaacccatcatcatgttcggagtcctggatcttmaaaaatcacaaacctaaccacctttcaccaccccaccaccactacactggtctaagcccccaccatctcttgcttggattattacaagaagcttttggctgctctctctgcttctactattgccccagcactgccgccaactgtcctcccctgccaccccaaccaccactacagtctattcagcgcagagcactggaagaatctcatctcagtcaaagcacaaagtcttgacattaacc

SEQ ID NO: 386533 - DNA, 517 bp, Homo sapiens
ttaatccataattctttattgctgatggttattgcattagatgatgacccttagctattaagagtcagtttttaatatcacaaccatttagaaaggttaatggacttggttttgcgayttaacctttggatgctgcaggttgagaggttatatttgtgcactacactgccagaaaatatctacttattttcatttatctatgcactttgagtagtgtggttttgtacagtaactgttatttacaaagcaaagggaaagaaacagtgtgtccacataacaagtttctagagcagtgagattcttctaaaatatacatttcatatttggcttctattatttttcatttagacataagaattgaaatgtgaacagatgtaacctaaatcagttgaggaatatttattatggctgctttaaaaaaatagaccaagattataattcatagttttcttggcttgtttggaaagttcacatgcattgtaatgagacactggtcatttaggaaagacacaaatcc

SEQ ID NO: 386534 - DNA, 534 bp, Homo sapiens
tggtttaaacctgtcaaatgtattttctaggtctactcttttgaaataatagtctgttgaacgaatggcagaggagagaagacagcatgacaaaagagaaaaatctamcataaatctatttgtgttgctactattttattaattaagaacagaaattattatttgggatctagcaaaaaaagacaattaaatgcaaagtgtactagtcaataaattaacagccactctctcggtaggtccttatatctaaaatatgttataaatcggctggaagaacttggtgacattctaatgtgccacctggatacaaaccattcttgtctaaggctcccacttaactctatgcaaactattagatgatcgcggagtataaaaggtgccagggaaagacaaattagtttctgctttctgctaatggatgacctttgtgatttggatcaggtgctgaaattcacttagtcggaaaggcaggagagtgggggaaacttctaaaataattttctcttcctacagagaagacgcctggctaccacc

SEQ ID NO: 386535 - DNA, 534 bp, Homo sapiens
tggtttaaacctgtcaaatgtattttctaggtctactcttttgaaataatagtctgttgaacgaatggcagaggagagaagacagcatgacaaaagagaaaaatctaacataaatctatttgtgttgctactattttattaattaagaacagaaattattatttgggatctagcaaaaaaagacaattaaatgcaaagtgtactagtcaataaattaacagccactctctcggtaggtccttatatctaaaatatgttataaatcggctggaagaacttggtgacattctaatgtgccacctggatacaaaccattcttgtctaaggctcccacttaactctatgcaaactattagatgatcgcggagtataaaaggtgccagggaaagmcaaattagtttctgctttctgctaatggatgacctttgtgatttggatcaggtgctgaaattcacttagtcggaaaggcaggagagtgggggaaacttctaaaataattttctcttcctacagagaagacgcctggctaccacc

SEQ ID NO: 386536 - DNA, 534 bp, Homo sapiens
tggtttaaacctgtcaaatgtattttctaggtctactcttttgaaataatagtctgttgaacgaatggcagaggagagaagacagcatgacaaaagagaaaaatctaacataaatctatttgtgttgctactattttattaattaagaacagaaattattatttgggatctagcaaaaaaagacaattaaatgcaaagtgtactagtcaataaattaacagccactctctcggtaggtccttatatctaaaatatgttataaatcggctggaagaacttggtgacattctaatgtgccacctggatacaaaccattcttgtctaaggctcccacttaactctatgcaaactattagatgatcgcggagtataaaaggtgccagggaaagacaaattagtttctgctttctgctaatggatgacctttgtgatttggatcaggtgctgaaattcacttagtcggaaaggcaggagagtgggggaaacttctaaaataattttctctycctacagagaagacgcctggctaccacc

SEQ ID NO: 386537 - DNA, 593 bp, Homo sapiens
ggccacacattatatgtctaatcctgtatgtctcgacacttattctgcagaacagagaaaaaggctttgttgcttgaggcacagtataaaagctggtgtctccattgtatttgtacatattcacatttcctccaaactatgacaattgttgattgtccaagctaatacattaaaggaaataaaaggaaaaataaatctggtaaatttgtaacactccccaccccaccttttaaccaattcaattaattgtaagttccttcaattatatgcttaactccttgaggttgygaaatatgtcttacatatttttaatatccccagacacactaacatagcgattgggtcacagattagcatgaaataaagatttggttgaattacacagaattatattatccaatactttggaccatggcatagcagttattttagaccacacacttatatccagtgtaaagtgcaaaagatgcagctttcctgcagacttctctttgatagatgctctgcatcacagggtggtttaagtagtgtttgcttctgaggtgttcctgctaccttccacaaagccttttccaggcactgcaaaagtgtga

SEQ ID NO: 386538 - DNA, 593 bp, Homo sapiens
ggccacacattatatgtctaatcctgtatgtctcgacacttattctgcagaacagagaaaaaggctttgttgcttgaggcacagtataaaagctggtgtctccattgtatttgtacatattcacatttcctccaaactatgacaattgttgattgtccaagctaatacattaaaggaaataaaaggaaaaataaatctggtaaatttgtaacactccccaccccaccttttaaccaattcaattaattgtaagttccttcaattatatgcttaactccttgaggttgtgaaatatgtcttacatatttttaatatccccagacacactaacatagcgattgggtcacagrttagcatgaaataaagatttggttgaattacacagaattatattatccaatactttggaccatggcatagcagttattttagaccacacacttatatccagtgtaaagtgcaaaagatgcagctttcctgcagacttctctttgatagatgctctgcatcacagggtggtttaagtagtgtttgcttctgaggtgttcctgctaccttccacaaagccttttccaggcactgcaaaagtgtga

SEQ ID NO: 386539 - DNA, 565 bp, Homo sapiens
ctcaaagtctaatatattttgcattgttatgttgtgggttctgtaagccaaaatatatttttgatgtataactctagatctttactttacaataaaacttgccatggggaaaatttaaaggggcaccatttgttttytaaatatgcaacagtatctttcacgtaattgacaattgtttcaacggaatgctatcatttttagtttaaatccccatcttttaatttagccctaggccataccttttaaagaaaatgccatccatgaaatatcagatgattcaacagggccagacttgtgtacctccctagtagagctgtgtgaaaaatttcacacctacactgaaactgccaaaatatgcttcttcactcttttcagtaccaaggggaaaacatatactttttcccctttgggcagttttgacagttttaatacaagtgaaaagcaggttttgccagcaaaaaaaaaaaaaaaaaaaggaaagagaaagaaatcttgaattataatgtgacaacctcatagtcaagggagaggtggaagggagagtctcatccagggatgaccacat

SEQ ID NO: 386540 - DNA, 412 bp, Homo sapiens
aaatgtttcctctatgtcagacactgctccatgtactgaggatatagcactaaacaaaacagagacgttcatgaagattatgtacagtgcaatggmaaagtaatacttaattccagcaatatattggtgccattttccaacagcatgtactcacttcatgtttgagtcacattttgataattctcacaatatttcaaactttttgattattatcatatctgttatggtggtatgtgatcagtgatcattgatattactattgtaattgttttggggtgtacaaaacatgctcaaataaaacagcaaacttaataaatgttgtgtatgttctgactgctccactgactggccaatgtccccatctctctccctctccttaggcatccctatttgctaagacagaacagtatta

SEQ ID NO: 386541 - DNA, 595 bp, Homo sapiens
acatcaactgattcagaacctttgaagatggagccaagaactcctcatttttacaggctctctgggtaatttttgagcatacctttgaaaactactgatctaggccatgaagaattattttgattatctggggaactttgagccagatcctgccttgcttcttccacacatattaaacttgccatattctctttcagcaggaaagtcacttctattgcttacactttaagacaaaaaaaaaaaagttgccttcttccaaaatgacccatcctcaactttttgtccagcctgttgcaaatgatctgctcttgtacattgtatcctgctcatggacattttggggatgggcataatatcatcatttcattatgagtggataattatttctttcagttgccctatgcagcttatgaagtgccacataaacttcttttacagcctcattagagaagctggagagctggagaaaatrcatggctctgtatgtgagcagagcaagagcagggcatttctgagcactaattggttgaaccagccagtggtcccattgttcagtcagtggctacaatcacaggagtgcaggtgacataattgt

SEQ ID NO: 386542 - DNA, 500 bp, Homo sapiens
atactgaagaatgttccatttgctgatgagaagactgtttattctgtggctgttgggtaaaatgttctgtaaatgtatgttaggtctatttggttatagtgcagtttaaatctgatgtctcttgcttgattgtctatctagatgatctgcccaatgctgggaatggtatgttgaagtctccaagtattactgtattgaagtctatctctcccaaacaacatttgctttatataactggatgctcttgtgctgggtgcatatatatttacatttgtgatattatcttgctgaattggttttattgtataagcccttctttgtctctttttacatagttttaacttgaagtctgttttgtctgatayctttctagctgatactgttcacttttggtttctgtttgcataaaatatcttttttcatcccttcactttcagtatatgtgtatctttacttgaagtgagttcttgtagacagcatatagttgggtcttgttttgt

SEQ ID NO: 386543 - DNA, 556 bp, Homo sapiens
tatttctctttcatttgctgggtaaaataytcttggctgccagtagtttttctttcagtacttcaaatacattaaactgtttacttctggtctatgaggtttctgctgataaatcctctattagtctaatggggattcccttatatatgatttgatgttttctcttgctgcttttagaattctttgtcatttacttttgacaatttgactatagtttaccttgagaggacttgtttgggttgaatctatttggaattcttttaaattcctggacttggatgttcatctctctcccaaaatttgtgaagttttcagctgttatttcattaaatatgttttgtacaccttttctcttctccttctagacactcataatatgaatattcattcttttaatggtgtcccataaatcctgagggttttcttcattcttattctttctttttcttttcttttatatttattatttatttattgtctgcctgtgttatttcaaaagacttatcttcaagttctcaaattctttcttctgcttggtctagtctgttgtgaaaac

SEQ ID NO: 386544 - DNA, 548 bp, Homo sapiens
gtgcccatcacatagtgtgataagtattgtggtaagtccaaattccttgcggggggtggggaatgagaaaggatgaacagcaaattctcagactcagtgatttgagaaagacttcctgaagcaaatggcataagttggagcttaaaatctgtgtagaatttagcagggtcagaagaaaaatgtcgctttaaaataggttaaatgccaaggccatagtggtggaacactgggctgctgaactgggttgtgttgctttacaggaaaggatcatgaaagaaatattcaagaattttaagatccagttgttaagactgttgataacttgaaaccaaccatgctgggagaatttacaccacggacattggcgaatactataaatcagggctgtttygtttattttcagagagccagtgaaccaggacatcactggctgtaaaagtgcatgagaggttcagagaattacaagtggcttaatgttctactctagttagcaaattatataccaaagttaaccctttgactagattgttagccttctaaaggaaaga

SEQ ID NO: 386545 - DNA, 607 bp, Homo sapiens
gctgtttcgtttattttcagagagccagtgaaccaggacatcactggctgtaaaagtgcatgagaggttcagagaattacaagtggcttaatgttctactctagttagcaaattatataccaaagttaaccctttgactagattgttagccttctaaaggaaagactgattccttatccattctgaatttctctggctacacctccaacaaaagcaggtaggtacttaacttaggccatcaattaatatagattagagaagaatcacttcagacataaaaatatgcttcttaaaattttggttaaatgtatttgcatttcaatgcttgtgtttactttatctctcataatgaaaataaacatatcttgaaatagtgtagtttagaaacagttatctactcagaagggggctaagggattattttaaagtggtatttatacaataggtttagtttttacttagaactatttatcatatttttctaataatttttcttttatttytacattttagctaagattgagaaaagatcagttgccaaaattaagaaacggtatgccattaagaaggaggctttagaaaagataatttcaaggagaatcaaaag

SEQ ID NO: 386546 - DNA, 513 bp, Homo sapiens
cttttttttttcaggttttttttcttgtcctttgactttatgagtctcaatatatataaaagattttatttagtgaaaatgtctgtttttaaagtttctggattttatgtcttgccaataagggcttcccatctccacagttaaatgtataaacattctcctaatttttttgaacacgttattggattttttacatttaaatttcttaactacgtgaagtgtatttttatatacaatgcaaagtgagcatctttctttgcttttttctctgctagaatagccaattatgtcagtgccattcattaaagaaaccacactttttacacctttgttatatactgtattgattccgataggtagctggtttatttctgaactttcccttcccttttacctctatttttgtgccaatattattgtttgtatgtatgtatgtatgtatgtatttgttgrgacagagtcttactgtgtcacccaggctggagtgcaattgtgcaatcttggctcactatg

SEQ ID NO: 386547 - DNA, 432 bp, Homo sapiens
aactggcacatatacagctttacacttwgccaatggaagggttttacagggaagtcacatggccaggtgtgtgcccgcagactgccactttaaggctcctccccattcacaggtgaataggctgaactgaaaacaaagcccaaaatagcagcctcaatttccaccagtagagaattcacacaactaatccacatctctgccttcctctgtttgttccgtaatcaaaccgaacacctatttcctcctctggtttcatgttcatttgggccttgacacgttgttttacctgatcctctgtgtcataatccatctttcttccaagaagagcttgtgtcttctttctgggcccagcattgtttgtattgtctgcaaggccatttgaccacactgacaaggcctggtgagctttattctgggcaatcaagaatgtgc

SEQ ID NO: 386548 - DNA, 552 bp, Homo sapiens
ctttttctgtttgtctgctttggtctcttttatgaaaatctttaataaagagactttcttcagatgactagtaatcttcaagcatttctcacatttaagagttaagaactagagaaaatgattggaagctatgagcatgagggtggggtttacctcctctgagcatcaccgcacatgcttttaaacttcctattttctagcacctctgtcctcaactatgtctggtgtctcccagcctagaaacactgttttactctattcaaagaatatcccaactggctttgaggaagggtagtcaccagattacctcatgactgagaagatcacatggttaatagcatttttttaagtagagaatgtggtccatttagatttaatgtggtttttacttttacttttagttttttttttttyaagtaattggggcagatttagcccccaaacatttagtctcatcactctcatctcatcttgtcttgcctatgttccttttcctcttttttcttgcttttcggatttttgttgtttcatttcatcccaacattaccttac

SEQ ID NO: 386549 - DNA, 606 bp, Homo sapiens
ccgaacagaggcttgaggttttctaaatcacccattgctgctgcaaactatacccccaatccaaggtacagcactttagggkttcagtccagagtgggaggtagtgccagactcggacatggtgccgatcttgtccactttccatgaaaagcacagctgtacctcttagccactttcttcctggtctatatttccactgtaaaactggcttcaaaagcttgttctgtgcatttgttccctccctaaccttggtccagaattctccaatattccattagagtcaatatcttatccctttgacccttttaaagtcttaaaaaaaattttcatccggttgttatagttgctcaactaggtcattcaaatattaacagttttttttttaagttgctttataaacagactttcagccaatcctcctgcttttaggctcatttctgcctcaaatgccaggtcattttattttatttttttgagacagtctcactttgttgcccaggctggagtgcactggcatgatgatggctcactgcagcctggacctcccaggctcatgcgatccttccatctcagcctcctgactagctgggaataggggtgtgcacc

SEQ ID NO: 386550 - DNA, 471 bp, Homo sapiens
cctccccttctgcgagcctcccggagccgccgtcagctcaggctcacactggcgcgggcggccccacacgcagaggcggcccgaagagcggccgagwgaggggagggcgcgaggagccggccagccgcggggcccggaaggcgtggcccacggtggagacggacgggctcgcgggccaattggaggcaggaaccggccggaggggcgggctccgtctggaggcttagctgccggcgctggggttcctgtcctccgcgccttcctcaacccagctcctggaggttacggttctgaggcggggcgggcggcctcgtggacgcgatgctgaggatgtgagaagtgcagtgcggaggaggaggtggagctccgccgctccatgaaggaagccggggctggccgaccgcgcccccagcactcctggcccgggggtcccagtctccgaacccgcggaggccagggaagctgggagtt

SEQ ID NO: 386551 - DNA, 471 bp, Homo sapiens
cctccccttctgcgagcctcccggagccgccgtcagctcaggctcacactggcgcgggcggccccacacgcagaggcggcccgaagagcggccgagagaggggasggcgcgaggagccggccagccgcggggcccggaaggcgtggcccacggtggagacggacgggctcgcgggccaattggaggcaggaaccggccggaggggcgggctccgtctggaggcttagctgccggcgctggggttcctgtcctccgcgccttcctcaacccagctcctggaggttacggttctgaggcggggcgggcggcctcgtggacgcgatgctgaggatgtgagaagtgcagtgcggaggaggaggtggagctccgccgctccatgaaggaagccggggctggccgaccgcgcccccagcactcctggcccgggggtcccagtctccgaacccgcggaggccagggaagctgggagtt

SEQ ID NO: 386552 - DNA, 471 bp, Homo sapiens
cctccccttctgcgagcctcccggagccgccgtcagctcaggctcacactggcgcgggcggccccacacgcagaggcggcccgaagagcggccgagagaggggaggrcgcgaggagccggccagccgcggggcccggaaggcgtggcccacggtggagacggacgggctcgcgggccaattggaggcaggaaccggccggaggggcgggctccgtctggaggcttagctgccggcgctggggttcctgtcctccgcgccttcctcaacccagctcctggaggttacggttctgaggcggggcgggcggcctcgtggacgcgatgctgaggatgtgagaagtgcagtgcggaggaggaggtggagctccgccgctccatgaaggaagccggggctggccgaccgcgcccccagcactcctggcccgggggtcccagtctccgaacccgcggaggccagggaagctgggagtt

SEQ ID NO: 386553 - DNA, 528 bp, Homo sapiens
tacagggctctttctctactctataggtttaagcagtgcttgatttcacataatcaaatgatcaacaatttctgactataatttgaaagaaaaatagtgatgaagcctgccatgttagcagtttgttggctctaaaacttgcctactacttttttactaatttgtaatcaaaggcactattttcccgcttcattctatgttaattacctctgtagacaargttcatttactgattctaggagaccactattatattacatgtagattacctctaagcagagagcaagagagaaaagagaaagcagctttctcttatctgtataaattatagtattagatgtgttaagtatcactttgaaatgacttaaatttgaataacacattacaaagcatttcaacaagcaccatttagtccttatagcaaaagtttaaggcaaaaagagcaattattaacctcattctaccaataaaaaaaaagaggctctgaaaagttaaatgaccacctgatccaggtcactcaaatacaat

SEQ ID NO: 386554 - DNA, 618 bp, Homo sapiens
atatccaggctatataagtaaattaacagcaaaaaactcaaataagttgattaaaaatgagcaaataccttaatatacatttctcagaagaagatatataaatgactaactagtatatgaraaaatgctcaacatcactgatcatcatgaaaatgcaagtcaaaaccacaatgagacacagctcactccagttaaaatggctgcagtaaaaacaaagtaaacaagtgttggcaaggatatagagaaaagagaacacttacacactgttggtggaattgtaaattagtacagccattgtggaaaacagtatggaggttcctcaaaaaattaaaaatagaactactatatgatccagaaatcccactactggatatatatcccctgaaaattgaatcagtattttgaagagatgtctgcactgccgtgtttatttcggcactgtttataatagccaagacacagagttaacctacatgtccaacattggatgaacgaataaagaaaataaggtgtatatatatgcaatggaataccatttatcctttaaaaatgaatttctggcatttgtgataatatggatgaaccaggagaacattatgtttagtgaaataagacata

SEQ ID NO: 386555 - DNA, 618 bp, Homo sapiens
atatccaggctatataagtaaattaacagcaaaaaactcaaataagttgattaaaaatgagcaaataccttaatatacatttctcagaagaagatatataaatgactaactagtatatgaaaaaatgctcaacatcactgatcatcatgaaaatgcaagtcaaaaccacaatgagacacagctyactccagttaaaatggctgcagtaaaaacaaagtaaacaagtgttggcaaggatatagagaaaagagaacacttacacactgttggtggaattgtaaattagtacagccattgtggaaaacagtatggaggttcctcaaaaaattaaaaatagaactactatatgatccagaaatcccactactggatatatatcccctgaaaattgaatcagtattttgaagagatgtctgcactgccgtgtttatttcggcactgtttataatagccaagacacagagttaacctacatgtccaacattggatgaacgaataaagaaaataaggtgtatatatatgcaatggaataccatttatcctttaaaaatgaatttctggcatttgtgataatatggatgaaccaggagaacattatgtttagtgaaataagacata

SEQ ID NO: 386556 - DNA, 618 bp, Homo sapiens
atatccaggctatataagtaaattaacagcaaaaaactcaaataagttgattaaaaatgagcaaataccttaatatacatttctcagaagaagatatataaatgactaactagtatatgaaaaaatgctcaacatcactgatcatcatgaaaatgcaagtcaaaaccacaatgagacacagctcactccagttaaaatggctgcagtaaaaacaaagtaaacaagtgttggcaaggatatagagaaaagagaacacttacacactgttggtggaattgtaaattagtacagccattgtggaaaacagtatggaggttcctcaaaaaattaaaaatagaactactatatgatccagmaatcccactactggatatatatcccctgaaaattgaatcagtattttgaagagatgtctgcactgccgtgtttatttcggcactgtttataatagccaagacacagagttaacctacatgtccaacattggatgaacgaataaagaaaataaggtgtatatatatgcaatggaataccatttatcctttaaaaatgaatttctggcatttgtgataatatggatgaaccaggagaacattatgtttagtgaaataagacata

SEQ ID NO: 386557 - DNA, 533 bp, Homo sapiens
catccccaagatatctcattatatatattcaaatattccaaaatttgaaaaaaatcaaaatctaagacagttctcgttccaataattttggatatgggatagttagcctgtgcttggggcagaagaatctgaggggaatttgggtacaaagcccaataagatttaaaaattggygtattatgatgttattaaccaaaataaataagctagaagaaactgatatgctgtggaaaagtaaagtgggtctgtgtgtcacaaatatcttttatattaaagatataaattagcctttgtgataacattatccaattgtgtcacttgggacactggctaattaaataaaaaatcaaattacatttttagttgggtcaagaaatccatttttgaaagggaaagtcgagtttttaaaattatcttagaaaatagatgaataggggtaggagagagagagaaatgacactctcaaggaacaatagagattccatactatttctcataaatcatttttcttttaactatattattttacttat

SEQ ID NO: 386558 - DNA, 533 bp, Homo sapiens
catccccaagatatctcattatatatattcaaatattccaaaatttgaaaaaaatcaaaatctaagacagttctcgttccaataattttggatatgggatagttagcctgtgcttggggcagaagaatctgaggggaatttgggtacaaagcccaataagatttaaaaattggtgtattatgatgttattaaccaaaataaataagctagaagaaactgatatgctgtggaaaagtaaagtgggtctgtgtgtcacaaatatcttttatattaaagatataaattagcctttgtgataacattatccaattgtgtcacttgggacastggctaattaaataaaaaatcaaattacatttttagttgggtcaagaaatccatttttgaaagggaaagtcgagtttttaaaattatcttagaaaatagatgaataggggtaggagagagagagaaatgacactctcaaggaacaatagagattccatactatttctcataaatcatttttcttttaactatattattttacttat

SEQ ID NO: 386559 - DNA, 525 bp, Homo sapiens
aaatatctgacagaaacttctggttttgggcttggaaaacaaacagagctcaccttaccagccaatcagggctcagctgtatcaaccaatcagggatcagttgcattgaccaatcagaacttagccgcactcgccaatcagaaatgagcttccatccttaatctgcataaacaaacctggttgggaacytgggcttggtggggtgatattgtgctataaaatgagaaccctctctttgttctctgcaacactctttcatttaacccaaggtggtggtgtgtcctgggttttaagactggactgttcactggaataaattatatttgctctaaaactcctttcagagacgttttgttcacaccctcaattctagtgagtccattttcaggcttcctcggtttgcataacattccaatcatcagtttttactttgcctttcttttttttttttttttttttttgcattagttgtatattgtcactgtctctccagttcacatttgccagacaattaaaacattgttt

SEQ ID NO: 386560 - DNA, 550 bp, Homo sapiens
tggcctcccaaagtgctggtattacaagtgtaaaccaccatgcctggtctacaatatctttcttagtacaaagagtatgtgattgctccttcacycagccatgtccacttggttctgttttaacactgagcacttcaatttgccatgggagttcattttgtctgtaggccggggagataactttaacaatctgaatacatgttctcatttaacgtttgtctgcctactaatttttttttttttttttgagacggagtcacgccctctgtctcccaggctggagtgcaggagcacgatctcggctcactgcagcctctgcctcacgggttcaagcaattctcctgcctcagcctcccaagtactgactactatattttacatttagtagtgtgtgactccaagaagtccaacagaaaacaatagttttgaggcagaaggtgataaatgttattgcctagtgcatggcgtaaaggtttagtgttcaagtcctgccaagttagacactttgtggtctctgttaaaatatcagatagaccatatcttaggaata

SEQ ID NO: 386561 - DNA, 573 bp, Homo sapiens
ctcatagtcaaactgttgaaaatttgtttataataactacaaaatattaatagtagccaggaaaaaaaagagattatctaggaaccaatcataaaaatgatgtctgatttttcattttaaaaaaaggaaatgaaggaacaaaaatcatcaggctagaatttgatatctcacaaaaatattctttaacaataaagcaaaaataaaaatattttcaagcactagctgatggaaatagtgttcagcagatactgccatagacattctccaggctgaagggtaatgatgccacaaggaaatacagattttaaaaagcgyataccaagagcactgtcattgacaaatatgtggaaagtataaaaatgtttttgtcttgagttccccaaaattcaattgactagtgaaagcaaaaatgctaacagtgtattaagatagaactcagataagtgataatgatacacgaagaatgggagaggctgagtaaaattactcttttgcccttataatggtgaggtaataatattaatatgaaatataacatgatacattaaagatcaatatatattcatatttcta

SEQ ID NO: 386562 - DNA, 613 bp, Homo sapiens
aacccttccttacaccatatataaaaactaactaacttacaccatatacaaaaactactcaaactaacagtagaaaaacatacaaccccataaacaagtgggtaaagggcatgaacagacacttttcaaaaaaagacatacatgctactgayaatcatatgaaaaaagcttgacatcactgatcattagagaaatgcaaatcaaaaccacaatgagatatcatctcatgccagtcagaatggtgactatttaaaataataacaacagatgctaatgaggttgtggagaaaatggaacacatatatcctgttgttgagagtgtaaatcagttcagccattgtggaagacagtgtggtgattcctcaaacacatgaagacagacataccatttgaccaagaaatctcattactgggtaaacccagagaagtataactttttctattataaagacacacacaggcatatacactgcagcactattcacaatagcaaagacatggaatcaacccagtatggtttggctgtgtctctatccaaatctcatcttaaattataactcccacaattctcatatgtcatgggaaaaacctggtgggaggtaattgaaacatg

SEQ ID NO: 386563 - DNA, 613 bp, Homo sapiens
aacccttccttacaccatatataaaaactaactaacttacaccatatacaaaaactactcaaactaacagtagaaaaacatacaaccccataaacaagtgggtaaagggcatgaacagacacttttcaaaaaaagacatacatgctactgacratcatatgaaaaaagcttgacatcactgatcattagagaaatgcaaatcaaaaccacaatgagatatcatctcatgccagtcagaatggtgactatttaaaataataacaacagatgctaatgaggttgtggagaaaatggaacacatatatcctgttgttgagagtgtaaatcagttcagccattgtggaagacagtgtggtgattcctcaaacacatgaagacagacataccatttgaccaagaaatctcattactgggtaaacccagagaagtataactttttctattataaagacacacacaggcatatacactgcagcactattcacaatagcaaagacatggaatcaacccagtatggtttggctgtgtctctatccaaatctcatcttaaattataactcccacaattctcatatgtcatgggaaaaacctggtgggaggtaattgaaacatg

SEQ ID NO: 386564 - DNA, 606 bp, Homo sapiens
caaaagtttcctggggttcgaggaaaaaaagtgtttcatcattaaacttggtatgcttaactaaaattacactgagaaagaaagttgtggaggcagaaaagagagagagagaggaagagagagagagagaaggataagctgaggaaataaagaaataaagcaaatgtaagagttttgtttaagaagtaattgtgggttgtctattggcatatacagctaactagaatcaaatataaaagaatcaaatatatattgagggagtctaaactggtgtcaaaagaaacattagcctgaatgtaaagaaacttggagtattctatatctactggccggatgaggtttaaataatgctactcacctgccaaagaaagtacattctccaatgcatattttcaatgtggccaaggaaaaatcttcaagagggaggagctcgaatcacaggaaacaatagatactcatcccaggaagcagatsaaacaataatctagaaacgttctctactctcagaggagaagaacctcattaggtttcagaatttgtctgtatttttttttctgcctcctattgcttgtcttagatctttctactttcccaataaggccatgt

SEQ ID NO: 386565 - DNA, 561 bp, Homo sapiens
aacgttctctactctcagaggagaagaacctcattaggtttcagaatttgtctgtatttttttttctgcctcctattgcttgtcttagatctttctactttcccaataaggccatgtttttgcagttatactattcctattttacacttaatattgaataagtgagatagataacttgtattgttaatgaataggtctctgattcatgggaatccttgtccagatctggtatagagactacacctgtcactccaccatgaagaggccgtaggacatcaaccaggaatgctggatattgagcttgatgctatgtttaaatataaaggaagattgtggtgattgctggggctgttcagaaacgaatgacagaagaaaagattgtacatccctaccccctttgaaagagagttcggccgtctgactcgatttgattagcataatgtgaatagaagtgatatataacatgtccaggtggtatctttaacrgccagtatacaattcacaattttccctttctctgctttggtgactatgaatcatgtattaagattgaacacctgt

SEQ ID NO: 386566 - DNA, 474 bp, Homo sapiens
aaacttcacactcagatcatgataatgttgccattttctaaatatatgtcctatgaaatggcataaatctcaactatgcttgcacagagcactgataacttcatttttccccactgcctattacctttcctcgtgtcttagaccacattcttctctaatccataaatattcacaagccttatcttcagggaagtggatttaagaactgttcygcctccttgcttggctgccttgtgaataaatgttttttcttttgcaaaatcagtcatcacagtgattggttcagtgtgcatgggcaaaatgaacctggttagtgtattagctgtagtttggggggttttggtacaatactctttagcagactgaggaagttttcttctctttgtagttttatgtttctaaaaaatcctaaatagttattaaatattatttagtactttttctgaataaactgtgatgaccatttggattttc

SEQ ID NO: 386567 - DNA, 581 bp, Homo sapiens
gttccatttatgttgctgcaaagacatgatctcatttttttatggctgcataatatgtcatggtgtatatataccacattttctttctccagtcaaacattcatgggaatttaggttgactccatatctttgctgttgtgaatagtgctgccatgaatttaggcrtgcatgtgttttttggtggaacaatttacattcctttgggtagacacccagtaatgagatttctgggtcgaatggtaatttaagttatttgagaaactgccaaactgctttccacaatggaaatttacattccaagcggcagtgtataagcggtcccttttttccacaaccttgccagtatatgttgtttttaactttttaataattgccattctgactgatgtgaggtggtatctcattgtggttttcatttacatttctctaataaatagtgatcccatactaattccttttccttgcattcatttgttcactttgtggaaagtagaatctgaaaggacaatattctctctgattattaatcagtatataatacagtatctcaatgatgaggaggaatatggcacaatatgttt

SEQ ID NO: 386568 - DNA, 581 bp, Homo sapiens
gttccatttatgttgctgcaaagacatgatctcatttttttatggctgcataatatgtcatggtgtatatataccacattttctttctccagtcaaacattcatgggaatttaggttgactccatatctttgctgttgtgaatagtgctgccatgaatttaggcatgcatgtgttttttggtggaacaatttacattcctttgggtagacacccagtaatgagatttctgggtcgaatggtaatttaagttatttgagaaactgccaaactgctttccacaatrgaaatttacattccaagcggcagtgtataagcggtcccttttttccacaaccttgccagtatatgttgtttttaactttttaataattgccattctgactgatgtgaggtggtatctcattgtggttttcatttacatttctctaataaatagtgatcccatactaattccttttccttgcattcatttgttcactttgtggaaagtagaatctgaaaggacaatattctctctgattattaatcagtatataatacagtatctcaatgatgaggaggaatatggcacaatatgttt

SEQ ID NO: 386569 - DNA, 581 bp, Homo sapiens
gttccatttatgttgctgcaaagacatgatctcatttttttatggctgcataatatgtcatggtgtatatataccacattttctttctccagtcaaacattcatgggaatttaggttgactccatatctttgctgttgtgaatagtgctgccatgaatttaggcatgcatgtgttttttggtggaacaatttacattcctttgggtagacacccagtaatgagatttctgggtcgaatggtaatttaagttatttgagaaactgccaaactgctttccacaatggaaatttacattccaagcggcagtgtataagcrgtcccttttttccacaaccttgccagtatatgttgtttttaactttttaataattgccattctgactgatgtgaggtggtatctcattgtggttttcatttacatttctctaataaatagtgatcccatactaattccttttccttgcattcatttgttcactttgtggaaagtagaatctgaaaggacaatattctctctgattattaatcagtatataatacagtatctcaatgatgaggaggaatatggcacaatatgttt

SEQ ID NO: 386570 - DNA, 609 bp, Homo sapiens
gccctaataagaacaggtagggataccagggctgtacctgcacagaggaagtattatgtgacaggcagtgaaaaggcaaaaagagagacttcaggagaaaccaaacttcccaacaccttatattggcctgatagtctccataactgccagaaaaaataaatttctcttgtgacattttgttatggaagtcccagcaaactaatagagagacttgaggacacagctgctggaagccctacctgaacacgggtgttatagtctgaatgtttacgtccccttcaaaattaacgttaaaacttaatcccaaatacaacaatattacgaggtggggtctttaggagttgattaggccatgtrcattgatgagattagtaccttacaaaaggacttgatataagcccttataaaaaggcttgagagtgtgaatttgccccttccatctcttctgctgtgtaaatgtgcagtgtacttgccctctggaggacgcagcagcaagccatcatgatgaaagcagaaaacacaccatctccacacactaaatttaatttctgttctttataaaacatcctttcttatgtatcttgttgtagcagcaaagccagactaaga

SEQ ID NO: 386571 - DNA, 502 bp, Homo sapiens
tgtagtgagagcaaaatcagccaactagtaagagctatagttgtgatacaagcccagctttgtctgactaggcaatgcatgatttgaagaatgaatctgagtagtaatagcactatggtgaagtgataatcttatgggatcaacctagtgaagagggaaaaaaagtacaaaagctctattgcatatccaaagtctgtcctaaatctatgttattatttactatcaaaattgtcttcagaaattattctgtaaaatttacttagaattttaagttgtgatttaccattcaccttcataattacctagtattaggactaaaaacctgatatgggtatgaattcagacacttakatattattatatttataatattttatacactgatgttctgtttattaaagtataacttaaataacatggatgagcaataccttgttttgatactagtacctattattttttcacaaattttgaattattttacatatggctactcattcat

SEQ ID NO: 386572 - DNA, 581 bp, Homo sapiens
cacgtatgtaaaaaattggcactcttatgtgagagcttctcatcctgcaaatactatatctttgatccatgtttgcttgaaaaataattcatgtataagtggatccacacagttaagacccatgttgttttatataaatctataaaacaaccagtcctaagatctgcagttggcaagctgaagaagcaaaagagttgatgctttggtaatatatattattatatatgtataatatattatattaattatatatataatatgtaatcacatatatgattatatamctattacattattatatatacagatacatataatcatatatattaccaatcctcatatgtgcatgagtgcgtgtgtgtgtgtgtgtgtgtgtgtgtgtgtgtgtgtgttctgtttctctagagaacgctgactaatatagtttttctggcttccttcagtattccaattactaatggtgctttaggctataatatgagtagaagggcacagcactagtttgtgcaacagctctagcaattgaaagatataaaggcaatggtaaccataagacttgtgtcacttgtctcattaactgc

SEQ ID NO: 386573 - DNA, 580 bp, Homo sapiens
gcctttcactggtaaatattttagcattgcagttgtcttcagtaattcaggataccttccatggtagaggacaagatggtaaattattgcattttgtaccagctgacatataaaagcatcacagtgtttgttacggttctctggattttgggcattataaaaacaccacacttgggaatgctgcatcagtccatttgtcccattttttaatggctttcagcacaagcaaaggcttttgttcttgtgaacctgcagaattaaaagagctcatcataaatgaggaggttaaatagaatctctggcaagccccataagaaagttttaagtgacatctaaatatatatatatatgtaataaaaaaataaaatggamtagaaaagggtaaaagtgcctcaaagtttcttactctgtataaaaataaatactattaatagttttatacagcctttaattataataagtagtattataaaaattgtgaataatacatatacatattcttccttccccataagatactttatcttatatataaaatacacctattttcattttcctatttgtgtctagagaacaattt

SEQ ID NO: 386574 - DNA, 540 bp, Homo sapiens
ataatgaaatagattatagtaaatgacacatagcaaatatggataagaaaaataattatactgttacttataccataatcagaattaaatatgggtttcttctttgatgatataaagaacccaggggtgtgaggcttttctaatttctagtggaaacaccagcttgtctttgccactgacacaacttaagacacrtttggcaaaaaaacataaacatattatgtctcttgtgtgtaattgccaccatttcctcgctggccaaataccactaattgtgcctctcaagtgtattattttggcattagctcattaaatttttatttaagtttacaaattagagccaaaaattcacaactttcagtttttaagagacaagactccaaactctgcctcgtaaaactctaagatttctgagagaacaactggtcttctcaggtgatagtttataagggcctgacatggcatctaacaaatgacgggcagttcttgaaagacttgacttttttcaggaattatcgcagaaccaaccacacatttatt

SEQ ID NO: 386575 - DNA, 594 bp, Homo sapiens
taacatattaacatattgggtaacaagagttgaaaactcatactatgtatagtaaatttagaagactatataaaactttacatgaatatgtcagggcttgttatttagacaagccagttatggaatcttaaraatgataaaatttttacaattttgcagtgagatcttgaaaccaattttctacaaaataaacaaataactatgagtgtgcatcaacctaaaatagggatgtctacattgatgagtaatttagctaacagatatagatagatagatagatagatagatagatagatagatagatacagatatgttcacctttattcttactcttctttcaaatggtagctattttttatttggattaaaagattgactatattacatgtttacttcaataattatctataaacttaccacggagccatgcttaaaaaaaaaaaacaaatttaggctaggaacagtggctcatgcctttaatcccagcatttttggagcctgaggtgggaggatatattgagcccaggagttcaataccagcctgggtaacataccaagaccctgtctctacaaaattaaaaaaaaaaaaaaatt

SEQ ID NO: 386576 - DNA, 594 bp, Homo sapiens
taacatattaacatattgggtaacaagagttgaaaactcatactatgtatagtaaatttagaagactatataaaactttacatgaatatgtcagggcttgttatttagacaagccagttatggaatcttaagaatgataaaatttttacaattttgcagtgagatcttgaaaccaattttctacaaaataaacaaataactatgagtgtgcatcaacctaaaatagggatgtctacattgatgagtaatttagctaacagatatagatagatagatagatagatagatagatagatagatagatayagatatgttcacctttattcttactcttctttcaaatggtagctattttttatttggattaaaagattgactatattacatgtttacttcaataattatctataaacttaccacggagccatgcttaaaaaaaaaaaacaaatttaggctaggaacagtggctcatgcctttaatcccagcatttttggagcctgaggtgggaggatatattgagcccaggagttcaataccagcctgggtaacataccaagaccctgtctctacaaaattaaaaaaaaaaaaaaatt

SEQ ID NO: 386577 - DNA, 605 bp, Homo sapiens
attcaatatattctattcaaaagatgtttgtcaaaacaataacttagaaacaactaaattcttatttataaattatataatcttctcatgaaatagtggcataatattatatttattaatttttttattgaacaaacagatcgggtactctcctaagcttagggatgagactggatacaacagggaatgaacaaatatctgctctcatggacttgactttcaaaagagaaagacaaatatataaacaaaaaactcacctaatatgagacaattaaaactactgtaacaaatttggaatatrcattctaaatttgtgatatataagtcactgtgaaacaatactatatgctcctgcactaatattaagttaaaaagtaaaacaatctagaatgtctgaggttacaattattgaatatactatatcatattgaattttgagtgagtcaaatgttttaatgtttgttaacattactttcaataaattcctcaaattcacaattgaaaattgaaaacacttagaaatcgatataaatgttgagattataaatagtatggtaagttaatgaacatcttatttaattgttattgtgggtgttgtgacatca

SEQ ID NO: 386578 - DNA, 605 bp, Homo sapiens
attcaatatattctattcaaaagatgtttgtcaaaacaataacttagaaacaactaaattcttatttataaattatataatcttctcatgaaatagtggcataatattatatttattaatttttttattgaacaaacagatcgggtactctcctaagcttagggatgagactggatacaacagggaatgaacaaatatctgctctcatggacttgactttcaaaagagaaagacaaatatataaacaaaaaactcacctaatatgagacaattaaaactactgtaacaaatttggaatatacattctaaatttgtgatatataagtcactgtgaaacaatactatatgctcctgcactaatattaagttaaaaagtaaaacaatctagaatgtctgaggttacaattattgaatatactatatcatattgaattttgagtgagtcaratgttttaatgtttgttaacattactttcaataaattcctcaaattcacaattgaaaattgaaaacacttagaaatcgatataaatgttgagattataaatagtatggtaagttaatgaacatcttatttaattgttattgtgggtgttgtgacatca

SEQ ID NO: 386579 - DNA, 565 bp, Homo sapiens
ttctgttgcaataccaattgtattaacagatgtttaaagatgaatgttccaaactaaaggcatttktttgatattttcagcatcattttttctattcacatatgtcaaaacaattctgaacagcatgctttccaaactgctagtaatttctttagagaaataacttcagaagcaaaagtaattaactaagcaaataaagtttgtataaaattagaacctattcaagcagaacaaaaatttttgttaaaaagctcgtaaagaaggaacacagataattagcttaaatttccacagatattaatgttctttgtacattattatgccctatgcattgttttatgaaaaagttttatttttaatttttgttggtacatagtacgcataacctatgaatttttattgaggtcttagtaggagccacaagctgacctgtttctgtggtggaaaaggaactgttcaccttttgtatcacttgtatgatttttaaatttacattattaaaaataaggaaataggcttgagtgtcagagtgccttacctacagagtcaatgccgatattacttg

SEQ ID NO: 386580 - DNA, 565 bp, Homo sapiens
ttctgttgcaataccaattgtattaacagatgtttaaagatgaatgttccaaactaaaggcatttgtttgatattttcagcatcattttttctattcacatatgtcaaaacaattctgaacagcatgctttccaaactgctagtaatttctttagagaaataacttcagaagcaaaagtaattaactaagcaaataaagtttgtataaaattagaacctattcaagcagaacaaaaatttttgttaaaaagctcgtaaagaaggaacacagataattagcttaaatttccacagatattaatgttctttgtacattattatgccctatgcattgttttatgaaaaagttttatttttaatttttgttggtacatagtacgcataacctatgaatttttattgaggtcttagtargagccacaagctgacctgtttctgtggtggaaaaggaactgttcaccttttgtatcacttgtatgatttttaaatttacattattaaaaataaggaaataggcttgagtgtcagagtgccttacctacagagtcaatgccgatattacttg

SEQ ID NO: 386581 - DNA, 584 bp, Homo sapiens
aatgagtcttctataatgtcaagcaattactttggcaaaaaaatggtactagagcataaaaaattrattcagttcatagatgactgttaaagcctgacaagttttattccaaaaataaataagtatctgtcattgtaggtttctcaggctctagaaatctttcacacaagatattatctgtaatttcattgaaaaataaaatgaatactttcgtgcataaaatatatttatatgtttgtgtttatattttattcctatatgtcaagtgaattattctgtgttagtacctggtttaagttaggtaatttgtgagaaataaggaaatcttacaataacatggcacacagattgctttaaaattgaaattctgctccaaggaggcttacacagcaagatcttgccttgcacagtaggagacccaccttttgtgaactatagccctgcacaggcttctaacgctatgatttttttttttaacctttcagaaagccgttcaatatctagagaatctatgaagcagaagtcatgctgatttctgaaaggtttttttaaaaattggggtccagcagagttatgctctgaca

SEQ ID NO: 386582 - DNA, 584 bp, Homo sapiens
aatgagtcttctataatgtcaagcaattactttggcaaaaaaatggtactagagcataaaaaattaattcagttcatagatgactgttaaagcctgacaagttttattccaaaaataaataagtatctgtcattgtaggtttctcaggctctagaaatctttcacacaagatattatctgtaatttcattgaaaaataaaatgaatactttcrtgcataaaatatatttatatgtttgtgtttatattttattcctatatgtcaagtgaattattctgtgttagtacctggtttaagttaggtaatttgtgagaaataaggaaatcttacaataacatggcacacagattgctttaaaattgaaattctgctccaaggaggcttacacagcaagatcttgccttgcacagtaggagacccaccttttgtgaactatagccctgcacaggcttctaacgctatgatttttttttttaacctttcagaaagccgttcaatatctagagaatctatgaagcagaagtcatgctgatttctgaaaggtttttttaaaaattggggtccagcagagttatgctctgaca

SEQ ID NO: 386583 - DNA, 533 bp, Homo sapiens
caatttactgtattagtctgttctcatgctgctagtaaagacatactgagactgggtaatttatacaggaaaggtttaattgactcacagttccacatgactggggaggcctcacaatcatggcagggggcaaagaagaagcaaaggcatgtcttacatggcaacaggcaagagtttgtgcaggggaaccgctggttataaaacaataacaattaaaacaatttcatgagacttattcaccatcatgagaatagcgtgggaaaaacccacccccatgattcaattatctctcaccaggttcctcccataacacgtggggattatgagagctacaattcaaaatgagatttgggtggggacatagccaaaccatatcatctgtttaycccatcagtagtttctcttgctgtgcacagggtctttagtttaactaggtcccactcaccaatttttggttttgttacaattgattcatggacttagccataaattctttgacaaggctgatactgagaagaatattttctaggttt

SEQ ID NO: 386584 - DNA, 533 bp, Homo sapiens
caatttactgtattagtctgttctcatgctgctagtaaagacatactgagactgggtaatttatacaggaaaggtttaattgactcacagttccacatgactggggaggcctcacaatcatggcagggggcaaagaagaagcaaaggcatgtcttacatggcaacaggcaagagtttgtgcaggggaaccgctggttataaaacaataacaattaaaacaatttcatgagacttattcaccatcatgagaatagcgtgggaaaaacccacccccatgattcaattatctctcaccaggttcctcccataacacgtggggattatgagagctacaattcaaaatgagatttgggtggggacatagccaaaccatatcatctgtttatcccatcagtagtttctcttgctgtgcacagggtctttagtttaactaggtcccactcaccaatttttggttttgttacaattgattcrtggacttagccataaattctttgacaaggctgatactgagaagaatattttctaggttt

SEQ ID NO: 386585 - DNA, 528 bp, Homo sapiens
tggtaacggacctggagctcttctggttgtctgactcctacttctgatgttttcaactcaatactgcctcctccacttcctagtaaaagtcaccctctcatttcactcccttcaagctcttccatctccttgctcggacccaagtctccaagccatcaggatccagggcactgtcttactgaagtcttaccccttcctcatgatcattcaggatactcaaagcaggagagcaataagaaacacacagatgtccagccgggcgtrgtggcttatgcctgtaatcccagcactttgggaggccgaggagggtggatcatgaggtcaggagatccagaccatcctggctaacacggtgaaaccccatctctactaaaaatagaaaaaaattagccaggcgtgctggtgggcccctgtagtcccagctactccggaggctgaggaaggagaatggcttgaaccgggaaggcggaggttgcagtgagccgagattgcgccactgcattccagcctgggcaacagagtgagact

SEQ ID NO: 386586 - DNA, 528 bp, Homo sapiens
tggtaacggacctggagctcttctggttgtctgactcctacttctgatgttttcaactcaatactgcctcctccacttcctagtaaaagtcaccctctcatttcactcccttcaagctcttccatctccttgctcggacccaagtctccaagccatcaggatccagggcactgtcttactgaagtcttaccccttcctcatgatcattcaggatactcaaagcaggagagcaataagaaacacacagatgtccagccgggcgtggtggcttatgcctgtaatcccagcactttgggaggccgaggagggtggatcatgaggtcaggagatccagaccatcctggctaacacggtgaaaccccatctctactaaaaatagaaaaaaattagccaggcgtgctggtgggcscctgtagtcccagctactccggaggctgaggaaggagaatggcttgaaccgggaaggcggaggttgcagtgagccgagattgcgccactgcattccagcctgggcaacagagtgagact

SEQ ID NO: 386587 - DNA, 518 bp, Homo sapiens
ctgtcttgttccagttctcaaaggggatgctttcaaggttttctcatttagtatgatgttggctatgggtttgtcaaagatggcttttattactttgagatatctcactcctgtgccaattttgttgagggtttttctgataaaaggatgctggatcctcacctctcaccttgttcaaaaattaactcaagatggaacaaatacttaaacgtagaacttgaaaccataaaaattctagaagttaataacagaaaaaaactcttctagacattggcttaggcaaagrattcatgactaagaacccaaaagcaaatgccacaaaaacaaaactaaataaatggaacctaactaaatgaaaaggctgctgcacagcaaaagaaatcatcagcagattaaacagacaacccagagagtgggagaagatatttgaaaactatgcatacaacaaatgactaatatccagaatctacaaggaattcaaagaaaccatcaagaaaaaaaaaacccatcaaaaagtg

SEQ ID NO: 386588 - DNA, 610 bp, Homo sapiens
gtaaactacagttattgtaagtagaaagactaattgataaattaatcaaaaataataattacaacaacttttcaagacatagtacaataagatatgaagagaaacaactcatgttaaaacgccagaggggagaaagttaaagtgtagagttattaytagctttctttgcatgtttgtatatgcagtgagtgtaaagttgttatcagtttaaaataatagtccataagcctcatttgcaagcctcatggtagaatcaaatcaaaaacctacacaggtacacaaaaaaataaaaagcaagaaatcaaaccataccaccagaaaaaattaccttcactaagggaaagacaggaaggaaagaaagaaggaagagaagactgtaaaactatgagaaaccaaataaaaaatagcagaagtcctacttatcaataacaacagtgaatgtaaatggactaaactctcaaatcaaaggcatagattggctgaattgccaaaacagcaagattcagttatctgttgctacaagaagtacacttcacctataaagacatacatagactgaaaataaacagatggaagaaagataatctacgctagggaaatccaaaaagag

SEQ ID NO: 386589 - DNA, 545 bp, Homo sapiens
atcaaaccataccaccagaaaaaattaccttcactaagggaaagacaggaaggaaagaaagaaggaagagaagactgtaaaactatgagaaaccaaataaaaaatagcagaagtcctacttatcaataacaacagtgaatgtaaatggactaaactctcaaatcaaaggcatagattggctgaattgccaaaacagcaagattcagttatctgttgctacaagaagtacacttcacctataaagacatacatagactgaaaataaacagatgraagaaagataatctacgctagggaaatccaaaaagagcagaagtagctatcctttttatcagacaaaatagatctcaagacaaaaactgtaaaaagaggcaaaaaaggtaaatcaccactttaatggtaaagtggtcaattcagcaagaggatataatgctggtaaatatatatatataaccaacacaggaaaacactgatatataaagcaaatatttttagagcacaagagacaagagaaagatatatcccaatacaataatagctgtaga

SEQ ID NO: 386590 - DNA, 545 bp, Homo sapiens
atcaaaccataccaccagaaaaaattaccttcactaagggaaagacaggaaggaaagaaagaaggaagagaagactgtaaaactatgagaaaccaaataaaaaatagcagaagtcctacttatcaataacaacagtgaatgtaaatggactaaactctcaaatcaaaggcatagattggctgaattgccaaaacagcaagattcagttatctgttgctacaagaagtacacttcacctataaagacatacatagactgaaaataaacagatggaagaaagataatctaygctagggaaatccaaaaagagcagaagtagctatcctttttatcagacaaaatagatctcaagacaaaaactgtaaaaagaggcaaaaaaggtaaatcaccactttaatggtaaagtggtcaattcagcaagaggatataatgctggtaaatatatatatataaccaacacaggaaaacactgatatataaagcaaatatttttagagcacaagagacaagagaaagatatatcccaatacaataatagctgtaga

SEQ ID NO: 386591 - DNA, 545 bp, Homo sapiens
atcaaaccataccaccagaaaaaattaccttcactaagggaaagacaggaaggaaagaaagaaggaagagaagactgtaaaactatgagaaaccaaataaaaaatagcagaagtcctacttatcaataacaacagtgaatgtaaatggactaaactctcaaatcaaaggcatagattggctgaattgccaaaacagcaagattcagttatctgttgctacaagaagtacacttcacctataaagacatacatagactgaaaataaacagatggaagaaagataatctacgctagggaaatccaaaaagagcagaagtagctatcctttttatcagacaaaatagatctcaagacaaaaactgtaaaaagaggcaaaaaaggtaaatcaccactttaatgktaaagtggtcaattcagcaagaggatataatgctggtaaatatatatatataaccaacacaggaaaacactgatatataaagcaaatatttttagagcacaagagacaagagaaagatatatcccaatacaataatagctgtaga

SEQ ID NO: 386592 - DNA, 593 bp, Homo sapiens
ggatgcggagatgggcagtaatgtgcacggggtgggaggtctcttgctttagccaaggtggtcagggaagacccaagccctgaagacagagaaggagctggccttgaatcctgtaaatgttcccaaacgatctccctaagaggttatgccagtcacactcctgccgagagagtatctctgcgccacggccaagggtgagtcatcctgctgagaggttgagctggggacgcctgcccagatgggctccaagtgagggagagcctggcggggagaacagcccggasagaggcagggcagggcgccgggacactgcttggcgcgtcctgggagtgaagcgcattgaacccagctcaggctggtggtgggggagtcttggcaatgctctctctccaaaggcgagttgatcacagacgctggcagtgagtcagcggcaccgccagggctgctgagaaatccctcctgctgtccgatcgcattcctggaagggtgggccgctcagggccccccagctccagtcccactcagaccccagaatcccagcagcccaccactcacttcctttgcgctcactcttccttctggtccccacacac

SEQ ID NO: 386593 - DNA, 593 bp, Homo sapiens
accaaaaaccacttgtatttctaaagctactgaaatttaaaaatttaaattaaaaaaaaattgttggccaggtgcagtggctcatgcctgtaatcccagcactttgggaggccgaggcaggagacaggagtctgagaccggcctgacctacgtggtgaaaccccatctctactaaaaatacaaaaaattaaccaggcatggtggcaggcrcctgtaatcccagctacttgggaggctgaggaaggagaatcgcttgaacctgggaggcagtggttgcagtgagttgagatcgcaccattgcactccagcctgggtgacaaagcaagtctccgtctcaaaagaaaaaaaaaaaaaaaaaaattacaatggtgaactgagcacaggggcacgtaccagtagtctcagcttcttgcaaggctgaggcaaaaggatcacttgagcccaggagtttgaggcatttattatattttgtgggaaacaatactaatgtagatattatcctaaggaaggcagagcacccttaacacataagcatgagtgtgacatgatgggattcatgtggggtttggtgagcagtgcaccacctgggcata

SEQ ID NO: 386594 - DNA, 593 bp, Homo sapiens
accaaaaaccacttgtatttctaaagctactgaaatttaaaaatttaaattaaaaaaaaattgttggccaggtgcagtggctcatgcctgtaatcccagcactttgggaggccgaggcaggagacaggagtctgagaccggcctgacctacgtggtgaaaccccatctctactaaaaatacaaaaaattaaccaggcatggtggcaggcacctgtaatcccagctacttgggaggctgaggaaggagaatcgcttgaacctgggaggcagtggttgcagtgagttgagatcgcaccattgcactccagcctgggtgacaaagcaagtctccgtctcaaaagraaaaaaaaaaaaaaaaaattacaatggtgaactgagcacaggggcacgtaccagtagtctcagcttcttgcaaggctgaggcaaaaggatcacttgagcccaggagtttgaggcatttattatattttgtgggaaacaatactaatgtagatattatcctaaggaaggcagagcacccttaacacataagcatgagtgtgacatgatgggattcatgtggggtttggtgagcagtgcaccacctgggcata

SEQ ID NO: 386595 - DNA, 605 bp, Homo sapiens
atggaaaaacagtttgaggcccatgcacgaaaattraaacttggttcctgtagctatttgcttgtgtagctacgtgacaagcctggtgagaaacgctggatttctccctctttcagttctctccacctggcatctgggggcctagtcccaaaaagtgaaaggaactggaaaataaacttactaagatccaggaaatgatttcaaaaaaaaacagccaacaaaccgaggtgagcaggcgcagtgggtgggtgttatgagacagacagcggggctaggagatgcccaggatgaagcccggagacctgctctctgattcctcttgggtctagctcatcacagcctgcttccccactcccactgcaacgtgacagcaacagcacatctcactttccaacatgcagacagccccctgtgttaacagcaccgtctctgaaatcagtggagctgcatttgaccctacctccgtcaggccgtagctgtgagtttgggaaaggcgtttgatctttctgagcctcagtgtcttcatcttcaaacgggaaggataacatgtacattgctgggctggactaaagatggaaggagacatcattaagggaaagttaggg

SEQ ID NO: 386596 - DNA, 557 bp, Homo sapiens
gactcccaagtagctgggagcaatttatgtcccaggacattgtcacaatgcaccaccatgcctggctaattttttgtattttttttagtagagacagggtttcaccatgttggccagggtagtctagaactcctgacctcaagtgatctgtctgccttggcctcccaaagtgctgagattagaggcatgagccactgtgcctggccgtgattttaaagtccctagaattttacatgtctgctattattatctctaaaacttttctgtgggtctcttacctctcttctcagcacactgtcagcaattagaggcatagacakgtagttcaactcatgttagtggttggctcagcagcacaacagtgtcaagtaaatgaaaacacagcaagtatctcagacttaccaatgtgcatggcataatcctgctcaaagacaacattctagaccccctaactgagctctgcattcttcaataaatgctaataatcctaggtaagcacagagaataaaaatggaagcattaccccatataactcatcacaactaaaaaaaatgcta

SEQ ID NO: 386597 - DNA, 383 bp, Homo sapiens
tagtggctcatcctgggatctggagggcagtggctctgttcctgcagctccactgggcagtgccctggtggagactttgtatgggggctccaacaccatctttcccctcaacactgcccttgtaaaggctctctgtgggggcatttcccctgcatggggcatctgcctgggcacccaggcttttccatacatcctttgaaatctagatagaagcttccargcctccttcactcttgcactctgcacacctgcaggcttaacaccacatggaaaccaccaaggcttacggcttgtgccctctagaatggtggcctgagctgaacctggggccctctgaaacacagctgtagctgtagccgtggcatctgggattaggggagcag

SEQ ID NO: 386598 - DNA, 563 bp, Homo sapiens
ttttttaatttttcatccagtttatggtatttttgttttatggtaattacttttaattttatcagagttttccttcatggcttgtatattttatatctcatataagaaattaatttggtgtatggttaaaaaaaaagcagcaggagataagaagagagttgactttgggattgtagagataagattttttaagtagtaaagtatatgttataaccaaaatataggaattccatgacagcatatatactctctttgattctcagacacatgactaaggcaaagatcatgctttttgttcaccaaatcccatttattttcttcctatggggcacaaggaagactggttctggataataaaatgcttccaggctgaagcagtgaaaaaaccctaygtgaacctccagattctctcctcctttgccatgaaaccagaagcaccagttagctgagtccctcttccagcctgctctggatacccaatatgagcgagaaataaaatgttgtcatgtaaagagatattcaatgtctgtatgttttattgcagaatagctgaagctatccta

SEQ ID NO: 386599 - DNA, 563 bp, Homo sapiens
ttttttaatttttcatccagtttatggtatttttgttttatggtaattacttttaattttatcagagttttccttcatggcttgtatattttatatctcatataagaaattaatttggtgtatggttaaaaaaaaagcagcaggagataagaagagagttgactttgggattgtagagataagattttttaagtagtaaagtatatgttataaccaaaatataggaattccatgacagcatatatactctctttgattctcagacacatgactaaggcaaagatcatgctttttgttcaccaaatcccatttattttcttcctatggggcacaaggaagactggttctggataataaaatgcttccaggctgaagcagtgaaaaaaccctatgtgaacctccagattctctcctcctttgccatgaaaccagaagcaccagttagctgagtccctcttccagcctgctctggatacccaatatgagcgagaaataaaatgttgtcatgtaaagagatattcaakgtctgtatgttttattgcagaatagctgaagctatccta

SEQ ID NO: 386600 - DNA, 540 bp, Homo sapiens
ccattcatactccctgagccaaacccaatcatgtggccaagcttaatttaaatgaagaaagagactgtataacccttcttatccaagagctgcagggaggaacattgactcttaggcatcatcataaactctrccacaaaaaggctgaaaggttgttgcatgttcatgagaagacaattgacacaatgaaggggccaatttttttgggaaccagacaacttgtacaggttggaatgcagtgaggaaggtcggaggacacagcactgctttacctctccaggtgagattccgcgggtctttcccaagtgaatacctcttacctgcaggaaacatgggcaatccagtccctcttctgttgagacttcctcccagatcagtagtgtagggactgcatctcttttacacaaacaagttatttgcctaacaaggcccttttctttgcctggtgattttccctagggctgtgaacacccaaagtgccaggatcccaaggagagaacagtctcttcctacctacctgggaaaagcagtctgtctaca

SEQ ID NO: 386601 - DNA, 557 bp, Homo sapiens
ttgattgtcagtgactcatggcccttcccctgtgctcctgagccygcctaaactcatgctggtggagagaaacggagcatttcttcccaggtgtgaatcacttgccccacgcccctggcagagacctctccctgcaggagataggctctttggagatttgcccagaggggatgggcctcccaattctcttaccttgcccatctacttttcttcttgctccctcctccctctgcagctgtcgtggagctcaccagaagctcctggccagaaccaggattgttgagcagatgttgagcacctgagggaggaagcccgtgggagccgctagggttttctcagagggaataaaaacttgcctctgaatttcttgcagaaacccgggtctctggggagcagcactgttggtgtttagacaggtccattctataattccttgaccagatttcattgagccctgattataaaccccagctctgtaaggcacactctctgccttcatagcatttatagtctagctaggggtgcaaaacccaaacactcacaacaaataaaaatgg

SEQ ID NO: 386602 - DNA, 557 bp, Homo sapiens
ttgattgtcagtgactcatggcccttcccctgtgctcctgagcctgcctaaactcatgctggtggagagaaacggagcatttcttcccaggtgtgaatcacttgccccacgcccctggcrgagacctctccctgcaggagataggctctttggagatttgcccagaggggatgggcctcccaattctcttaccttgcccatctacttttcttcttgctccctcctccctctgcagctgtcgtggagctcaccagaagctcctggccagaaccaggattgttgagcagatgttgagcacctgagggaggaagcccgtgggagccgctagggttttctcagagggaataaaaacttgcctctgaatttcttgcagaaacccgggtctctggggagcagcactgttggtgtttagacaggtccattctataattccttgaccagatttcattgagccctgattataaaccccagctctgtaaggcacactctctgccttcatagcatttatagtctagctaggggtgcaaaacccaaacactcacaacaaataaaaatgg

SEQ ID NO: 386603 - DNA, 557 bp, Homo sapiens
ttgattgtcagtgactcatggcccttcccctgtgctcctgagcctgcctaaactcatgctggtggagagaaacggagcatttcttcccaggtgtgaatcacttgccccacgcccctggcagagacctctccctgcaggrgataggctctttggagatttgcccagaggggatgggcctcccaattctcttaccttgcccatctacttttcttcttgctccctcctccctctgcagctgtcgtggagctcaccagaagctcctggccagaaccaggattgttgagcagatgttgagcacctgagggaggaagcccgtgggagccgctagggttttctcagagggaataaaaacttgcctctgaatttcttgcagaaacccgggtctctggggagcagcactgttggtgtttagacaggtccattctataattccttgaccagatttcattgagccctgattataaaccccagctctgtaaggcacactctctgccttcatagcatttatagtctagctaggggtgcaaaacccaaacactcacaacaaataaaaatgg

SEQ ID NO: 386604 - DNA, 610 bp, Homo sapiens
acactttgtagcagttatatcagttatattgggctttatgaagaggcatctgtccctgttcttgggagaaagattcctgcccactattcagccttatgtgaccctaggatgagagctgtaatttgctgagcagctcttatgtgccagacacattatgccagacccttcgctgcgtcatctcattttagtcaagcaacaattaagacatcaattaatacatatgacatatacattagttgggtccagaaaggcagaacaacttgaagtggggtggggggaggtgggagttggggagcttacaggtcataggtggatttaaatatttttttmattggcagttggtcaaaagagttaagttattatctaaagacctggaatcaagagagaggagtgtgtggattaagataaggggttgtggggatcaaggttcttattatccagagaaagtatttaggtggctatccttagtgacaattgatggcaaatgtttcctatttagacctttaaaaggtgctagactctcagttaatctcttcaggatgggaagggcctggaaaggaatagatctagttatgttaacagagattctttacagatgcaaattttcccc

SEQ ID NO: 386605 - DNA, 622 bp, Homo sapiens
ttgtgacaagactagatagcctgcaaagtcaaaaatgtgtattatctggccctttacaaaagacattagccaatcccagttctagatttatatttacctctgagatggagttatctataagaataccaactccattagaacaccaactyataaattcaaactctcagaggaaggagtaaaaggtaaaggctaaatttattttgtaaactctaaaagttgaaatcacaaatgcgcctcattataaagacctttttttttttttttttttttgagacagtcttgctctgtcactccagctggaatgcggaggcatgatctcggctcactgcagcctccacctcccgggttcaagccattctcctgcctcagcctcccaagtggctgggactacaggcacccgccaccatgcctggctaatttttgtatttttagtagagatgaggttttaccatgtttgtcaggcttgtcttgaactcctgacctcaggtgatccacccacctcggcctcccaaagtgctgggattacaggcatgagccactgcgcccagccaagaccttctttattcacccaatgtgagtacatcctaacacagtcctgtctgtcattcttggttgattttct

SEQ ID NO: 386606 - DNA, 622 bp, Homo sapiens
ttgtgacaagactagatagcctgcaaagtcaaaaatgtgtattatctggccctttacaaaagacattagccaatcccagttctagatttatatttacctctgagatggagttatctataagaataccaactccattagaacaccaactcataaattcaaactctcagaggaaggagtaaaaggtaaaggctaaatttattttgtaaactctaaaagttgaaatcacaaatgcgcctcattataaagacctttttttttttttttttttttgagacagtcttgctctgtcactccagctggaatgcggaggcatgatctcggctcactgcagcctccacctcccgggttcaagccattctcctgcctcagcctcccaastggctgggactacaggcacccgccaccatgcctggctaatttttgtatttttagtagagatgaggttttaccatgtttgtcaggcttgtcttgaactcctgacctcaggtgatccacccacctcggcctcccaaagtgctgggattacaggcatgagccactgcgcccagccaagaccttctttattcacccaatgtgagtacatcctaacacagtcctgtctgtcattcttggttgattttct

SEQ ID NO: 386607 - DNA, 622 bp, Homo sapiens
ttgtgacaagactagatagcctgcaaagtcaaaaatgtgtattatctggccctttacaaaagacattagccaatcccagttctagatttatatttacctctgagatggagttatctataagaataccaactccattagaacaccaactcataaattcaaactctcagaggaaggagtaaaaggtaaaggctaaatttattttgtaaactctaaaagttgaaatcacaaatgcgcctcattataaagacctttttttttttttttttttttgagacagtcttgctctgtcactccagctggaatgcggaggcatgatctcggctcactgcagcctccacctcccgggttcaagccattctcctgcctcagcctcccaagtggctgggactacaggcacccgccaccatgcctggctaatttttgtatttttagtagagatgaggttttaccatgtttgtcaggcttgtcttgaactcctgacctcaggtgatccacccacctcggcctcycaaagtgctgggattacaggcatgagccactgcgcccagccaagaccttctttattcacccaatgtgagtacatcctaacacagtcctgtctgtcattcttggttgattttct

SEQ ID NO: 386608 - DNA, 530 bp, Homo sapiens
agctgcatgggacaaattggcttgctaggattttggaggaaagtcacctctttcagcaaagaacttttttcttttttttwaaaaaaaaaaaaaaaaaggaaataacccctgacttgcaattgggctgtactctggtctgaatatttgtgtctcctgcaaatccacatgctgaaatcctaacccccaaggtggtggtattagaaggtggggccttttagaggtagttaggtcacaagggtgaagtcctcatgagtgagattaatgcccttataataaaagagaccccagagagctgccttgtcccttccaccatgtgaggacacagcaagaagctggcagtctgcaatccaggggcaggccctcaccagaacctgaccgtgctggcacctgatcttgaacttcccaatctccagaattggaagaaataaatttctgttgttatgagcccctcagtctcaggtatttggtttttatagcagcccaaatagacaaagacacgctctgatggttaagggtttggaagaagcaag

SEQ ID NO: 386609 - DNA, 520 bp, Homo sapiens
aatcatgaaggaatcatctatgaataagaaatgtgaacaaattaaatggctatacatcaaaatagtgcatgttgaacactagaaataaaataaattatagtatccattttactgagcaattatcatgtgcctggtattatatggtgttacaatcctgacatgttttattaatacattccttgtaacagcttatgtggtaggkagtgttcttttccctattttacaaatggtttaatggagactaaggtagattaaatgattttctgagttttaagaaatatacatattataatcatatgtacatttatattctcatatatataaattttggttagcttttatatacaaaaataaggttgactaattttcatccaatttctatctaatgaattctaataggttagctcattaagtgaattaatcttctcttcatattaagtaatattcaattttcaaaaaaatgctcatcccactaaaactgagattatatttataattaccaaataagcaagataaacct

SEQ ID NO: 386610 - DNA, 611 bp, Homo sapiens
ttgcaaaactactgaaggaaatcagagtggctcttagcagtgttcagagtttaatcagacagactagaagacaracaattacagtacagggcaaaaagcatcacataatgtttcttagctcactggtatgaatccatttgtctttagatatttcagacatcagtttctctactgtgtgaaactaccgcaattgttggtttctgttgtctctgacttagtgcctttacattggtactgaattatcattgtcaaataatatcaaccacacctgccctggtgtggtcaggtgaataatgcacctcctcacccccaaagatgtccagattccaatgcctagaacctatgaacatgttactttacatggtaacagggactctgtagatgtgaataaattagatatcttgatagagtttatcctggatcatcacaaagctccgttgtaaaaggaagcaagagaatccgttggtagcagcagatagacaatgatgagagaagcaagtggttggagggatttgaggaaaaggctactaaccaagaaatgtaggctgactttagaagctgaaaaaggacatggattctccccttgaccctccagcagacacagaacttct

SEQ ID NO: 386611 - DNA, 508 bp, Homo sapiens
ttgttttagcggcaatgggaaacaaacacacctgctttccaagaaaattttaattaaaatattttctttgattctcatgtcacaggtattaattttcagtttggaaaggatggcgacagtggtgaaggtgtaagtgtttccaaaatattaggaagccttgtatgtgaaagaaagaaaatctacacaatgtaaatgaaaaataattattaaacaaaatcaawaaataacaaaaccaactatacattagaacatattacatattgaaacattttacattggattgaattttatccctagactgcttccctaagggaatagactgaatttggttgaaagggtacttatttgagaagtcagcagttttcagacttgggtgtgtatcagaatcacctagggaactttttaatatacaaatggctagggcaggtgccgtggctcatgcctataatccccgcactttgggaggccgagattggtggatcacttgaggtcaggagttcgagagcag

SEQ ID NO: 386612 - DNA, 545 bp, Homo sapiens
gggaaatcatacactaggcatgccgaagtagaatcagcagggaaaaaaagccatgcttaatctaggaaaacattcaggcatggcttcagagacactaggaggattctagtaggggacttgacatacgccgggggcaacccattgtgaaggagctaggtggcctgggagtgcattctcaggctatgagatactgccacatwtaggtcaacctaaaccttcgttcttgaagaccactagctttggaaataaacggcttttttgatctagaaaaaggccttgaaaattaaagtcactcagcaacgttagacattgaaaattaaaagtaactcaattcaaacttttcattttataatcaggaaaactgaactgaaaacaatatatcagttaagtcatttgagcatgtctcacagcaaatgattgttgaaaaaaggctattcaaaatgctaggatatggttgttatctatataaagattttctatgcctttcatctaaaaaacaacttttaactttattaagataccaccaagaagcttaggtaccgaaa

SEQ ID NO: 386613 - DNA, 581 bp, Homo sapiens
ataaaggtatatatgttatatgaagtaattcaaaggcacatatgatttataaaagtaatattaattttaatgtgaagtatcacttctaaaagcaggctaatttcttagattttaagacacagtaagtaatagttcatacttactggttaaatgttcttgaaatgttctaatgaatcaatgtgctgtactgtctcrtgatctaaatttcccacacttaaatggcaggtagtaatagcatacgtgtgtcaggactgaacctactgaatgtattcttaaaataaaatattattttctttgggatttaaaaacacacacttgtaaatattgatatgaataacttttgattaaaaaattaaagtaacagagctagattgtctctgaaccaagagcaataagatgtaaaatcatagtggtacttaccacagtgaaattcataactttcaatatccatattgtcatggctaagttaactatcatggtaaccaacagcagaaggacaaagaagtataagcacctctttcgccatccataaattcccactgggtaaagttgtgcattctcagtccttggcaggttattct

SEQ ID NO: 386614 - DNA, 592 bp, Homo sapiens
gatttttttttttgctactttgtttgagttcctagtagattttggatagtagtcttttgttgaatgtatagattgtgaagattttctcccaccctgtgggttgtctgtttacctttctgagtgttccttttgtaatgcaaaagctcttcaatttaagtcctagctatttatctttgttcttattgcatttgcttttgggctcttagtcatgaaatccttgcttaagttaatatctggaaggatttttccaatgttatcttctagaatttttataatttcaggttttagatttaagtccttgatccatcttgagttgatttttgtataaggtgggagatgaggatccagtttcattatcctacacatggcttgccaattacccccamaccatttgttgaatagggtgtcctttccctacttcgtgtttttgtttgctttgttaaacacaaatagagaatctcaggtcacacctcaaggaactagagaaacaagaaaaaccaaacccaaacccagcagaagaaagaaaataaccaagatcagagcagaagtaaatgaaattgaaacaaacaaacaaaaatacaacagataaatg

SEQ ID NO: 386615 - DNA, 589 bp, Homo sapiens
actgatgaatgaattcagcaaagttttaggatacaaaactaatgtacacaaatcagtagttctgctatacaccaacagtgaccaagctgagaatcaaatcaagaactcgaccccttttaccatagagcaaaaaataaaataaaatacttagaaatatacctaaccaatgaggttaaagacctttacaagaaaaactacaaaacactaccgaaagaaattatagatgacacaaacaaatggaaacacatcccatgctcatggatgggtagaatcaatattgtgaaaacgaccatacttcccaaagcaatctacaaattcaatgttgagaaatttttataaaaattatttggttttccatctttttgttttaatttcaaaattactgtaatttcaaactgcattaatgtcctgttaaatcttaygtttccattttttaccattgaggcatgttatgcttcatacaataaaaataattggataagctattaaaatatcataattttaaatgaattggaaacgctgataacggtagataattcatagcaagttctctcagaatgtaaaaaatcctatttattatcattattat

SEQ ID NO: 386616 - DNA, 583 bp, Homo sapiens
aaatgcctctaacaattttgacaagcraatgagataacaagaggctaaaagaaaagttgtgaaaaaaacaaaacacaaaaaaaagttatgaaattaaagctatgtttatctcctcaagaaattcaatattattttctttaataaagcttagtttaacattattattttataaattgtcttcatcacaaaatactttagagcatctacgctgcagtaagaaaaggttagacttttcttttaaaagttcctttttttgttgttaaatctgagtgtttttcaagatcacaaaagctttcagtggctgttttagtgcaatagtagtattagcagaagaataaaaacatataattctaagtgattatgcaaactatcctccatttgaaactttacaactttagctttaaatgtttaatattgccatttttaagcattaactatattctgaaatacattgttttctttggcattatgaaacttctataaataaaagtattttttactaactgcctattgtcattctaatggaatctaccaaacaatgctgcaattgcagaggtactgattttctcagaacagttaagtg

SEQ ID NO: 386617 - DNA, 583 bp, Homo sapiens
aaatgcctctaacaattttgacaagcaaatgagataacaagaggctaaaagaaaagttgtgaaaaaaacaaaacacaaaaaaaagttatgaaattaaagctatgtttatctcctcaagaaattcaatattattttctttaataaagcttagtttaacattattattttataaattgtcttcatcacaaaatactttagagcatctacgctgcagtaagaaaaggttagacttttcttttaaaagttcctttttttgttgttaaatctgagtgtttttcaagatcacaaaagctttcagtggctgttttagtgcaatagtagtattagcagaagaataaaaacatataattctaagtgattatgcaaactatcctccatttgaaactttacaactttagytttaaatgtttaatattgccatttttaagcattaactatattctgaaatacattgttttctttggcattatgaaacttctataaataaaagtattttttactaactgcctattgtcattctaatggaatctaccaaacaatgctgcaattgcagaggtactgattttctcagaacagttaagtg

SEQ ID NO: 386618 - DNA, 539 bp, Homo sapiens
catttttaaaatgtatcgtctaccccttagctagtgatcccctacttaagtactgtagaagtatttttattggaattaacttttaaagacatggttgaaatagaatttttaaaacataatgcttgaagggtccaaattatgtggtgtgaactttccataccaraaaggcattttgttttctgctccaacaaaatgagtctctaaacagctactaatgttgagagagattgaaacaatacagtaaagcctacttaccacggcaatttaaacttctccctatctatgatacttaatgctcaaagggacatttcagcataatgatagtcaaaatttgctgtataagaaaaacggccatttggagtggattttttttttctacttggtttatggaaaatgctgtagtcaggttttgcagcacggaaaagaagcaacctagcaactgaatttcaagaatgatgaaagatatctgagtcaaatgtgctgcctcttgagacaggaaatagatgattctagccaagcctgacagaaaagagaaaact

SEQ ID NO: 386619 - DNA, 579 bp, Homo sapiens
  misc_feature (1)...(579): n = A,T,C or G
aatacttagccattaatgcaattttgaaggagcccaaggtagtctttttcctgctcagaggttatcaacatgngagagataaaacaacaaagacagtccacgggcaccatttacactaaaatgcaaggcatgagacactcattggtgagtcctgctgcatgttcacagcaggggaagaaggaaaaatctttaaggaaaaacaaattggccagaaacgcagcaggagagcttaactgggcaagcagaaagcccacactacttcaaacagtaaggattaacaagaaaacatatttgaaaaacaatggtaagaaaacatatccagaaagaggaggggatattgtcttgtattctaacaccaagcagaacaaggtaatgagaaaaaagataatagaggatggcttccataacactgataataaagagaaagacaccaatggttatgaaaaatcttgcaaacaattttcaaaataccttattggaacgtcatttttttttccactctgacaaacttctttacattttaccagattcrtgtaaattatttatagtgtagtcaaatttattttgatgtaaaatttt

SEQ ID NO: 386620 - DNA, 595 bp, Homo sapiens
ttttattttattccagtattgtgcaattgaaaacaactttcaatcagttaatatatctgaaatgactagaagcgataagaaagaatttaaaatggttatgtatgtaaaatacaataattttacagatattaaataaataaaatgactttcatacttttctcactcatcgagattagtcattaccttgacaggtgtattagtcagttttcgcactgctataaagaacacctgagactgggtttataaaggaaagaggtttgactctcagttccacatggctgaggaggcctcaggaaacttacaatcttggtggaaggtgaaggagaagcaagtaccttgtytgcaaggtggcgggaaagggagatagcaggggaaaccgccacttacagaaagagcagatctcatgattacagcatggggcaaaccgcatccatgatccagtcaccttccaccaggtcactccctcggcacaagaggagtacagtttgagaagagatttgggtggggacacagagccaaaccatatcaacaattgcaaatgtatttgcattaatgttgctgtaatcaaaccaagtagtcactgtttttagcaaca

SEQ ID NO: 386621 - DNA, 595 bp, Homo sapiens
ttttattttattccagtattgtgcaattgaaaacaactttcaatcagttaatatatctgaaatgactagaagcgataagaaagaatttaaaatggttatgtatgtaaaatacaataattttacagatattaaataaataaaatgactttcatacttttctcactcatcgagattagtcattaccttgacaggtgtattagtcagttttcgcactgctataaagaacacctgagactgggtttataaaggaaagaggtttgactctcagttccacatggctgaggaggcctcaggaaacttacaatcttggtggaaggtgaaggagaagcaagtaccttgtctgcaaggtggcrggaaagggagatagcaggggaaaccgccacttacagaaagagcagatctcatgattacagcatggggcaaaccgcatccatgatccagtcaccttccaccaggtcactccctcggcacaagaggagtacagtttgagaagagatttgggtggggacacagagccaaaccatatcaacaattgcaaatgtatttgcattaatgttgctgtaatcaaaccaagtagtcactgtttttagcaaca

SEQ ID NO: 386622 - DNA, 370 bp, Homo sapiens
tgcatgatcttacttatatatggaatctatgttgttatactcatagaaatagagagtagaagggtggttacctatggatggaggggcaaggaaaatgggtagatactggtcaaaggatacaaacttttagttattcaagattagtaagtaatggaaccctatttatttatttatttatttatttayttacttacttacttacttacttacttagagacagggtcttgctctgttgtccaggctagagtgcagtggcatgtcttggctcactgagatctaggcctcctggactcaagcgatcctcctgcctctcacctcctgagtagctgggattacaggtgcaagctactatgcccagctatatatatat

SEQ ID NO: 386623 - DNA, 577 bp, Homo sapiens
taagtaattctcccaccttggcctcccaaagtgctgggattaaaggcatgagccagcacacctggctagaagtgaacagtgtaagaattctcccccaagtttgaattctggagtttactatatattccgaccccattagtgacacagatatattacaacttggttcagtaagtttcagatgayattaaaagcagcagaattaccatcaccttaaaaggtcaaatgagaattcatgataatctggactacttggaaaatggattacattaattaatttactaattaatttagacagcaaagtttcatccaaggccaaactccatttgcaaagaaaaaggggcagtcgcatactgtcgctagggcagacatatgaggaatagtggcttttatcctaaaatgctgaatgggagtccacaaaatgtcaaatgattaacataacacagagttatatcttctttgctatctctcagtctttttgttttatatcatttttattttattttatgttctaagatacttgtgcacaatgggcaggtttgttacataggtaaacgtgtgtcatggtggtttgcagcag

SEQ ID NO: 386624 - DNA, 565 bp, Homo sapiens
atatagaatccaggttgagaacatctaatacctaattttcaatgctggatcatttttgatccattgtgtttcttcttccaacgtttttatttacttcagtggattttccactgtcctatcctcacaaagtcttatatttaaagtcctctagcatcataagatagaaagatcctgaaaacattatttaccattttcctactatgtggtaataattcaagaaataatttttagcaatatatggttattcctaattttagatttcagcactttttttcctatgaaatattctcattttaatttctgaatgattgtccttggattaggcgcatcatacacccagctgatctgtataggaaaaacatattcastctcaatgaattacttcatttttttttgactgcaatcatgaatacgtctgctgacctcaaagtcccattttaggaagctgaaaaggaaaggctctgacgttaacctggatgtctattgacttatttcaggagtattaacatgtttaaatggaaaagccaatgtctagaaactaatataaattaattcctttattgta

SEQ ID NO: 386625 - DNA, 565 bp, Homo sapiens
atatagaatccaggttgagaacatctaatacctaattttcaatgctggatcatttttgatccattgtgtttcttcttccaacgtttttatttacttcagtggattttccactgtcctatcctcacaaagtcttatatttaaagtcctctagcatcataagatagaaagatcctgaaaacattatttaccattttcctactatgtggtaataattcaagaaataatttttagcaatatatggttattcctaattttagatttcagcactttttttcctatgaaatattctcattttaatttctgaatgattgtccttggattaggcgcatcatacacccagctgatctgtataggaaaaacatattcagtctcaatgaattacttcatttttttttgactgcaatcatgaataygtctgctgacctcaaagtcccattttaggaagctgaaaaggaaaggctctgacgttaacctggatgtctattgacttatttcaggagtattaacatgtttaaatggaaaagccaatgtctagaaactaatataaattaattcctttattgta

SEQ ID NO: 386626 - DNA, 516 bp, Homo sapiens
acactggggcctgttgtggggtggggggaggggagagggatagcattaggagatatacctaatgtaaatgacgagttaacggatgcagcacaccaatatggcacatgtatacatatgtaacaaacctgcacgttgtgcacatgtagcctagaacttaaagtataataaaaaaataaaaataaaaataaatttatatgtaataaaaaagaaaggtgatttccatgccccattggcttgctttcctattttcgtaattagttcccaactcaatatgtaagaagagtactattcattgcgccactcgaatctccaacacgttatttaccactgggatcctcctcaggggtgaggagtctgaaccgatcaaacatgaaatggttaagtgatcggctaatgtaaaggtagtgwtaatacagaacacataggaattctttttttattattattatactttaatgagagcattctctatcaaatagagtaattagtgacgtgctagagttgacttgtacttac

SEQ ID NO: 386627 - DNA, 558 bp, Homo sapiens
gttttattactaaatctatcaaaccttttaaaatgtttacgttccctgacaatggcagcatttaacattctaggtcattccatttttctgttttccaaaacacgactctcattttagttttctttctacttctggccttcattgcaatctcctattttttttctttttcatacattctggattcgtgtttcactctctccacctatcattttttgctcctttccttaaagaatttctcatacctctgaatttacctacccatatatgtgaaggagtccaaatcttacatcactactctaggactctgytgagttagatttattcagtctgttttctagaccctgtcaaccaaacactctaccagcacttcaattcattatgttctctaaaactgtcctctccttttctattctctattttcatttttttttttaatttcaacttttattttagactcggagtacacgtgcaggtttgttacacgagtaaattgcgtgatgctgcggtttggagcatggatcccatcactcagataatgaacatagtacagaataggcg

SEQ ID NO: 386628 - DNA, 558 bp, Homo sapiens
gttttattactaaatctatcaaaccttttaaaatgtttacgttccctgacaatggcagcatttaacattctaggtcattccatttttctgttttccaaaacacgactctcattttagttttctttctacttctggccttcattgcaatctcctattttttttctttttcatacattctggattcgtgtttcactctctccacctatcattttttgctcctttccttaaagaatttctcatacctctgaatttacctacccatatatgtgaaggagtccaaatcttacatcactactctaggactctgctgagttagatttattcagtctgttttctagaccctgtcaaccaaacactctaccagcacttcaattcattatgttctctaaaactgtcctctccttttctattctctattttcatttttttttttaatttcaacttttattttagactcggagtmcacgtgcaggtttgttacacgagtaaattgcgtgatgctgcggtttggagcatggatcccatcactcagataatgaacatagtacagaataggcg

SEQ ID NO: 386629 - DNA, 543 bp, Homo sapiens
ttctagttcccattcccattattgctactgtgaagtctactctcagtctaaagattattgttttgtaagcaatcggtccttttctgctgcatttgctctttgaagcctggaattaagattttcctcttcttttttcatcagtttcacaataatgtatcttcgtgaatattcctctgtttttaactttttaattgatatataacatgcaaataaaaagttgataaaccaaaacaccacacatatatatatacacacatatatgtgcaaacatatatataggggtgtgtgtgtgtgtgtgtgtgtgtatatatttgctttgtacttgagttttaacttttacttgaagaatttcctaaagytaaaagataggctgcatcttccaatcctcttagccctcagatagctcatcctctgtccagagacagtcaaagcacatctcatcttttctgatagctggagcccctgcaagttctgaatactctgggtatgagacactaaacagcttcagccatctgcagcatacatcttatttagaatatctgg

SEQ ID NO: 386630 - DNA, 543 bp, Homo sapiens
ttctagttcccattcccattattgctactgtgaagtctactctcagtctaaagattattgttttgtaagcaatcggtccttttctgctgcatttgctctttgaagcctggaattaagattttcctcttcttttttcatcagtttcacaataatgtatcttcgtgaatattcctctgtttttaactttttaattgatatataacatgcaaataaaaagttgataaaccaaaacaccacacatatatatatacacacatatatgtgcaaacatatatataggggtgtgtgtgtgtgtgtgtgtgtgtatatatttgctttgtacttgagttttaacttttacttgaagaatttcctaaagctaaaagatagsctgcatcttccaatcctcttagccctcagatagctcatcctctgtccagagacagtcaaagcacatctcatcttttctgatagctggagcccctgcaagttctgaatactctgggtatgagacactaaacagcttcagccatctgcagcatacatcttatttagaatatctgg

SEQ ID NO: 386631 - DNA, 543 bp, Homo sapiens
ttctagttcccattcccattattgctactgtgaagtctactctcagtctaaagattattgttttgtaagcaatcggtccttttctgctgcatttgctctttgaagcctggaattaagattttcctcttcttttttcatcagtttcacaataatgtatcttcgtgaatattcctctgtttttaactttttaattgatatataacatgcaaataaaaagttgataaaccaaaacaccacacatatatatatacacacatatatgtgcaaacatatatataggggtgtgtgtgtgtgtgtgtgtgtgtatatatttgctttgtacttgagttttaacttttacttgaagaatttcctaaagctaaaagataggctgcatcttccaawcctcttagccctcagatagctcatcctctgtccagagacagtcaaagcacatctcatcttttctgatagctggagcccctgcaagttctgaatactctgggtatgagacactaaacagcttcagccatctgcagcatacatcttatttagaatatctgg

SEQ ID NO: 386632 - DNA, 553 bp, Homo sapiens
tatatatatatttatatgtatatatatatatatatggcacatatatgcaataattatgtttattttaaaaatgctgtatattaggaacaaatagacaaaaataaattcctggtatcctcgaagcttggataaacagcatcagattgaaaatgatcttttcctatcttggaacacttataacactattataccccatacgcaccttttcatatttcctaatgaccttatagtccatttacacatacatacacacacacattctgttttaatattgtaaatttttacgtagtaagttaccaaataatatctgttgattgatacactcattaacaatgtaagcaaatgcagacattcacagcaaattttattttctttgcattatgaaagcattgttttactcaattaaactaaattgaagtgttccataatgtacctcatgatattttaattaccttgctttcttcaacctgttctcttactaygcacaactttattctataaaaacgagaaaaattggaaattcagaatctcagaatcttgaacaaattaaagt

SEQ ID NO: 386633 - DNA, 553 bp, Homo sapiens
tatatatatatttatatgtatatatatatatatatggcacatatatgcaataattatgtttattttaaaaatgctgtatattaggaacaaatagacaaaaataaattcctggtatcctcgaagcttggataaacagcatcagattgaaaatgatcttttcctatcttggaacacttataacactattataccccatacgcaccttttcatatttcctaatgaccttatagtccatttacacatacatacacacacacattctgttttaatattgtaaatttttacgtagtaagttaccaaataatatctgttgattgatacactcattaacaatgtaagcaaatgcagacattcacagcaaattttattttctttgcattatgaaagcattgttttactcaattaaactaaattgaagtgttccataatgtacctcatgatattttaattaccttgctttcttcaacctgttctcttactatgcacaactttattctataaaaaygagaaaaattggaaattcagaatctcagaatcttgaacaaattaaagt

SEQ ID NO: 386634 - DNA, 588 bp, Homo sapiens
aatccaaacagttttcaaacgcaatgccattkgcaatacatgctagaaaatctctatccaaagttagcaaaatgaaaatccattcatattaaaaaaaccctcagttgtctcaaaaatgttagattttcagagaatgaaacttctcatagaatcataatcctttttttgaaagctctattactctgtgataattgaacaagcatttcaccaattaaaagacagatttgtttttgtccaaaatgcagatgactataaactttcatttgcttgctcaattgaatttcttcaatgaagccatttaggacaatgcatgatggagcatattatattcgcaaaagttcctgccaaaataataagagtcatagaagttaacattcaataacttttgcatatatatatatacacacacacacagagtagtagaatagaaacctactaaaatccatagcatttattctaaaataaataattcagtaaaataatgggtaacatatgacaaattatacagagaaattaaaaaaaaaaaaggatatccattgcatggaatgtttaggagccagcccacctcgggaggaatcccagttctgt

SEQ ID NO: 386635 - DNA, 550 bp, Homo sapiens
gacctaacatttttgaaagccattttagacactgttcrgtgtatgaagaaaataaaagggttgaagggttactgtcatagaaaaatagctgcagtaaggctgggcacagtggctcatgcccataatcctagcactttgggaggccgaggtgggtggatcgcctgaggtcaagagtttgagaccagcctaggcaacatggtgaaacctcatctctactaaaaatactcaaattagccaggcgtggtggtgggcacctgtaatcccaactacctgggagggtgaggcaggagaattgcttgaaaccagaggcggaggtttcagtgagccaacattcagccactgcactccagcctgggcaacagagcaaaaactccatctcaaaaaaaaaaaaaaaaaaagagagaaaagaaaaatagctgcagtaaggtcatttaatagaggcttcaggaaaggtctctgaggaaagaaccacttgagtttagctctcagagaagagagaccagtgaaataatattataggcagaacaaagagtaagtagaaaggtcttac

SEQ ID NO: 386636 - DNA, 561 bp, Homo sapiens
ttaatacaaccaaccaagaaaaaagaagatgcatctatattttcttcttctattcttctaatgtctgtgtagaaatctttactagctgtaaataaagsgtgacaaaagtcatatggtcattctgaaattaaatacgagaaattcaaaaatgactattaagtgtcgatcgtctgaattgcaaaagttatgttttcactttcatttttagtaaatttaaacttcaaaaatgcaagtaattctaatgaagggatttgaggaaaaattgaacgtcatcccacatcctgggcagcatgtaagccttgcagcattaggctctgtgacctaagcttgcacaagaacctgattctggcaactgagcaaacatttgcccttctcagattttaagtcttttctctgaatatcttttaaccacgctgtttctgatgtttttgccaagcatccacctgcctttcaaatgtcctaacaaatactagggttgcatccaagtctcatgaagcatcctattactgaaatgtttgtagggcataaaaggaatgctggcagtgtgtacagtaataaatg

SEQ ID NO: 386637 - DNA, 561 bp, Homo sapiens
ttaatacaaccaaccaagaaaaaagaagatgcatctatattttcttcttctattcttctaatgtctgtgtagaaatctttactagctgtaaataaagggtgacaaaagtcatatggtcattctgaaattaaatacgagaaattcaaaaatgactattaagygtcgatcgtctgaattgcaaaagttatgttttcactttcatttttagtaaatttaaacttcaaaaatgcaagtaattctaatgaagggatttgaggaaaaattgaacgtcatcccacatcctgggcagcatgtaagccttgcagcattaggctctgtgacctaagcttgcacaagaacctgattctggcaactgagcaaacatttgcccttctcagattttaagtcttttctctgaatatcttttaaccacgctgtttctgatgtttttgccaagcatccacctgcctttcaaatgtcctaacaaatactagggttgcatccaagtctcatgaagcatcctattactgaaatgtttgtagggcataaaaggaatgctggcagtgtgtacagtaataaatg

SEQ ID NO: 386638 - DNA, 515 bp, Homo sapiens
acttctatgcaccctgtaggggaagcaaaattttatctctgtcctcttagtgtscaagctgactctgagaattaagatgacatcagatagattaataggagaaaagcacatacatttaagatgagttttatgtgacacaagagccctcataaagagggttcttgagacccaaataaatgacagaatctacatgcttttgagttaggttaaactaaaggaggcaattgaggaaatgtaagttatatgtggaagcttaaagaagaagaattattctaagaaagtctgtgcagaatcctctcagttctgactctccatcaaagaatgattcatttgtcttgtagagggagggcatctttcacatgggagtttatctcctgttttcagggagaaaagggggagactcaaatgcccttcttacatctactgtttctcaagtgtctttaggtcaaggtgattcttgtaacaatgtaatataggttggggccacttattctgccatcctgcaaatttactcc

SEQ ID NO: 386639 - DNA, 515 bp, Homo sapiens
acttctatgcaccctgtaggggaagcaaaattttatctctgtcctcttagtgtgcaagctgactctgagaattaagatgacatcagatagattaataggagaaaagcacatacatttaagatgagttttatgtgacacaagagccctcataaagagggttcttgagacccaaataaatgacagaatctacatgcttttgagttaggttaaactaaaggaggcaattgaggaaatgtaagttatatgtggaagcttaaagaagaagaattattctaagaaagtctgtgcagaatcctctcagttctgactctccatcaaagaatgattcatttgtcttgtagagggagggcatctttcacatgggagtttatctcctgttttcagggagaaaagggggagactcaaatgcccttcttacatctactgtttctcaagtgtctttaggtcaaggtgattcttgtaacaatgtaatataggttggggccacwtattctgccatcctgcaaatttactcc

SEQ ID NO: 386640 - DNA, 554 bp, Homo sapiens
tataaattacccagtctcaggtatttatttttagcaatgcaagaacagaacaatacagtagtccataaataatgcataataccgaaacaaacatttctctctttagaatgtacaacatatatttattgtttcagaaaggtccattttagaggtatgtaattcacatattaaatacagaggaaaatattatataatagaagctctatacattaaaatcacattttaaatggcttatttattgaccwctgtatacactttacagagtgtatacactttaccattgtatatatagattcctcaatttatatgagaaaatatgttaaattaccaaaaaatatacactgagctcctactgtttggcagctgcttgcccaggtgctggaaaaaatgtgatgagcaaaaacaatggacagaaagagagggacagaaacacaactctgatttcccgtcttgccttaaacacctggaactcccaacaaaatatgtaaaatatcatcttttcagggaaaatggaaacaaataacactgatatcaaagataaaaacaagcaagat

SEQ ID NO: 386641 - DNA, 554 bp, Homo sapiens
tataaattacccagtctcaggtatttatttttagcaatgcaagaacagaacaatacagtagtccataaataatgcataataccgaaacaaacatttctctctttagaatgtacaacatatatttattgtttcagaaaggtccattttagaggtatgtaattcacatattaaatacagaggaaaatattatataatagaagctctatacattaaaatcacattttaaatggcttatttattgaccactgtatacactttacagagtgtatacactttaccattgtatatatagattcctcaatttatatgagaaaatatgttaaattaccaaaaaatatacactgagctcctactgtttggcagctgcttgcccaggtgctggaaaaaatgtsatgagcaaaaacaatggacagaaagagagggacagaaacacaactctgatttcccgtcttgccttaaacacctggaactcccaacaaaatatgtaaaatatcatcttttcagggaaaatggaaacaaataacactgatatcaaagataaaaacaagcaagat

SEQ ID NO: 386642 - DNA, 538 bp, Homo sapiens
ttttaaaaatgattgttcatttctaactaaatgaacgtctacatgtactcactcccttcataatgcaatttttacttggcatctgatggcttcttaaatgatgttttggcccagtttaataatttttctrtaaacaacagcttgttttttgagtattaaataagacaatcaagttctttagggaaagtggaaccaaatcatgtattgaaaagtcatggcaacgtatttatgtacagacacattttggttcgttacatcacatttcatacaacttacaggaatttcactaatatttttggcttctctgttactgactctggctaaaagagctttgggacattgtagtgagttggctcgtgctcttaaagctgctggagttttgctaactaattttctcagagtattcatactgtaaacatgttgtagcagattaaaaatacctataaaacacacaagcaaataagtgtaaaaattaaaatagctttaaaaagttcatctaaatgatgcatctcaaatctgaggctgaaatagtttcgac

SEQ ID NO: 386643 - DNA, 443 bp, Homo sapiens
ttttggtaaaacagtttaacaggaatcacatcatatataaaattgctgcaaagaagtctttcctttcaaaaaaaaatctacaatgcttcataaccctrttggtagcaggcccttgtcatttcaagaaacaatgcagccttcactgaaacacatgtgtggaggagggaggtctgttatctgtgcaggtcgtaattcctggtcctctgtttaaacatgcagtggcatttcctatgtaattaaatttctaaatgtacaagcaaactttgtctacatattggcatgtataataaattattaattagaattgtcaaaaaccattaatttgaaatctgtagagcaagtcttcagcctcttgactgtaccatgagattcatttagaaattatttaaacacattaattaaaactaagtttaaatattctaaaattaatactgataaagaag

SEQ ID NO: 386644 - DNA, 539 bp, Homo sapiens
cggccaggttttcagcttctggagatcatggctattattaagtagaagcaggggtactggggtgcaatagagatttcaggtttagacatgttgcaggggctgaaattgtggacacaaggatctagactacatcagggaagaaggttggaatagtgacctatattttaatgcatggttttgaatatgataaatatgtaatgattgcaaaaagaatatcaaattctgattgtccaggaagggagaaagatcagctaaagagagtaagatgatactgccacatggcttcatcagcagcacaagggataaackaacaaaccatcattaacattttcaaactgggtccctgaattgtacttgagcctttgcaactcacctcacaaaatattcagtaataatattaaatataggactatttacaggatcacaccaaaaccaagccaagccaaataaacaaaaaaattctctactttgggcccaaaatggtattttgaagatttgtacattttacattatttcagtggccataaatgtaattatga

SEQ ID NO: 386645 - DNA, 554 bp, Homo sapiens
cacaaagaataaggttagaaaaacaaagtttaatgaattaagcaatggtgaattcttactttcaaaggaagattttagaatrcaaaagcagttgagaatgagacaaattcgtgccacaaatatttctaagtaaattgtgagtgttgtctcttttttttttttttttaaagtccatggacttctaaagaggttattttgggcccgtgttgtgtgtataggatactacaggaagcatttttagaaaaagggttatgcctattacggtctgaaataattcgtatatcttaagtatgtagtttatcctccttgtttgactagttccacaatttcaaaagtcactcttgactcttactgatggcttcccactccttgcctcctgtgtgggcttgctagggtcccagcaacccagccaggaggtctcaggctgagtttgaaaaagctgctgagggtattaggcacctcaagatcaagctaaaggatgatgagatgctgttgatctaagaacattgcaaccaagtggcgtgggcgacataaatacagaaatacagcaaggc

SEQ ID NO: 386646 - DNA, 384 bp, Homo sapiens
ctacattacacaatatcatttacacaaattaaacatgcacacgcacacacacacacacacawaccaacaatatacagttttcaaagatgcatgcatatctaagggcacaaattaattaaattcactggcacatttactagcaaaagtgatgaggagggggccaagaaatgatgattaacatataataaaacaagacaaaggcattgctagatcaataaagaacatagttaatgagctgagggtcataagtacttcaaatctgtgcaaccaagataaaaaaataaaaataaaagctaaaaccttccaaattgcttctacaattaccatatcagtgaaattttataagatattggtcacctgaattgtttcaccctacatatccag

SEQ ID NO: 386647 - DNA, 384 bp, Homo sapiens
ctacattacacaatatcatttacacaaattaaacatgcacacgcacacacacacacacacaaaccaacaatatacagttttcaaagatgcatgcatatctaagggcacaaattaattaaattcactggcacatttactagcaaaagtgatgaggagggggccaagaaatgatgattaacatataataaaacaagacaaaggcattgctagaycaataaagaacatagttaatgagctgagggtcataagtacttcaaatctgtgcaaccaagataaaaaaataaaaataaaagctaaaaccttccaaattgcttctacaattaccatatcagtgaaattttataagatattggtcacctgaattgtttcaccctacatatccag

SEQ ID NO: 386648 - DNA, 483 bp, Homo sapiens
gtacatatgacacattttgtaaagattacatattttaatttttgttcatttctgggtcaatctgttattaaattctacttcccaccaaatctctaagaccatttctttttctaaaatggttactcaatctgagtaccactttttctacaattttcctttccatgggatggtctccttaagctccccactcaaaacacctagcagatctctgacctattatcatgttaataaccttacatatctatcacaagactcttccagtcgrtaccattaatgtgaaatatgacactaatggagtattaaaggaaaccaggagttaaaaggaatctcaatcctaaccgtgattcaagtacaacttgttgagctttctctttagaaataatattgcttctgaagttagccttaatgctggaaaaaacactctattctttgattatttaagtgataacaggatctaggtccttttttattgccttctcactc

SEQ ID NO: 386649 - DNA, 520 bp, Homo sapiens
tgtagtgggtatttaccttaatttaaaaaaaattaactgctaaacaattacataaaatattgataacgttagttttctcttgtttaacatggtatgggaatgggtattctgattcatcaaatgtttgattaataattgcttgttatctatgtagtggagtctcaacttcaaagtagtaagacaatgataagtaaacagtttattcaaataagtatgaagcatagaatacacaaagactgagtgcaggagtatcaatttcatgaatccccraaaagacggtagcacataaaattttgattttgatgctttctcaggaggaaaattggtgcctagcacattacttgacccaaattattttgtgatggtcaatattaggtgtcaacttgattggattaaaggatgcctccatagctggtaaagtattgttctggggtgtgtctgtaagggaattgacagaggagattaatatttgagtcagtggactaggagaagaagacccactctcgatgtgggtgggcac

SEQ ID NO: 386650 - DNA, 525 bp, Homo sapiens
tctcctggaaaaagataaaagtttattccaaatcaaatatctgagtatattaaagagcttacctttttaaccaagacagttggaatccttcaacttgctaattccagggaaggatcctcaagtgacttaacagtgaccttgactgtgctacaccaggacgggtttaccagcaatcacagattcatctgtaggtaggggtgtgtgtgtgtttttcctttcctttccttttataaccaaagttttacttcacaggctaccaaaggaataagataatgctgcctatcttagtggggccctgtggatgkctcacaaacacatttggtaagttggcaaaataacgtactatgaatgtccactaatgatgtcccattgtttttaaatctccttctcagtgtggaactgcactaattaagagctgacataggcacaactcagtttcctgaggtgccacacagttcatattagtcaactctgtgctttctcagtcgtcctgggattgctggagtgcttatgccatatttcaga

SEQ ID NO: 386651 - DNA, 581 bp, Homo sapiens
cttccctgctttcattgaaaacgccaaatgtgcctatattattctaaaaagtacagctgatccttctgtttgggccaacaggtctataggccagaacacattccaaagcttttcccttgaggctgtctgcccaaagccagataacatcttctatccatagggcttggtctgccttggtggatgtcatttggagaaatgcatccatatcaaaatttaccctggaccccattccaacttcctttttttctggagaagtaactgaatttatttagaaataaaatcagtatctctgtggaaggcttgttggatggagaaatgagaatactggatccacgtagaggtgtagttcatttgtatacaatggacaagaaaaatactttaacttggaactactggctcagagaaagcttaatagtaacacttgcagaatgactgaaaaaagggaatctgayttccctggtttaaaaatgttcaatgagagattattgctgaagaaatacctttcagtcattcatttattcattccacatggcaattatgtaccagcagggtaaagtgaaaagaggcaatacaaaggtttt

SEQ ID NO: 386652 - DNA, 448 bp, Homo sapiens
ataaggttttgtagaataagatagtcaaaatcctttttttttactgtaatatgagagagagtaagaatgctaagcataacctgggcaagaatagatatgtaatctcttgtccatcttatgtgattataaacaatttattttttcccttcttactagggataaaaaagaaagtgtttactagataaatgggtgcatacatctgagtccatgttagcctgctcttatacacctaccatattcatcaaagcagctgtaataagaggtgctacttggttgagttttgggtagtctactttaattctctgrgatgcatctgatttttgatagggaataagcagtgaattaaatgcaaactaccacatttatcttctaggtctgccagagtttacaaatctctgatatttcttttgggatgtgatattgtttctaatttactatcttggttggg

SEQ ID NO: 386653 - DNA, 579 bp, Homo sapiens
tggtatttatacacaatggagtacgatttaaccataaaaagaatgagatcctgtcatttgcaacaacatggatggaactgaagttcattatggtgtgtgaaataagcaggcacagaaagacaaacatcacatgttctcatttatttctgggatctaaaaatcaaaacaattgaactcatggagatagagagtagaatgatggttaccagagtctgggaagggtagtggggaagtggggaaaggtagataaggttaatgggtacaaaaatgatagaaagaatgaataagacctagtatttgatagcacaacagggttaaaataattgttaaatagttaaaataattgtacrttcaaaaataactaaaagagtatacttagattatttttaacaaaaacagtaaatgcttgagggaacggataccccattttccacgctgtgattattatgcattacatgcctttaccaaaccatctcatgtacccaataaatatagatacctactatgtactcataaaaaattataataatgtcatctgattccattgtccttgatattacaacttccctgagtcattgc

SEQ ID NO: 386654 - DNA, 606 bp, Homo sapiens
caacctatttgtttaaacttgtctcatttgagccttctagcacatttaactcaagttgaaaatatcctaacagccaaagaaacattaatcaagagggctaatttatcttgtggacaagtctgaccctgctatttgatgtactaacaattctctataaggatagttgctacacaatatccattatggcagaaacctggctaccagaaccaatttgctcatttgaataagatttcagagcctgaaatcatctcgcctgacctatacttttttttaattacacagttgagacccagaaaagttatctgtagacttcagcctttgcaaaaaaatggaaggtgtgtattttctaagaaggtggttgggttagcaaacacacaccatagatacaaattgagttcttgctttttgtgctttccttctttctctttcttttctcttcctctatctccatctctctctccttgwgtccttctcctctcctttctttccatcatagcttgtaccttgtttcaaaaataactttttggcttatattttagtagaacagtatgaaaatggtatcaggacaacaaaatatataaatgcaaaacactacagtttgtgtca

SEQ ID NO: 386655 - DNA, 545 bp, Homo sapiens
gtgaaaattaagtacaatcatagatttgaattagaagtcaaactacacaattgcaaagaataaagggttaatagaaaaaggtgcccaatagttgactaaatcatatgaaaaatcattgatagatattattttgaagaaaacttctcccatcataactgaagccaacctctctgtatatcctcaggaagggtcagcctcgacaagattgagaagtccatgaggaaagatatattatctctttttgttttgttcttctctgttttattttaactttctctctttctccccaaggcatagaatacaataagatctaaataaatacatttcaacatcactscaataatactaatttcttagttattagagatttcaacctccaaatgaacaattctttcaaagtcttagcctctcattttcttgacctcttctcgtccagcattcttgcattttcctcagttcaaacactcattccattgttatttccaatgactgctcatctgcaatatcccaatgtcaagtattccactgaatctcatctgaatctt

SEQ ID NO: 386656 - DNA, 583 bp, Homo sapiens
atggtgaaaatagcaaggaatgcacctcgacttgaaggcagcctgctgagccattatgcacagcatcccactcattctgaagatcatcgatcttaaaccagcccatgctagagatctgcaggtgatgatgacggaaaactccaggctcaatagtgacttcagggatgaggagctkgcaagcctttgagtaaaggaacttctgggtgtgaaggattatgtgtcctataatggatatgacttagaacatgaaacaacagaatattcaacacacttgaagaaaaacccccaagagctttctgtataaaaaaaaaattaacagggaaagagtgatcttaaaagggataagagtgaaaccaacttgttagtttctcccagaatcaatgttcactatgatttagcattttttaaaagtttaaagtatatattaaatatactgaataaatgaatacatgagggtcttcactttctgtttgtcatgcattaaacatttttcttgaatataaaaaaggaaaggaagggaggaaatgaatcctagcgagaaaaaggaaggaaaacggtgaaaatttcattctactaaattagc

SEQ ID NO: 386657 - DNA, 560 bp, Homo sapiens
accaaattcacatatttatgctggtctctgaaattttagagaacattgtctacattgtggatctggtaaagattttatatcactccactgaaattttttaatgtaaagtcatcaactaccattttattgacaatttcagtagatgctttttaaccttctgctgtatttgtcattactgtctttttcttactgaagtactccattcttttgatttttgagacatcatagtatcataatcacttttcctcagtcttcttaaatattttgtttcccctcaaagttccattcttcactctgtccctgagaaatctacaccttctccctatgtaatctcaccttctgcatgccttgtcatccatgtgttgctatttcactgtatttggctaaattgtttctcccaaaaagatatgtctaagyacctgagcacctgagaatatgactttatttgtaatagggacagggggcagagaaattcaaggcagaaaagggcaggtgcctggcaaaaccccaccctcaagccaaaaagcctgaaactgtggctcaaagtgagaacttctatc

SEQ ID NO: 386658 - DNA, 670 bp, Homo sapiens
  misc_feature (1)...(670): n = A,T,C or G
cagccacaagaaagaaggaaattctaatattggcagcaacatggatatgtctggaggacacggtgttaaattaaataagccaggcacaaaaaartaattatcacatgttctaagtcatatgtggaagctaataaagttgatctcatagaagtagagagtaaaatagtagttaccagaggctggacaaggtaaaggaaagaggggataaagaaaggccgattaaaagttacaaaaccggccggccacggtggctcactcctgtaatcccagcactttgggaggccaaggtgggcggatcacgtggtcaggaaatcgagacaattgtggccaacatggtgaaacnccgtctctattaaaaatacaaaaattagctgggtgtcatggcacatgcctgtaatcccagctattaggaaggctgaggcaggaaaatcgtttgaaccagggagtgggaggttgcagtgagccgacatcacgccaccacaccccagcctggtgacagagtgagactccatctcaaagaaaaaaaaaggatacaaaactacagctagataggagaaataatttccagcattctatagcactgaagcttgactatagttaacaataatttattgtatattttcaaatatctgaaagagaggattttgagtgttcccaacacaaagaaatg

SEQ ID NO: 386659 - DNA, 670 bp, Homo sapiens
  misc_feature (1)...(670): n = A,T,C or G
cagccacaagaaagaaggaaattctaatattggcagcaacatggatatgtctggaggacacggtgttaaattaaataagccaggcacaaaaaagtaattatcacatgttctaagtcatatgtggaagctaataaagttgatctcatagaagtagagagtaaaatagtagttaccagaggctggacaaggtaaaggaaagaggggataaagaaaggccgattaaaagttacaaaaccggccggccacggtggctcactcctgtaatcccagcactttgggaggccaaggtgggcggatcacgtggtcaggaaatcgagacaattgtggccaacatggtgaaacnccgtctctattaaaaatacaaaaattagctgggtgtcatggcacatgcctgtaatcccagctattaggaaggctgaggcaggaaaatcgtttgaaccagggagtgggaggttgcagtgagccgacatcacgccaccacaccccagcctggtgacagagtgagactccatctcaaagaaaaaaaaargatacaaaactacagctagataggagaaataatttccagcattctatagcactgaagcttgactatagttaacaataatttattgtatattttcaaatatctgaaagagaggattttgagtgttcccaacacaaagaaatg

SEQ ID NO: 386660 - DNA, 559 bp, Homo sapiens
atataataaaggccatatatgacaaacccacagctaacaccttcctaaacagggaaagactgagagcttttcctctaataactgtaaaaagacaaggatgcctacttttagcgtgtgtattcaacatagtaccrgacatactactcagagcaagtagacaaaagaaagaaataaagtgcatccaacgcatccaaattggaaaaaaagaagtcaattttgcttggtttacagatgacatgctcctacatatagaaaaactaaagaccaccgaaaacctcttagaactgataaaataattcagtaaagttggaggataaaaaatcaatataaaagatcagcaacatttctttacatgaataataaactacctgaaaaagaaatctagaaggcaatcacatttataatagctgcaataaaatctaaaaataaatttaacaaagaaggtaaagatctttgcaataaaaattacaaaacattgatgaaagaaattgaaggggatacaaatgtaaaaacatcccatgctcatggattagaataattaatattgttaaaatgccat

SEQ ID NO: 386661 - DNA, 559 bp, Homo sapiens
atataataaaggccatatatgacaaacccacagctaacaccttcctaaacagggaaagactgagagcttttcctctaataactgtaaaaagacaaggatgcctacttttagcgtgtgtattcaacatagtaccggacatactactcagagcaagtagacaaaagaaagaaataaagtgcatccaacgcatccaaattggaaaaaaagaagtcaattttgcttggtttacagatgacatgctcctacatatagaaaaactaaagaccaccgaaaacctcttagaactgataaaataattcagtaaagttggaggataaaaaatcaatataaaagatcagcaacatytctttacatgaataataaactacctgaaaaagaaatctagaaggcaatcacatttataatagctgcaataaaatctaaaaataaatttaacaaagaaggtaaagatctttgcaataaaaattacaaaacattgatgaaagaaattgaaggggatacaaatgtaaaaacatcccatgctcatggattagaataattaatattgttaaaatgccat

SEQ ID NO: 386662 - DNA, 592 bp, Homo sapiens
caaatcaattgaactttcttgagggctcattatggtcaacgtacttatttgacaaagtggtggcagggcctgtatctatgttgtctcggtctgtgtcccagcatctaacaagcagcctgatacatagccaactgtcagcaaaaatttgataagtgaatggaaaaagacattgcattgaatactgtattgggaaggaaccatgtagttcaatgcacacaaacaggagtaaaatatagtccttatatacaaagagtttataatctcrtatgggtgacagatgcagtcacagtttaccatcactcaggcagactatacacagaggaggatggctcattttattttgggggtgatcagggaagatttcaacaaaaactaaataagtgagctgtgaaaggtgagttgaatgtgtcaggctgagaatggcaaatggagaaaaaattgagaggagcaaaagtttgaagcacgagggcctgttggggtttagggggtgcaataaatgatcccctcatcccctctcctgaatttcagagtcagttgagaagtagagcagggatctctcagacaccaacatgttcagctttattatagataa

SEQ ID NO: 386663 - DNA, 550 bp, Homo sapiens
gtaccaattcccacatggtggtagagaatgtatacacacacactgagttgcattacagaagaaggactctgagcttaggaaacctcagtcctttataaagggctgtaagcctgcctggccatgtgtcagtgagagatactgtctttattatactggacaataaataaatctaccttttgctctgcagggataccctatctctgtcttcaaaggtgattcgctatgcaactatcctttaaaagaatcctggaacaactactttcagtgtccgttctcaaaagatgtatagcaaagtgagagatccatgaactgccttcygacaatgacaaatttcagtactggttaaggcaaaaggcaaaatggaatgtagtagaagaaaatttaacaattctgactttgggaacagtttcagaatcaagggcaactatgtatattttttaaatcctcactttgttttatatatatatacacttctatatattaactgtttgtctttctcccccttctctactgttttatatgatatgtgttggttggaattaacattatc

SEQ ID NO: 386664 - DNA, 592 bp, Homo sapiens
tgcaaaacataacagttgttggttagtttgtgtttggcaaaaatagcatttttccttggccatctctgagtgtaaaatatacaaaggaaaaattaatgtggttctttcgcactttgtacctaaacatgtgcgatacacactgagacatttaggaacattttttcaaaggtgtcttttaactcatttaaagataggaactctaagaattaatgatattatgtgagaccataatgagactaaaaatattcatttagtaccatatcctggcactagcaatatgagcaagagatattttatgggtgagcatggtaagttgccctacatatcagcctcaaaaggctcacttattgtctcagcctgaatgattcgtataactatctattgtgtaaagcagcacttgctattatttgtcctaaagtgacctctttcaagctttaagatttgcaaacatcagtattctaaaatttggtgtgctcatttgtatgyaaattacatgtatttggtgtgccagtttgtatccaatttggagtgtattcagcaagtatatagactgcaatcatatttcctccaagtcatcactattttatcagtc

SEQ ID NO: 386665 - DNA, 559 bp, Homo sapiens
gtctacttatggcccacaaaaatagcaatgtaaccaaaactacatcaatggggctgaccttttataaaggaaagactccttacaaaatggaaaacattcatttgatgaaataggcaaacctaatggaattttgtatttaaatcaaagtcataggaytacgaaagtaacattggattaatgaaaactactgtgaccttctctcaaaataagtccacacttcagagaagcaattaaaagagcttacaaaatgtagactacatagccaatgccacagaatgcaagtctgaagaatttacagggtaataataaaaatgtctaagttgctgcacttgaaaaggcaaaaagacaatcaatgggttaatcactagactgcaaagtataaaatatttgctgaaatgaaaactaattgaatccataaagctttggtaaaggcaatcctcataggaactaacaaagtacaggacctcatgtagaatctaaattctgtcaggctcacttctcttcctttgtacaggaagctactcaccacaaaggatgccagggtggtaaggagaacaag

SEQ ID NO: 386666 - DNA, 610 bp, Homo sapiens
aatgataggtaggtctgagtgcacctgaaacaaatattttctaaattgtgctgactctctggcaagatctcactgacttcatgtcatggctgttacttacatttgaagtcatgctttcaaaccgtgatgtgtagtaatataatctccctgactaggcctttactgtgacaatrtacatatttaatttagtttactaagaaagacagattgattaagctgattaactccacatatatattaattttattaatgcttatcaacatgacccacaatatgtcttttaaagaaatccctgtatagcagtgtggaagcaagttgtgctactctaaaaggtaatcgatgttgtcttttttatattgctgattacatttatgaaatttaaatatgcaaacaataaaaagtggcactagaaataattgtactttctattacctttcaatctactaaattttgtaagttttggtgaagccaaagcattaagaaactttgtggcatgtgttatggatacagcaatcttaacaataacatacttccatacagactatcttatcatgcctctttgtgtcagaatcttgctctacttcaccacattccattccatttccatata

SEQ ID NO: 386667 - DNA, 581 bp, Homo sapiens
taattttattcttttaaaaaatgtatattaggtaacatgaactgttgtgacatttcttaaatttcattttaatggaatgacctgaataacatagtaatgggtaaaatttcagccacatccttgagtatgtatgcagaatgcccgtgttcctttctgagaatgataggtaggtctgagtgcacctgaaacaaatattttctaaattgtgctgactctctggcaagatctcactgacttcatgtcatggctgttacttacatttgaagtcatgctttcaaaccgtgatgtgtagtaatataatctccctgactaggcctttactgtgacaatatacatatttaatttagtttactaagaragacagattgattaagctgattaactccacatatatattaattttattaatgcttatcaacatgacccacaatatgtcttttaaagaaatccctgtatagcagtgtggaagcaagttgtgctactctaaaaggtaatcgatgttgtcttttttatattgctgattacatttatgaaatttaaatatgcaaacaataaaaagtggcactagaaataattgtact

SEQ ID NO: 386668 - DNA, 358 bp, Homo sapiens
tggcctgaagttttcttgtttcttgtgtctccaccagkttttggtatcaagatgaagctgacctcatagaatgagttgaagagtagtccctcctcctcactttcttggaacagtttctgtaggaatggaaccagctcttctttgtacatctggtagaatttggctgtgactccatcaggtcctgggctttttttttggttggtaggctatttattactgattcaattttggagcccatcattggtctgttaagggaatcaatttcttcctggctcagtcttgggagggtgtgtgtgtccaggaatttatcagtctcttctagattttctagtttgtgtgcatagaggtgtttttagta

SEQ ID NO: 386669 - DNA, 564 bp, Homo sapiens
tacttgggtagtggcttagaaatcccctgagtgctcctcttttaaaatttataatcaaagtgctctttgataattttcctttttgtcctctctcagtgcttattaccttcctgaattttctgttaatcattcctttgtggttctttactgttttaacaggtatatttctatccctaaactaaatagtgtttattttgcctctttttgaattttatacatagtgtggttcttctctttgactcaaaattatgatcttaatttatctttattgttcttattcttacatattgatgtatggctgttgacattwcaccatatactattgtattatacaccatttgaatatattgcaatttacatatctactgtatcatttttttctattttttttttaccatgagcaatgatgctgtgagatttcttgttgatgtcttcagtcatagatgctcaagagtttctctttgccacttaagaggggaattactgaattataggtgatgtgcatgtttaactttcccaagaatgcctaagtactatacaaacggttgcatcagttgacactta

SEQ ID NO: 386670 - DNA, 600 bp, Homo sapiens
catgcataactgttgggactggggttcaaagaagctagaaaacttgtctagggtcacatggttagaaggggctcgactccatcagtactcttaattgcttaataatacctacctcaaagattatgaggtttaaagtgttatcaatgtaggaaaaaaatcaccattttttagttctttacaataaacaagagctcaatggttaggcagttaattggtgtctcatttgtaaaccttggctttttgagtagytttcttttgacattctctaatagcatatgagagagttcatgagtcaatatttataaactgataatcttgttgtgataagttttgatatagattaatcaaattcattttttttgataatctaatatgtgcctagtgggtattcagatccatagatttcatgaaaaaactaatatttgttttacattaagaatataatatagacaagattacatatgtgagcaggaaaaaggaaaaagataatttttgctgagtatcttacattcattgaatgagacttgatataaatggcctgatgtatgtatgtgaaagaatagaggacttttaaagaaccaattctatgctttatgctga

SEQ ID NO: 386671 - DNA, 587 bp, Homo sapiens
gagagaaaaggggccgcagatattggattggaagatgtagcagttatcattaagggttaaaagaggaatcaggaaaaataataaacagacaaattcaggctgtgtttacatgaagacatcaatgaaaatttcagtcattaatttgtgatactgatgtattttgaagcacaactggtcacagcagtggcaaatgattccatgaataacataataagggagttgcagtcagggtggaaggtgctgatttctgcagatatataagaaaaaatggtataaaacttaaaaataatgttaaaaattattcagtggctttaaagagtcttaaagacagacttcccccaagaagttcatggacattaaagccaatatgggcagyaacacagtgcccagagaatttataaaaacaagagcaagggcattgccttccagaaacatatacattctttggtctgtaacttggttttctggaaatcagtcctagaaactcttcaacaaaagcatattttaactttaggccttggagctgcttttacttgcttccttgggcatccatagctggattttctcctagatatgtccatggactc

SEQ ID NO: 386672 - DNA, 599 bp, Homo sapiens
cacaattcattgcatcattttaactacatggatatcttaagtcctccaggtctacttcctgtccttaacagtgaactgtattatgacatcatgcagagcccatggtgccagcagtagccctgctggtaatgcttgcttatgattgccgaattgggggtcagcctgtcctgtgtttgtgttttatttattatcttctgcgtgtagctaggggatcaatgtgtgatcttactccattgtaraagaatataaactgatgctgtgtagtacaaaacttctcattcaggatattgtttttctggtatcaagctgaaatgtaaatgctttgttttatggagattaatttaaaaagtatttgtcagaagtattcaacagtgacctttagagttgaaaggaactcaagtatttcagagggataaagttgagtatgttattttctccttccacaattcagaaactgggtaaaataacacaaaatttacttgtccgccaagtcctgattttcacatgttagggttaacttatctcaaggtcttttttgaatgacatgcttgcagatgtttttcacatttttttcttcattcctttgcaagctcagcagc

SEQ ID NO: 386673 - DNA, 593 bp, Homo sapiens
attgcactctgcctgggtgacagagtgggactcaatctaaaaaaaaaaaaaaaaaaaaaaagcggaaggaaaacttaccacaatattgaaaaaaaatagtgcagaaaactcagtagatgattctaagaaaaaaatcactctagctagaaggcagacagaaccgcattaagaaaaagcctgtgagaattgtgtaacaggagttgcagaaagggagagggaataaaaaatatttgaagcaataatgtcccaagttttccaaatttatttaaaaatgtaaacatamacatccaagaggttttgtgttatgtactgaatgtgttctgtgtgaatgtgaatgtgaatgtactgaagccctaacccctaatgtgatggcatttggaggtggaggcctttgggagataattaggtttaggtgagttcatgagggtgggccccccatgatggggttagtgtccttataagaagagagagaccagagtgggcttgctttctctcatgtgcagcctctctttcattctctctctctgtctctctatcttcaaggtgaaaacacagcaataagttagctatccgcaaatgagggagagggccct

SEQ ID NO: 386674 - DNA, 602 bp, Homo sapiens
ttcacttcttcacttattcaactgttccacaactatttgagcctatgatatgtgccaagaactctgatagggctaaaacagaacgcaaaaccaagcatggtccctatcctcccaaagctgatagcctactggggctgagagaaactgaccaaagaatcacaccagcaaacacaaaaccacatcccaaataaatgttctaaaggagaggaacatagttctatggcagtggatagcaaaggcttgaggaggccgggtaagggtgtcaggagacagcctccctgagaaagtaaccaatgagctaatgagctgagactgaaggattaggatgagtttatcaggcaaaggcagtgcttgccaaagggctccatgcatacttagtgaagagttgggagggtggctaggcaggtgctcatagagataagatctttctgtgcttcccacctaggctcagccatagctgccctggctgtgrgtaatgaccttggagctgaatggtgtgcaaaggaaaaagatgaactctctgtccggtagtgccaggggtaactcagctcttctgccccatgacctgctctgcccatatctgacagcagaataacagcatt

SEQ ID NO: 386675 - DNA, 548 bp, Homo sapiens
taggctgaaggcaaggaggacaagtgcagtgaaaatcaaaggaagaggcaatatggggaygtggtatgcaccctgcagagaaaagcagaggatcatcctagcccagccttgccaccaacttgccaaggggacctgggccagcactggcccaccctggactcactttatcctttggtaatagaaggggctggaggggtttctgaggtctcttccagccctacatgcctttaaccaggagaacaacatgaaactcaaaactctgcatttagaatttaattgtccatggatacagtaaagtctacataggtatcttctctctggtttataatttttttttaagtaattaaatccttaattcaggagaaaagaattgggacaactgggtctaaagtgtgtagcttccgcatctttacatctgcctgtggtcctagtcgtggaatatttgccaaacagtaaccactttgttgagggcattttaccaggtaatgatgtttaaagtgcagcatagtggctttcaaatatgaatactaaaacatttaaaatatgca

SEQ ID NO: 386676 - DNA, 585 bp, Homo sapiens
tactttaatccttaccaaaaaataaaaaataatgacctgaagaaacctgatcttaaccaatcagttatttttctgttgttctatttccctgttcycaccttacaaggaaaataaccgaaatgaccaatctgctttttcttgtgtttctgctttctttagctcttttctgtttgtaaaaccaacctcctctgtttacctcactggaacacaggctattttatggaatgaagtgttgcccaattctagaattgcaaataaagccaaagaaaatcttttaaattaaattgcagtcattttatcttttgacaagtattttaaattattttgtggaaaagttgtgttctgcatcctggattcaaccaaacctgaggtcaaaaatattcaaaaaataaaaaacagcaatacaacaataaaacataatgcaaatgaataatattgtataacaattatttacagagcatttacattgtgttaggtattagaggtaatctagggggatttaaagtagatgggaggatgcatgtaggttatatgcaaatactagaccattttattacatacaagggacttgagaatccttggatt

SEQ ID NO: 386677 - DNA, 547 bp, Homo sapiens
ggagtgaagtagacagatccaagatttattttggatgtaggatccatggaacttggtaaggtgtkagcttatgggagttgaggagaagatagcagaaaggctgactcccagatttctggcatgactaactggaaggatgaagagacacccagctgagatttggggaggagcagatttggggaaaatatcaaacatgtaattttgggtaggccaagtttgagatggtgtctttgtctactttgtgttgctataaaggaatatctgaggctgggtgacttataaaggaaaggcttatagggctcatggttctgcaggctgcacaataagcatggtggcagcatctgctcagcttctggtgaggggctgcaggttgcctccactattggcagaaaggaagagggaaggagagcgagcatgggctgagatcacatggtgagagaggaagcaagagagagcagggaggtgctaggctctttttaccaaccagctttcatgggaactaacaaccagcataacagagtgaaaactcactcactttacctgcgcc

SEQ ID NO: 386678 - DNA, 547 bp, Homo sapiens
ggagtgaagtagacagatccaagatttattttggatgtaggatccatggaacttggtaaggtgtgagcttrtgggagttgaggagaagatagcagaaaggctgactcccagatttctggcatgactaactggaaggatgaagagacacccagctgagatttggggaggagcagatttggggaaaatatcaaacatgtaattttgggtaggccaagtttgagatggtgtctttgtctactttgtgttgctataaaggaatatctgaggctgggtgacttataaaggaaaggcttatagggctcatggttctgcaggctgcacaataagcatggtggcagcatctgctcagcttctggtgaggggctgcaggttgcctccactattggcagaaaggaagagggaaggagagcgagcatgggctgagatcacatggtgagagaggaagcaagagagagcagggaggtgctaggctctttttaccaaccagctttcatgggaactaacaaccagcataacagagtgaaaactcactcactttacctgcgcc

SEQ ID NO: 386679 - DNA, 547 bp, Homo sapiens
ggagtgaagtagacagatccaagatttattttggatgtaggatccatggaacttggtaaggtgtgagcttatgggagttgaggagaagatagcagaaaggctgactcccagatttctggcatgactaactggaaggatgaagagacacccagctgagatttggggaggagcagatttggggaaaatatcaaacatgtaattttgggtaggccaagtttgagatggtgtctttgtctactttgtgttgctataaaggaatatctgaggctgggtgayttataaaggaaaggcttatagggctcatggttctgcaggctgcacaataagcatggtggcagcatctgctcagcttctggtgaggggctgcaggttgcctccactattggcagaaaggaagagggaaggagagcgagcatgggctgagatcacatggtgagagaggaagcaagagagagcagggaggtgctaggctctttttaccaaccagctttcatgggaactaacaaccagcataacagagtgaaaactcactcactttacctgcgcc

SEQ ID NO: 386680 - DNA, 561 bp, Homo sapiens
acaattgcccttcttcaagggtttttttcctcctatcaattttcttttttgtttttgaaacagagtcttgctctgttgcccaagctggtgcgatctcggcttactgcaacttctgcttcctgggttcaagtgattcttgtgcctcagcctcccaaatagttgggattacaggcacccaccaccacacctggctaatttttgtatttttagtagagatagggtttcaccatattggcccggctggtcttgaactcctgacctcaagtgatccacctgcttaggactcccaaagtggggaattacaggtgtgagccactgcacctggcctctcccaccaactttcaatgaccagactccttgctgtccaaagccccgcgcatgacatgcactgctcttggtcacctcctggggaaggaagggcctggactgcagtgccttataggccgaggtctggcrctgctctgtcacctgccagctgtgtcactccacctctctgatcctccttccttccatggtaaaagagcctcactggtggttcctaatagcccaaaaatactatga

SEQ ID NO: 386681 - DNA, 635 bp, Homo sapiens
ttggtggatgcgtgcaccatactttaagtctcagcaaaaaaagataaagggttaactaagtcagcaagttttgatttttttttcaaacaaatatgttgtaatggtggtttcaggttataaatgtgtaaattcacagcttaatcaagttactgcatctcagttcacacattactcttttatatttcaaatagttcctataatttttcctgaggccaaaatttacagaatatttaacccaacataagccaatcctttaactattttgcacccttccatgtgtggtttccatttctgtttccttctkagaattgggagtccattgtggacatggggttctattctgagcctgagcagtatagtacatcttatgcctcatccgtcacttgtaaagagatgatgctccattgctgttgtgcctgcagcactcattcttcaagtgcttattgtaagttgaagtgcagcgtagtgtgagagccaagcctgtggacaaacctgcctgcaaggggaagcaggactttctagaagcaagcagatggataaaaaggccttggagtgaagaccagcctgcaaaaaaatgcaggtattgggcaacaggacttctggccttgctaatcatttcttttatccagatagca

SEQ ID NO: 386682 - DNA, 517 bp, Homo sapiens
atacaaatattccagactgagaacatctccttttaaagcattgtactcttacccttaataaggtgaaacatttaaayggtgtttaaactagtaaaaataatttcttacatctataatccctttaataattaaacaaattttcagttattgtcccttgtaattctcaaaactggggtaatagcctcattttaaaggaaagaaaactgaggcttcaaccaatagtcagtttcctgtctctgctcttgtcttgcccccagggtgagggagaagcagccttgcccacctttctgggatttgaagagtcttcatttagcaggtactcacagagcacatgctgcatgctagggacagagtaagacagacacagttttcaagtgtgcctggttgaccttttcccaatgggtccaattaagaaatatacgttgccttaaaagtctcactctaaggctgggcgcagtggctcacgcctgtaatcccagcactttgagagaccgaggcgggcggatcacgaggtcag

SEQ ID NO: 386683 - DNA, 517 bp, Homo sapiens
atacaaatattccagactgagaacatctccttttaaagcattgtactcttacccttaataaggtgaaacatttaaatggtgtttaaactagtaaaaataatttcttacatctataatccctttaataattaaacaaattttcagttattgtcccttgtaattctcaaaactggggtaatagcctcattttaaaggaaagaaaactgaggcttcaaccaatagtcagtttcctgtctctgctcttgtcttgcccccagggtgagggagaagcagccttgcccacctttctgggatttgaagagtcttcatttagcaggtactcacagagcacatgctgcatgctagggacagagtaagacagacacagttttcaagtgtgcctggttgaccttttcccaatgggtccaattaagaaatatacrttgccttaaaagtctcactctaaggctgggcgcagtggctcacgcctgtaatcccagcactttgagagaccgaggcgggcggatcacgaggtcag

SEQ ID NO: 386684 - DNA, 563 bp, Homo sapiens
aattactgccatcatcttattatttcagtgcaagtttacatacaatgtttaggcatttggtattgtgttgaaaaaaatgtacctcaggattaatatttgtttcctggttgttggttaatctctcattcctaaaaaaattaataaaagataccaactgaaatcaggggcttttttgtcccttttagcatccatagtgacaatcttcttccttctaaaatgtttaaaaattgtaagtattgaagcgcaactttttagcattgtcataaatgtattaattttggttgttactacaaatcagatatcatgtcaatcttactgagggtaaaatagctgaaaacacaagtatggactcagtatttaaatttctttcttggtcacattaagttaaagagatccagccccttaaatgtgaacatcagtggaaagaaaygatccatcttggaattctgaagacattactaaagctaaaatcatataatttttttttaaaagaaaggagttcctttttggttggaggctgcctctgtttgatttatttatgctaaaataaaagaaaaaaaatg

SEQ ID NO: 386685 - DNA, 588 bp, Homo sapiens
agaaaacttttttttcctaaatcaccattggatctactgaagagcataaatctcttaaaagacattggaagggaaraagggatggagtccagcttgcagggtaggaggattagcttgaccatgaagaggatggcagaagcaattaatggaaggtgacctttagaaggaataaatgctccctgtctactctgccttaatcttattttaccttgagaatactgtttgttaataactaacaaacacggtggagaactctggacttcctggatatacgtgctcaaggatcatgtataggagcatgatctcaggaaggcttccagttttccttgctattccctgaaaatctgttgctacttcctcctatgcattgcggatatgccttaggaagtttccacactctggtcctgccatggctggtagatacagggaaaacaaaaaacaaacaacaacaacaaaaaaaaacccagtgagaatagtccaaattccacaggaaggatttcaataggatatggatgacaaagagggtggcttcatgggcatataacccttgcagtctcacagcaccctgtgctcagaagggaaccccgg

SEQ ID NO: 386686 - DNA, 588 bp, Homo sapiens
agaaaacttttttttcctaaatcaccattggatctactgaagagcataaatctcttaaaagacattggaagggaagaagggatggagtccagcttgcagggtaggrggattagcttgaccatgaagaggatggcagaagcaattaatggaaggtgacctttagaaggaataaatgctccctgtctactctgccttaatcttattttaccttgagaatactgtttgttaataactaacaaacacggtggagaactctggacttcctggatatacgtgctcaaggatcatgtataggagcatgatctcaggaaggcttccagttttccttgctattccctgaaaatctgttgctacttcctcctatgcattgcggatatgccttaggaagtttccacactctggtcctgccatggctggtagatacagggaaaacaaaaaacaaacaacaacaacaaaaaaaaacccagtgagaatagtccaaattccacaggaaggatttcaataggatatggatgacaaagagggtggcttcatgggcatataacccttgcagtctcacagcaccctgtgctcagaagggaaccccgg

SEQ ID NO: 386687 - DNA, 554 bp, Homo sapiens
caccggcatcaccacaaacatgtgaataaaataatgcattgtgctatgacattatracaggagttgctaggcaataagaatttttttagctccattataatcttacgaggctgaatatgtggtctatccctgactgaaacactgttatgtggcacatgaacttactatgttatgtgtattttaccacaatgaaaaaatgtgatgtgatatatcctttaaaaaaagaaggaattgttttgccagaaatatagctcaagagctcatcaattattgccacattgactaaagagtagcctccttgaagtcctacttagacatgactctcttcctaaatcccatgttattaatttaacgtaactcaatgtagcaaatatttattgtagacctactgtgtacaaggcattgtctgtgctcctagtgagtttaccaaagaactgtggggagagggaaataagagaagtattagcaaagatccatggaaaggagaggttatgtccagttcaagaaatctcatttgttttgagaagaggctggtcttgaatggcagagatttc

SEQ ID NO: 386688 - DNA, 554 bp, Homo sapiens
caccggcatcaccacaaacatgtgaataaaataatgcattgtgctatgacattataacaggagttgctaggcaataagaatttttttagctccattataatcttacgaggctgaatatgtggtctatccctgactgaaacactgttatgtggcacatgaacttactatgttatgtgtattttaccacaatgaaaaaatgtgatgtgatatatcctttaaaaaaagaaggaattgttttgccagaaatakagctcaagagctcatcaattattgccacattgactaaagagtagcctccttgaagtcctacttagacatgactctcttcctaaatcccatgttattaatttaacgtaactcaatgtagcaaatatttattgtagacctactgtgtacaaggcattgtctgtgctcctagtgagtttaccaaagaactgtggggagagggaaataagagaagtattagcaaagatccatggaaaggagaggttatgtccagttcaagaaatctcatttgttttgagaagaggctggtcttgaatggcagagatttc

SEQ ID NO: 386689 - DNA, 543 bp, Homo sapiens
tcccagttgtcctgatgccacatttctcccatcccaggtgcccctctctgtccttgtccatattgagcttagctctccactcctgacacgagttccctgacttcctctccacttccccggatgacggtgwgttacgatcttgtctcctaaggtgccccctccctcttggctcctctcccagtgacgacttcatggaggctgagaaatatagtgagtggcctttcttgcctcacttactgctcggtaagttagctcagggggagagctgttcataactttgcactgacatctggagaacaaaggttttggaagagcggagcccagattccctgtgagccagcagagccaagtcttttttgagtttccagcaaaacctgtgttttaataataggagtgggtcattgtgtttaatagtacaacaaaacctaagtgcacataataagcacatcttttctgtgtgctggggtgaggagaggtgacagtgagtgtgtaggatgatatgaaaagcattacagacatgggaaagcatcttagagcacccaa

SEQ ID NO: 386690 - DNA, 575 bp, Homo sapiens
acccctccgtgggtgttggcccagcggtgcccagagaatattcccttattggatctttctcgaattgacttgttcacttcctgttcagcgcagcctggtggtgactcggtaatccccacagtaagacctcacagtgggttgagtggcctgggagctcaagtcaggggcagaaatggggaagctggaaagttgggtgatcaagagtcatttggaagcccccatgtctgtgtcagtccactcacatctctgtccgccacccaccaccactttctccctgcctgaaagcactgggctgtgtttcagagaggtagctgggtcccacagatatttatggagggcttgtttctgtatctccttctagtgggctggacctccccaggccatttttytaggtaactaggaaggcctgactctgtcagcaacttggctttctttggaggaggtgtcactctgggattagttaaaaggggatcagtggtattcacattggctcgtgggtgtattttctcctcctcaaattataaccttttggagggcaggagtcatgttttattttttgtgccttcttggtgcct

SEQ ID NO: 386691 - DNA, 571 bp, Homo sapiens
agtcaggagtttttccaactatggtaggctagttcaaccttagaaaatcaataaatgtcttctacaacatgaacaagttaaaacaggaaaaccattatatcaattgttgctgaagaagtactttacaaaatccaactcctattcatgataaaaactcttagcaaaacagaggaaaaatttgtcagcttgatggagaatatcataaaagctttatggctaacaacacaggtaatgctgagaaactggacttttttacactaactggggaaaagcaaaggtatttcctctcaccattcccattcgacataatmttggaattcatagctgctgtgattatacaagaaagtaaaatgaaaggtgtacagattgggaaagaagaaataatgtatttgttttttgtttgctgatgacatcattgcgtatttagaaaatcatagacagttgaaaacaaacaagcaaaaacctgaaacaaataagaaagtatagcaaggcttcaggatacaaggttaacataccaaagtcaattggttgcttatatatcaatactaaacaatcagaaatcaaacttgaa

SEQ ID NO: 386692 - DNA, 588 bp, Homo sapiens
ggcccaggtattggtacttgttgtaattaggcactggagtgctttggaagcattttatacaaagtctctactcctggacacaaagtagttcaccccttatctttgatttcccttgccttggttttaattacttytgggcaaccttgatctgaaaatattaaatggaaaatttgagaaataaacaatacataagttttaaattgcacgtcgttttgagtaatgtgatgaaatctcctgctcaggatatgaaccatcactttgtccattgtatccaggctgtacatgctagttgcccatgaatcatttagcagccatattggtgatcagattgatatcacagtgcacactgcttgagttcaagtaaccctcatttttcttaataatggccccaaagtgtaagggtagtgatgctggctatttggatatgccaagaaaagcataaagagctacttttaagtgaaaaagtgaaagttctccacttaataataaaaggaaaaaaaatcatatgctaaagttgcaaaggtctaatgtaagaacaaatcttctatctatgaaattatgaataaggaaaagaaatttatgatagtt

SEQ ID NO: 386693 - DNA, 588 bp, Homo sapiens
ggcccaggtattggtacttgttgtaattaggcactggagtgctttggaagcattttatacaaagtctctactcctggacacaaagtagttcaccccttatctttgatttcccttgccttggttttaattacttctgggcaaccttgatctgaaaatattaaatggaaaatttgagaaataaacaatacataagttttaaattgcacgtcgttttgagtaatgtgatgaaatctcctgctcaggatatgaaccatcactttgtccattgtatccaggctgtacatgctagttgcccatgaatcatttagcagccatattggtgatcagattgatatcacagtgcacactgcttgagttcaagtaaccctcatttttcttaataatggccccaaagtgtaagggtagtgatgctggctatttggatatgccaagaaaagcataaagagctacttttawgtgaaaaagtgaaagttctccacttaataataaaaggaaaaaaaatcatatgctaaagttgcaaaggtctaatgtaagaacaaatcttctatctatgaaattatgaataaggaaaagaaatttatgatagtt

SEQ ID NO: 386694 - DNA, 565 bp, Homo sapiens
tgaccaatatggtaaaaccccatttctactaaaaatcmcccccaaaaattagcctggcatagtggcagcgcacctctaatcccagctacttgggaggctgaggcaggagaatcacatgaaccaggaggcggaggttgcagtgagacaagttcacgccactacactccaacctgggcaacagagctagaccctgtcccaataaataaataaataaaataagaactgaatatatgtgaggtctaataataaatccctttatactcttcaattaaaaattgaggtaaaatacataatacaatttactatcttaattattttaaaatgtatacctcagtggcacccagtacatttacatagttgtgcaccatcaccactgttcattcacagaaggctttttatcttgtaaaacagaaactctgcctattatacaatagtcacaattccactcttcacccaccccctagaaaccaccattctactttgtggtcctaagaatttggctacaccaggtacttcatatgagtgtattcatacagtattagttcttttgtggctggcttatttc

SEQ ID NO: 386695 - DNA, 626 bp, Homo sapiens
aggtaatgtagttggtgaaggagacatggaaaattaggatacttcttatgcaaattatttgtgccttcagggcatgtatgagcccartcttacattgaccactttgatttgatgacagagaactcctgttcatgtccaacattatggcttggtaagttcaacaatggttcatgacaggcaactcaagctgcatggtgatttagtgacccatggtcaagtgttaaatcttttccaaggctcaggagcaaaaagctgttttcaaaaggaaataattatgtgcaaaggatggaagagttttgctccaaaatcctggggttctgtgattaatctgtgggtatctgccataggctccaaacagtatctttattttcacacactgagaagaggtcatatgaggatacagcaagatggtagcttgctgtctgaaagccgggaacagcactctcaccagacatcaactctgttggctttttgatcttagactttgagtcttaagaatttgtagaaataaattttgttttttgcgccactcagtctatggttgtattacaatagcccaagctgactaatgagctagtatgtacaaattagaaacaagttgtctccaaattccaattcaaagagac

SEQ ID NO: 386696 - DNA, 450 bp, Homo sapiens
tcatcttttcttttctccacttctccagccagttaggagcaaccagccaattccattttactccttaatttgactaaaatgttctaaggtggcaactatatagaaaccagtagttctctttctgtaggtatttaattaggagtgtccaytgaaaatattttgcttatttttattaccagattatgccacggacaaccactgcccacttttacaccaaagataatggcataagtgtccttacatacagtcagatgggagaaccaattccagaaactcagaacattttccctaataacataacagtgcctcccctgcggacctcttaagaagtggctgttttccttttctttcccacctgcttaataccttttgtgcctggaagtgagatacattacattctttctcattattgttgcttccaggctgttctcctttttcccttagaatgac

SEQ ID NO: 386697 - DNA, 450 bp, Homo sapiens
tcatcttttcttttctccacttctccagccagttaggagcaaccagccaattccattttactccttaatttgactaaaatgttctaaggtggcaactatatagaaaccagtagttctctttctgtaggtatttaattaggagtgtccactgaaaatattttgcttatttttattaccagattatgccacggacaaccactgcccacttttacaccaaagataatggcataagtgtccttacatacagtcagatgggagaaccaattccagaaactcagaacattttccctaataacataacagtgcctcccctgcggacctcttaagaagtggctgttttccttttctttcccacctgcttaataccytttgtgcctggaagtgagatacattacattctttctcattattgttgcttccaggctgttctcctttttcccttagaatgac

SEQ ID NO: 386698 - DNA, 544 bp, Homo sapiens
agcgttggttataagtaataatacatctgcatttatttctctcatcatgttttgcccttactattgttcaatcttttctattttttttctttcctttttgtcttattttggattgattatttttgctcactttcttctttttcctactacctttaagttatacatttacttacaaaatttaatgtaaagttttcaattgagaaaacaatgactaggtctttttcaatttatatgcaattattgtagtgtattttatttcaatttttgattccatggaaccttattattaatattgttttaactgatatttcttttgatttggtagcatatttaacattttttaaaatttctttttgcatcttaaacttcctaactgggctaacttggctcatgcctaaagcmcatcctttagaatttctttttaatgaggatctatgaggcaaactctttcagtctgtttaaaaatactttttccagggcctacttgagggtggagggtgggtgaagggagaggattgaaaagctacctatcgggtactgtgct

SEQ ID NO: 386699 - DNA, 536 bp, Homo sapiens
gtaatctaaggcaggggtgcccagtccctgggcygtggaccagtacccatccatggcctgttaggaacgaggccacacagaaggaggtgagtggtgggcaagtagcattactgcctgaccgccgcctcctatcagatcagcagcagcattagattctcataagagtgcggaccctattgtgaactgcatatgtgaaggatctaagctgagagctccttatgagaatctaactaatgcctgatgatctgaggtggaacagttttatcccaagccatccctacgcccatcctgggccatggaaaaattgtcttccatgaaactggtccctgacgccaaaaagattggagaccactgatctgaagccacattctcctcctgaggtttatttgacaacatggtaatgtgaattggggttcaaactcacctgagagctggcttgtgatttggaattctcaggggacttttcatccctcaggcatccagtcattccacgttaaggcaggtggttttcctttcttgtcttctcatggtgactg

SEQ ID NO: 386700 - DNA, 536 bp, Homo sapiens
gtaatctaaggcaggggtgcccagtccctgggctgtggaccagtacccatccatggcctgttaggaacgaggccacacagaaggaggtgagtggtgggcaagtagcattactgcctgaccgccgcctcctatcagatcagcagcagcattagattctcataagagtgcggaccctattgtgaactgcatatgtgaaggatctaagytgagagctccttatgagaatctaactaatgcctgatgatctgaggtggaacagttttatcccaagccatccctacgcccatcctgggccatggaaaaattgtcttccatgaaactggtccctgacgccaaaaagattggagaccactgatctgaagccacattctcctcctgaggtttatttgacaacatggtaatgtgaattggggttcaaactcacctgagagctggcttgtgatttggaattctcaggggacttttcatccctcaggcatccagtcattccacgttaaggcaggtggttttcctttcttgtcttctcatggtgactg

SEQ ID NO: 386701 - DNA, 631 bp, Homo sapiens
ccctattgtgaactgcatatgtgaaggatctaagctgagagctccttatgagaatctaactaatgcctgatgatctgaggtggaacagttttatcccaagccatccctacgcccatcctgggccatggaaaaattgtcttccatgaaactggtccctgacgccaaaaagattggagaccactgatctgaagccacattctcctcctgaggtttatttgacaacatggtaatgtgaattggggttcaaactcacctgagagctggcttgtgatttggaattctcaggggacttttcatccctcaggcatccagtcattccacgttaaggcaggtggttttcctttcttgtcttctcatggtgaytgttgttgatgatggtgtgaggtgtgtgtgtgtgtgtgtgtgtgtccccctttttggtggtgatgatttctagaatgctacctttatgattttataagatcccccatctttatctggcctaggatttgtctcttgttccctgccaggagtgaaactttaaaaagcaaacctctaggtgatcagcttgacaagtgttttccggttgagaactgttgttagtgctctgatcactctggtttcttctcttttcttttctttttttttttga

SEQ ID NO: 386702 - DNA, 453 bp, Homo sapiens
atctcctgacctcatgatccgcctgccttggcctcccaaagtgctgggattgcaggcatgagccaccgcacccggcccactctggtttcttgtgttcacttgatttcagcctccaatgattgttttctttattgacagcttattaatgcatataacaattatcttaaagaaaccactcagcattttagttgttttagccagmaggtcagtcttggtatttaattcattacattcctggaaatgacatccccattagacttttaaaaagttttatttactatactggatttttctataacccaatttaaaattaaacttcagttgctagtagtacacattgagttggaatatatattctctgtgatgtatgtatctagctcttttataacttaagatctgagagtgttgcacaaattttacataatgacagcatttggtgtttaaaaacagtca

SEQ ID NO: 386703 - DNA, 453 bp, Homo sapiens
atctcctgacctcatgatccgcctgccttggcctcccaaagtgctgggattgcaggcatgagccaccgcacccggcccactctggtttcttgtgttcacttgatttcagcctccaatgattgttttctttattgacagcttattaatgcatataacaattatcttaaagaaaccactcagcattttagttgttttagccagaaggtcagtcttggtatttaattcattacattcctggaaatgacatcsccattagacttttaaaaagttttatttactatactggatttttctataacccaatttaaaattaaacttcagttgctagtagtacacattgagttggaatatatattctctgtgatgtatgtatctagctcttttataacttaagatctgagagtgttgcacaaattttacataatgacagcatttggtgtttaaaaacagtca

SEQ ID NO: 386704 - DNA, 480 bp, Homo sapiens
cttgggaggctgaggtgagaagagttctggagactggaagtctgaggctgcagtgagctatgatcatgtactgcactccagcctgggtgacagagtgagaccctgtcccaaaacaaacaaacaaacaaacaaacaaacaaacaaaaaacaagaagaagaaagaaaagaaatcatgactgtatccactttatcctaacaacaactgaaaacctgaacagaataaaaaatcagcaactcttcttggatccataagctagctgaggacacagggcaaatggctgcccccaagattggagagacagataggaaatacagggagttacagcttacgagagtaractcatgagcagagaccaccttgggaactggttttgtggtagggaaatatgaactgtaattgacaaatgttggagactcagtgtggacaagctaggagttaaaaaccgcaagcagacccagtcatcaggtgaccatgccccc

SEQ ID NO: 386705 - DNA, 574 bp, Homo sapiens
tgacacggtattgttcagagtaactcattgctgcctgttattgtcagcaatggttcctaagcctgacttttgatcgaagtcatatgaggagcttagatagatagatagatagatagatagatagatagatagatagataaatggacagacagatagatagacagatagatatatagatagatgcccagtcttagtctagaccttattgaattttgatggggtgggtctcagcctttaactstccaggagagaggtgagagcaggggtctgtgcagcaggaatgagcctgggatccctgtaaaggctgacagctggtcccacccagtgatgactcacagcaataaagagaagaccctggttcccaccatgaagtagccaatatgatgcccaaatgtgagatgaggagtctgaagaactgtttctagctattccacttagtgcctgtgcattcctatttagtcagttggaagatagctgccttttatataaggaatgtgttcttagaagccttgttcaatttaaaacacgcacaaataaagactattatcctaataggaataaatataaactgtgt

SEQ ID NO: 386706 - DNA, 612 bp, Homo sapiens
aactgagaggttgcaggaggaagggaaagagagggagatcaaggatgacaaaatctgggatttcagtttatcccttctctgaggacagaaacagctctcaagcaggaagagagaggctttagaaatacccagatcagtgagcctgggaaccttgattgtccacttttctgggcagaggaaggggaagtttctggtcccagagaattccagctcagcaccacacccaaaacagtgcaagtggatgacagttaaacccaaggcggggctgtagggtgcaggggcctgcatgtcgcaccctggagtcctgacagtttccccgagccacatgaagggcacacagccatactgagatgccttggcacacagagatctcagacggcttcaaacaagccttagtgtgaatcagtcatcaaaaccagaaaacactttccgggtcctcagactccaccgtggtctgcagtgcatcaccccaaaaggccagaggaggccagtcacacctcagagggcaacagtgcaggaagcggcccaacscagccgctttgttgcacagactggcatgtcaatacaggatacaaactgggcctcactgtctgctctgccatgagttttcct

SEQ ID NO: 386707 - DNA, 539 bp, Homo sapiens
tagtgagctacgtttaacacttcatttctatttctgggtgaagcaggatgatgagttcattgtctggtcaatgccaagggcaacttcccctgctttcctaggctcccatggcagaatagaggatatctgtgaaaaatccaaattttcctcctatgtgtgtgtcgggtaagggcagcccacagttatgactggggctccagtttcaaatgccgctgactcaagacckatctggttgagaaccaaacaaatgggcctttttatactgaagaggagatttttcttaccacgtgtcaacaaaagatctgtagacaatcttgttatacatttcacactgctgacttcataagtacaacagcactcacgacccctttacattttttggtgtatttgggtttatttctgtggttaccatgcactgagggaagtccacaaaagccagcctgttcagggctggagcacggtgccagtggaattttggtgaacttcacagcggtagaagggagtggactgggaggtgcagaagtagtgaattttgcagc

SEQ ID NO: 386708 - DNA, 535 bp, Homo sapiens
ttaagttctttctgtgcatttcacgtcccctctgcacgcccttctcatggggccaatcactgttgggaacactcagagataataaacatttccctgctgtatcatcctagaggatctgtcatttattaactgtgtaccgttggcaagaacctctctgcacttgtttcctcatctgtatgatagaaataatacatctcgggatggtagtgaggaagggagggttatataaaatgacttctactgaagtgcctgcctggcattcagcattgtatagagccggaactccaaatgtcttctgcttgtacctgttttccttctccccaagtcacccagctcacaggtggccgcaagctctgaactggaactgtttctaacacatctggctgcttcccctagagacagacatgcaaatagcttcatatcctcttgtagctgtaaccatttgcagacaccttattgtcttacagctttttaatttgcctgcacamatagacctgcctggccaacttggagggaattttaatatctaagtgcg

SEQ ID NO: 386709 - DNA, 588 bp, Homo sapiens
attgattctaattaaaatagcttgatgaaagcatcttattttaaaatgaataatcaaaagtatctttggaatagatttttgcaaaatcagggctatcagagctgtcttagactgattgaaaagttcatactctagatgctttttaaataactttaaatggctctttaaagtatatatcctaaatttaaatgtattaagatgtaattactggaataatatgaaatgactatttgaaaattatttttattaattaattcatttcttagatttgttttgttttcatgagcagttgaatgtttaattttttcagataacgtgattattttcaaaaatttacagacttttttctcactactgcattttctcattctcttctctttgaaaaatcttaatatattagagaatttgtgagaagcatgtctacatgaaagatctataaataaatatttttaattagtgaacctatctgaattggctgcttttattgtagatttcacaagaagtggcaaaccttggtggctgaatgacacatccactgtttcttattcactaccrattaacaacacacatatccaccacagacagaag

SEQ ID NO: 386710 - DNA, 547 bp, Homo sapiens
tgacattgacccttcctttattgcttactcagttggcccctaaagtctcatggagaatttattacaaatagctgattaggaaaaaaaatttcttatttacagttggttctacctcagacactggcatttacaacccaataagcgggagtactaaagtattgtagtaaagccagttctgcccagtggacagaaccttgagtgatacattggaaaggggaatgatcagaagtatggatatactttgatttatgggtagtttctaatggattggctggacaatcaggtggaaaaaatgacatattttatggatatcagcsagcatctttctccagagacactggtttatgttgtgtgtactcaaccccatgaacaaagtggccattttggcagaaatagtggttatatgtagactcaactaagtggacttccccttaccaaagctcattctgctactgctaaagctgagtgcctaatttaacaatagtagagttccagactgcactttcaatatgtcactattctggtggaatcaactaaatatttaatg

SEQ ID NO: 386711 - DNA, 555 bp, Homo sapiens
ggaactttccaccaaaaataacatatttcaaacaaattaaagacagagagtattttgtgtttatttaacgtacccaaagtatactgaacttaaatagtgatgatgtgtaagaaagtatcttattaatgtcataaaaatatagttttaccataaaatttaatgaacttcatctatatgtaaatctatacacttttatgaatgaatgtcatgataaaacatagaatgaaagaagccagacatactgagagtaatttctgtatgatttgatttaccaaaagttcataaagagrcaaaacatagattagctttagaaggcagggcagctgttcactttgagaagcataaagtttaggaggcagcatgaaagagtcttccgggcatttgccatattccattatttgatctagattatagttacagagaagcattcactttgtgaaaatttactggggtataaatatgttttatgatttattttagctacagtttggtttctaaacatttactgacaaaatactttagcctcataaagtgcacttgacagctttttctcta

SEQ ID NO: 386712 - DNA, 555 bp, Homo sapiens
ggaactttccaccaaaaataacatatttcaaacaaattaaagacagagagtattttgtgtttatttaacgtacccaaagtatactgaacttaaatagtgatgatgtgtaagaaagtatcttattaatgtcataaaaatatagttttaccataaaatttaatgaacttcatctatatgtaaatctatacacttttatgaatgaatgtcatgataaaacatagaatgaaagaagccagacatactgagagtaatttctgtatgatttgatttaccaaaagttcataaagagacaaaacatagattagctttagaaggcagggcagctgttcactttgagaagcataaagtttaggaggcagcatgaaagagtcttcygggcatttgccatattccattatttgatctagattatagttacagagaagcattcactttgtgaaaatttactggggtataaatatgttttatgatttattttagctacagtttggtttctaaacatttactgacaaaatactttagcctcataaagtgcacttgacagctttttctcta

SEQ ID NO: 386713 - DNA, 609 bp, Homo sapiens
cattcaacaaatctctatgaagttccaaactttcccatgtcttcctgtcttctgagccctctaagtctctaggaattccaaactttcccacattttccagtcgtcttctgagccctccaatttgctccaamctcttcttcttacccagttccaaagtcacttgcacattttggggtatctttagagcagcacccaacttctagtaccaatttactatattagtccgttctcatgctgttaataaagacatacctgagactaggtaatttataaagaaaataggtttaactgactcacagttccccagggctgtggaagcctcaggaaactcaaacatggtggaaggggtagcaaacatgtccttctccacaaggtggcaggagagagaagaatgagagagattgaagggggaagccccttataaaaccatcagatctcatgagaacttactcactatcaggaaaatagcatggggggaccgccctcatgatctaatctcctcccacaaggtccctcccccaacacttgggaattacaattcaagatgagatttagttggggacactaagtcaggccatattagttctgccgacctagaattgtcacact

SEQ ID NO: 386714 - DNA, 609 bp, Homo sapiens
cattcaacaaatctctatgaagttccaaactttcccatgtcttcctgtcttctgagccctctaagtctctaggaattccaaactttcccacattttccagtcgtcttctgagccctccaatttgctccaacctcttcttcttacccagttccaaagtcacttgcacattttggggtatctttagagcagcacccaacttctagtaccaatttactatattagtccgttctcatgctgttaataaagacatacctgagactaggtaatttataaagaaaataggtttaactgactcacagttccccagggctgtggaagcctcaggaaactcaaacatggtggaaggggtagcaaacatgtccttctccacaaggtggcaggagagagaagaatgagagagattgaagggggaagccccttataaaaccatcagatctyatgagaacttactcactatcaggaaaatagcatggggggaccgccctcatgatctaatctcctcccacaaggtccctcccccaacacttgggaattacaattcaagatgagatttagttggggacactaagtcaggccatattagttctgccgacctagaattgtcacact

SEQ ID NO: 386715 - DNA, 372 bp, Homo sapiens
cacaatgctcactgtatagcctgcataatcataagtcaaaataaacctcttatctttataaattgttccatctcaggtattattttatagcaatgcaaatggactaatgcagaaaattggtacccaggaargaagttttgctattaagttacctaaaaatgtggaggcagctttagaaatgggtaacaggcagaggttggaagagtttgaagggctcaaaagaagacagaaagacaggagaaactttgtaacttcttaggaacttattaaatgattgtgattaaaatggtgatagaaatgtagacagtgatggtcaggctgatgagatctcagatgaaagtaaggattttattaggaactggagcaaaagtc

SEQ ID NO: 386716 - DNA, 608 bp, Homo sapiens
attttttctcccaatgaaacctatttgtttattgaatattgctacctcagaaatcaaagataaaattttatatttaaaaccatttttggttttgctttcttactccattaaaatataaggttttaaggtaaaaataattaaagtctagaagaaatagacatgattgcctgtacagttttattgcctttatttctctctaaaamctacttttccaaactgggcttacttaactatatccttgttaaatacagtaaagggagacaaaacaatggttttaatataaaagaatgcagcgtaccaaagggaaaaatagtaatgctctgtgaaataattttttaaagaaataattaagtggaaatttctctgaatataaagcagataactctatcttccattattttatgacatgaaaaataattgaaaacagttatgttttcagttagttataaattttaaaaactagcaaatatgttccaaacaatttgtggtctaaatatctgtacaacagataaaaattagaaatgtttcacaatctaattgcacatttgtatttaaatttatgtgaaaaaggaaaaaaaactttagaggagacataaaaagaaataccc

SEQ ID NO: 386717 - DNA, 608 bp, Homo sapiens
attttttctcccaatgaaacctatttgtttattgaatattgctacctcagaaatcaaagataaaattttatatttaaaaccatttttggttttgctttcttactccattaaaatataaggttttaaggtaaaaataattaaagtctagaagaaatagacatgattgcctgtacagttttattgcctttatttctctctaaaacctacttttccaaactgggcttrcttaactatatccttgttaaatacagtaaagggagacaaaacaatggttttaatataaaagaatgcagcgtaccaaagggaaaaatagtaatgctctgtgaaataattttttaaagaaataattaagtggaaatttctctgaatataaagcagataactctatcttccattattttatgacatgaaaaataattgaaaacagttatgttttcagttagttataaattttaaaaactagcaaatatgttccaaacaatttgtggtctaaatatctgtacaacagataaaaattagaaatgtttcacaatctaattgcacatttgtatttaaatttatgtgaaaaaggaaaaaaaactttagaggagacataaaaagaaataccc

SEQ ID NO: 386718 - DNA, 489 bp, Homo sapiens
ataacatccacttcaacagtcttgagatgctgtgcacttcattgaygaagcttcccagagtgtggattccctcttccatgtaaaaacacattgttcatgatcaaaaactctgaaacaaattctacaaatactattttctatagcactgacagttatttatccactggtaatatccaagagccagatttgtctcagatggtgtattctgtaacaatcacacaaaacaaacaaaagaaaacacagcttagagatgtctcctgatctgacccagagattcagggttttctgcttttcaaagaggctgaaataggaaagagtcgatgtcccagctatactaaataccatgctttactaattaccctgaatattcacctgtggacataactaatctttgttcagttcagtggttcccaactataagcaccatattagaattacctctgaagcttctaaacttcctgtaatccaggccacaccccaaaacaatta

SEQ ID NO: 386719 - DNA, 489 bp, Homo sapiens
ataacatccacttcaacagtcttgagatgctgtgcacttcattgacgaagcttcccagagtgtggattccctcttccatgtaaaaacacattgttcatgatcaaaaactctgaaacaaattctacaaatactattttctatagcactgacagttatttatccactggtaatatccaagagccagatttgtctcagatggtgtattctgtaacaatcacacaaaacaaacaaaagaaaacacagcttagagatgtctcctgatctgacccagagattcagggttttctgcttttcaaagaggctgaaataggaaagagtcgatgtcccagctatactaaataccatgctttactaattaccctgaatattcrcctgtggacataactaatctttgttcagttcagtggttcccaactataagcaccatattagaattacctctgaagcttctaaacttcctgtaatccaggccacaccccaaaacaatta

SEQ ID NO: 386720 - DNA, 489 bp, Homo sapiens
ataacatccacttcaacagtcttgagatgctgtgcacttcattgacgaagcttcccagagtgtggattccctcttccatgtaaaaacacattgttcatgatcaaaaactctgaaacaaattctacaaatactattttctatagcactgacagttatttatccactggtaatatccaagagccagatttgtctcagatggtgtattctgtaacaatcacacaaaacaaacaaaagaaaacacagcttagagatgtctcctgatctgacccagagattcagggttttctgcttttcaaagaggctgaaataggaaagagtcgatgtcccagctatactaaataccatgctttactaattaccctgaatattcacctgtggacataactaatctttgttcagttcagtggttcccaactataagcaccatattagaattacctctgaarcttctaaacttcctgtaatccaggccacaccccaaaacaatta

SEQ ID NO: 386721 - DNA, 489 bp, Homo sapiens
ataacatccacttcaacagtcttgagatgctgtgcacttcattgacgaagcttcccagagtgtggattccctcttccatgtaaaaacacattgttcatgatcaaaaactctgaaacaaattctacaaatactattttctatagcactgacagttatttatccactggtaatatccaagagccagatttgtctcagatggtgtattctgtaacaatcacacaaaacaaacaaaagaaaacacagcttagagatgtctcctgatctgacccagagattcagggttttctgcttttcaaagaggctgaaataggaaagagtcgatgtcccagctatactaaataccatgctttactaattaccctgaatattcacctgtggacataactaatctttgttcagttcagtggttcccaactataagcaccatattagaattacctctgaagcttctaaacktcctgtaatccaggccacaccccaaaacaatta

SEQ ID NO: 386722 - DNA, 584 bp, Homo sapiens
aaaagtaaggcaaatctcttgccaattatattagtcatgccttttaattccctgttcataaatatctgtgaccctaatctcaaattattttcttttcatagcaaattcaaaaaactgagayatatttgaatgctagcatgttagaaaaatattttaaataatggcaaaaacaagaagtatataattaacaggttgaattgtgcccaccaaaagagaaatgctaggcttcagaatattttaagaagactagacataatagcatgctcctgctattatgttcatggggaagaacaatgactgaattttgggaaacagttttgactgtgataaaaaatgattttttttagtattattatctgtttctcaaacattataaatacagagaatttaaataaacaggtctttaagaacttgttgtttctaaaactaattggccactattaagtagtatgagcatggcagcagtcagccccacccacgatgaagtagctacgtggtgcccatggccactggctgctgcttaagaaatgagggcagggaccaagtatttaatcaagggttattctgggctgactttttttgtg

SEQ ID NO: 386723 - DNA, 484 bp, Homo sapiens
aaaataaaatcctagtctatttaatatatttaaatttcttctctcccttttcagggctcaaatagtggcttaaatatatgagcttgtaattcctattgtttactaaattctactttggcagtaggtttcatctcttctaacctacataggactcaggcaattccccctccaccctactctgcaaatcttcaactttctcttctacatgggaccatcagatcggcataaaaatatgttatttctcctaccataaaaagcaaacaaaaaagaacaaataaagccataacattctttttagccccactttcctctccaggtactaccccatagcaaaaccctttaaaamcgttgtatataacaatgattttcaatgttctcctcccattatctctgatacccaccatgctactaacaatgttctcagccagggtgttagtgcactccatgctgctactactgatgcaaattctcagccctcatctca

SEQ ID NO: 386724 - DNA, 557 bp, Homo sapiens
aatccttgtacactattggtgagaatgtaaattggtgcagtcatcatgaaaaatagtacagagatttctcaaaatatgaaaaatagaactaccatatgattcatcaattctatttctrtgtatgtacccagaggaaatgtccatcctgagcaattactgaatgttaacatggcttacatgaaattagaaagtgagttcggaaatggagatgcccttttatcttcaaaggacgtctttcttcctaacctcaaggaatattttgtaagctcctggaagacagataggcaatagtcaaaacatgtcaagaaataataattactaaatgataagtgtaatcttcagtaatacacaaattctatatcttgtaaagtcaacctgtgtgagaatatttaatgtatactaacatgtacatcacctcacatacttacattttgtggtgagaatatttatgtgtacatttttaagcaattttctaatatacattattattattaactgtagttatacaactattgtgcatttctttactcttatttttatatttttcagatttatct

SEQ ID NO: 386725 - DNA, 574 bp, Homo sapiens
acctcttttttgtcagaggccacaaaagcaaactgcttcttgcaaataggacttacatgtgtgatgtttagtgaaatctcactatcactgktcctgtgaaataaattgggtttcagtggcttctgccacttcacattctctctcacaccgttgctgaagtccctcagtctatgctccttcccttcaaaaagtgcatttctattggcactttatgagccctactctcgctgattcaacatatgaaatatgttctgtttcccaactttcccacagacaactcctcagtaaacttggcagaccttaatttaacaaaaataaagcttgaattctattttctatttttcatattactgctgagtaacatgaaccaataaaaactgaattggtaagtatctgggttatttcagtgtttgacaagtataaataatgttgatatgaatatccacatacaattttttatgtgaatgtttttagttctcttaagcatacaacctaggagtggaatcgaaaggttatatgacaattctgtgtttaattttttgaggaagtgccaaactgttttctaaggtggcca

SEQ ID NO: 386726 - DNA, 574 bp, Homo sapiens
acctcttttttgtcagaggccacaaaagcaaactgcttcttgcaaataggacttacatgtgtgatgtttagtgaaatctcactatcactgttcctgtgaaataaattgggtttcagtggcttctgccacttcacattctctctcacaccrttgctgaagtccctcagtctatgctccttcccttcaaaaagtgcatttctattggcactttatgagccctactctcgctgattcaacatatgaaatatgttctgtttcccaactttcccacagacaactcctcagtaaacttggcagaccttaatttaacaaaaataaagcttgaattctattttctatttttcatattactgctgagtaacatgaaccaataaaaactgaattggtaagtatctgggttatttcagtgtttgacaagtataaataatgttgatatgaatatccacatacaattttttatgtgaatgtttttagttctcttaagcatacaacctaggagtggaatcgaaaggttatatgacaattctgtgtttaattttttgaggaagtgccaaactgttttctaaggtggcca

SEQ ID NO: 386727 - DNA, 519 bp, Homo sapiens
gtctttcgagggataaaatgagatggagacagagacgtgttactggcaaccctgaaaaaagctgttccaatggcatgatgacagcagagtcattccattaagagtttacagtmgagagagggaaaaagattcattgttataacatagtaaattgctgtggtatgggggaaagagacatttattctaacttaaactatcagtgtaggctccttttagaagaatatacgtttaggttgcaacaaatattctttcctgtgggatatataagatatgtatttgaaataacaaaatgagttaaaagaaattctttcaattgcagattcttcaggtctgatctatattatcttgtccccaccaatgaacttgccaaatatattacctgtaacagtactgggtttgattgaagaccagaaaaaaaaaaaaaaactcttgcatcaaggggctttttatttcaggaaagtatctatataaaagtcaaaggattcctgaagtaaaaaattctgagtactaattaaaaag

SEQ ID NO: 386728 - DNA, 519 bp, Homo sapiens
gtctttcgagggataaaatgagatggagacagagacgtgttactggcaaccctgaaaaaagctgttccaatggcatgatgacagcagagtcattccattaagagtttacagtcgagagagggaaaaagattcattgttataacatagtaaattgctgtggtatgggggaaagagacatttattctaacttaaactatcagtgtaggctccttttagaagaatatacgtttaggttgcaacaaatattctttcctgtgggatatataagatatgtatttgaaataacaaaatgakttaaaagaaattctttcaattgcagattcttcaggtctgatctatattatcttgtccccaccaatgaacttgccaaatatattacctgtaacagtactgggtttgattgaagaccagaaaaaaaaaaaaaaactcttgcatcaaggggctttttatttcaggaaagtatctatataaaagtcaaaggattcctgaagtaaaaaattctgagtactaattaaaaag

SEQ ID NO: 386729 - DNA, 558 bp, Homo sapiens
tatataagatatgtatttgaaataacaaaatgagttaaaagaaattctttcaattgcagattcttcaggtctgatctatattatcttgtccccaccaatgaacttgccaaatatattacctgtaacagtactgggtttgattgaagaccagaaaaaaaaaaaaaaactcttgcatcaaggggctttttatttcaggaaagtatctatataaaagtcaaaggattcctgaagtaaaaaattctgagtactaattaraaagccctcctgattttattttttacattcaattaaagcaatcattttataatataatattaactcttctttctcagttgattatttgcatatatattttctaagtacaatataaagttttggagagcagggacataactttttcaactttgatggtgctcaagttccatgtgactgttagcaaacactcaggtagatatttggtggatgaagaaagtacggatggggagaggtgatatactggttgtgaattgaaagattactatgagaaaaatgcaagggaatgaagaaaatgagcagaag

SEQ ID NO: 386730 - DNA, 535 bp, Homo sapiens
ggatttaagttgctgatgatactactgtcaaatagaagggatttggataagctaggaaatgcttgatatatttagaattctgtaatcattaagtgattatgcgtgtgtggttgtatatgtayataatttataatatgcaatcattgtatgagggcacaagtttcacataagaggacataacacatttgaaatactgcatggtcaattccctcttaaaatctgttaattaaatctttttgtacttttgattcccttgataattattctcaactattttataaagtagtcaactagctggaggctaagggcctgtattgatgtgacattagggagaggcatgggaaaaagaagcccattaaaagctagaatttcttttgatatctcctgtctatatgaaaaaaataaggaaattttgtattctagtttatatgtagattcttctgggaagctgctagctaccatggtttgagaagaccactatatcaaaatcttcaaaagtgcttttttattaaagacatcctaagactaacgctta

SEQ ID NO: 386731 - DNA, 563 bp, Homo sapiens
ccagtgttctctcataaatgatctatttgaagtgtaattacctatttgctactttggttcttctgtaacagatgcctgtagtcagtcatcttgatgsccttttcttgagtcactgcactcttggtagtttaaaacttctttaaaaaattatttaaacaatttagttatttaaaaaatagtggatgattgctatactataaactggagatatttgcctgtaatgggcagcagagaaaatgaggtaagattgtagtgggaggtggagtcaggggaaaaatcctttatagaatgggatttcctagtgcatgttaacatgactatggaaacacccagtagaaaggaagacaacaatgactgggaaagagagaaagcaatggcgcaaatctcaaaggacacaaagagcaaagtccatcagagaacaagagagaagagatgatattaacacaataagaactcagtaaatgtagccaaatggataagtaaatgaaccaataaatgccctgtagcaatcccaccagatgtcctgtatttaatcaccttttccactctccaaaacaattaaa

SEQ ID NO: 386732 - DNA, 563 bp, Homo sapiens
ccagtgttctctcataaatgatctatttgaagtgtaattacctatttgctactttggttcttctgtaacagatgcctgtagtcagtcatcttgatgcccttttcttgagtcactgcactcttggtagtttaaaacttctttaaaaaattatttaaacaatttakttatttaaaaaatagtggatgattgctatactataaactggagatatttgcctgtaatgggcagcagagaaaatgaggtaagattgtagtgggaggtggagtcaggggaaaaatcctttatagaatgggatttcctagtgcatgttaacatgactatggaaacacccagtagaaaggaagacaacaatgactgggaaagagagaaagcaatggcgcaaatctcaaaggacacaaagagcaaagtccatcagagaacaagagagaagagatgatattaacacaataagaactcagtaaatgtagccaaatggataagtaaatgaaccaataaatgccctgtagcaatcccaccagatgtcctgtatttaatcaccttttccactctccaaaacaattaaa

SEQ ID NO: 386733 - DNA, 541 bp, Homo sapiens
gttcaaataaggcaaatgctgagctgtaaccaatccagctgtttctgtacctcacttccaagttctgtacatcacttttcttttttgtctataaatttgttctgactacaaggcatccctggtgtctctgagtctgctgtgattctgggggcttcccaattagtgaattttttttcttgcttaattaaactcagttaaatttaatttgtctgaagttttattttaacagtagatatatgcaaccatcactatggtcaattttagaacattttcatcacttccaaaataaacctcataacctttaattatcactccctatttcctgcctctgtccytatgcaaacactaatctaggttttatccttacagatttccctgctttatttatttagctaaatgttttcaaggttcatccatgttttggcatgtattagtattttgttccttcttaagattgaataatattttactatatagacatatcacttttaaaaatctattcattgctttatgggcaatgaattttttttccattttttaa

SEQ ID NO: 386734 - DNA, 541 bp, Homo sapiens
gttcaaataaggcaaatgctgagctgtaaccaatccagctgtttctgtacctcacttccaagttctgtacatcacttttcttttttgtctataaatttgttctgactacaaggcatccctggtgtctctgagtctgctgtgattctgggggcttcccaattagtgaattttttttcttgcttaattaaactcagttaaatttaatttgtctgaagttttattttaacagtagatatatgcaaccatcactatggtcaattttagaacattttcatcacttccaaaataaacctcataacctttaattatcactccctatttcctgcctctgtccttatgcaaacactaatctaggttttatccttacagatttccctgctttatttatttagctaaatgttttcaaggttcatccatgtyttggcatgtattagtattttgttccttcttaagattgaataatattttactatatagacatatcacttttaaaaatctattcattgctttatgggcaatgaattttttttccattttttaa

SEQ ID NO: 386735 - DNA, 597 bp, Homo sapiens
tctgtacatcttcacaaacattgctttgttatctgaatttttgattctagccattctagtaggtgtgaaacattatctcattgtggttttgatttgcagttccctgatgactgatgatgtatgtgtcctgtcatttcttgggcttattggccacttgtgtatattccttgaaataatgattattcaaatacttttcacatttttaaattgggtagttttattattgaattgtaagttttctttatttagaaatcacatattttataaaaggcttatctcttaattccatttttattttggttttatttaaagataacaattgtcagtagttttgtagtttcataattttctaagtttccattcatttgtcatttttgttggaatttggtaggacactgcacagttactagtgttcmaaattcagagactctgagtttgttgagattaagaagagcaggatggggttagagtccagtgaatcttttcatagcaagctatgggactgaagttaggattgtagcagggaaacgcaacagaaataaagtgatagggagtcaattacctgaggctgttgcaagaaaagaaaatatgcagagg

SEQ ID NO: 386736 - DNA, 563 bp, Homo sapiens
cagggacagatcatattgaatagctggtccttctgaagaatgttgagatgcaaacatctaccctactttactcaagtttggccaactctaaagggccatctyagtttcagggcttcctgtgggatcaactgaggcctctgtcgttactgcatcacagctcggcctctccatctgcctaaacctgctccctttacttcctcgaaagtgtttctggagcattccccaataaatttcctacatgcaaatttctgtctgggaaccttttacctggcagtcttacctatgcaccactacccaagcaccatccaatgagagggtatgtcagcttcaaacactgaccaagcccagagagttccaatagctgctttttattcacctcatctgtattccacttctgtgaatctagaattaggaaactgggggagtagatgatccaagtggaaaaatagaaaatatataactattgattctcttattttactccagatacaatcagtctaaagcagaccagagttgggagagggagaaattttaactttaaatatgcatgggtaggttcactc

SEQ ID NO: 386737 - DNA, 537 bp, Homo sapiens
actaatatttcagtcttccatggactgctttgttattgcatagaccgtgtatcccagttgtatttcttattcttttcttaggtagtggacaaacttgaaacaagcaaaagtgcaaaaaacgttttacactaaggattccctacagtyagtaacaaaaccaatcattgcaccactttattggaggaaaaatttccaagccatgcaatgcaacaccttcgtatagatttaaattttcttgccagagtgttgaacacctcagtattgggaacaggaataaaaagactttcgatagatcaacattacattaaaaaacaaagtaatataagcctgcctagcaagcagagtgacagtttatattctaaaatatgtcacccttatatttgagtctaatgtaatttttcccctaccagtaggatatcataaaactgatgattttaaaagtatgttacataaatctaatttcatatttctttacttctttttcctttagttcttattctttcaaaccagcaggagatcttatcactccttactgat

SEQ ID NO: 386738 - DNA, 577 bp, Homo sapiens
gcctctttccccctgcagctcacaattcctgcttttcttttaaggttggcaaagtatttcctttgtttctgtctaatctgcagtccttacttctatttatgctaagctcatattcttcgctcacatcatgatactaaacaggagatgatttcttaacagagataaatattatttttactaagggaattaaaactgcaaagcacaatcatacaaacaatcaatattaacaaaataaaaaagataaagtaagcaagcaagaaataattcaatttttatacttttacaaagctcttcagaattattattttcaagctgttagataaagccatgataaattagaaccactcttcctaatattcactttatctcctaaattgcattttgcctagaaaaaagcttaaatktatcttaaaatattgtattaaagaatgataaaagaaatatctgttcctgggccctctataacttacatctaaaaaacaaatatcaggtataggtctgttctctttggttaatatttctagaaaaactaacccataaatcatgtccataacttgtagttaagaaatgtagctgg

SEQ ID NO: 386739 - DNA, 526 bp, Homo sapiens
tggtctcgatctcctgaacttgtgatccgcccgcctcggcctcccaaagcgctgggattacaggcatgagccaccgcgccgggccgggaattttatttttatctaagactcttgtttggtttagtgacagtagaactaaacattagattgggggcaattattaattatattgttaatgaagagataccactagcacactaagaactgtctgcttctctttatttattctacaatttagtgttttacattaatatttatgtttctccctctgatgtcttcctacagaagcatattttatagacactccagacagtgttataagctgccagcaactctgaattttagtagtcctagtcttcctgtttaggtctaagttccatacaattcaaacatagcaattggcgrtattaatcttgaacaaaaagctagccctatacaagcgacatgcttaaaatatattgacattttgtacaaacggaattcacgaagtcatcatatttaaatagatgacaatgacttgcaaaat

SEQ ID NO: 386740 - DNA, 592 bp, Homo sapiens
aatataaatatggtagaaaaagatcaagaatttattcaatcaatgtttttaggaatttattcatttcttttaaattactcaattttttggtgaataattgttcatcatattctcatgatcttttatatttctgtggtatcagttttaaygtctccctttaatttgtaattttatttatttaagtcttctctctttttggcttggttagtgtagataaaagttacaacaaggaggaagtaaggacttcttaatattcaatgctcaattaaggctgtgagaacattcctaaaaattgtcaaaatcaacttttttcacaaatctggaaattaaagttttgtgacagtacaaagaccatttattcaataaaagtagctaaatttccatgagaacagtgagatttgtagtattttaatttgctctattcctaccttcctcttcctatctcctcaatgtccctgaaaaccaatgactctacaatttcaacataaatgatcaggctagcagtcactgcaggtgacaaaaggattttgggctttccaaaaaccctactcccagaaaactgacattttctgattcatctggaagttctcta

SEQ ID NO: 386741 - DNA, 592 bp, Homo sapiens
aatataaatatggtagaaaaagatcaagaatttattcaatcaatgtttttaggaatttattcatttcttttaaattactcaattttttggtgaataattgttcatcatattctcatgatcttttatatttctgtggtatcagttttaacgtctccctttaatttgtaattttatttatttaagtcttctctctttttggcttggttagtgtagataaaagttacaacaaggaggaagtaaggacttcttaatattcaatgctcaattaaggctgtgagaacattcctaaaaattgtcaaaatcaacttttttcacaaatctggaaattaaagttttgtgacagtacaaagaccatttattcaataaaagtagctaaatttccatgagaacagtgagatttgtagtattttaatttgctctattcctaccttcctcttcctatctcctcaatrtccctgaaaaccaatgactctacaatttcaacataaatgatcaggctagcagtcactgcaggtgacaaaaggattttgggctttccaaaaaccctactcccagaaaactgacattttctgattcatctggaagttctcta

SEQ ID NO: 386742 - DNA, 579 bp, Homo sapiens
ttatgtgttagagtatgtcccccaaaacaatatgttgaggtcctaatttttcaaacctcagaatatgactttatgtggaaatagagttattgcagatgtactataattagttaagatggtgccattggagtgggtcctaacccaatgtgactggtgtccttttaagaggaaaatttggacacactcttacagaagaagatgatggtaagacacactgggataaaatggccgtggaacagatggaggcagagattggggttatgctgtgacaaaccaagttctgctagaaactggaacaggcaaagaaggatcttcaccaaagaattcagaggaagtacagcactaccagcattttgcttctggacrtctggcctccggaactatgagaataagtttctgttattttctgttattttaagccacaaagtctgtggttctttgttccggcagccctaataactaatacaaatatatttacatttaaagaaatgcagggaaggaagtgtaggattttcatgtactccaccctcagtttcccatattgttaacaatttacatttgtatgggacacatgtcaca

SEQ ID NO: 386743 - DNA, 455 bp, Homo sapiens
ctaaaagcagggtgttattgaaaacctatactcgtggtacatttagagaactaaaacagtctgaaaaagctggatcagtatgtctatgtttgcatgtggtatgattgtggggtgttcgtgtgtgcgtgtgtgtgtgtgtgtgtattaggattatatagagcaaatgtcaagaggaggctgaggtgcaaaggtgatcatgatcaagaccttggtatttctcaatggtagcactattggcttttcaagttgataattcttcattttatggtgttgttctatgcataacaggatcattagcatccttgacatctacatagtagatgccacttctgctactagacattgtgacatgcaaaaatacttctatacttttccagatttagtctagggaagtggcactacctacagttgagacctacagatgtggaaagyattgctatgctaatgttgctaat

SEQ ID NO: 386744 - DNA, 591 bp, Homo sapiens
ggtttactggtacagaaccagaagcctaatcattttattcttaattcataaattcacaggagtagtttagaagtgatgatgtgcaggtttcttagagtttatgttgcagatctcagtaacaagaytgtaattgatttgatctctttgcctttaaaataaagtaactcacataaagcctaggtagtagatttttattacatgcttttaaaatacatgcaacataagcactgaaggaattcatttcattaatgcaagtcaaagcctaaagaggtttcagaaagctaagcagaggtaggcttctcccatctcccatgaaaagaacatagatcaaagtctcctatagctctcttcaagaaaatgtctagaattcattacacatacgatgttttttttttgcaccaaacatcacttaagatggaagaacagcacttggacttggaaaactttactatagaaagccatttttctagaaataagttgttttgcctttccttagggtccaggtcagggagtatttaccaacagataataataggagtttcaaccgaggctaaggatgccactacattgaagcaaacatcacttaatgag

SEQ ID NO: 386745 - DNA, 599 bp, Homo sapiens
cacttaaaaaaacaaactaggatgaaaaatcccagagagtattctgccagttgccacgtcatattcccataaaaccttcagttatttacccatatgggtgctttacctggttgttacttaagatagatttctgtatgtgttgcaaggaaaggcattgcagaaatggacaggaccatttttttcgttccacattgtgactcttcctttcctgtatttgaaagattaaaagatagcaccccctagatgggtgagggttgggttaaatagtagtgttgggacagaaaggtccatttgtgagctcgctgcaggcaggtttgatggtcctggtggaagtagccttggcggctgctggttttcaaagcctctgacaaagctgtgcatatcacccgtgactgcaccctgaggaaagacgaaaagtcagcctctcccttacgtaggacgcttgtaaactttcccagacgcactgttggtcttaagrattgttctgaccctggacatttgcaggacttgtccaaggtggatctgagcctcctcatgtgctccaggcagagatcaggattcggatgcatcaccaactggtggaagatggggactaggca

SEQ ID NO: 386746 - DNA, 604 bp, Homo sapiens
attaatgatgttgagcattttttcgtgtttgwtggtcacctgcgcgtcctcttttgagaagtgtgtgttcatcacgtttcagccttttggctaagatcaagtgtgagaagtgtgtgttcatgtcttttgcccacttcttaatgttttttttattgctttttgaattatttaagttccttatcgatatagtgtggatgttgtctctgcccaaatctcatattgaaatgttatccccaatgttggaggtggaacctggtgggaggtcactggatcatgggggcagatttctcctgaatgctttagcaccatttcagttggtactgtccccatgatagtgggtcagttattgtgagatctggtcatggcagaagaagaaaggggagcaggcacatcccatggtgaaaacaggagcaagagagcgcaggggcagactgtaagcttcctgaggcctccccagaagcagatgctgccatggttcctgtacagcctgcagaaccgtgagccaattaaacctcttttctttataaattacccaggctcaggtacttctttatagcaatgcaagaatacactaatacacttatagattctggatactaggcct

SEQ ID NO: 386747 - DNA, 604 bp, Homo sapiens
attaatgatgttgagcattttttcgtgtttgatggtcacctgcgcgtcctcttttgagaagtgtgtgttcatcacgtttcagccttttggctaagatcaagtgtgagaagtgtgtgttcatgtcttttgcccacttcttaatgttttttttattgctttttgaattatttaagttccttatcgatatagtgtggatgttgtctctgcccaaatctcatattgaaatgttatccccaatgttggaggtggaacctggtgggaggtcactggatcatgggggcagatttctcmtgaatgctttagcaccatttcagttggtactgtccccatgatagtgggtcagttattgtgagatctggtcatggcagaagaagaaaggggagcaggcacatcccatggtgaaaacaggagcaagagagcgcaggggcagactgtaagcttcctgaggcctccccagaagcagatgctgccatggttcctgtacagcctgcagaaccgtgagccaattaaacctcttttctttataaattacccaggctcaggtacttctttatagcaatgcaagaatacactaatacacttatagattctggatactaggcct

SEQ ID NO: 386748 - DNA, 546 bp, Homo sapiens
attaattatagattatctgtgaataatacaatatttcatttttgcttaaatctctattttgtgcttttttcttatacgtatataatagtcaaaattttacaagccaaaacattatcttggagatgcaacactttttaaaattattattatattgatattgcagaagcaccttcaatatattagctgccatcacacaaattatcctattccatcatcaaakaattaaataacaaaaagacttttcccatttcaccgttgaaaagcctgagttccatccaggcttggtctctaactagagtgcgctttcatagcacctcctcatttctataacacattaacacacagttttattgcatgtttgacatagatacagtgggtaaagcagaaattgtcatctctattttttacagatgagaaaacccaggtgcacagaagttaaaaatccctgcccctgccatcaccaatgccgccactggggctagcggtcctgcttcttgacctcacgatatcaactgcccatctcacaagcaggagaagaagaagcag

SEQ ID NO: 386749 - DNA, 565 bp, Homo sapiens
gcatccatgggggtgaacctgacccagcttagtgcagagggagtggaaagtgctgcctcaacaaggcgagaggcctcctgggagtggagcccgggaggcacctcacctctgggtgggccggtgtgcctgttggacactagaccacgagccctgaacagcaaccctagtgacagaagaggcaccacagaggggactgattacagcccttgcggaaatcagacacaatgaccccagcgctcagactgtgtaagacttgggttcttggtgggaggggcgaaggacatttcaagagagaaaaatctagcacttcaaaaatgtgtggggtacctattgcagggagcagaaaagttgtctttctcaggcatcaggtaggaygagaaaagcagtagcagaacccgacagaccaactgctcagccagcagctggcattggtggcgtgccaacagcctacctggcccatgcgggcctcgggacagcatgtgagctgcagtctcctgtcctcttgtgatctccagcacagtgtgtagccagccagggggtaggtctgacaccgtgccggggcagg

SEQ ID NO: 386750 - DNA, 565 bp, Homo sapiens
gcatccatgggggtgaacctgacccagcttagtgcagagggagtggaaagtgctgcctcaacaaggcgagaggcctcctgggagtggagcccgggaggcacctcacctctgggtgggccggtgtgcctgttggacactagaccacgagccctgaacagcaaccctagtgacagaagaggcaccacagaggggactgattacagcccttgcggaaatcagacacaatgaccccagcgctcagactgtgtaagacttgggttcttggtgggaggggcgaaggacatttcaagagagaaaaatctagcacttcaaaaatgtgtggggtacctattgcagggagcagaaaagttgtctttctcaggcatcaggtaggacgagaaaagcagtagcagaacccgacagaccaactgctcagccagcagctggcattggtggcgtgccaacmgcctacctggcccatgcgggcctcgggacagcatgtgagctgcagtctcctgtcctcttgtgatctccagcacagtgtgtagccagccagggggtaggtctgacaccgtgccggggcagg

SEQ ID NO: 386751 - DNA, 606 bp, Homo sapiens
agtgtgagcactgcacaaggaggtgtcttaagtaatctctgaggtgggagcactgcacagggaggtgtcttcattcatcccccagaagggactactgcaccaagaggttttttggataatcctgaggagggagcactgcaccaggaggtatcttgratgataactgagttttaaccactgcagcaagaagtgccttaaataatctctgaggtggaaacactacaccaggaggtgtcttggatcatccctgaggtgcagacactgcaccaggaggtctgtaggattatccctgaggtttgagcactgcaccaggaagtgtcttttatcatccctgagttgggagcactgcaccaggaggtgtattggatcatcacttaggtggagcattgcacctgcaagtgccttggatcatgcctgacgtgtgagcactgcaccagcaggtgtcttggctcatccctgagcagggagtactgcacgaggaggtgtcttgtgtcacacctgaggtgtgagcactgtaccaggaggtgtctaggatcatccctgaattgtgagaagtgcaccaggaggtgtcatggagcatccctgaggtgggagcactgcaccagg

SEQ ID NO: 386752 - DNA, 555 bp, Homo sapiens
aactgacccagcacagattgacttctttttcaggctacgtgttttgtggaggtcggcaggggctctgctctaccgagacacccaggacccaggctgatcgagactctaccatctgggagagtagagcagcrgaagggacccctgggggctcacgcactgtttcttctgtattttggcccagaggtgacacacaccactcttgcccaaactggtccagaaccagtcacatgctcctgctctggctgtgtggtaagaacgcaggacaatgtggagactgggttgaatgctgaggaatgttactctccctgccacagactctctcctgatacattctgacgtcagaggggatggtgactttcctgggaagtgttaactagcagaattgatctgagatgtaagaattccaaagagatgcataagaagacaagggaaaggtttctaagatttaccttccagactggatcccatcccagatggttttattgaaaggataaccagtgcatgtgtctgtctggggggagggacaggatgcttccaaaatggacttgagggctg

SEQ ID NO: 386753 - DNA, 555 bp, Homo sapiens
aactgacccagcacagattgacttctttttcaggctacgtgttttgtggaggtcggcaggggctctgctctaccgagacacccaggacccaggctgatcgagactctaccatctgggagagtagagcagcagaagggacccstgggggctcacgcactgtttcttctgtattttggcccagaggtgacacacaccactcttgcccaaactggtccagaaccagtcacatgctcctgctctggctgtgtggtaagaacgcaggacaatgtggagactgggttgaatgctgaggaatgttactctccctgccacagactctctcctgatacattctgacgtcagaggggatggtgactttcctgggaagtgttaactagcagaattgatctgagatgtaagaattccaaagagatgcataagaagacaagggaaaggtttctaagatttaccttccagactggatcccatcccagatggttttattgaaaggataaccagtgcatgtgtctgtctggggggagggacaggatgcttccaaaatggacttgagggctg

SEQ ID NO: 386754 - DNA, 555 bp, Homo sapiens
aactgacccagcacagattgacttctttttcaggctacgtgttttgtggaggtcggcaggggctctgctctaccgagacacccaggacccaggctgatcgagactctaccatctgggagagtagagcagcagaagggacccctgggggctcacgcactgtttcttctgtattttggcccagaggtgacacacaccactcttgcccaaactggtccagaaccagtcacatgctcctgctctggctgtgtggtaagaacgcaggacaatgtggagactgggttgaatgcygaggaatgttactctccctgccacagactctctcctgatacattctgacgtcagaggggatggtgactttcctgggaagtgttaactagcagaattgatctgagatgtaagaattccaaagagatgcataagaagacaagggaaaggtttctaagatttaccttccagactggatcccatcccagatggttttattgaaaggataaccagtgcatgtgtctgtctggggggagggacaggatgcttccaaaatggacttgagggctg

SEQ ID NO: 386755 - DNA, 597 bp, Homo sapiens
ttaaatggacctgactcatggtaagtactcaacaactattacttatacttacataattgtcattatttaatcattattgttattatttcttccacaaaccactaactcagacatacatgtagctaaactgyggctagatgatgatgtcctctaccaaacagtaatgagatgatactgccaatggtggccgtgctgtcctcaagctaatcacttatttattgaactcatgactggaggtttaattatgcatgcacccttagtgttaaagttaggtgatgagtgcttcatatgtttattctttggttctcagtacagtactttttaatgtaacataactttgcactaaaggcactccttaatcaggtgtacacacctggcattcgattgataaaatgaatttcaactaaggaacaaattagaaattaatgattcttaataattagatatgaatatattcaatagaatgtattaagtgcctaatgtatgctaggaaggttatatgctgggtaatgcagcagtgagatagggtaggtatgttgcctgttgtcatgagagatacacattacacaaggtacacatctatctgtgtgtgtgttt

SEQ ID NO: 386756 - DNA, 597 bp, Homo sapiens
ttaaatggacctgactcatggtaagtactcaacaactattacttatacttacataattgtcattatttaatcattattgttattatttcttccacaaaccactaactcagacatacatgtagctaaactgcggctagatgatgatgtcctctaccaaacagtaatgagatgatactgccaatggtggccgtgctgtcctcaagctaatcacttatttattgaactcatgactggaggtttaattatgcatgcacccttagtgttaaagttaggtgatgagtgcttcatatgtttattctttggttctcagtacagtactttttaatgtaacataactttgcactaaaggcactccttaatcaggtgtacacacmtggcattcgattgataaaatgaatttcaactaaggaacaaattagaaattaatgattcttaataattagatatgaatatattcaatagaatgtattaagtgcctaatgtatgctaggaaggttatatgctgggtaatgcagcagtgagatagggtaggtatgttgcctgttgtcatgagagatacacattacacaaggtacacatctatctgtgtgtgtgttt

SEQ ID NO: 386757 - DNA, 597 bp, Homo sapiens
ttaaatggacctgactcatggtaagtactcaacaactattacttatacttacataattgtcattatttaatcattattgttattatttcttccacaaaccactaactcagacatacatgtagctaaactgcggctagatgatgatgtcctctaccaaacagtaatgagatgatactgccaatggtggccgtgctgtcctcaagctaatcacttatttattgaactcatgactggaggtttaattatgcatgcacccttagtgttaaagttaggtgatgagtgcttcatatgtttattctttggttctcagtacagtactttttaatgtaacataactttgcactaaaggcactccttaatcaggtgtacacacctggcattcgattgataaaatgaatttcaactaaggaacaaattagaaattaatgattcttaataattagatatgaatatatwcaatagaatgtattaagtgcctaatgtatgctaggaaggttatatgctgggtaatgcagcagtgagatagggtaggtatgttgcctgttgtcatgagagatacacattacacaaggtacacatctatctgtgtgtgtgttt

SEQ ID NO: 386758 - DNA, 597 bp, Homo sapiens
ttaaatggacctgactcatggtaagtactcaacaactattacttatacttacataattgtcattatttaatcattattgttattatttcttccacaaaccactaactcagacatacatgtagctaaactgcggctagatgatgatgtcctctaccaaacagtaatgagatgatactgccaatggtggccgtgctgtcctcaagctaatcacttatttattgaactcatgactggaggtttaattatgcatgcacccttagtgttaaagttaggtgatgagtgcttcatatgtttattctttggttctcagtacagtactttttaatgtaacataactttgcactaaaggcactccttaatcaggtgtacacacctggcattcgattgataaaatgaatttcaactaaggaacaaattagaaattaatgattcttaataattagatatgaatatattcaatakaatgtattaagtgcctaatgtatgctaggaaggttatatgctgggtaatgcagcagtgagatagggtaggtatgttgcctgttgtcatgagagatacacattacacaaggtacacatctatctgtgtgtgtgttt

SEQ ID NO: 386759 - DNA, 469 bp, Homo sapiens
aaacaatttgagcttattaatcactggggttcacacatgagtaaatttgttgaatgaatttgggtgaagccagatttgacagaagcctgattgttgaagggacagggggacccctagagagaatgtgtagtcagcaactgagcatgagagtggagctagagaagcctggttcagggtcctargtgcaatgatactcaaactgggccaccctgttcgtattctgctgctaaaacacaatatacagactaggtaattttatttttaaaaagagatctgtttggctcacagaagctgggacgtccaagactgaaagctgcatctggcaagggccttcttgctgcatcctaagatggcagaagggcatcatgtggtgagagacactgagagagagggagaaaaagtgggcagaactccctaacttatgaaaatcccattcctgagataatgacattaattccttcgtgagagc

SEQ ID NO: 386760 - DNA, 649 bp, Homo sapiens
ccactaggctgagactgtatgctagttttyacaacattaattagaaaaaacaagaatcccagcatggcacccaactgacctccacagagaaaatcattgaccaaatgagcactgtgagtcgttgaggtaggcagatgctccttaatgggacctcgaaggccgaaaaacaagacattgttgagtccattctggaaaagaatgggcagcaagcctcgataacgctctccaattctatggcatttcagtgccttgaaagcctgataagtgctggtaaatttgtcatgatgcttgtggtcttgaagcaatgtctgaactctttgcagtggagtgaaaattgcttctgctgtccttgcaagcactgccaccacgacacgggttgcaaactctggagcactgacatgcttgtggagaaggtaggataaatcctcatacagaccaaacataagtgcaagtgtagttgtcttttgcatcaattagggaaggattccaggatacaagtttcaaaatccatcccttctcaactgaagtattgcatcccgggttttgatgccatacagctgttgttgaaagaggaccttctgaatgggaaatgtgatttctacgtgttgaaggctgcacagcagccacacaagtcatgcttcatttcacc

SEQ ID NO: 386761 - DNA, 649 bp, Homo sapiens
ccactaggctgagactgtatgctagttttcacaacattaattagaaaaaacaagaatcccagcatggcacccaactgacctccacagagaaaatcattgaccaaatgagcactgtgagtcgttgaggtaggcagatgctccttaatgggacctcgaaggccgaaaaacaagacattgttgagtccattctggaaaagaatgggcagcaagcctcgataacgctctccaattctatggcatttcagtgccttgaaagcctgataagtgctggtaaatttgtcatgatgcttgtggtcttgaagcaatgtctgaactctttgcagtggagtgaaaattgcttctgctgtccttgcaagcactgccrccacgacacgggttgcaaactctggagcactgacatgcttgtggagaaggtaggataaatcctcatacagaccaaacataagtgcaagtgtagttgtcttttgcatcaattagggaaggattccaggatacaagtttcaaaatccatcccttctcaactgaagtattgcatcccgggttttgatgccatacagctgttgttgaaagaggaccttctgaatgggaaatgtgatttctacgtgttgaaggctgcacagcagccacacaagtcatgcttcatttcacc

SEQ ID NO: 386762 - DNA, 649 bp, Homo sapiens
ccactaggctgagactgtatgctagttttcacaacattaattagaaaaaacaagaatcccagcatggcacccaactgacctccacagagaaaatcattgaccaaatgagcactgtgagtcgttgaggtaggcagatgctccttaatgggacctcgaaggccgaaaaacaagacattgttgagtccattctggaaaagaatgggcagcaagcctcgataacgctctccaattctatggcatttcagtgccttgaaagcctgataagtgctggtaaatttgtcatgatgcttgtggtcttgaagcaatgtctgaactctttgcagtggagtgaaaattgcttctgctgtccttgcaagcactgccaccacgacacgggttgcaaactctggagcactgacatgcttgtggagaaggtaggataaatcctcatacagamcaaacataagtgcaagtgtagttgtcttttgcatcaattagggaaggattccaggatacaagtttcaaaatccatcccttctcaactgaagtattgcatcccgggttttgatgccatacagctgttgttgaaagaggaccttctgaatgggaaatgtgatttctacgtgttgaaggctgcacagcagccacacaagtcatgcttcatttcacc

SEQ ID NO: 386763 - DNA, 649 bp, Homo sapiens
ccactaggctgagactgtatgctagttttcacaacattaattagaaaaaacaagaatcccagcatggcacccaactgacctccacagagaaaatcattgaccaaatgagcactgtgagtcgttgaggtaggcagatgctccttaatgggacctcgaaggccgaaaaacaagacattgttgagtccattctggaaaagaatgggcagcaagcctcgataacgctctccaattctatggcatttcagtgccttgaaagcctgataagtgctggtaaatttgtcatgatgcttgtggtcttgaagcaatgtctgaactctttgcagtggagtgaaaattgcttctgctgtccttgcaagcactgccaccacgacacgggttgcaaactctggagcactgacatgcttgtggagaaggtaggataaatcctcatacagaccaaacataagtgcaagtgtagttgycttttgcatcaattagggaaggattccaggatacaagtttcaaaatccatcccttctcaactgaagtattgcatcccgggttttgatgccatacagctgttgttgaaagaggaccttctgaatgggaaatgtgatttctacgtgttgaaggctgcacagcagccacacaagtcatgcttcatttcacc

SEQ ID NO: 386764 - DNA, 546 bp, Homo sapiens
tgtgttgttttgagtcacttgaaaaaaaaaaatggttcaaacccacttcattaaaaaaaaaaaaaaaggcaggggaagccgggcatgatggctcacatctgtaatcccagcactttgggaggctgaggcaggtggatcacctgaggtcaggagttcaagaccagactggccaacatggtgaaaccctgtctccactaaaaatacaaaaattagccagaagtggtgacatgcacctgtaatcccagttatccgggaggctgaggtgggagaatggcttgaacctgggagacagaggttgcagtgagccaagatctcaccactgcactccagcctgggcaacagagtgaaactccatccaaaacaaaacaaacaaacaaaaaaaggggaacggtggtttaggaaataaagaatatggaatatggagaaaatatggaacctaagtcctttaacaagatgcacactgcccttcaaagacactaaaactaatacaatctattmacttatattagacatagctattccctctaacagaaaataaaacttgct

SEQ ID NO: 386765 - DNA, 560 bp, Homo sapiens
gactgaggaatgtttgcccaaaaaccacttgaggaaagatttacaagaaggtaggactgattagttggctaaatggtatcaagaattcaaagcacttgaagatttagaattgattactggattttgcaaagtaggtgattggtgaccttaacaagctaattggaatgtgcttgagaatatttgcataagtaaaacttataaaacttaggtatcataaaggagagttaagagttagatgaattgtctttagttcttccttgttggagactaatcctattgtggtgaaaatcttcattaaraaaaaaggtgatatattgaactttgggatatagcattaagtaaaacgaaattaaatgcctttttgaaaataagaacttgatttatcaataatttgaaactttgacttattcctttatgaaaacccaaaaacagtgaaaaataaaattatcaatagcaatgttagtaaaaccttatcttgtaaaagataattgagatatttcaaaggaattttaaaaacttagcatatataacatttattcaagaagtatctatattgtaga

SEQ ID NO: 386766 - DNA, 560 bp, Homo sapiens
gactgaggaatgtttgcccaaaaaccacttgaggaaagatttacaagaaggtaggactgattagttggctaaatggtatcaagaattcaaagcacttgaagatttagaattgattactggattttgcaaagtaggtgattggtgaccttaacaagctaattggaatgtgcttgagaatatttgcataagtaaaacttataaaacttaggtatcataaaggagagttaagagttagatgaattgtctttagttcttccttgttggagactaatcctattgtggtgaaaatcttcattaagaaaaaaggtgatatattgaactttgggatatagcattaagtaaaaygaaattaaatgcctttttgaaaataagaacttgatttatcaataatttgaaactttgacttattcctttatgaaaacccaaaaacagtgaaaaataaaattatcaatagcaatgttagtaaaaccttatcttgtaaaagataattgagatatttcaaaggaattttaaaaacttagcatatataacatttattcaagaagtatctatattgtaga

SEQ ID NO: 386767 - DNA, 549 bp, Homo sapiens
tttttatagcagcatgttttataatcctttgggtatatacccagtaatagaatggctgggtcaaaatggtatttctagttctagatccctttgttttaatgctcttcaagtgtagacgttaagatgccaaaagctgtaaagagacagcaggtgtgcatgttcctttccattaaaaaaatcttaaaaggctttgagttygtgaatgaacatgtgcctgttttcagttcccaatgtatgcaggaatcttccatgcagcttttaagggaagtgtgtcttatactttagaacaagtcctatgggttggtttcttgagaatgtggaagaataaaaaatatttactctgtgacgcttgaccagtgtgctccattgtcttgttagtacacatagtgggaggaggtagaatgttttgatatctgtaggattaatgggggtaatttgggggtttctagtgccttcttttttccttcaagttcactagatgaaaggacagtatcagatttgtctcaggtttttattctaagtagagccaaaagcctttatatccaaatc

SEQ ID NO: 386768 - DNA, 530 bp, Homo sapiens
atgggcatttaggattatgaataatgtggcagtctttcattattttagtttgcacagaaaccatctattctagtttagtctctgtcagcctgatttcttcaaaccatagtgctttcttaattgaattgtgttgttttttacttattattgttagccattgagatatataatttcttagcacttaggccagacagactttgggagattctgcaggcagtgcgatattaacaggcagtagaagataagatgggatttgttcttctgctagagacaagtggtaaattacttgacaagagggatgctttcttttgaggagtgtggagaaggcttttctcttcttagatgagggccgcttgtagtmccacattgcaaatcatatccagtgctgctacatcagctagcatagtcagcctttcccagaataggatgccacgtatggacaaggaaagcatctcttgctgaagctttgttcattatcacttcccccaccccagctttattgatgtataattcattgataaaaactgtat

SEQ ID NO: 386769 - DNA, 624 bp, Homo sapiens
gaggggtatgacaagttattccagcttttccaaatattaattatattggttttaagaagtctccataatcacaggtggcattttcccttcatctgtgggagtagatgatgcaacccacacagtgacttcgaacttctttgatagaatttccactgccttgttgaatttctcactgtatcgcatgtcttgccaagtgtgaaataatgagtttatgaaaacttcaaaactacacatcattttgcatgaataatacccattcgagctaaggagactgacatgttttgtagcatttccgggtaaatgaaaattttattggcattcaccatttactagctttgtacaatattataaaggtagaagcaaaacagcagcacattgtgcttggcttataaggattgctttagcaccattaygttaaataaacaatgtgcatagtgtattgtaagtgcctactcttgcaaatttacaatacttaaatatacttaacattctaatgtattaaaagtataaagaaaaaactaaacagacatttatagcaatactatgaaatctccaataattgttttgactgttgcctttggctctttagtgcaacttttctacattgtaattactatattgtgt

SEQ ID NO: 386770 - DNA, 577 bp, Homo sapiens
tggaattttttcccaattaggagagcagaatcctaactgctaatgagattgaattgtaatggcatttgtttctgagcatagacgttttattttccctacccattcatgacttcaattcaccaagcattaaacatttacttaggtctcatgctttatattagatattgaagcaattaaaattaagtgtttgtgagtcagattctctgttttagaggtcagcaaactatggtccaggtaccaaatctggcctgttgcctatttttaaaataagttctattggaacacagtcatgctcatttgtttacrtgttatctatggctggttttgcactacagcagtagcattgattagttgcaatagaaactctgtaactcacaaagcctgaaatatttactatctaactttttctgggaaaagtttgctgacccctgttctatttaataaacattataatgcttttaagtttaacataaaaaggtacttagatttatagaatattaaaattacaaataattcattccaggtcagttttagatgtttttgatcctttgatattttacattttaaggtttatcaa

SEQ ID NO: 386771 - DNA, 530 bp, Homo sapiens
tattaaaatcaaacataaatagtttgatttattagccttttacatttagttgaaattcttttccttgtgctaaaaatattgcttcagtacatttacatagatatatgctaccatattggagataaataatttaataggtatctcttagattccaaatgtagacaaatatatctttctgggactggatcacaggttattctcaactttaaaaattagaaatgttggctgtgcatggtggctcatgcctgtaatcccagcactttgggaggccgaggcaggtggatcatctgaggtcaggagttcgagaccagcctgaccaacatggcaaaaccccgtgtctactaaaaatacaaaaattagycggacatggtggcgcatgcctgtaatcccagctactcgggaggctgaggcaggagaatcgctggaatctggggggcggaggttgcagtgagctgaaattgtgtcactgcactccagcctgggcaacaagagcaaaactctgtctcaaaaaaaaaaaaaaagaaatgttc

SEQ ID NO: 386772 - DNA, 591 bp, Homo sapiens
ctatattactgtcatccatcagctacctcagctacctcccattttcccataagaggattgcacatctctattgctgcaatgttatagtaacttcctgtaggggaagaactctttcctgttgattggcatcaggctttttatcaaccgactgaaaaggaaygtgacctattccagtcccacccagctctctttcctttttccctctgcctccagaacatcatttcccagatacagctgatctttcagcctggaatcatggaaaaaaaaggcatagacaggcaataaaaagatcagtgtctgtcaccagttgtgggggaaggaaggaagaataaatagatgaagcaaagagatttgtagggcagtgaaactactatgtatgatattatattggtgaatacatgtcactatacgtttgtcaaaccatagaatttacaacacaaatagtaaactctaatgtaaactatggactttaattaataataatgcatcaaaattggctcatcaattgcacaaatgtgccacattaatgcaagatgttaataatagaggagtgtggaggagaatggcagagggaagaaagatgaatatgca

SEQ ID NO: 386773 - DNA, 591 bp, Homo sapiens
ctatattactgtcatccatcagctacctcagctacctcccattttcccataagaggattgcacatctctattgctgcaatgttatagtaacttcctgtaggggaagaactctttcctgttgattggcatcaggctttttatcaaccgactgaaaaggaacgtgacctattccagtcccacccagctctctttcctttttccctctgcctccagaacatcatttcccagatacagctgatctttcagcctggaatcatggaaaaaaaaggcatagacaggcaataaaaagatcagtgtctgtcaccagttgtgggggaaggaaggaagaataaatagatgaagcaaagagatttgtagggcagtgaaactactatgtatgatattatattggtgaatacatgtcactatacgtttgtcaaaccatagaatttacaacacaaatagtaaactctaatgtaaactatggactttarttaataataatgcatcaaaattggctcatcaattgcacaaatgtgccacattaatgcaagatgttaataatagaggagtgtggaggagaatggcagagggaagaaagatgaatatgca

SEQ ID NO: 386774 - DNA, 580 bp, Homo sapiens
ggagctcagctgttccctttgttggaaactcatttaccccagatatcctcatagctaaccctctcatctcctttaagrcagctaatttggtaacttcatataatgtctgtcctgaccatcatattttaaattgcaatctgccctctcctactataaaacttctaatcagcttcctgctctatttttctggtgtgtggcaccaatcagtttgatggtactattatattaattatttgtaatattctagtctccctctagaacttgagctacataagggcagagatcttgttgagagacaggactagctggattacctaggctgactaagaatccctaagcctagctgggaaggtaactgcatccacctttaaatacagggcttgcaacttagctcacacccaaccaatcaggtagtaaagagagctcactaaaatgctaattaggcaaaaacaggaggtaaagaaatagccaatcatctatcacctgagagcacagcaggagggacaatgatccggatataaacccagacattcgagcctgcaatggctaccctctttgggtcccctccctttgtatggga

SEQ ID NO: 386775 - DNA, 585 bp, Homo sapiens
ttagctaatttttaggtcattaattaattgcctttattagtgattaaaaatgtgtatgctgattgtacctaaaattggaggcaatttaagacttgaaaaggatactaccttttacattttgttagataaatattgtagaaaaaatgtattttatgattaaaagaaaatgaaattacgtagctttctatttgctttttatttgtagctttctagtaaatctttagtataaaactgtttaacaaaaaaaaagcctagctttccttgaattatattcttgcttgtgaatgcaaaaccttccaaattatttgaaacatttatgtattcagaatattactttgtggttttcttcttaagaagctaaacaattcattaaacaagctgctcttgaatagtagatcagaacaagcataagctgccttctgtagaattctattgtggaactgtacccatttgtgttttctttgaagccataaaaatgaaacccttatgctcatattaaaagcataagaaaggcatctattatgtcaatagatttaaaacacggccttagacacagtragaaccactctaaaggttaagaagttc

SEQ ID NO: 386776 - DNA, 685 bp, Homo sapiens
ccaatgtcctgaacattttccctagtgttttcttgtagtagtttaatagtttgaagtaacatatattttaaatcactattttaaccgaacatttaaagccatttaaatgatcatggcaattgtagccataaagttctctttccactgatatttattattacattgaaatctccttaaaggtaagaacatatttactattttcagagttccaacatctaaaacattgcctgaaacacagcaggcactctgtagacagctgcagaaatgaacatttttgtaacaaacctggtgaagtacctggttttttctcatcctatacccttgggtaaataattctttarttttttttatgaacattcttttttttttttttttgagatggagtctcactctatcacacagactggagtgcagtggcgtgatcttagctcactgcaacctccaccacccgggttcaagcaattctcctgcctcagcctcccaagtagctgggattacaggcacctgccaccgtgcccaggtaatttttgtatttttagtagagatggggtttcaccatcttggccaggctggtcttgaactcctgacctcgtgatccacccgccttggcctcccaaagtgctgggattacaggtgtgagccaccacgcccaggctttaatgaacattcttaagttatggtaccc

SEQ ID NO: 386777 - DNA, 685 bp, Homo sapiens
ccaatgtcctgaacattttccctagtgttttcttgtagtagtttaatagtttgaagtaacatatattttaaatcactattttaaccgaacatttaaagccatttaaatgatcatggcaattgtagccataaagttctctttccactgatatttattattacattgaaatctccttaaaggtaagaacatatttactattttcagagttccaacatctaaaacattgcctgaaacacagcaggcactctgtagacagctgcagaaatgaacatttttgtaacaaacctggtgaagtacctggttttttctcatcctatacccttgggtaaataattctttaattttttttatgaacattcttttttttttttttttgagatggagtctcactctatcacacagactggagtgcagtggcgtgatcttagctcactgcaacctccaccacccgggttcaagcaattctcctgcctcagcctcccaagtagctgggattacaggcacctgccaccgygcccaggtaatttttgtatttttagtagagatggggtttcaccatcttggccaggctggtcttgaactcctgacctcgtgatccacccgccttggcctcccaaagtgctgggattacaggtgtgagccaccacgcccaggctttaatgaacattcttaagttatggtaccc

SEQ ID NO: 386778 - DNA, 685 bp, Homo sapiens
ccaatgtcctgaacattttccctagtgttttcttgtagtagtttaatagtttgaagtaacatatattttaaatcactattttaaccgaacatttaaagccatttaaatgatcatggcaattgtagccataaagttctctttccactgatatttattattacattgaaatctccttaaaggtaagaacatatttactattttcagagttccaacatctaaaacattgcctgaaacacagcaggcactctgtagacagctgcagaaatgaacatttttgtaacaaacctggtgaagtacctggttttttctcatcctatacccttgggtaaataattctttaattttttttatgaacattcttttttttttttttttgagatggagtctcactctatcacacagactggagtgcagtggcgtgatcttagctcactgcaacctccaccacccgggttcaagcaattctcctgcctcagcctcccaagtagctgggattacaggcacctgccaccgtrcccaggtaatttttgtatttttagtagagatggggtttcaccatcttggccaggctggtcttgaactcctgacctcgtgatccacccgccttggcctcccaaagtgctgggattacaggtgtgagccaccacgcccaggctttaatgaacattcttaagttatggtaccc

SEQ ID NO: 386779 - DNA, 616 bp, Homo sapiens
atttaaaataaatgccttttaggctttggcaactgtcacagaaaactaacttgaagcaattatcaaaacttgatctgttgtcagaagccaactaagttttagagggattatactgtcaaagaaaacactagcctggactgaaaaagcctttgayggagttcattgtaaaataacctacaggctttcagaattaccccagcattcttgaagctcccccaagacaacatcctcctgagaccccattttagatgtggccatggaggaagatggacaagaaagttccagaaggtagaaccaaggatctgggcaattgaggtccaaggatcccagccaaaaccaagggctgggcacttggctcatgcccgtaatcccaacactttgggaggctgaggcaggaatgctgcttgaggccaggagttcaagaccagtctggtcaacataggggaacaccatctctactgaaaattttaaaaaagaaaaaaaaactggtcaggtgtgggggggtgtgcctgtagttcccagccacttggaaggctgaatcagaagtatttgagcccaagagttcaaggctacagtgaattattatcatgccattgcactccatcctgggcaacag

SEQ ID NO: 386780 - DNA, 616 bp, Homo sapiens
atttaaaataaatgccttttaggctttggcaactgtcacagaaaactaacttgaagcaattatcaaaacttgatctgttgtcagaagccaactaagttttagagggattatactgtcaaagaaaacactagcctggactgaaaaagcctttgacggagttcattgtaaaataacctacaggctttcagaattaccccagcattcttgaagctcccccaagacaacatcctcctgagaccccattttagatgtggccatggaggaagatggacaagaaagttccagaaggtagaaccaaggatctgggcaattgargtccaaggatcccagccaaaaccaagggctgggcacttggctcatgcccgtaatcccaacactttgggaggctgaggcaggaatgctgcttgaggccaggagttcaagaccagtctggtcaacataggggaacaccatctctactgaaaattttaaaaaagaaaaaaaaactggtcaggtgtgggggggtgtgcctgtagttcccagccacttggaaggctgaatcagaagtatttgagcccaagagttcaaggctacagtgaattattatcatgccattgcactccatcctgggcaacag

SEQ ID NO: 386781 - DNA, 617 bp, Homo sapiens
atattagtcctgggaaaatagaaagtttggaaaataataaaactaaaattttgccagaatacacaaaaaacagtaaaaacactattgatagtttctrtattcttatttcctgtctgaacaagaagttactagagcaactcaataatcagtcatcagagaggtaatgcttgacatgttgcagaatggttcatgtgagaaacttcaaaagtacacacagccatgacaagctctactccatgtataagtcagatgcaatgtctggtttcatgacatctggaaactgtttccttcaaccagaaagactgcattgcctcaaatcccaccaagaaatagagaagttaactgtctaggcagttgagttaatccccgaggaccttgggaagacttgaacaccctaggtaatatgagaaaagggctaccagaagcatgaggaattgtcagaaacagcctgtgtaaagtttgtcaattccatcctgacaagtatatgccaacttattaaatactgatctctaaatacgttggcaagagtatttaacaacattatgagatgataaataatatgaccataaaaaagaagtttagagttggatatagggatattaagtcctggtaactat

SEQ ID NO: 386782 - DNA, 579 bp, Homo sapiens
tcattcctatttttaaaaatgtattgagatttgttttgtggcctacyatatggtctatcttagaaaatgttccatgtgctgatgagaagaatgtgtattctgcagttttggggtagaatattctgtacatatatcttacgttcctttgttctagagtgtacgttaagcctagtgtttctatgttgccttgctgtcttgatgatttgtctagtgctgtcagtggagtattgaattcccccattattattacgttgctgtctatctcatttctcaggtctagtagtaattgttttatgagtctgggagctccagtgttaggtgcatttaatttacggttgtaatttcttcttgttagattgatccttttatcattatataattaccttctttgactttttttctttttatactgttgctgctttaaagtctgttttatctgatataagactgactactgctcacttttggtttccatttgcattcaatgtatttttccacctctttaccttgagtttatatgaatccttgtgttaggtgagtctcttgaagacagtagatatttggtttgtgatttttaaa

SEQ ID NO: 386783 - DNA, 515 bp, Homo sapiens
tcctggaccaccattttagactatgttttaatttagattatgtatttttttctactttcttaattttaactacaaatttaaatgatacatgatgttaaaactttaacttaagcgcttgtttttagattaaaactcaggtctataaactgcctgatgtgcatgttttcttggatgtaccagtgatatcttagattcaraacagttaagcctgaagccattctctctcttttacctctctcttcacctacatcctccaaaagaagccttttttgtgcctaatttattttttcacatttaaaaaaattttaactgaggtattagcaaatataatacaggctgtggtaaaagaacaagaactagaaatagtgcaaaactgcccagttttttgttaaatcatttcttttttgccatggcatttaataattttgtgtatattctagcaaattgggattatttgatgaccactcttcagattttttatttgggaggtggagaggctgcaggtagaaagacca

SEQ ID NO: 386784 - DNA, 515 bp, Homo sapiens
tcctggaccaccattttagactatgttttaatttagattatgtatttttttctactttcttaattttaactacaaatttaaatgatacatgatgttaaaactttaacttaagcgcttgtttttagattaaaactcaggtctataaactgcctgatgtgcatgttttcttggatgtaccagtgatatcttagattcagwacagttaagcctgaagccattctctctcttttacctctctcttcacctacatcctccaaaagaagccttttttgtgcctaatttattttttcacatttaaaaaaattttaactgaggtattagcaaatataatacaggctgtggtaaaagaacaagaactagaaatagtgcaaaactgcccagttttttgttaaatcatttcttttttgccatggcatttaataattttgtgtatattctagcaaattgggattatttgatgaccactcttcagattttttatttgggaggtggagaggctgcaggtagaaagacca

SEQ ID NO: 386785 - DNA, 581 bp, Homo sapiens
gatatatttaaagtgctgaaagaaaaatagtttcagccaaagatactatttccagcaaggttatccttcataaatgaaagagaaataaaggctttctcagacaagcaaaagctgagggaatttgttaccactagactgaccctacaaaaaatgtttaatggagccttacaccggaagcaaactaatgatatctaccatcataaaaacacatgaaaatataaaacccactggtagaggaaacacacaagaaaaagaaaagattcaaatrttaccgctacagaaaactaccaaaccataatgataaaaaataagagagaaaggaacaaaggacatacaaaactaccagaaatcaattaataaaatgacagaaataagcccccacatattaataataaccttgaatataaatggattaaactttccacttaaaagatatagattggctgaataggtaaacaacatggcccaactatatgttacctacaagaaactcatcttacctataaagacacatagaaactgaaagtataggaatggaaaaagagattccatgaaaatgaaagccaaaaatgagtaggagt

SEQ ID NO: 386786 - DNA, 565 bp, Homo sapiens
ctttaaaatcagtattttgaattctttttctgggattttataaatttactttcgattggaatctattgctgggggattatgttcctttacgagtgtcaaacttccttgctttttcgtgttttctgtgtccttatattggtatctgtgcatctggcataatagtcactttcttccaattttttaagttttctctcatggggagtgcattttcctgaagacgtatctatggtgttggttgggtggggcactttggcgttgattctgggtgcatgcactagtgtagcctctgtatgatttctttagctgtaaacagcatcagtggtgcctgtgatttcctcaatggcttagggtacagttattagtgaagtatatggtgaagtttttctggggactgggatgccagacgggccaagcttttggccccagtagtggcagtggtgggctgagctggctgtctttggggcctagggcagcatacattggcactggtgycaacaggttcaaacaggccaattcttgggcctccaggtggcttgctcaaatgcaaggaatggcagcagtgggc

SEQ ID NO: 386787 - DNA, 625 bp, Homo sapiens
gtttgcctaggcctttcctgggccctaaagcataacaaaataatagaggaattcttaatagaacccatttaggattaaacaagttttactgtgggtctgaagaaactccccaggcctccacaaacaagtttattgagggtctgaaggaactccccaaacctctgtgatttagcaggagacaagataagggtaatcaccccagcacctggacccattgagattaagtaaatttactgaggctccagaggaaggtcttcaggactcagaccttagttgtggattaaaagaagttaatcacttatgtctttaggtgaatgcacacttacacatagacatataacttaaaaggtatatataagctctggaaaactrtaattttgagttggtctggcgataatttccaagtcttctccctgtaactggttgcagaaatataaattctcttcctccccagtttatctgcaccttgttattgggccacaagaaatagcagcctgaccctcagtttgatccaggaacaattgcactccagcctgggcaacagagcaaatctctatctcaaaaaaaaagaaaaaagaaagaaacggtagatgggatatataatttatggcatattcatacaatg

SEQ ID NO: 386788 - DNA, 405 bp, Homo sapiens
tgaagtgaacccccagcaaactgcagcagccctatagaagagggagttgaccattgaaataaaaacaaaaaataaaacagaaagtgacaacagcatcaacaacaacaaaaatgtccccacaaaaccccatccaagggtaagcagcytcaaagatctaaactagacaaactcatgaagatgagaaagaatcaatgaaaaaacgctgaaaatccaaaagaccagagtgcctcttctcctccaagttatcgcagtgtctctctagcaagggcacacaactgaatggaggatgagatggacaaactgacagaagtaggcatcagaagataggcaataaaaaaccctgctgagctaaaggagcatgttctaacacaatgcaaagaagctaagaaccttgataaaagatta

SEQ ID NO: 386789 - DNA, 582 bp, Homo sapiens
ataccacataaacagtaagcacaagaaagctggtgtggttgtattaatctcaaaatagattaataataagaaatattaccaaagataaggaggggtattttaaatgataaaagggctggttcttcaagatgacaaataatccaaaaaatttgaacgcattattatatcttcaaagtacacacaaaacaagctggcccccatcgtgcatgcctgttgtcccartgacttaggaggctgagatgggaggattccttgagtccaggagtttgaggctagcctgggaaacaagacaccatctgtattagtccattttcatgctgctgataaagacgtacccgagactgggcaatttacagaagaaagaggtttaattggacttacagttccacttggctggggaagtctcagaatcatggcagaaggcaaggaggagcaagtcctgctttacatggatggcagcaggcaaagagagaatgaggaagatgcaaaagcagaaacccctgatgaaaccctcagatctcatgagacttattcactcctatgagaacagtatgggggaaaccacccccatgattcaattat

SEQ ID NO: 386790 - DNA, 582 bp, Homo sapiens
ataccacataaacagtaagcacaagaaagctggtgtggttgtattaatctcaaaatagattaataataagaaatattaccaaagataaggaggggtattttaaatgataaaagggctggttcttcaagatgacaaataatccaaaaaatttgaacgcattattatatcttcaaagtacacacaaaacaagctggcccccatcgtgcatgcctgttgtcccagtgacttaggaggctgagatgggaggattccttgagtccaggagtttgaggctagcctgggaaacaagacaccatctgtattagtccattttcatgctgctgataaagacgtacccragactgggcaatttacagaagaaagaggtttaattggacttacagttccacttggctggggaagtctcagaatcatggcagaaggcaaggaggagcaagtcctgctttacatggatggcagcaggcaaagagagaatgaggaagatgcaaaagcagaaacccctgatgaaaccctcagatctcatgagacttattcactcctatgagaacagtatgggggaaaccacccccatgattcaattat

SEQ ID NO: 386791 - DNA, 582 bp, Homo sapiens
ataccacataaacagtaagcacaagaaagctggtgtggttgtattaatctcaaaatagattaataataagaaatattaccaaagataaggaggggtattttaaatgataaaagggctggttcttcaagatgacaaataatccaaaaaatttgaacgcattattatatcttcaaagtacacacaaaacaagctggcccccatcgtgcatgcctgttgtcccagtgacttaggaggctgagatgggaggattccttgagtccaggagtttgaggctagcctgggaaacaagacaccatctgtattagtccattttcatgctgctgataaagacgtacccgagactgggcaatttacagaagaaagaggtttaattggacttacagttccacttggctggggaagtctcagaatcatggcagaaggcaaggaggagcaagtcctgcyttacatggatggcagcaggcaaagagagaatgaggaagatgcaaaagcagaaacccctgatgaaaccctcagatctcatgagacttattcactcctatgagaacagtatgggggaaaccacccccatgattcaattat

SEQ ID NO: 386792 - DNA, 582 bp, Homo sapiens
ataccacataaacagtaagcacaagaaagctggtgtggttgtattaatctcaaaatagattaataataagaaatattaccaaagataaggaggggtattttaaatgataaaagggctggttcttcaagatgacaaataatccaaaaaatttgaacgcattattatatcttcaaagtacacacaaaacaagctggcccccatcgtgcatgcctgttgtcccagtgacttaggaggctgagatgggaggattccttgagtccaggagtttgaggctagcctgggaaacaagacaccatctgtattagtccattttcatgctgctgataaagacgtacccgagactgggcaatttacagaagaaagaggtttaattggacttacagttccacttggctggggaagtctcagaatcatggcagaaggcaaggaggagcaagtcctgctttacatggatggcagcaggcaaagagagaatgargaagatgcaaaagcagaaacccctgatgaaaccctcagatctcatgagacttattcactcctatgagaacagtatgggggaaaccacccccatgattcaattat

SEQ ID NO: 386793 - DNA, 634 bp, Homo sapiens
ccaacacaagaagaaatggaaaatctgaatggtgctaaaaaatgttaaaaaaaatcaaggccgcatgaaaaactgttctaagttttaaaattccaggtccatatggttttattcgtgaattctccctaacattgtaggaggaaraaaattgccaattgttcacaatttttttcctcagagaatagataagaggaaatatttcccagtttcttttataagagcaacataagcctgatatcaaagtctagcaaggatattgcaataaataaataaaggaataaataaataaataatgaataaaaatgcaaaaattctaacaaaatactattaagcctaatcaaccaatatttaaaagggacactatctcatgaccagctgcattttatttcaaaaaagtaagattggtctaacatttctaaatcaatttgtttcactgcactagcaagacagaaaatcaaacataattttcttaaaaattttagaaaaatgtaatgaaagtcaacacttatttatgataaataggtgataaatgataaatctcagctgaccatgactagaaagcaactttcataaattaacaaaaggtatctgtgacatatctacagctaacataaaccttaatcataaaacattg

SEQ ID NO: 386794 - DNA, 634 bp, Homo sapiens
ccaacacaagaagaaatggaaaatctgaatggtgctaaaaaatgttaaaaaaaatcaaggccgcatgaaaaactgttctaagttttaaaattccaggtccatatggttttattcgtgaattctccctaacattgtaggaggaaaaaaattgccaattgttcacaatttttttcctcagagaatagataagaggaaatatttcccagtttcttttataagagcaacataagcctgatatcaaagtctagcaaggatattgcaataaataaataaaggaataaataaataaataatgaataaaaatgcaaaaattctaacaaaatactattaagcctaatcaaccaatatttaaaagggacactatctcatgaccagctgcattttatttcaaaaaagtaagattggtytaacatttctaaatcaatttgtttcactgcactagcaagacagaaaatcaaacataattttcttaaaaattttagaaaaatgtaatgaaagtcaacacttatttatgataaataggtgataaatgataaatctcagctgaccatgactagaaagcaactttcataaattaacaaaaggtatctgtgacatatctacagctaacataaaccttaatcataaaacattg

SEQ ID NO: 386795 - DNA, 634 bp, Homo sapiens
ccaacacaagaagaaatggaaaatctgaatggtgctaaaaaatgttaaaaaaaatcaaggccgcatgaaaaactgttctaagttttaaaattccaggtccatatggttttattcgtgaattctccctaacattgtaggaggaaaaaaattgccaattgttcacaatttttttcctcagagaatagataagaggaaatatttcccagtttcttttataagagcaacataagcctgatatcaaagtctagcaaggatattgcaataaataaataaaggaataaataaataaataatgaataaaaatgcaaaaattctaacaaaatactattaagcctaatcaaccaatatttaaaagggacactatctcatgaccagctgcattttatttcaaaaaagtaagattggtctaacatttctaaatcaatttgtttcactgcactagcaagacagaaaatcaaacataattttcttaaaaattttagaaaaatgtaatgaaagtcaacacttatttatgataaataggtgataaatgataaatctcagctgaccatgactagaaagcaactttcataaattaayaaaaggtatctgtgacatatctacagctaacataaaccttaatcataaaacattg

SEQ ID NO: 386796 - DNA, 589 bp, Homo sapiens
ttccaggttttggctagctgctatgaatattcgtgcacagtttctgtgtgaatgtaagtttttatttctctgacgtaaatatccaagagtgcaattgctgggttgaatggtggttacgtttttttttttttttttttttcccaaaaaccctactgaactgatttctagggtggctgtcccatttttcattctcatatgcaatatatgagtgattcagtttctttgcatccttgccagcatttggtgttgtgactgttttttattttagctgttctgataggtgtgtagttgtatctcactgcggttataatttgtgtttgttaatgcacgttgaacatctttacagatgcttgtttgctatgcgtgtgtctgcttggcaaaaaatctgttcatgacctttgtccattttctaactggattcttagtttgctattcagttttgaaaattctttctgtattttaratactagtgctttgccagatacgtggtttgcaaatattttctcccttattttaatctaacagaatttttcacagagcaaaaggtttaaattttggtgaaatccagtttatcatttttctctttttg

SEQ ID NO: 386797 - DNA, 626 bp, Homo sapiens
taaccagtttgctggcctgttcactgacagcaaacgtaagagtaagccaggaaagaccacttggagcagaaaagagctgtcctggctgagacatgtccaaactgccaatccacacaaacataaaatattgttgttttaagccactatattgtggggtgattttgttaarcagcaatagaaagcaaatacacttaggttcttagtgcatgattaaaacttttgcctgtaattctagcactttgggaggccaaggcaggggaactgcttgagcctaggagttcaagaccagccctggcaacatagcaagaccccatctgtacaataataataatagtaataataatactactaaattaaaaatgagccaggcatggtggtgcatgtctgtagtcctagctactcaggaggctaaggtgggaggatcgcttaagcacaggagttcaaggttataatgagctgtgatcatgccactgcactccagcctggacaacagagcaagatcctgtctcaaaagagagagagagagagagagtcactctaatggcccaggttgaaatgcaagctccatctccggcatgtgaccttgggcatggcctgtgatctctgtgaacctgagtctcctcatc

SEQ ID NO: 386798 - DNA, 545 bp, Homo sapiens
gctcacgcctgtaatcccagcactctgggaggccgaggcgggtggatcacgaggtcaggagttcgagaccagcctgaccaacacggtgaaaccccgtctgtactaaaaatgcaaatatcagccgggcttggtggcgcgcgcctgtaatcccagctactcgggaggctaaggcaggagaatcgcttgaacctgggaggcggaggtggcagtgagctgagatccgccactgcactccagcctgggcgacagagcgagactccgcctcaaaaagaaaaaagaaaactaagaagggaagatttttccaagaattggagacttcattccatctgaggagtgcagtgtaggcccagtggttaaaaaccagactgcytaggttctcaaatatcagggccattgctacttagctgtgtgacctaaactctctaagcctcagttttcccgtctgtaaaagggggatgatggtattttctagcttgtgagtttacggagaagagtaaataagacaatttgtgtcaagtgcttactacagtgtctggcaggtagta

SEQ ID NO: 386799 - DNA, 545 bp, Homo sapiens
gctcacgcctgtaatcccagcactctgggaggccgaggcgggtggatcacgaggtcaggagttcgagaccagcctgaccaacacggtgaaaccccgtctgtactaaaaatgcaaatatcagccgggcttggtggcgcgcgcctgtaatcccagctactcgggaggctaaggcaggagaatcgcttgaacctgggaggcggaggtggcagtgagctgagatccgccactgcactccagcctgggcgacagagcgagactccgcctcaaaaagaaaaaagaaaactaagaagggaagatttttccaagaattggagacttcattccatctgaggagtgcagtgtaggcccagtggttaaaaaccagactgcctaggttctcaaatatcagggccattgctacttagctgtgtgacytaaactctctaagcctcagttttcccgtctgtaaaagggggatgatggtattttctagcttgtgagtttacggagaagagtaaataagacaatttgtgtcaagtgcttactacagtgtctggcaggtagta

SEQ ID NO: 386800 - DNA, 545 bp, Homo sapiens
gctcacgcctgtaatcccagcactctgggaggccgaggcgggtggatcacgaggtcaggagttcgagaccagcctgaccaacacggtgaaaccccgtctgtactaaaaatgcaaatatcagccgggcttggtggcgcgcgcctgtaatcccagctactcgggaggctaaggcaggagaatcgcttgaacctgggaggcggaggtggcagtgagctgagatccgccactgcactccagcctgggcgacagagcgagactccgcctcaaaaagaaaaaagaaaactaagaagggaagatttttccaagaattggagacttcattccatctgaggagtgcagtgtaggcccagtggttaaaaaccagactgcctaggttctcaaatatcagggccattgctacttagctgtgtgacctaaactctctaagcytcagttttcccgtctgtaaaagggggatgatggtattttctagcttgtgagtttacggagaagagtaaataagacaatttgtgtcaagtgcttactacagtgtctggcaggtagta

SEQ ID NO: 386801 - DNA, 531 bp, Homo sapiens
tatcatggctgtaatccacaaagaaggaagtgaggacaaggaaacaccaaggttcagagaggtttagtgacttacccaagcttgcacagctagtgaataatgagttggtctctgcatccaggcagtgtggctcaaagcttattctctcaccaacccagtatacacaggctgtccccagggtgtagcatagcatttggcacatgtagcctctgctaacaagtgaattaaattgtacctggggttctctctgcctttcattctatgcctccgaagaatactaaataaaataaaataaaacaacaacaacataaaaacctagcttcttccttgccttcaagctgtctttgatgtcttagtgtgcacgatgaaggagatgkaccatcagtctcctttgggtggccattggttcatgcctgcagtctggctttcagcaggtcattctcagcacatactctggggcagacactttctcaggttctcagtacacagcgggaaacaagtcagtattcctggcctggtggagctcagtca

SEQ ID NO: 386802 - DNA, 568 bp, Homo sapiens
cttgcttcccactcctctccaggtctctgtgcttttatacattgattatgccttccaatagtgcttgctaggggaaatcctactcacccttcaagaatcagcaaactttacatccactatgaagcacactatgaagcattcccatctttctccaaaacaggccaagtacctcttctacagggccaaagcaaccccatatactctctgacattgtcacactgaatgtgttttgtttacatacacctctctcctcagattatgaattcaagtacttggactttgatttatttctcttggtggatgccccgtgtttcaccactgcccaggctggtctcaaactcctgacctcaggtgatccractgtttcagcctcccaaagtgctagggttacaggcatgagccactgtgcccggcctgtggtttttaaaatgctcctcagtcttacctataaatgttattgcatccatcctttttaaaccaggggaaaaaggtttcctactatcacttaccaaagagatgtgaaactagtcagtatgggtgaatgatgtttcttggagattttatgagg

SEQ ID NO: 386803 - DNA, 585 bp, Homo sapiens
cccctgacctcaggtgatccgcccaccttggcctcccaaagtgctaggattacaggtgtgatccactgtgcctagaccattatttgactttctaaactatattcactttctacttaaaaaaataaatttacttgaaattaaaatgcagattcawgggcccatccctggagatttgtacttacttagtaggggaagaatctgcattttaaattaacttcccaaatttgagaaacaaatcaatgtagtccttttctgtgcttattctaaatataattttttcaaagacacttttgggggttttaaatttttcttctaattttactgttctcatttcttccttggcttcaagcttcttgataatgtataaataggtatatatgtgcaatttaaaaacatttgtccttgagtgtgtctatttttccttcttttatgtgcctccttttataacataagctcatttgagaagtccctataaggtcacatcatctttagattcattctccttctattttacttggggattatttttagttgtatagtgaaaattttatttttgagaacttcccacttcttaatacaagcttc

SEQ ID NO: 386804 - DNA, 585 bp, Homo sapiens
cccctgacctcaggtgatccgcccaccttggcctcccaaagtgctaggattacaggtgtgatccactgtgcctagaccattatttgactttctaaactatattcactttctacttaaaaaaataaatttacttgaaattaaaatgcagattcatgggcccatccctggagatttgtacttacttagtaggggaagaatctgcattttaaattaacttcccaaatttgagaaacaaatcaatgtagtccttttctgtgcttattctaaatataattttttcaaagacacttttgggggttttaaatttttcttctaattttactgttctcatttcttccttggcttcaagcttcttgataatgtataaataggtatatatgtgcaatttaaaaacatttgtccttgagtgtgtctatttttccttcttttrtgtgcctccttttataacataagctcatttgagaagtccctataaggtcacatcatctttagattcattctccttctattttacttggggattatttttagttgtatagtgaaaattttatttttgagaacttcccacttcttaatacaagcttc

SEQ ID NO: 386805 - DNA, 585 bp, Homo sapiens
cccctgacctcaggtgatccgcccaccttggcctcccaaagtgctaggattacaggtgtgatccactgtgcctagaccattatttgactttctaaactatattcactttctacttaaaaaaataaatttacttgaaattaaaatgcagattcatgggcccatccctggagatttgtacttacttagtaggggaagaatctgcattttaaattaacttcccaaatttgagaaacaaatcaatgtagtccttttctgtgcttattctaaatataattttttcaaagacacttttgggggttttaaatttttcttctaattttactgttctcatttcttccttggcttcaagcttcttgataatgtataaataggtatatatgtgcaatttaaaaacatttgtccttgagtgtgtctatttttccttcttttatgtgcctccttttataacataagctcatttgagaagtccctataaggtcacatcatctttagattcattctccttctattttacttgggrattatttttagttgtatagtgaaaattttatttttgagaacttcccacttcttaatacaagcttc

SEQ ID NO: 386806 - DNA, 526 bp, Homo sapiens
gttgcgaattgtgctgctataaacatgcgtgtacaagtatctttttcgtataatgacttattttcctctggatgggtacccagtagtggaattgctgggtcaaatggtagttctacttttagttctttaaggaatcttygcactgttctccataatgattttactagtttacattcccatcagcagcatagaagtgtttccttttcactgcgtccatgccaatatctatttattatttatttttttattgtggccactcttgcaggagtaaggtggtatcacattgtggttttgatttgcatttccctgataattagtgacgttgaccatttttttcacatgtttgttggccatttgtatatcttcttttgagaactgtctatgcatacccttagccctctttttgatgtgattgatttttttttcttgctaatttgtttgagttccttgtaaattctggatattagtcctttgctggacgtatagattgtgaagattttctcccactctctgagttgtctgttta

SEQ ID NO: 386807 - DNA, 414 bp, Homo sapiens
atatacaagttcagtgcttgggatagatgtctggacaggagatatatgcttaggagaggaatgactgtaaatagaaaagagtagagtttcaaggactgagtcctgggtcacactggcctaaagagatcagagagaagaggaggaatcagcaaagagcctgacaaagaacatccagtgagataagaggaaaagtaagagagaattatgttytgaaagctaatcaaaaacaacatatccacaatgagggaataatcagctgtgtcaaatgctgttaataagtcacatgagaattggcaattggatgtggcaatgaaagtcaatggtaatctcgatgagaaaagttttgatagagaagtgggaatgaaaagtttgagtggcatgtgtttaagaaagaataagaggagaggaagtgga

SEQ ID NO: 386808 - DNA, 656 bp, Homo sapiens
gcctaaaatttagatcaccactattattagaaaaatgttaattgattgacatattgtatacctttgtctggggtctggaccccagcttgtatggattctcattactcctttctttttccaatgtacttctcttgcaatattatgtgaaaactcatctctcattctccttgaattcacagcattttgcataattaaatcctgtgcagccgagatgtaagactttttccactttatagctctttataaacgtcctacttaacattcaacagccttaattattttttagaggattgttactacctgtcttcaaaactccattttatcatttaaaggcagtagacaagggaaacagaacaatggtaggctcaatgattctatttcccctgaaataatattcttcatttttggaatgtttattgataagttcaataaataagtgactttcaaaataaattcatattcattatacaatatgayaatcactatttcattttatagtcagagtctgatgaaagtagatctgaagaaaactggcatttgccaatactatcatctccctgaaatgcaaacgtttatacccatgttcaagatgtgtactatattcttccctgaagtacataattttaattttatgttgttatctcaaatatcctttc

SEQ ID NO: 386809 - DNA, 560 bp, Homo sapiens
tctcttctacctcatgatcatgctgcaaattttgccaactttcatgctctgcctcccttttaaatataagttccaatttcagacaatctcattacaaattcatatcagcatatgctgttagaagcagccaggccacatcttgaacactgctgtttagaaatttcttcctccatataccctgattcatctctctcaagttcaaagttccaaacatctctagggcaggggcaaaatggcaccagtccctttgctacagcatagcaagaatgacctttactccagttttcaataggttcctcatctccatctgaggccactgaacttcattgtccatatcactatcagtattttggttaaaaccatacaacaagtctctaggaagttcaaaactttcccacatctccccgtcttcttctgagacttccaaattgttccaacctctgcccattacccagttccaaagttgactccacattttcaggcatctttatagcatcgccccactactgrcatcaatttttttattagtccattctcccactgctataaagaactacctg

SEQ ID NO: 386810 - DNA, 573 bp, Homo sapiens
atgtgtaacataagtgctataaaagagttcttgaggctgggcatggtggcttatgcctgtaatcccagcactttgggaggccgaggcaggtggatcacctgaggtcaggagttcgagatcagcctggccaatatggcgaaaccccatctctactaaatacacaaaaattaactgggcatggtggcaggcacctgcaatcccagctactagggaggctgaggcagggagaattgcttgaacccaggaggcagaggttgcagtgagctgagagcatgacagtgcactccagcctgggtgacagagcgagactttgtctcaaaaaaaaaaataaaaataaaaaaataaaaaataaaaaaaagagttmttgaaattccttatgtaggctttttttttaaattgtgcactaatgatcatagcaaaatctgattattggcaatagaaaagagataaaggcattcaagaggggggaaggtaggagatgggaggacatttcttatctaaagattttattctattgagatgagggaaagcagtaggcaaatacagtaaaaacacagagaaaaaagccatata

SEQ ID NO: 386811 - DNA, 531 bp, Homo sapiens
atgatatattaatgtaagttaacaaattgaaggttaaacttaagggagatgggttgggtacttttcttggtggatcttgtgaggttttgcacatctgattgagcagttgtccaagggggaaggctttaagtatgccaacatgaactgatgttatgcagacatccttctggtcttctgaaatgggagtattgagatttttattaataaaacttaaatttttargtaaaggtgctaattccaagacaagtctgcttgattgcttttctggttgcagacatttagatttcattataagtttttgtttccttttctgaaaatgctttttcctaagagaggaaaatgaaatcctttagtggaaaggaaataattgaaataagattggaattttagaatgtagatataggttgcaaaacaggaatttgatggaaagaagttacttaaatcagatagctatcgattcaattcaagaattcaaatccatgattattagcattatattgtgctagatagtaatctatcaggatgaaatct

SEQ ID NO: 386812 - DNA, 544 bp, Homo sapiens
aagagatggaagccttggaaggtaggcggtgtttcttgatactgcatgtsccagggaggacaaataacaaccacacagtttgctctcccaagccccataggcattcaaaggaagcctgttgactgcaattaggatgccccagcttttaaaagccgacactcagcagacagtaggcttcatcatgggtgacacaatttgggtatgtttcggatttaccatggaagcagactcactgaaggagatgacaagcaggaaaactctaatgacttaaaattcacagcggccccaagggggtctctactggttcctcccagccagaatacactgttttacattttgtagaaagaaaaatgatcctcattctagtgctattaaattggcctacctaaaagactgcctatacctggctcccctacagtttaacagatgatttatctctctacctgacggctttctctgatgagtgtggtcttagtatagaccaaaccagaagtccagagagttaatgccccaagatttacccttaatggttgaagagtaaagc

SEQ ID NO: 386813 - DNA, 544 bp, Homo sapiens
aagagatggaagccttggaaggtaggcggtgtttcttgatactgcatgtcccagggaggacaaataacaaccacacagtttgctctcccaagccccataggcattcaaaggaagcctgttgactgcaattaggatgccccagcttttaaaagccgacactcagcagacagtaggcttcatcatgggtgacacaatttgggtatgtttcggatttaccrtggaagcagactcactgaaggagatgacaagcaggaaaactctaatgacttaaaattcacagcggccccaagggggtctctactggttcctcccagccagaatacactgttttacattttgtagaaagaaaaatgatcctcattctagtgctattaaattggcctacctaaaagactgcctatacctggctcccctacagtttaacagatgatttatctctctacctgacggctttctctgatgagtgtggtcttagtatagaccaaaccagaagtccagagagttaatgccccaagatttacccttaatggttgaagagtaaagc

SEQ ID NO: 386814 - DNA, 576 bp, Homo sapiens
gaactaaactaaagtttcagatgaaagaagatcttcataagcaacatcaccatcttgtcacagcagccaaatggtggcatgtcatttcttccaggaaagtatatatactctgaatgtatcatgtttcarcattgctctgttataggcttgtatatctaattttgtcatcacacaagatctattgggctggattaaaattaaccaagatcataagacaaatgtgtaaaaacattaaatttttcatttacaatgagaaatcattgtcatgcaatgagacatacttaatttcacgcaaccaatttattttcttcatgtagtcaagataaacaagatgccagacagtaatcagaggctactgcatagttttatgagaactgaacctactcaaagtctataaaatcagcaccttgagtccctgaaggcagatgtacataggaagccaaattttaatcaggagattgcttcatgaacctggaagcagatgtggggagttggatgattcatatgtcaaatggtgcatcacacaacagtgatgttcttggcaatagggacagacatgagataggacagctttaa

SEQ ID NO: 386815 - DNA, 576 bp, Homo sapiens
gaactaaactaaagtttcagatgaaagaagatcttcataagcaacatcaccatcttgtcacagcagccaaatggtggcatgtcatttcttccaggaaagtatatatactctgaatgtatcatgtttcagcattgctctgttataggcttgtatatctaattttgtcatcacacaagatctattgggctggattaaaattaaccaagatcataagacaaatgtgtaaaaacattaaatttttcatttacaatgagaaatcattgtcatgcaatgagacatacttaatttcacgcaaccaatttattttcttcatgtagtcaagataaacaagatgccagacagtaatcagaggctactgcatagttttatgagaactgaacctactcaaagtctataaaatcagcwccttgagtccctgaaggcagatgtacataggaagccaaattttaatcaggagattgcttcatgaacctggaagcagatgtggggagttggatgattcatatgtcaaatggtgcatcacacaacagtgatgttcttggcaatagggacagacatgagataggacagctttaa

SEQ ID NO: 386816 - DNA, 507 bp, Homo sapiens
tttcaaagttaatcaaattagaaattcatttaaacaatctagggaaaaatgattaacttattcttctgatttaataactaaggactgattatctaagtagttggtatatgaagagtacacaatttataaataagaggtcagtgcaaacatcaaagaaagaagcatggtttacaatggagtgaagaatgaaaacagggtagtttactcattcctttaatcaccaaatatatatatatgtttttttttttgtttttgagtcagagtctttttctgtcacccaggctggaatgcagcggtctgatatcgactcactgcaacctccacctcccaggttcaagtgattctcctgcctcagcctccctagtagctgggattacaggcgtccrccaacacacccagctaatttttgtatttttagtagagacagggtttcaccatattggccaggctggttttgaactcctgacctcaggattcaccaaatatattttggtacctagtaggtac

SEQ ID NO: 386817 - DNA, 568 bp, Homo sapiens
cccaagaaccaaatgttttcttttaatggtatatttcttctctcatatcacactaatatacatttcagatcacacatatgcacaatgtttgtttgtttttaccataattccctatgcaactccagatgcttggaccatttaggcatctaatacatgtttgatgaattaaggaataagtaatagaacccttgaataagatgaactatgattccaacatccattagcaagctgttaacagtttatagctgtctagtttgaaatgtaggtccatccacttggagaggggaatggaaaaatgtgatacgaatacctgatctgtctaatgattttgaatcagtacttaaaatgtaatcacctataagacatttgctacactgagatggaatgctgagttctggctctaggtctgcccctcattgctatgtcagattaactttttggctgataaaattgagcttgrtcccacctgtcttaatatacactcactttaaggaacacagaccaaattttctttaagtctaatataacccagtatgattctgacatgattatacgtgaggctgcattg

SEQ ID NO: 386818 - DNA, 422 bp, Homo sapiens
gcaaagtgttgatgttataatggtaacccaaacataatctctttctttattgagcttataataggaatgaagcaattgcaacctttactggctcatccagaaatgcaaataaccaaacacacacaactactcattgcattcytacagtgtgcaagtcattactctgagccttttggcaaaaagtgagccagaaagcccatcatccttgcagaagtctgtgaaaaattaagcagctcagagacttcagcctccatttagaatatgccatatacctggcatgaggacggaggaaaagctgaagctatttgcttgatacttaaaaaaacattcatattcattcatttaatcaattaacagaccatctcagtgaaaacatactacttcaaaaaaccgtattatcatttaactgaacttctcataag

SEQ ID NO: 386819 - DNA, 365 bp, Homo sapiens
tgtaattattccagtgtgatttgttttttttgcctggcacatggtttaaaacacaaaataagcatataaaacttatatgagagggtttttcagccacaggcagaaacataccacaataatttttatcctatgctaagattttggtccataataacatgatacccattggaaagatagatttgagaaagaagcatgcttaaataatttttaaatttttttacatgcatgtttttggataagtgtattgttcaatctttaatattaaaaactaaaattctgaatgacaaacatatgtgcaaacmaactattgtggcaaaaacagtttttgttggtgaagggactagctgccatttggtgatttttca

SEQ ID NO: 386820 - DNA, 365 bp, Homo sapiens
tgtaattattccagtgtgatttgttttttttgcctggcacatggtttaaaacacaaaataagcatataaaacttatatgagagggtttttcagccacaggcagaaacataccacaataatttttatcctatgctaagattttggtccataataacatgatacccattggaaagatagatttgagaaagaagcatgcttaaataatttttaaatttttttacatgcatgtttttggataagtgtattgttcaatctttaatattaaaaactaaaattctgaatgacaaacatatgtgcaaaccaacwattgtggcaaaaacagtttttgttggtgaagggactagctgccatttggtgatttttca

SEQ ID NO: 386821 - DNA, 582 bp, Homo sapiens
gactcttcaaacagtgaaacagtcctcagagccccaaacttgcatccaaaaaaagtggacttgtatttttgcacagttcagaaggaaggcagagaccatagcaccaatctcaatatggccacagaggataatgaacaagaaggaacctacagtggaactaagccagaagctacaaagaacaatggggaaasgtgctcctctgggggacagccatggtccaatcaaggaactttcttcagtaccacggcaaagttcctcatgatgcctgcctagtttttcactatttggactagtgatgcttatatgtttcccatgtttccgttttctgtattacagtttatactgcagttattctgtccttacttcacaattgtgcattgtgttcatggtggtgatggtggtgggaagcagaaaacttgtattttgttttgttggttaccataatgcaagtgacactgctgaaccaaatgatgcagattgtgtgtcagccacagatcatgaactgtgagacatgcagtaactgaagaagagatctggggatgtttctttttttggttgtggagagaagaaagtcagtgaata

SEQ ID NO: 386822 - DNA, 549 bp, Homo sapiens
ttcctcttcttttcttcttcccctgagtagatgccaaggtcttcctcacagagtttcaatttcttgcccctctcttcttccacatttcttgcctgtcaaaaccccaactctggttaaacctaattctctgcctgctttgcctacatctgttcagctgagcatagctatggaaaaaaatcagaatcaggctgacstgtttcatttcatgtttataacctcaactcacaagttgaattcaactgaattttctctatcaattaacttactacaatgtgagatgagtatttcacaccttcctcctccatattcaaatccctaacactctccccactcactttttctctgagtgacaacatggattttcatttcactgagcaaatagaagaaatcagaagaacatttttattcttccaccaccaaatccatcaatgatttatatttcccttttctctggatgttgcctcggtatttcttctgtattgacttacctggagctgggtagtctggaatagtcattcacgtgtttgaagcttcagttgggacagctgg

SEQ ID NO: 386823 - DNA, 597 bp, Homo sapiens
ggaggcaatttggtcatgaggatggagccctcttgaatgggagttgtgcctttataaaaagagacatgagatggcgaaaccccgtgtctactaaaaatacaaaaataaattagccgggcgtggggrcgtgcacctgtaatcccagctacttgggaggctgaggcaagagaatcgcttgaacccaggaggtggatgttgcaatgagccaagatcgtgccattgccctccagcctaggcaacagagcaaaattccatctcaataaaagacaagacatgagagactttgcttctttcttctttgttctctgccatgtgaaaatactataagacagtgtattagtcagggtaccttagaggtacagaactaataggatatatatatatgtgtgtgtatatatatgtatatatatctttttatgtatatatatgcatgtatctatatatgtatctttcatatatatgtgtatatatacaagtttatacaagtatatatatatacacaaacacacacatatatatacacaagtatatatatgtgtgtgtttgtgtatatatagtatatatatatgtgggaatttattaaatattaacttacac

SEQ ID NO: 386824 - DNA, 466 bp, Homo sapiens
ttacagctataatataaaggaaataaatatgctttccttaaatgtatcaatggagcaaaaattgtttttataataaagaacaaatccaaagacaggcaattcagttaatcatataatttaaaggttattgcaaggtcttggataaccctgaatatttatttttccaccagctcactatcttatttgcatcttttcttatrtgttctaagatccctgcaactggaataatttctcttgataaaagaataaagaaaagatttaattatggtatttattattgtattttgaaggtaaatattaaaaatatgctttgatggaatgggctcaagagaaatgggaatgaggatgctagttgagaagacttctcatgcgtcctcctcatttcataagcatagattaattaaattaactagttgctcaccaaagcctgacataagaatgatgaggtgcagaagccactaagttt

SEQ ID NO: 386825 - DNA, 591 bp, Homo sapiens
gtcatgctccatcactttagtccattttcaccttccaaagaaattctgaatgggccttccttctctggcagctaattaatctttcacaagcctactcttgcagcctgtctgccagggatgccccacaccttaagccagtgactcacgagcagatttcttaccctcttgagcagtactttcttcccttgarctatgtgaagacctagcttttctattttgtttcggaaactatgtgagctgtaatatatcattgaagaattgctccttcccccccaccaccataagtgaatataaagtgttcctgaatcatttaattgggtaataatgacaacaaagtctgaatataaattatgaatgtgtacagcattttaccaatagtgtatatcatatagatgtaaggacacatattactagattataaattctctgtgtatatacatttgttagattatcattgtaataacacaaatgtacttatatttataataatgttgcatttgcctaaaaatactaataaaactgcaaataaaaataatttttagtctaattaatggaagatttggtatatgaatttttttttaagttagagca

SEQ ID NO: 386826 - DNA, 576 bp, Homo sapiens
acatagtgtttctaaacaaaataaatggactaaattgaggagaaagagaaaaaaaagtcacaggggaagaaactttcctggaataataaaagtctaggcataataggtggacctttccattagggtatgctgtgctaaaatttctgaacttcagtatttgggaaagaaactgtaagggctcttgggygtaaacagcaaacgaaccccaaagaaggttggatgggagattggagagactagactgacctcagactttgcagtactctaacagtgaattgtttctccacaaacatttgaggaggtcaggtgacccaagaaattataaccagcgaaactgctgttgaagtactgaataatcattaaactgtataaaagtatggatgcagaggattaatttaaacatatattaaacactaggaagatggggaaggagggacgctgagtttgagctttgtgattacagatcaaaatatgtgatgatttttgatattctaaatttaacaataagatttttttaaatttcagaggtgagtaaaaagaaagtgggaggaacataaatacgttattttccttttt

SEQ ID NO: 386827 - DNA, 576 bp, Homo sapiens
acatagtgtttctaaacaaaataaatggactaaattgaggagaaagagaaaaaaaagtcacaggggaagaaactttcctggaataataaaagtctaggcataataggtggacctttccattagggtatgctgtgctaaaatttctgaacttcagtatttgggaaagaaactgtaagggctcttgggtgtaaacagcaaacgaaccccaaagaaggttggatgggagattggagagactagactgacctcagactttgcrgtactctaacagtgaattgtttctccacaaacatttgaggaggtcaggtgacccaagaaattataaccagcgaaactgctgttgaagtactgaataatcattaaactgtataaaagtatggatgcagaggattaatttaaacatatattaaacactaggaagatggggaaggagggacgctgagtttgagctttgtgattacagatcaaaatatgtgatgatttttgatattctaaatttaacaataagatttttttaaatttcagaggtgagtaaaaagaaagtgggaggaacataaatacgttattttccttttt

SEQ ID NO: 386828 - DNA, 526 bp, Homo sapiens
aattattagcaattcattaaattacatttaaattggataaccattgatgcaccatataatcatggtgactttttttcaaccatttagtatactcaggcatttcattcaataaagaaaatactgtaaaagaagacaagctgccttgcataccctactgttatgacacttgtgcattctatatataaggacaaaaaccttaaatttaatgatataacaaaattaaactrtaaacttctgtaaaagatttactaagatggtcatttgttgtttatttgactacccagcatccaagaaatattcttttgaagggaaattgacaatgtaagaaatgtggtaagaggcagggctgaagaaatatcagcaaatagaaaataataaagattaaagcataatttaacagtggaaaaaaagtagaatttgtttgtccaaaaacagtttctttagaaaagctaacagcaaaccatacttagcgttactttgccttactgttagcatcttcttataatttctacttttgcaataacat

SEQ ID NO: 386829 - DNA, 582 bp, Homo sapiens
acattgctaggaaataaaggatgttttatagaaagtcagtaagttatgaagtttcccttttttcgtctctttttagttaatattcatttttttgatggaactttgctgtaaggagcaaacagaggggaagtatgagaagaaaaatcagtctcacattgagattgggtatcagcatatacagggggaaccaaagtgcaattaaaattggcagakaaatttttcagtttagtattttaaaaatagcttttcttgattgagtttatattattattcttataatatacgatataaagagaaaagatttctccaaaactatatctgggatatatagactggaccttgattccagataatttagctgcaacactgcaatcaacagtggagtctgtggctggtgcaggcaagtcagagttttgcaggtatgaattatctggaaatgaattggttgtgccccaggggcaaggtgtctctttcgtttgtaactctgtgctgcgctctgagttaaaccagaaaacgttgaaagctgtgtaactgtgaacaaaggtcaaaagacttctaagggattcacttttgctacaaaga

SEQ ID NO: 386830 - DNA, 557 bp, Homo sapiens
acataacttcattagctgattcttcagctaaagaatagttgggctagacttgccttcacttcttgatcttcatgattgagattaccaccgtgtccctaagagaggtagttttttccatatggcttcactyctcgcctcttcccactaagaggagctcactcatgggtattcttaatatgacctctaatgggaccacaccagccgtgttgattgtctccaaaggtgtagaaatcaagacacctttcaaataaaagctctcactgaaaggaatgaaatataccaataaaatctgttacacattcttcttttccagaaactatttccagaaactctgtttcagaacatatgttatatctcttttttatttttcaaatgacgtttctataaaatgtataagaaggtatttttttaaaaaagtttaaccttttaatttgtgacgtaaatataacttcccttcaaaaattaatttcaggttggcctagtgctgccatcctgagatactgctcacaggagtccccagggctgcgtccaactttctcacaataaacttacaatgg

SEQ ID NO: 386831 - DNA, 648 bp, Homo sapiens
ttctgaaagaaagctcaagagattattgcaagtcagagagcatgacaggagttttaaaaaagcaactytcatgtttatagtctgggtaatccagattttaaaagtcaaatattgacggaaaaggagaggtgcttcggttcatgtgatcaagatcaagacttcctttaatacaacaaagctccatttaatttcttaactgttccttttcagtcaattgagataagctttttcagattgctataagcacattttctcctttgaaaatgtctaaactctttgagatcagcctgggcaacatagtagacctcatctctagaaaatgtttaaaatttagctaggcatgatggtgcatgcctgtagtcctagctacttgggaggctgaggcaggaggattgcttgagcccaggagttcaaggctgcagtcagctatgcttgtacaatttcactccagcctgggcaacagagagaccctgttgggaaggagagaaggaagaaaggaaagaagggagggagggagggagtctaaactactaaattctccttatatttcaccaatatggaataataagatttttttgtttcttttttaatttgtgtaggtacataggtgtatatatttatgggttacatgagatattttaatacagg

SEQ ID NO: 386832 - DNA, 593 bp, Homo sapiens
gtctttttcaaattagtatggttatctggtttatttgttttgacattcaaactagttgaacattttttctgtttgtcttggaaaattgagtgcttcttggaatgtatcgtgattgtcttaaaggtataatatatgactaagtgtgttattttagctaactaattaaaatatrtatttgtaaaatgagcctttattttccctaccatcttcttaactgttttctggaacttttggcatctaggatttgcaacacacatttttatgatgtgtgagattgtggggagctagcatactactgtgcctaaattactttacttgggtccccaattacactgaactagccatgccttttccgtattttctgtattccctggaatttgtgtatctgattataggaaaatggtggtgagtttgtgatgaaatgacatagaataacaaggagtagaactagtctattgtacttcttagataggctcatagagtttgaatcacactgctgtcaatgtcttagttcctaaaagccacagaactcaggatcacttggcagatagatgatggagccttttcacaattcttgactacttcatgaagca

SEQ ID NO: 386833 - DNA, 593 bp, Homo sapiens
gtctttttcaaattagtatggttatctggtttatttgttttgacattcaaactagttgaacattttttctgtttgtcttggaaaattgagtgcttcttggaatgtatcgtgattgtcttaaaggtataatatatgactaagtgtgttattttagctaactaattaaaatatatatttgtaaaatgagcctttattttccctaccatcttcttaactgttttctggaacttttggcatctaggatttgcaacacacatttttatgatgtgtgagrttgtggggagctagcatactactgtgcctaaattactttacttgggtccccaattacactgaactagccatgccttttccgtattttctgtattccctggaatttgtgtatctgattataggaaaatggtggtgagtttgtgatgaaatgacatagaataacaaggagtagaactagtctattgtacttcttagataggctcatagagtttgaatcacactgctgtcaatgtcttagttcctaaaagccacagaactcaggatcacttggcagatagatgatggagccttttcacaattcttgactacttcatgaagca

SEQ ID NO: 386834 - DNA, 611 bp, Homo sapiens
tcagagatgatgaacttacagcagatttgattccaaaataaacctaggagactgtaacagatgccattgatacctctccccctaacctcacgtttatctgcagctgtactgcaattcctgggtcccttatctacttcccacctcaagggttttcatctgcatctctctgtttctctgcctaaggcaatgccacagcttactaggctcaagtttgaggaagttaatgtccctggggacaggtagaagtcactggataaatagctcagcattgttgtccctcagtaggacagttgtgaagcatgttttatatgattcttcagggagtctttgtattagtttgttctcactttgctataaagaactacctgagtttccagtttttctgctctgttttttccccatctttgtggttttatctacttttggtctttgatgatggtgatgtacagatgggtttttggtgtggatgtcagttttccttctaacagacagraccctcagctgcaggtctgttggagtttgctagaggtccaaccatgatagactggattaagaaaatgtggcacatatgcaccatggaatactatgcagccataaaaaatgatgagttc

SEQ ID NO: 386835 - DNA, 611 bp, Homo sapiens
tcagagatgatgaacttacagcagatttgattccaaaataaacctaggagactgtaacagatgccattgatacctctccccctaacctcacgtttatctgcagctgtactgcaattcctgggtcccttatctacttcccacctcaagggttttcatctgcatctctctgtttctctgcctaaggcaatgccacagcttactaggctcaagtttgaggaagttaatgtccctggggacaggtagaagtcactggataaatagctcagcattgttgtccctcagtaggacagttgtgaagcatgttttatatgattcttcagggagtctttgtattagtttgttctcactttgctataaagaactacctgagtttccagtttttctgctctgttttttccccatctttgtggttttatctacttttggtctttgatgatggtgatgtacagatgggtttttggtgtggatgtcagttttccttctaacagacagaaccctcagctgcaggtctgttggagtttgctagaggtccaacmatgatagactggattaagaaaatgtggcacatatgcaccatggaatactatgcagccataaaaaatgatgagttc

SEQ ID NO: 386836 - DNA, 565 bp, Homo sapiens
tagttataagtgaacagagccatgaaatgcagaatgcataataggaagctgaaaatttatgggcatattgaagacatgtaacaattgcctgtatgaataacaaaggagcaggaatacagcttctcggaggctaggatctgagtttctgacatctagaataaagttaggaagaacttaagtgctacaataacaaaagatgccactggatttacagtttggctgaattctagggaaatcacrtgttgtaaggccttggtaaagatcagattcagaaattatttttaaaaagaagaatttggaaaagataaagtaaaaccccaaattctatattaatttttgatgtagatttactttggaggcataccaagtgtttctggcttggaaaagtttaggtgcaaagactatggatgagcaaatgttcagtggtccttttctttccctcttatggcataatctaagcctcaggaacagaaatatccataatccataaaatgctttttttatgttatacaaagaatcagaaagacacgacttgtttagaaattcaaaagactgttaacagaga

SEQ ID NO: 386837 - DNA, 557 bp, Homo sapiens
atcagattctcatcaaaaactatggaagccagaaggcagtgatgcaaaatattcaaagagctaaaaggaaaaacaaaaaccgtcaacgaactttcttatatatcccaaaaatacccttcaaaatgaggaaaaagtatgacattcccagatatacaaacattaaggtggtttgttaccagtagaactgccctgaaagaaatgtacgagaaagtcctgcagcgtaaaatgacaagatgctggacagtcactcaaagccacattaagaaataaagatttcattactggtaagtatatgggcaattacaaaagctaatgttatagtagcaatagtttataattcactgttttctacataatttaagatactaacacattaaaaaaaagtcaaaaagctagtcttattttaacttcagtttgtaactccacattatgttttctgaataatgtaagaggctaatccatttaaaataattgttagtttatgtttttggcacattatatgtaaagatataattttggaacatcagmaactgaaaaagttggtcagtgggaactga

SEQ ID NO: 386838 - DNA, 546 bp, Homo sapiens
aatcagaaatgaaaatagggatattactgttgattgtacagaaataacaatgattataaaaaagtagtgtgaataattatatgccaatgtattggatagtgtggatgaaatgaacaaattcctagaaacacaaaacctaccataattaatcatgaaatagaacatctgagtagacttatagctaataatacagaaatccaagagatccagattaaagtgatcttaaaaaagaacaaagttggaaaatcctgacttcaaaacttactataaagctacagtaattaagacagtgtggtactattataaggatagacatgtagatcaatctgacagaattaagagtctaataataaactaytatatttatagttaaatgattttcaacaagcgtaccccaacaagtcaaggatgaaatagcgttttcatcaaatgtcttttcaactaaagtttgaacaagtgaacatccacatgtaaaagaatacagttgaactttctttataacatagaccaaaattaactcaaaatggatcatagacctaaatttaa

SEQ ID NO: 386839 - DNA, 567 bp, Homo sapiens
tggtggcaaggatgtggagaaaaaggaaccctcacaaactgttggtaggaatgtaaatttgtacacctattttggaaaacagaatggagcttcctcaaaamattaaaactaccatgtgatccagtagttccattatcaggtatatttcgaaagaaatgaactcagtatgttgaagagatatctgtattcccaagttcactgcaccattattcacaatagccaagacatggaaacaacctaagtgtccatcaatgaataaatagagagattatggaacatatacacaatggaatactattcagtctttaaaaagaaggaaattctgtcatctgtgacaacatggataaaactagaggatattatgctaaatgaaataaaccaggcacagaaagacaaataccatgatttcatttacatgtggaacctaaagagtcaaactcagccaggcatggtggcacgtgcctgtagtcccaactactcgggaggctgaggcaggaggatctcttgaatccaagagtttgaggctgcagtgagctgtgatcagacctctggactccaacccagaca

SEQ ID NO: 386840 - DNA, 604 bp, Homo sapiens
tatggaacaaggggaatttgagaaagggaaaggaagagatgaagaaagatgaaaggaaatgaattttttaaatgaaggaaaaaagacataaataagcataaacaaacaaaactatatggtttttattattatggatttgtagtatatcaggtattctgcctttagtttttttttgttttttttcaaagtggatctagttagttgtggacaattaatcatgtatacaagtttcagaaaaatgtttgctgagttcatcaaaacatccaactagactattgacttaaaattactttgaatttatacattaatgttgaggaagaattgacattatttttataccaagccatcattggagaccatgctatttatgcaaatctttttgtatccttataattttacttttttttcttggtaaatttaaaacagattagataaaacaactcctaaatagagtagagttggctattttctgtggtattttattttcartttatattttctaattgattgttgctgacatagaaatatgctattgatttttataatttgttctgatatttggtgaatttgctgaactttcttattagttctgcagttttatttc

SEQ ID NO: 386841 - DNA, 579 bp, Homo sapiens
atattttggggcttatccttctgatattttttytgcccagttttttttttttttttttttttttaaagagatgagggtctcactctgtcacccaggctgctatagtgcggtggtgccatcatagctcactgcagcctccaactcctgggctcaaacgattctcctgcctcaacctctcgagtaacaggcatggaccactgcaccttgctaattttttaccttctgtaaagagatgaggtcttgccgtgttgcccaggctgtgccctgcttttgatacatgaaagcattctgtatatacaccttggtatctttctttcaatagttttatgacacatgcatttccctatattattttatttttaaagcaacataatttaaatgtctgcataacattccattccatgaactaactatataatttatgtataccttctattgtttaatactgggattatttccaatgttatgcattcataaataatggcttgataaatattttcatggaaaccatttgtctccaactttgatacttctctacaacatatatctttgaggggaattaataggtcaaagggcatg

SEQ ID NO: 386842 - DNA, 593 bp, Homo sapiens
catgccagctctgcttcaccttttgccatgagtagaagcaacctgaagccctcatcagagtagatgctggcaccatgcttcttgtacagcctgaagaackgtgagccaaataaagctcaattctttataaattacgtagcctcaggtcttcctttatagcaacataaagtggctaagacactcccccattgtaacatatagctaggtcaagaaaccattaatttatctgcagtatagtagaaagagatgtccaggctatgctgatcaaagtccattggaatgtaaaactttcagcataaattctcccttaatgctttctataaattccacttcaggacagtgacatagaatttctaatccagtggcctggtctggtatttacctgacccctggccaaagcaagagaaaatctaaggtttagagtttactcaaaaccagtccctttcttagtgcctctctttctttttcatattaactgatctcttccacctagagcaccaactcaaagtcttctctcttcacacgaatattaccagttacctcaatgggacatttggattctgagccctcaggagcgcatacattataagtag

SEQ ID NO: 386843 - DNA, 462 bp, Homo sapiens
aggcttgtaagaatttgattcaaattgcagtgacagtaataaggatggagaagagaaggtggatttgagagttagaggacactgaccaaaacaaaacagttgatgatgaagtgttctgcattactacaatacaaaaatgtaaatacaatacagagagctaagaggtgagaatcaaaattaacwaatggaaactcactttggtggttttacagtaggcattttaaagcataattttcaaaattttcttttgtttataaatttgctgtaatttttcttatagggaccaaaacaacaaatcaggttgaattcctgcacattaccctccctagacataccatatcactattattataaattcagtgcacattctgttcatattttttaaatttcctaagtacacatatgtacatataaatattaaaaaatatattattttagcatttcctggagtttaattaaaga

SEQ ID NO: 386844 - DNA, 597 bp, Homo sapiens
cagggaccctgggacaagtctgccggcagtggatataaggtccctaaagatgtgctgggagcagtgctttaaagaagtactgggaacaggaagttttctgaatcagagtaacaggagagggaggataaaaattggcctataccgcctcctctgcttcggtagcagaaatagaaacccaaatacaaaggattttatgctctgctgccatagctggagaccccttaggaccttctgcttttcctatttctgtaaggcctgatccaaataatccacagcaggttattcatgaacacactccactagagtttaagttgttaaaggcgtacagagctcattcaccttaggattgctagactctgtgtttggtgctatgcgtcttttaccctttgatgtgaaacacttggtgcgaacttgcttgtctgcgagtgaatatctgacacaaaacaacatatatttctgacccaataattcctcctctggtagccattctagataaatcaaatgsatagatgataaaggtagctggagagatagatagatgctcattgtagcatttttgttattgtgaataattgaaaacacaatatactagtatat

SEQ ID NO: 386845 - DNA, 609 bp, Homo sapiens
tttgttaaccacactaacttgatcagatcagtaaaaaatgcaatagtctagtgaaacctggaagctcctggcaacaaagactcaagattatataatattattttcttggtttctttgatatctggcaaaaagccctaccaacttcctaccccatatatttgaaaaaatggagcaaactccagaatgattgtgtttactaaatgtataagaacaattttcaccctaaccctaccatagcgattcaattttcataaggtgggacagatgccaagataaccccaaatggggcagtcctagtaaaagcttctcctagatattaattttacttgacaggtgtgtgttgtttcctttcaaatctgtggtktaaggaccaaaaagcactccactgtttttcttcttttttttttcttttaaaaaattatattttaataaaaccattataagaaccatgtaaatgatttgaaatagaataacctctctgaaagaaagttacagcagcaaaagtgtacatctggaagtgactttaatataacaaaatcaacccacactaaatactcaaaatgtaagaagagtcaaaacacagcattatttatagatgattacaaatga

SEQ ID NO: 386846 - DNA, 611 bp, Homo sapiens
gtctgcatttccaaaatggcatctgttgctgcaacctctggagggaatgaactctgtttcctcacatggtagaagagtaaatgagcaaagaggggctaagttagttatctctaaccattttataaggcactaatccacttatgagggcagagccctcatgacttaattataatatgtccacgaaggccacacctcctaatatcaccacagtggggattaagtttcaatacatgaatcttgaagggtacacattcaaatcacagcaacaataaatttattcatttggccaaaggaggttccaaaacagcaacaaccccagacaacaataacaagtgagaaaatataaatattttatttytaaagcaaacacaataatacgtgttgatatctttaaagttaaatgtatatactatgttttaggtctaatttttcctaactgtgcttaaatgttttcccatttagtttagttaagtacagtttcatagacctttcatacaaatttcctgccttggcatctttctactctttcattgtcttatagtccttccagtttatacaaaagccttttattcttcagaacgagatacaaattcattgatgtcaagcaagaa

SEQ ID NO: 386847 - DNA, 575 bp, Homo sapiens
gaattgagttgagacttgagaattgttcatttgtagtgaaaaatgtgggagggaatgactacccacatcgtatcaaagcagatgcatacatacattcttttatttttatccctgaaaccatcctatgatacaggcactattaatttagttttacagatgaacagctccaaagctcaaagatattaaattayttgtcctcttttccaagactgaatgtaatagggcttagatttcaatcaacactgtgtgatcccaaagtacctgctcttttcacaattgcattataatccttcttaagccaatcagaacaaagcattctggaaagtgaatgaatgcaaatatcattacagagagatgctgtggccatttacagatgacttactgaggaatccagactgtgagctgagctggctacagaaggatttgaagtgttctctgaaggacagataaaacttaaatagaaaggataaatattgaacaaacatgtaggctcaggactgtgaaaaaattttttacatgaagcaagaagtatatatatagtgagaaggagaaaatgagttgaaaatgtattctga

SEQ ID NO: 386848 - DNA, 566 bp, Homo sapiens
aggagcaaacaataattctcatccaggagaactgaccaaagtgatcacaaactttagaattaataacttattaaaataaataatatataaattaaaagttgtgtatatatgcgggagtgagaggtggttgttatttagccacaaaccacataactgagttatagattccaattttggcagtagtgatccaagcaatgttctaggggaagctatcttagctactagatttctatatagtggtcctatttagtgtaagagtagaaatgaatggaaggagtgatggttaatagatctaacaaatttgatgaatgtttatacatacaacctcatgctttttttggtagctaggtttctaggctgaaagtgggcttatactgtgttttattttggcccaaccactatgcctgagctactcggccatcttttattttaggagacaccatgtggatcctcactctactactggtactctactagtactctactactacctgccactcgatcctgytgcaagggattttgtcataaaagcttcttggactctccctgtctatttgaagtgactc

SEQ ID NO: 386849 - DNA, 549 bp, Homo sapiens
ttgtttttaatcttacttattaccatttttgttttctggtagaatttttcccaaggaatatgtactatttttaccatcagacaaaatagtagttggggagtagatctggttgatcattaatgttgttttgatagagttctttactatatttattcatgaaatcataggatttgtacartagtcctgagaagaaggctgtgatgaatcacagtatggaaggaatttgagggaagttattgttgttgcatctgtgttagttacctttgattattatcgactgtaagcagaatttataaatataagaaaattgaatctgcccttgaaaaaacatctagtttatgtaatataaatttttttggaataatggtaatgaactgttagatcacttccattttgtattaaataaggacagtaagttatcagaattttgtctagttcttatataatttgtgataatttcctacataataataaccaataaccaataaaacaactaaacttcacaagtaagtatgtattgacaaggacccactgacagagaaagagctt

SEQ ID NO: 386850 - DNA, 543 bp, Homo sapiens
ttgctgactccccgcttagagagtaatcatggacccacggatagtcaaaggttagtcttaggaccacatgagtaaacaagctatttagatagactcctctacattcctatgttaaattacccttgctatagctcaaagaggattaggctgccttcagccataactctctcgtgaggctttagcagaaaccttctggccttccaagaagatttgtgtttattttacaatttctcccaccatcctgattgaacccctaaaacatccagcccatcrgagctgctgtgtgggccgagcccagcaaagcctaaggatggggctgcctgaagccttggcgactcaactctcaccccagtgtgtctaggatgcaagatacggagtcaaaggagatcattctacagctttaaaacttagagccagttacccttcttttcttgcctatttctcccttttggaatggaatgtctatcctatgcttgttccaccattgtatttggaagtagataacttgttttaatttcacaggctcacagctgaaggaatttg

SEQ ID NO: 386851 - DNA, 523 bp, Homo sapiens
ttaaattacccttgctatagctcaaagaggattaggctgccttcagccataactctctcgtgaggctttagcagaaaccttctggccttccaagaagatttgtgtttattttacaatttctcccaccatcctgattgaacccctaaaacatccagcccatcggagctgctgtgtgggccgagcccagcaaagcctaaggatggggctgcctgaagccttggcgactcaactctcaccccagtgtgtctaggatgcaagatayggagtcaaaggagatcattctacagctttaaaacttagagccagttacccttcttttcttgcctatttctcccttttggaatggaatgtctatcctatgcttgttccaccattgtatttggaagtagataacttgttttaatttcacaggctcacagctgaaggaatttgcctcagggtgaatcatgccttgaatcccacctctaatttagatgaaactgggacttttaagttgatactggagtaatttaagacttttgag

SEQ ID NO: 386852 - DNA, 579 bp, Homo sapiens
aaataaaatatttacttctttataaatagagttattactattttgttaatttactcctaattgaaataaacttatcaagtttcatctactactcaaataaggcaccactgattatatgcttgcatcttccagaaataaaagcagataatcttaaaggatatatttttaaaaaaaaacctcattaaaattgttttgaaattgtaactattttagastaagtagaaagtctcaactggttattcaatcttaggttaacacagaaaataagttaaaacaaatacagcggtgctatgacagcaacagtttactgcaggcattttcagtttccactctttaatgtttaatgtggtgtgtcactgtaggtatctcaaaataaaaacccattttttttaatgcttcaaataaaaagtcatgtatattaaaacttggctaagatagtcacacaattagaaaatagtaagggaacagatgactttggcaattactgcatcttgagatgaaaaatacaattttccttattattaatagaggagatttgtgaaggattaagatcacagtgacaggaggtttgaagcaatg

SEQ ID NO: 386853 - DNA, 606 bp, Homo sapiens
tattactattttgttaatttactcctaattgaaataaacttatcaagtttcatctactactcaaataaggcaccactgattatatgcttgcatcttccagaaataaaagcagataatcttaaaggatatatttttaaaaaaaaacctcattaaaattgttttgaaattgtaactattttagagtaagtagaaagtctcaactggttattcaatcttaggttaacacagaaaataagttaaaacaaatacagcggtgctatgacagcaacagtttactgcaggcattttcagtttccactctttaatgtttaatgtggtgtgtcactgtaggtatctcaaaataaaaacccattttttttaatgcttcaaataaaaagtcatgtatattaaaacttggctaagatagtcacacaattagaaaatagtaagggaacagatgactttggcaattactgcatcytgagatgaaaaatacaattttccttattattaatagaggagatttgtgaaggattaagatcacagtgacaggaggtttgaagcaatgagacatcactatcaatacctgtaggacactagtgctcataaataaatcccatggtgtcc

SEQ ID NO: 386854 - DNA, 506 bp, Homo sapiens
ggcattttcagtttccactctttaatgtttaatgtggtgtgtcactgtaggtatctcaaaataaaaacccattttttttaatgcttcaaataaaaagtcatgtatattaaaacttggctaagatagtcacacaattagaaaatagtaagggaacagatgactttggcaattactgcatcttgagatgaaaaatayaattttccttattattaatagaggagatttgtgaaggattaagatcacagtgacaggaggtttgaagcaatgagacatcactatcaatacctgtaggacactagtgctcataaataaatcccatggtgtcctcaatttcaattgaatgctcctgtccaatctttgaaaacattagttatcaaaaatatacttttcggaatgtaataaccaatgagaagaaaaaaacttccaagaaacatgaacaatttttatcactctttaatatctgaaaatgttcttctgattgtttttctatgctaaaattcctaaca

SEQ ID NO: 386855 - DNA, 506 bp, Homo sapiens
ggcattttcagtttccactctttaatgtttaatgtggtgtgtcactgtaggtatctcaaaataaaaacccattttttttaatgcttcaaataaaaagtcatgtatattaaaacttggctaagatagtcacacaattagaaaatagtaagggaacagatgactttggcaattactgcatcttgagatgaaaaatacaattttccttattattaatagaggagatttgtgaaggattaagatcacagtgacaggaggtttgaagcaatgagacatcactatcaatacctgtaggacactagtgctcataaataaatcccatggtgtcctcaatttcaattgaatgctcctgtccaatctttgaaaacattagttatcaaaaatatacttttcggaatrtaataaccaatgagaagaaaaaaacttccaagaaacatgaacaatttttatcactctttaatatctgaaaatgttcttctgattgtttttctatgctaaaattcctaaca

SEQ ID NO: 386856 - DNA, 353 bp, Homo sapiens
ttaataaagagtcctgtaattttatttttattttatataattttataaaacacattcaactagggaaattaagaaaataccaaatcatatgagttaaatacatttgtatctatagttcaaaattaatctccaacaatactgttgcttcaaaaacaacaacaacaacaacaaaaacaacaacaacaaactggaccaaagaaggcatacaaagacaaagrtgtatgtgaaaagatgatcaacatcactaatcatcagggaaatacaaatcaaaaccacaataaaatttcacctcacaacttcacacctgttgggatggctataatcaaaaagttagaatataaaaagtgttaaaa

SEQ ID NO: 386857 - DNA, 353 bp, Homo sapiens
ttaataaagagtcctgtaattttatttttattttatataattttataaaacacattcaactagggaaattaagaaaataccaaatcatatgagttaaatacatttgtatctatagttcaaaattaatctccaacaatactgttgcttcaaaaacaacaacaacaacaacaaaaacaacaacaacaaactggaccaaagaaggcatacaaagacaaagatgtatgtgaaaagatgatcaacatcactaatcatcagggaaatacaaatcaaaaccacaataaaatwtcacctcacaacttcacacctgttgggatggctataatcaaaaagttagaatataaaaagtgttaaaa

SEQ ID NO: 386858 - DNA, 534 bp, Homo sapiens
cggtgtctgatttacatggggctcacagattggttctatcaggtatgatgtttacatagtgcttggggaaggctgagtaccccactttattcttattatgcaaatgagctttccagttgatccatgccatcttgtctactccttacttcatacctggctgacaaagagaaaggaagacggaaccaccgttttgaatatgtctagtccatagttcctgctggcattcactcgtgcaagctcctarcctgcttttcatgtgggcagcttgactttacaggctgctttttgttagaaaatgatttggggctacttttcattagaaagaaaagccatactgaggactcccatacccttactatctgcctaagtgatttcttcttaactcctatatcaatactattattaatactgtaaatacaaccgacatgtctggaaatttttataccctaattcaacagagatacacttaaacaatgtggcaggacaattaggaattaacactaaactgaagctgaaaatgagactgtctttgct

SEQ ID NO: 386859 - DNA, 647 bp, Homo sapiens
tactttgtataattttaaacatgattttaatttcacaatttatcaaattaattttcaaatcattattgactacctaagaaagactatataattattcaaaattattcaattattcaaaattttgcctttctatatacttttttaatttgggagatacttgtctgtatgatgttggaacactatcaatatggttgacttcttcactttctagtatgttagatgaaaacaaatttagatgaggcagaattggctgagagattctgcttttaataaaaagatggtatttaaagtgtgacttctaaaaatggaagaccctactaaaataggattattttatttcttatttttgcagttcattatttatctgaatttattgattcagaagagaggaaataaaacaatcaatttataggatcattgcttatttscatatctcattttaagctttgtaattgtcactaaaaatgcccagattgtttattagtcatttattttgttgaaaaacactatttgcttagacagtctcaatagtaaaattattctcagaccactacccagagtatatcaaaagattaaaagtatttgtttttcacaactgattttcccagttttgaaagccaatttcttggcattctgaggaaacatgt

SEQ ID NO: 386860 - DNA, 528 bp, Homo sapiens
aactggaaaccctggtaactccctgatctgcatcaaatcagctgaaggtaaatgaagaaaaacacacaaccatgcttactttaaatttgtggccagaaaatttaattgcactctcagtatttcttgaaaacataagtacatttctccagtcaattcacccttctattcaagggtaatatttcatgctttctcttatttctttaaatggcactttactccctcactcttgctttatatatcaccaagaaaacagaggtttttcagaagatgatttttacaactaacttaccagaccatcttcaaaatctaaacccatgcaatytgtgtgtccttctgttacaataggtaaactattcatactttttcctaaagccaacatcttttttatgatagatcttgtatcagttagcttttcccgtgtaataaatcactccaaaatgtatagctaaagacaacagttttattattatcactcatgaatctacacatatgctgtggcttggctgatgtaggctttgcttcaaacga

SEQ ID NO: 386861 - DNA, 591 bp, Homo sapiens
ctttgacttctcttttgcccttatgattcatttacaatttatcagtaaatcacaatggctctgcctttccaatatattccaaattcatgtttaggtagagatttatataaaacataaatctgacgtcacttttcttctcaaagttcctcattgacttctcttaacatgtaaagtaagttcaaactgcttagcatgacatccttcctttctactctccttgtactcttgtagcattagtctcattgttattcatataatgttccacrtagagcacctctttaaaaaacttgcctttaatgtttcctcttcctggaacactctagatctggattatgtatggatcacaccgtcactttaacaagattttttgctcaaatttcaactcttctgagaggtattctatccaatccaatctatgatcagatttattttacccaatttattctgtttattttttccttgtaacatttatttcaagaagagctttaaaataagacctgaagaactttggctttggacctatctcagcaactttttaataatgaaacttggaaaaatcatatcttaaaaccttaatctgctcatttgtca

SEQ ID NO: 386862 - DNA, 614 bp, Homo sapiens
tattaaaaagttcttttcagtgttttttaactgagttcatcaaagtcaaaatagagctttctctgatcagtaattcgagaagttatttgaaaagttgataaccataagagtcatctccaaatttttatcaacttttcaaaaaatattacaaatctacagctttaaaagtcaagtatattaaccacatgggtcataaatattgtcccacaattcttagcagccaatgtaaaagaaaacatggtcacatgcataaattaatataccagtaaggtacaagagaagccagttgcacaaataagcataatcattcttggtagtgcaractctgacatatttctcctaaatatcctcctaaagaagatattctatgaaagtaacctttataaaactttgacattacaaattgaattatttctgaaattcttagagaaatcttatttgctagctaaaaagggaaccagcaaaccaaacataaagacaataaacagaaggccaaattaataataatttataactgacaatagaaaaattgtatatttaatatagtagtcttcatacaaagataatttaggtgaaatagtaaaaaataaaaaagctacaattgtgaaaagatc

SEQ ID NO: 386863 - DNA, 551 bp, Homo sapiens
attctttgaaaaaaaatccatatttctttggaatactaaacagtgaatactagttaaaatttggattatgatattttatacaatttaagtgcctggtgtgatgataggtattattttacatctattatttattttaagagctaaccctgagttcagggggaaaaggtaatacatagctgctataattgatcaaaaccttctttcgtaaaatgtagtcatttgtggaaaataaatattctttgtaactaaaataatatttatagttatattttgtttaattgagtcttagatctgtaagctcttttaatatgtatattctatacagatrttctaattctttccttgtattcaagatttaatagtataatttctctaaccatgtactagtgttgatagctactaatcttctccaatctgttgaaagagaaaggcaggagaaaaaaagaattgtaatatttttatgacacatttttgaacctgagtaaatattaagcataggttggcagtaagacagtgagaagttgttttatgccagttgattaatcactagt

SEQ ID NO: 386864 - DNA, 551 bp, Homo sapiens
attctttgaaaaaaaatccatatttctttggaatactaaacagtgaatactagttaaaatttggattatgatattttatacaatttaagtgcctggtgtgatgataggtattattttacatctattatttattttaagagctaaccctgagttcagggggaaaaggtaatacatagctgctataattgatcaaaaccttctttcgtaaaatgtagtcatttgtggaaaataaatattctttgtaactaaaataatatttatagttatattttgtttaattgagtcttagatctgtaagctcttttaatatgtatattctatacagatattctaattctttccttgtattcaagatttaatagtataatttctctaaccatgtactagtrttgatagctactaatcttctccaatctgttgaaagagaaaggcaggagaaaaaaagaattgtaatatttttatgacacatttttgaacctgagtaaatattaagcataggttggcagtaagacagtgagaagttgttttatgccagttgattaatcactagt

SEQ ID NO: 386865 - DNA, 490 bp, Homo sapiens
atttagcaaaggtcctagcatgtgatgcttagtcactcaacaaacaaaaaataagaaagagaaaaaaagacaataaagtattcactgtaatgaaaatatttatgaatggcttacattttcatacaattaycttgttgtaataacatattttgcactttcactacttacttttgtaaccagttctttcattcatttattcactcattcatccaacagttagttgtcaggcattgtagcataatgaaaaatacagtattctttcctttaaacagcatatgtttttaagaaaaatcttttatataattaaatgtttcaacattatatgataatttacaaaggggtatggaagtgttacaggaccccaacacttacccaaaggtagccattgtgtgtgtcagggtttctgcactgtagtcccttctgtggtcaccagaaatatgttacagcacaaagaaatatgttacaggaaagtgctcccaatccaagccca

SEQ ID NO: 386866 - DNA, 525 bp, Homo sapiens
aagcaagtttattaagaaagtaaaggaataaaataatggctactccatagacagagcagcccagagggctgctgattgcccatttttatggttatttcttgatgatatgctaaacaaggggtggattatttatgcctccagtttttagaccatatagggtaacttcctgacrtttccatgtcatttgtaaactgtcacgtgttgatgggcatgtagtagtgaggacgaccagaggtcactctcgtggccatcttggttttgctacgatttacccggcttctttactgcaacctgtttcatcagcaaggtctttatgacctgtttcttgtgccgacctcctatttcatcctgtgacttagaatgccttaactgtctgggactgcagcccggtaggtttcagtctcattttacctagctcctattcaagatggagttgttctggttcacatgcctctgacagaagtagaaaggagaaagcattcagttttgaaaaagatttaacagatgattttcatgaattttcac

SEQ ID NO: 386867 - DNA, 602 bp, Homo sapiens
attcttaagctgtctgcatatattatcttgtctgacaaattgtttattaagtcattaaaatatttctaatagtgatgtgaagaaataattcttacttgctttttctcaatagaatttagctacgtttcactttatgttgcttaataatgttaaaaacttttcagtttaactacaaagttgtaaaatgtgttataaatcagtgagcaaatttatatcatagagtttgtagtaataatggttatgtttctttcagcagccaagagtgaccatctggctgtcatgtttttgctcaytgggaaagtttcccaatgttcttacaatgaagtacaaggtccttcaggatccatccttctcccttacctttcagaccttattttctactctgtctcatgctcagtgcactctatgtagactggctacctgcctgtatttgagctctaggtgtactcccacctccaggcatttactgtttcttcactccgcagtgctcgttctccagttatccatatggctcacctcacaacttccatgtttcttctctaatgatactttatctatcacagaagccttccctgagtagcatagataaactagcagctggc

SEQ ID NO: 386868 - DNA, 516 bp, Homo sapiens
aagaggttctttgttatatatgggcaacaagaaaatccatactctaacattagagcccatatatcagctttttataattgtgactatataatttacatttgttttgtgttacattccatgtctctttaaagtagggactgcagtgtataattttttgctcatcattgtttctagtaaaatgactggtacataatagataattagtaaatacaaaatgagttaatgaatgaattaatgaatgaattggcaatattagtattggttctgctttttcaccacactgtgactgtattaatttctgtcactgcaaaaaaaagttaccacaaaattagaagcttataataccagatgcttataatctcagtttctatggggcagaagtccagggatggmtaagctggattgcagctaaaactactgtcaccttgaaacttggcagcaataaagtctgacagttccccttttccaggattctggtctcagagccaggactgtgatcttatctgaggtttggtg

SEQ ID NO: 386869 - DNA, 387 bp, Homo sapiens
aagccttttaagtttagaaaactattggtaataataatatcccaaatctcctcacttatgaatataaatgtttaaatataatttaatagttgcatacattggktgcattattatttccaaaatataggcaaaaaagtgagactcaaaagtataaactaagcatccccaaatcttacatcaaatgagtttgaagtaatgcaatccactatatctctaaagcctggtctcttttcatcacactccacaaggagcaagaattaaaaagacaacaaaggttctcctctccctaaatctctttcttaatagcagtcatgaaaggatgaaatttcgaatacagaaattttatttttttggctaacagcattgttcctttgataaaaatcaatt

SEQ ID NO: 386870 - DNA, 387 bp, Homo sapiens
aagccttttaagtttagaaaactattggtaataataatatcccaaatctcctcacttatgaatataaatgtttaaatataatttaatagttgcatacattgggtgcattattatttccaaaatataggcaaaaaagtgagactcaaaagtataaactaagcatccccaaatcttacatcaaatragtttgaagtaatgcaatccactatatctctaaagcctggtctcttttcatcacactccacaaggagcaagaattaaaaagacaacaaaggttctcctctccctaaatctctttcttaatagcagtcatgaaaggatgaaatttcgaatacagaaattttatttttttggctaacagcattgttcctttgataaaaatcaatt

SEQ ID NO: 386871 - DNA, 605 bp, Homo sapiens
taaaccatacagttcagtgattttcagtatgttcacaaccattatcataatcaatattagaatatttttgcccccaaaaatgatacccatgagcacttgctctcaatcttctatccaccataaacccagcccccatacaaacactagcctattttttgtctctatagatttgtctttttggagcttcatataaatgcttcttatgtacttttatattttagatatattgatataataactactgmccagaaagtcaaagattctatgaacttgcgtcattaaagggtaaattttaaacacattttgtaaaagactaaaatttttataaaaagccttaatgaaataccaacatttttcatttacaaggaaagagatgttgtgacctgctgttaaacataataaaagactatgttactaagtaaattaatatactatatgcataatatcaagtattcatgacttttctaggactttatttatggagagtttttaatactatgctcacttccatcaattcctaaatatttctgcagtgtgttttttttattaatccgtgtgtgctagtatattcaaaatagttttaaggttaggcaaaggaaaatata

SEQ ID NO: 386872 - DNA, 605 bp, Homo sapiens
taaaccatacagttcagtgattttcagtatgttcacaaccattatcataatcaatattagaatatttttgcccccaaaaatgatacccatgagcacttgctctcaatcttctatccaccataaacccagcccccatacaaacactagcctattttttgtctctatagatttgtctttttggagcttcatataaatgcttcttatgtacttttatattttagatatattgatataataactactgcccagaaagtcaaagattctatgaacttgcgtcattaaagggtaaattttaaacacattttgtaaaagactaaaatttttataaaaagccttaatgaaataccaacatttttcatttacaaggaaagagatgttgtgacctgctgttaaacataataaaagactatgttactaagtaaattaatatactatatgcataatatcaagtattcatgacttttctaggactttatttatggagagtttttaatactatgctcacttccatcaattcctaaatatttctgsagtgtgttttttttattaatccgtgtgtgctagtatattcaaaatagttttaaggttaggcaaaggaaaatata

SEQ ID NO: 386873 - DNA, 435 bp, Homo sapiens
atccactaacaaactgacaaatccctcctcgccaccctgaaatgtatctaccagagcccagggaatgggttacragcaggttggaaatcagagcccaaagacaggttttcctaatgctttataactcttcttcagcactccagactctttttatttcactaggctattacactttttggagggcaggtgacggtggggccaaataaaggaaaatgtcttcatcctcacaaagctcctccttcaggggctagactggactagattgggcagtgggtcacgttactcccaaggttcaacatctacttcagtaagataagcaaatgtgctaattctagccctttggtttggtttcagccactttggaatcatgagacttttatcctttcctaaccttaactctgcttttccccatgctcaggatcagctggtgaagca

SEQ ID NO: 386874 - DNA, 435 bp, Homo sapiens
atccactaacaaactgacaaatccctcctcgccaccctgaaatgtatctaccagagcccagggaatgggttacgagcaggttggaaatcagagcccaaagacaggttttcctratgctttataactcttcttcagcactccagactctttttatttcactaggctattacactttttggagggcaggtgacggtggggccaaataaaggaaaatgtcttcatcctcacaaagctcctccttcaggggctagactggactagattgggcagtgggtcacgttactcccaaggttcaacatctacttcagtaagataagcaaatgtgctaattctagccctttggtttggtttcagccactttggaatcatgagacttttatcctttcctaaccttaactctgcttttccccatgctcaggatcagctggtgaagca

SEQ ID NO: 386875 - DNA, 603 bp, Homo sapiens
agcccaaagacaggttttcctaatgctttataactcttcttcagcactccagactctttttatttcactaggctattacactttttggagggcaggtgacggtggggccaaataaaggaaaatgtcttcatcctcacaaagctcctccttcaggggctagactggactagattgggcagtgggtcacgttactccyaaggttcaacatctacttcagtaagataagcaaatgtgctaattctagccctttggtttggtttcagccactttggaatcatgagacttttatcctttcctaaccttaactctgcttttccccatgctcaggatcagctggtgaagcagctctaaaagccctagagcctcttgtctatttccacagtccctcccctgacagagctgttcatcacttccactaaatcattccctcttggcagcctttgctcttcacacacaaatgtattttcttcattgcaaccctaaactgcagggcttgtttcccaggctttttcagtttccctgaatgctggagctgagctatactaagacgtactgtacctcactttcttcaggctggacaaaacatctatgcctcatgttttc

SEQ ID NO: 386876 - DNA, 603 bp, Homo sapiens
agcccaaagacaggttttcctaatgctttataactcttcttcagcactccagactctttttatttcactaggctattacactttttggagggcaggtgacggtggggccaaataaaggaaaatgtcttcatcctcacaaagctcctccttcaggggctagactggactagattgggcagtgggtcacgttactcccaaggttcaacatctacttcagtaagataagcaaatgtgctaattctagccctttggtttggtttcagccactttggaatcatgagacttttatcctttcctaaccttaactctgcttttccccatgctcaggatcagctggtgaagcagctctaaaagcccwagagcctcttgtctatttccacagtccctcccctgacagagctgttcatcacttccactaaatcattccctcttggcagcctttgctcttcacacacaaatgtattttcttcattgcaaccctaaactgcagggcttgtttcccaggctttttcagtttccctgaatgctggagctgagctatactaagacgtactgtacctcactttcttcaggctggacaaaacatctatgcctcatgttttc

SEQ ID NO: 386877 - DNA, 603 bp, Homo sapiens
agcccaaagacaggttttcctaatgctttataactcttcttcagcactccagactctttttatttcactaggctattacactttttggagggcaggtgacggtggggccaaataaaggaaaatgtcttcatcctcacaaagctcctccttcaggggctagactggactagattgggcagtgggtcacgttactcccaaggttcaacatctacttcagtaagataagcaaatgtgctaattctagccctttggtttggtttcagccactttggaatcatgagacttttatcctttcctaaccttaactctgcttttccccatgctcaggatcagctggtgaagcagctctaaaagccctagagcctcttgtctatttccacagtccctcccctgacaragctgttcatcacttccactaaatcattccctcttggcagcctttgctcttcacacacaaatgtattttcttcattgcaaccctaaactgcagggcttgtttcccaggctttttcagtttccctgaatgctggagctgagctatactaagacgtactgtacctcactttcttcaggctggacaaaacatctatgcctcatgttttc

SEQ ID NO: 386878 - DNA, 603 bp, Homo sapiens
agcccaaagacaggttttcctaatgctttataactcttcttcagcactccagactctttttatttcactaggctattacactttttggagggcaggtgacggtggggccaaataaaggaaaatgtcttcatcctcacaaagctcctccttcaggggctagactggactagattgggcagtgggtcacgttactcccaaggttcaacatctacttcagtaagataagcaaatgtgctaattctagccctttggtttggtttcagccactttggaatcatgagacttttatcctttcctaaccttaactctgcttttccccatgctcaggatcagctggtgaagcagctctaaaagccctagagcctcttgtctatttccacagtccctcccctgacagagctgttcatcacttccactaaatcattccctcttggcagcctttgctcttcacacacaaatgtattttcttcattgcaaccctaaackgcagggcttgtttcccaggctttttcagtttccctgaatgctggagctgagctatactaagacgtactgtacctcactttcttcaggctggacaaaacatctatgcctcatgttttc

SEQ ID NO: 386879 - DNA, 628 bp, Homo sapiens
tgttcatcacttccactaaatcattccctcttggcagcctttgctcttcacacacaaatgtattttcttcattgcaaccctaaactgcagggcttgtttcccaggctttttcagtttccctgaatgctggagctgagctatactaagacgtactgtacctcactttcttcaggctggacaaaacatctatgcctcatgttttcccttttctccttcatttacccacaatctctctttgagggctccatcattcttcttctaaatgtcttcaaagtcattcatatttaaaaatgtcctaatgatcttgcaatccaacacagcggaaacctgttttctctgtcattttcttcttaaacaagtttaacaaatatacagtcrctgtcatttctttactcattgtgtttattactgtttaatgagaaatagctcaatagtaagacaaagtaccagatcatggttcagcactaatgagtgttcaaatattgccatatttgcttcctagtttttaaaacgaagttaaaactatatataataacctacagcaacaactctctgtaatccgatttccctcctttctagcctagaggtaaatactatgaatatagtagatattttcatattaatgcat

SEQ ID NO: 386880 - DNA, 589 bp, Homo sapiens
ttctgctattaatttacagtttcaaaccctttatcatgttcttaaccattctaacttttcttattactgattttagatgacatatagatacatctatatcctgacatttctttctccttcctggtttgtgattacatttgtatataatttgattgttatacaaatatttagatataaatgttacttttttaaaaattttcttcttttctgctagattttcttttttccctgagaataattyagttacaccttctggaattcgctgtggttgagaattatctctgcagtcttgctcttttttttttttttgagacagagttttgctcttgtcacccaggcctcagtgcaacggcatgatctcggctcactgcagcctctgcctcctgggttcaagcaattctcctgcctcagcctcctgagtagctgggaatacaggtatgcgccaccatgcttggctaatttttgtattttaattagagacagggtttcaccatattggctaggctggtcttgattgcctgacctcaagcaattcacatgccttgacctctcaaagtgctgggattacaggcatgagccaccatgccca

SEQ ID NO: 386881 - DNA, 614 bp, Homo sapiens
gctgggattacaggttgagccaccacgtctggccacatgcaccaatttcttaaataaattccttcaaataaacctctgcctctctctctgtctctgtctctctctaatccaaaatctgaagggtagcctagtaggttgtgaagaattgatgttggaattcaatatggaagacagtctggaagcagaattctctcttcctcaagagacctcagactgtttactcgtaaggccttcaactgattgaatgrggcccaaccatatgatgcagggcaatacactctactcagtctactaatttacatgttaatctcatctgagaaaatacatccatagcaaaatccaaactggtgtttgaacaaatatcttggtactatgatctagccacgttgacacataaaattaaccatcacagtaatactacaggaaaatagttgtgcagctagcctgaaaacagacaatcctgagactacaagaaacaactttaaaaatccctatttattaatgctatgcatacttggatgttgacacacaatgctgaaatctccatccctttaattaagagtttaaagaggaagaaataagcaggatccacaatttgggtttcactgtgaatg

SEQ ID NO: 386882 - DNA, 614 bp, Homo sapiens
tttcactgtgaatgtgccaacatacattattctgaactttgcatactgataatttttgtcaatccataaactctcttattcctcactttcgaatattctctctgcttgatgatataccccatttttaaaaacttatctcactgyatttttgcatgtgttactcttcatatttttgtctactttatactattcttcttagctaataaaaatgatttctaaagttcctcacccgaaataagacttttctattactctacataacccactcaatactactttctttctaatttttgtctcaactaccagaataaaattatctccataccttgtcttcatttctgactatttatccatcctcagcctactataatgtttggctgctgtccttatccctccttccattgaattagctctcacaaagagcatcaaaatacctggattaccaagcttactggctctggtggaaccatttacattgtacctaactaactaaaataaaatcttcatgtcggaaatagaaatgaccttagtggccttcactatgacattcatcgttgtaaagtggaggctcagagatatttgaattcaaacacaatgaatttcattttcatgat

SEQ ID NO: 386883 - DNA, 614 bp, Homo sapiens
tttcactgtgaatgtgccaacatacattattctgaactttgcatactgataatttttgtcaatccataaactctcttattcctcactttcgaatattctctctgcttgatgatataccccatttttaaaaacttatctcactgtatttttgcatgtgttactcttcatatttttgtctactttatactattcttcttagctaataaaaatgatttctaaagttcctcacccgaaataagacttttctattactctacataacccactcaatactactttctttctaatttttgtctcaactaccagaataaaattatctccataccttgtcttcatttctgactatttatccatcctcagcctactataatgtttggctgctgtccttatccctccttccattgaattagctctcacaaagagcatcaaaatacctggattaccaagcttactggctctggtggaaccatttacattgtacctaactaactaaaataaaatcttcatgtcggaaatagaaatgaccttagtggccttcactatgacattcatcgwtgtaaagtggaggctcagagatatttgaattcaaacacaatgaatttcattttcatgat

SEQ ID NO: 386884 - DNA, 670 bp, Homo sapiens
cgctgtgcaaggaattggggaaagctccctgccaagaaagggaaacgttagcttagctaaaaaaaaaaaaaaaaaaaaaaggctggggcctaatgagaaagcttcccagaggcatccctttagcttttccatagccttctgggagcccctgaatctgcatttgaatggcgcggctctgggtccgcgaaggtttggtgggctgaagtcgtccttcaggtctccaaaggaatgcagctaggtcggaatctacttcctccttcaatccccagaaaatggaaacgcttcccccgcgacctttttctgccgagttagaccccaggccctccccgccgcgggcgcctggcctcccccgctgacaccccggacgcccaggcctgtgggacaaaaggcagtcgcggcgtcccgcgggcttcctagcccgggagtcggccccaggggccccaaagcgtgaccccaggccgacaactgcaagttcctaggcagaggggaagccccagcgccgagamgcccgctccgagaactccccgcgccgggcgcccagcctgagcgtcccgggcgcggagcccatccccggtgcgggcagggctccagccgcaggctcggcgcagggcggactcggccgaagcccggagggccggaggcgctgggacgcagcccggacaagagggcg

SEQ ID NO: 386885 - DNA, 431 bp, Homo sapiens
tatgactgcccatccattgaaaaataaaagaaggaaaattggaaatacctgggaagatgcaataagcaatgggaaaatgtcataaataaagaaaaaggaagataaatgagaaagaacaagaargggagaaataaataaaagagtaagaaaggcagcaatatgagagccatggggagacagaactgtaaagctgctggcttcagcgttcagctggcttcatagcccttttaattttctgtgagctttttgtctccatttctttagatatttgaatacttgtaaattatgacttgtatcagaaagtcagttgcttcttttttagaaattagtagtaataataataataacaataataaataatgccttaacattttcccatcaacaggtgactgaaccagataatcttttgggatcacatatgagtgaaggaa

SEQ ID NO: 386886 - DNA, 590 bp, Homo sapiens
tcccagcatgggattgcagaaaaggtttaaaacaaaagaagtattgtttttttggtaggatatggccacaggagatataaatggcagttttattcaagatcagggaagaagagaaatcttttaagataatatagtaatacagaactacttaaaaactaatcgtaaacataaaaaagtaatattaactggatagattgcaaaataatgttggcttcctaaaatcaaaaagttaaactacatcaggtacttctgttgcaactgcatcctttcattaaaacatagaaattgagtttaaatatcccaccaaattttctgtttgtttagcaatacttggtatcaacaaatatgggtttacttaggactggtagttctttctgttcttgtgtttttgtttcaataaagtaattattcttctgcatttagtcactgaagccattaactttatggcgaagtaccctctaccatggaattaacgtaattgatcactacaracagtgagatctataaacaacctctgaaacagagaaatgacctataaatctttcagacaggttttgagatctggcattaaatttccatattatcaggta

SEQ ID NO: 386887 - DNA, 568 bp, Homo sapiens
ggcaagcaaaatgaagaggagctttgttgagcaatagaacagttcacaatagacccacagcgggtagctcctttccacagtcagggtgtcccaacgagtgttcagctcctagcagagaggagaacctggagtgggaagctcctctctgtagacaggtcgtcccgtcatgtctgcagttctcagcagacaggaggccctggagtgtgttgctcctctctgcagctgttcgccctacaactcctgctattagcagagagagtagctcctctctgcaggcaggtcaacccatcatctgctcagctctggctgagcccaagggtttcatgggcctcagagggttggaagtgcacacaactggtccccggggggctgccatggggcagcccagaaaaggcttcacaagttccyactcctgtccctcggtgagactggctacctggcccccagccttcaggtcatccccggcctgaaggtggggcctcacccgagacccaccccctcccatccaggaatctgtctgcctcccactggctttcatggtgccctgctccaccctgactttgctctg

SEQ ID NO: 386888 - DNA, 495 bp, Homo sapiens
aaactgaaacagttttagagttgtacattgtagcagctttatgctgctaatggaaatttgaagtatatttttatatggttaatttagtataatttttacagcttttaaatgaaaccatcagtgtcattagattctgggaaaaacatatcaaaatataactgccatataataatataagagctcttgggtgaacaaastataagatttttaatacaaacaaaaaaactaaaagctcagctttaaattgcaatagctaagctgcagtaaaatcaaatctaatataaaccagtgatcttagtgctgctacaggtctagcatttatcagaaaatttttttagattttagatatttttgaccaaagatcaaagtgttcagttaagtagaaaaattctttgaccttgttcccttcctaatatgaagtatagaagtgtgtaaaatttctcatttaagaaaaaactcaacacagtgcttttgatcttgacagtatttcagaag

SEQ ID NO: 386889 - DNA, 495 bp, Homo sapiens
aaactgaaacagttttagagttgtacattgtagcagctttatgctgctaatggaaatttgaagtatatttttatatggttaatttagtataatttttacagcttttaaatgaaaccatcagtgtcattagattctgggaaaaacatatcaaaatataactgccatataataatataagagctcttgggtgaacaaactataagatttttaatacaaacaaaaaaactraaagctcagctttaaattgcaatagctaagctgcagtaaaatcaaatctaatataaaccagtgatcttagtgctgctacaggtctagcatttatcagaaaatttttttagattttagatatttttgaccaaagatcaaagtgttcagttaagtagaaaaattctttgaccttgttcccttcctaatatgaagtatagaagtgtgtaaaatttctcatttaagaaaaaactcaacacagtgcttttgatcttgacagtatttcagaag

SEQ ID NO: 386890 - DNA, 536 bp, Homo sapiens
acatttcatcattactagcttttaagatttttttaaataatcataagtttgggcagtgtagttattagcatcatggaagtcagtaataggttgacttataaacaaaattacatgaagagagggatgaaagacaaaaagaagagattttttttatatttaaacaggagctcatatcttaggcggattcctctcacttgttagtccactctatttgtaaatyggggagacattttcatcgtttctattttaaagaagggagaaagcttaagttctggcagaagggaagacattggtaaaaatggagactgactatggaaggaattaattgattcttttcatcttcgttagaatcaaaatgaatggaaaaataatctgatttacacgaactcttgcttgctcagacatctagctatgaaataaggactcagccttagctgaactctgagctcccatatcagagtttcaaatgctgttttacccccttgtaattgttaatatattcctagtgttaatatgtttctaggttccaagaaaag

SEQ ID NO: 386891 - DNA, 536 bp, Homo sapiens
acatttcatcattactagcttttaagatttttttaaataatcataagtttgggcagtgtagttattagcatcatggaagtcagtaataggttgacttataaacaaaattacatgaagagagggatgaaagacaaaaagaagagattttttttatatttaaacaggagctcatatcttaggcggattcctctcacttgttagtccactctatttgtaaattggggagacattttcatcgtttctattttaaagaagggagaaagcttaagttctggcagaagggaagacattggtaaaaatggagactgactatggaaggaattaattgattcttttcatcttcgttagaatcaaaatgaatggaaaaataatctgatttacacgaactcttgcttgctcagacatctagctatgaaataaggactcagccttagctgaactctgagctcccatatcagagtttcaaatgctgttttmcccccttgtaattgttaatatattcctagtgttaatatgtttctaggttccaagaaaag

SEQ ID NO: 386892 - DNA, 621 bp, Homo sapiens
ggtctcaatcaatttagaagtttgggtttccaaggtgaaggatcatgacctgtgacacagcctcaggaggtcctaagaacatgtgctcaaagtggttgggttgcagcttgattttatacacttyagggagacaaaatacatcaatcaatacctgtgaggtatacattagttccgcctggaaaggcagaacatctggaagcaggattttccagatcatacgtggattcatagattttctgattggcagtcagttaaaagagttaagttattgtctaaagacctgaaatcaatagaaaggagtgtctgggttaaggtaagggttgtggaagccagtgttcatattatgtagatgaagtctcataggtggcccccctaagaggcaatagatggcacatgttttctattcagacctttaaaaggtgctacactctcagctagtttcttcagaatcaggaaaagatctggcaagggaagaggattctctacagaatgcaaatttccccacaagagacagctttgcagggccgtttctcccaatagatgaagctggaacactttgagtaacgaaacaaagtattggcctatactctgaactataaaataaatatttatgagtggata

SEQ ID NO: 386893 - DNA, 561 bp, Homo sapiens
cccaagggaaagtgtgatggttggtaaattggaatggaaagagggttcttaatagactgtggcctaaatgtatgaccacatgagcacattgatgtagcagaaccttggaagaggcccatgcaactgaggggccttgaagcttaagctccatttgtttcataattaattctcctctcagggacaaagcagtgatggcacattgatccatcctcccaccaacaaagaaacatattatattatctatgggttatattatctctcgaagacctctagttattggatgacattaatatgctaagataaggataagaagaaatggttttcatttaaaaagaataactattgccaatattttaaaacactwatttgcctttaaactagagatttaaccaagatctagtgtgcaccatatattaagtctcacttatcaatgtacccacagtaagaactataaaaatattcgtgaattatttactcaaaatttcaaacaggctgaatgcatgtttgttttcatctagcaagttatattttgattacagcctagtgaccttggacttagaa

SEQ ID NO: 386894 - DNA, 555 bp, Homo sapiens
cagcctctataaatcaaaatttaattaactttatttagtattgtgacacagcttgttggtaatcaaccttaagttgtgttaaagttgccacctgatcaacaggagatcatctatggataaagggtataagcagatagagctatatcaattatgcaattagacagctcttactaatttatcagacgtgaaactgctgatcattttaggtatcttacttgaatttagtctcttctttttgaatttggtcaataaagtgttacaaacaccatataaatggaaacattgaagtaggcaccataatacctgttagagaaaccatagagaaagttattttgttttacttacctcagttccattttagacctacctattattatgttttaaatggaatccagaaaaactgctcagtaggctatttccatttagctgcatttgtastttttcagaatctctttttatatttatattttgtttacttattgggcatattgctttcaggtcatattgtgaagtgagaaagcgtacattcattattctcattcaagtgcagagctc

SEQ ID NO: 386895 - DNA, 573 bp, Homo sapiens
ggtatagagctttatgaattatgttgggaatttctggacattagatttctcctaaacctttctggaatacatgcacaaattcaartcagtaaatttttataataatacttcaatatctagattctaccattgacttgatgatctgcaatgaatttctaataagaaggtttaaagtgtcacttggtttttttaaccactagaaattttgcttgattcattttttttcattcatttaacaaatatttgttgatttgcattgtgtgataatactattctgagttctaggaatacagcagtgtattaaactgataaagtctgtgccctcaacaatcttacatgctagacacagaagatatttaataatggtataatataggtattaatgatgcttaataaagtaaatataaactatgccaggcagtaagggtcataaagatagatatagcagaataaaggatgtaaaaaagaacgggtggaggaaagtgttcttttatgcaaatggtcaagacagacttcttgaaggtgaattttcagcaaaggagcaaaggcctaaggaaggctgctgtgtgatga

SEQ ID NO: 386896 - DNA, 481 bp, Homo sapiens
gatactcgaagcttagcgtgacatgctataaatttttaacagagctcattttgaaaataattgattctaagcataattgcttgtctaatattctaagatggctgggaatccttagaatgttctagaaaagaagagaaatgctataaaaataaacaatgaaaacttaacgtcctttacataacttgaataatttatttgtatyctcttctgagtgtgagtggcaagataacttactaaaatattaatttatattttgtcttctgtatcttatatttcctgttaatccatgaagatggatgatagtaaagacagcaagaatagagttttaatttgtgtgtgggaagttgttttgtttttgtatttcaggggagaataagcaaaagtctgaaaggagagttgattcctggaaccgggaagagtagtagtgaacaactcagggaattctttacctcactcccaagctgtgctgcaggaaatgaca

SEQ ID NO: 386897 - DNA, 520 bp, Homo sapiens
caaaaatggaaacaatctatgtatccatcaatgaggaaataataaatacattttgatgtatctacattcacgagatgtttatgatatgttaaattaaaaaaaagtcagttgccaaaaacagtataaggtcatatttttgttgaaatatstgtgttactaaaagtagtcatagtaaaatacactaaaatgttaggagaacttaccactaaggataggttttgatagaaaaactagaagggtcctttcacttcttattttaagtaatttccagccgggcgcggtggctcatgtctgtagtcctagaactttaggaggccaaggtgagtggatcacgtgaggtcaggtgccaagactagcttggtcaacatggtgaaactctatctctactaaaaatacaaaaattagcgggatgtggcggtgcatgcctgtaatctcagctacttgggaggctgagacaggagaatcgcttgaacctgggagttagaggttgcagtgagcccaggtcatgccattgcactcc

SEQ ID NO: 386898 - DNA, 598 bp, Homo sapiens
gaataatggtaaggaatgtatagataatttttcaagtagaagataattttaaaagacagtatttaaaaaataaagcagtctycatgtttttcaatagaattcatgtcagttgactgcaaatagtatgttaacagccaagaataatgagtttcattcacttaaacatccaccaaaataagaaaataaaataaaaataactattatgggttagtaaatatgtaaggttcattttccaactggtgcagtttttactgaaatgaaataaaaaaccatttcacttggattacactcactcagatcaggctaatgctgcaaacacctgttgtatctcaggggttacttcagctttagagtatatttgattgaattgtaattgtgcatgtataaaatgcacagcaaatgattaggaggcatgagcacaaatacaaatttgatctcagaagtcagagcctgtgagagataatgcctgtctgcagtctgatcactacctctctttttcagccaatccccagagctaccagagttacttttcttttttaaaacttttgttttaattcaggggtataactgcacgtttgttacacaggtaaacttgtgt

SEQ ID NO: 386899 - DNA, 598 bp, Homo sapiens
gaataatggtaaggaatgtatagataatttttcaagtagaagataattttaaaagacagtatttaaaaaataaagcagtctccatgtttttcaatagaattcatgtcagttgactgcaaatagtatgttaacagccaagaataatgagtttcattcacttaaacatccaccaaaataagaaaakaaaataaaaataactattatgggttagtaaatatgtaaggttcattttccaactggtgcagtttttactgaaatgaaataaaaaaccatttcacttggattacactcactcagatcaggctaatgctgcaaacacctgttgtatctcaggggttacttcagctttagagtatatttgattgaattgtaattgtgcatgtataaaatgcacagcaaatgattaggaggcatgagcacaaatacaaatttgatctcagaagtcagagcctgtgagagataatgcctgtctgcagtctgatcactacctctctttttcagccaatccccagagctaccagagttacttttcttttttaaaacttttgttttaattcaggggtataactgcacgtttgttacacaggtaaacttgtgt

SEQ ID NO: 386900 - DNA, 570 bp, Homo sapiens
gcaatgtcaggaagttaccctatatggtctaaaaaggggaggcatgaataatccatcgcttgtttagcatatcatcaagaaataaccataaaaatcagcaaccagcagccgtcggggctgctctgtctatggagtggccattctttttattccattactttcctaataaacttgctgtcactttactctacggactcgccctgaatcctttcttgcaggagatccaagaaccctctggacccttttcccataacagatgaacctcaaaaacattatgttaagtgaaagctggatgcaaaagaacagtgaatgattccatttataagaatttccagaaaaggaaaaatctatagagacagaaatcagattagtggttgcctgggaaggaagaggagctgaggataacagtaaatgggcataagaaatcttattggggtgataaaaatgttctcaaattgatttatggtaatggttgcatgacttggtaaatttgctaaaaatcactaggattgtacccttgaaatgagtgaattatgawatgtaaaacatgattccttttatttcaaaaac

SEQ ID NO: 386901 - DNA, 260 bp, Homo sapiens
ggactcagtatctgtcaccaaactgtggccagcgtggtgaggtgacaagaacagcctttctgatcagtttggaggttaaaaagacttgtggaatgattgggtcatgagaagcacatggtttatttcagtaaagcttcttttacataarcaagttttagtctaaagaaagatttcacattaagggaaagtagaattacagattgactcagcacttcatttacatgtctttaaaaagtggctaagaaaaatagtcccctttg

SEQ ID NO: 386902 - DNA, 627 bp, Homo sapiens
tgaatcctttccagcatgttttctatgtacttagcccagatctatcagaggaatcactatctatggcagctatacccttatgaaatatatttaagacttaaaagtcaaaatgtcttcttaatctatgggctgtagaatggatgtggtgttaacaagcatgaaaacctcattgatctctttgtacatctctctcagagctcttggacaacaggtacttggccaatgaacagtaatattttgataggaatctttttctgagcagtagatctcaacagtgggcttaaaatattcagtaaaacatgctgtaaacagatatgctatcatccaggctttgttattccatttgtagagcacaggcagagtagaattarcatcgttcttaaggaccctgggattttcagaatgggaaacgagcattggcttcaacttgagatcaccagctgccttagcccctaacgagagtcagcccatcctttgaagctttaaagccaggcattggcttcatctctctggctatgaaagtcctagatggcatcttccaatagaaggtggtttcttcatttaaaatgtgtttagtgtagccaccttcatcagtgatcttagctagatcttctcgataacttgctg

SEQ ID NO: 386903 - DNA, 492 bp, Homo sapiens
ttggctcactgcaacctctgcctcccaggttcaaacgattcccctgcctcagtctcatgagtagctgggactacaggcacaggccaccatacctggctaatttttctatattttagtagagacagggtttcaccatgttggccaggatggtctccatctcctgaccttgtgatccacccactcccaaagtgctgggatgacaggcatgagccaccgtgcccagccccaagcaaactttagaaccacctgcagcaggggtgacagggcagggtgggcagggcctattcgggggacgggggtggaagtccagcctgggaaggctctggcccyacctggagaagcagttcctcctcggagtggctggcgcctgggctttggtgttggatcttcccaggtgcacacctctgctcccgtgctcactgctgtgtgctcctggccatgtggctgaactggctgagcctcaggtgcctgatctgtgaaatggggtgacag

SEQ ID NO: 386904 - DNA, 492 bp, Homo sapiens
ttggctcactgcaacctctgcctcccaggttcaaacgattcccctgcctcagtctcatgagtagctgggactacaggcacaggccaccatacctggctaatttttctatattttagtagagacagggtttcaccatgttggccaggatggtctccatctcctgaccttgtgatccacccactcccaaagtgctgggatgacaggcatgagccaccgtgcccagccccaagcaaactttagaaccacctgcagcaggggtgacagggcagggtgggcagggcctattcgggggacgggggtggaagtccagcctgggaaggctctggccccacctggagaagcagttcctcctcggagtggctggcgcctgggctttggtgttggatcttcccaggtgcacacctctgctcccrtgctcactgctgtgtgctcctggccatgtggctgaactggctgagcctcaggtgcctgatctgtgaaatggggtgacag

SEQ ID NO: 386905 - DNA, 588 bp, Homo sapiens
gtcatattttcattcctttttagttaagatcaactaaagccataaatcttttcctggtgagctgttatttaagtcacccctctcccttctcgtagaggagcaggttttgacaccctgcccccactacccggggcaggattttaaatgtacctcaaatacctttatcttccttgatgtttgctagggacaaatatttcagaatctgttttctcatcttcaaaatggtaatggtcatccctcttctgtccactatgcttttcagcagcaagactccagcggtgagatgtgggtgccaccagtgcactgtggagggtgtggggacctgctgcaatggagctccaagccactggctgtggcttcctgaagtgctgtattgacmtctatttagacctagctggaaagagaatggtgactaatttgtgatgtctgctgtgatgtgtgagtgtatgtgtgtgcacacagcatcattcttgacacagatttgtcatactatacccatgcaggaaatattatcattattaattcattaacatttgaatacgtattaatcacccagcttgcattagaaggcaggtacattttggtgag

SEQ ID NO: 386906 - DNA, 474 bp, Homo sapiens
ggctaatttttgtatttttartagagatggggttttgccatgttggccaggctggtcttgaactcctgacctcaggtgatccaccagcctcagccccctcaaagtattgggattacaggtgtgagccaccttgccctgcccaacgtggcttttaataatcactttactaaattgttctcaaccaggccattgtcaacgaaaaagagtcaaactgtaaaatatttgaacaggcttattctgagccaaatattaggaccatgacccatgatacagcctcaggaggcactgagaacatatgcccaaggtggctgggttacagcttgattttatatattttatgggggcattttattttataggcagaggcataaatcaatacatgtaagatgtacatgggttctgtccagaatggtgggccatctcaaagtgggagcttccaggttatgaacctgtgggttcataggtggattcaaa

SEQ ID NO: 386907 - DNA, 474 bp, Homo sapiens
ggctaatttttgtatttttaatagagatggggttttgccatgttggccaggctggtcttgaactcctgacctcaggtgatccaccagcctcagccccctcaaagtattgggattacaggtgtgagccaccttgccctgcccaacgtggcttttaataatcactttactaaattgttctcaaccaggccattgtcaacgaaaaagagtcaaactgtaaaatatttgaacaggcttattctgagccaaatattaggaccatgacccatgatacagcctcaggaggcactgagaacatatgcccaaggtggctgggttacagcttgattttatatattttatgggggcattttattttataggcagaggcataaatcaatacatgtaagatgtacatgggttctgtccagaawggtgggccatctcaaagtgggagcttccaggttatgaacctgtgggttcataggtggattcaaa

SEQ ID NO: 386908 - DNA, 552 bp, Homo sapiens
ttatttattggatgtttgttgtctagcagacactgtgctaagcactttgcatgcattattgcatgtaatatttacaacttcatgggttgggtactattattatcccactttcytagatgaagtaaactgaggcgcatggagttctttgctcaaggtcacccatcgatgtaagtggtggagctctgtcttatgtataaagcccaggctctcagcaaagggatatgctgcacttacccatagtgttccataaataagtgacagattgggatctcaaacccattttctgattcccagtccagtacttttttttccacaacaaaatactgtttttgtttccaaagtgttttcaatggtggtggtgttttctggtctattgacatgcctgcatgatgacagctactctggtagttcctctgtggccatcctttctcattcatttttcagtgatttaggaataacaggaaaaattgagatggagtcacatctttataacaatgtcaataccctctttcgtttatgtgccataaaactaacattctgcaggcgagcaag

SEQ ID NO: 386909 - DNA, 552 bp, Homo sapiens
ttatttattggatgtttgttgtctagcagacactgtgctaagcactttgcatgcattattgcatgtaatatttacaacttcatgggttgggtactattattatcccactttcctagatgaagtaaactgaggcgcatggagttctttgctcaaggtcacccatcgatgtaagtggtggagctctgtcttatgtataaagcccaggctctcagcaaagggatatgctgcacttacccatagtgttccataaataagtgacagattgggatctcaaacccattttctgattyccagtccagtacttttttttccacaacaaaatactgtttttgtttccaaagtgttttcaatggtggtggtgttttctggtctattgacatgcctgcatgatgacagctactctggtagttcctctgtggccatcctttctcattcatttttcagtgatttaggaataacaggaaaaattgagatggagtcacatctttataacaatgtcaataccctctttcgtttatgtgccataaaactaacattctgcaggcgagcaag

SEQ ID NO: 386910 - DNA, 674 bp, Homo sapiens
gtgtgtgtgtatatctcacaatttctttatccatttgttgattgatggacatttgggctggttccatatttttgcaattgtgaattgtgctgctataaacatgcgtgtgcaartatcttttccatataatgacttcttttcctctgggtagatacccagtagtaggattgccagataaaatggttgttctactattagttctttaaggaacctccacaccgttttccagagtggttgtactagtttacatttccaccggcagtgtagaagtgttcccttttcaccacatccagagcaacatcgatttttaaaaaattttttgattatggccatttttgcaagaataagggggtgtcgcattgtggtttacaaattgccaacaaacatgaaaaaatgctcaacatcactaatgatcagggaaatgcaaatcaaaaccacaatgtgattgcaatatacttctaatgttttgcttgaaaagaagttgcgattaaagttcacatgttgtatgtgcatctcctgttggtaatgtcagccctgcagctgctgggctgatgagggagtgaggatatagttggacccaagctggacatcagaaaacagttcttggcctacagcgaatcatcagaatttagctctatccactgtggaagagaaagtgacttcagctaggtgta

SEQ ID NO: 386911 - DNA, 535 bp, Homo sapiens
tgaatgcggggttttattgagtggtggaagtggctctcaatgggatagatggggagctggaagggaggatggagtgggaagatgatcttcctctggagcttggctgtccctttgtcaaactcctctccaaccaccactagccaaactcctctctgcatttaggagttccttctcttctctctttgtctgccacactgtttgtccgcttgtttccttgtctgctcatcagcttctggagcctgggattcagggttatatgggtacaggatgggggcacggcaggccaaaaggcaactttttggrtgtgaaaacaggaatgcctgtccccatttagggctgtaggcctccaggcttgagggtggggcctttgccagggaaccatcctcttctatccggtatttttctgtctcctctccatgtcagtaacatgtacaaaattaggtgactttatcagctattttcatcaaagaagaacagctctcccagtggtctttcctccctggtctggttatctggcaattgacttacaaacact

SEQ ID NO: 386912 - DNA, 414 bp, Homo sapiens
gtacaggatgggggcacggcaggccaaaaggcaactttttgggtgtgaaaacaggaatgcctgtccccatttagggctgtaggcctccaggcttgagggtggggcytttgccagggaaccatcctcttctatccggtatttttctgtctcctctccatgtcagtaacatgtacaaaattaggtgactttatcagctattttcatcaaagaagaacagctctcccagtggtctttcctccctggtctggttatctggcaattgacttacaaacactcccagcattaacttcctgccttcaacatataagacaaagcaagcctgtctcttctaattctcacgatgaaaatgtctgtttaaaaaatgtctttcaaaatacccacataaagaatcttcccacttagaccctaatatgt

SEQ ID NO: 386913 - DNA, 632 bp, Homo sapiens
cacaggtctagagagaattaagtattttgtagttttcaagttttatacattttgccaaatggatcactgaaaaaacctaatttatgccatttcacaaaaagctaacaggctttctatatccaatatagattgatttgtagttttataaacatgcattgtatggcaaaataatactacttttttttcttcttgattttaatagatccacatttttttaaacccttgggaatgtattatatattgggcttttgagaattagattatcagattaatttttttataaatatgaaggacctaccaccttatcaccttaccactaagcactaagtgagaataaaagaagaaatgctataggcttggcatactagagtttccatactgcaaatggctaagaactaacccttcacttttccaaagcccagttggctaagstggggttctgtaaggaaaggaaattttaaaagtcatagaatgtgggcactgccagggagaatatttgaccatctactatttcatgcactatacctgaactaaaaagagaagaagagagggaaaaaaaagataaatcaacacctttgaatgaaatgagccactttcaatatgtcagacaaacataatgcattttgttcaca

SEQ ID NO: 386914 - DNA, 617 bp, Homo sapiens
cactatatttacatgaactcttagcaaattttcatatgaaaatatttataattcctactgaaatgtatatgaactgaacgcaactggatttcagcccctgtctctgtgtcttaatttgataaacaagcaattacccttaacacaagcaatagcactttgatcagcttgagtgtgggaaaacttcctcaagtgagtaagggaaactaatatatggacattgtaggcaatgtaaaatgggcagaaatgcacagattaagtggcggaaaatagattcagtttcaacagttacctccaagaggtgaatgatccagtccattcacacatttcacaaatatttaccaagaatctgctacatattgggcactggcctttcctctgagtatacagagatgaacatgacaaattggggaccggtrgcgttgcttccttaaagaagaccagctcagatgaggagtcaggcaagtccagccagtttgtaccagcagagaatcaattgctcagtcagtcactctgcatacagttatggctcgcacagtgttcaaagctggtgtagatggctcatttctggctcttccagccccagtgccatttagctacttaggtttttaggcaatgtg

SEQ ID NO: 386915 - DNA, 460 bp, Homo sapiens
caccctatgaaagtgcaaaggctcttggaaaggacaggtagacagatatctacaaagataactctaatccaaagcaagttatgggaaatgctatagtgaaggtttaaacaaaatgtagagagagttcaggggcagacaggattctgagaagagcgtagtattatcttaggaaggtttctgctcatgcttgtctgtctggcaacttagacagcaacagctttacaagcmgattcaagtatctgtgctcccatgaagcatttccacctccctgcccacacagataggatgatggtggctctaagagtgatcaggggatgctgggctcctgtgaatgtctaggacaagacctaggtatggatgaattttccatttcttctgaaatatataggatcagcaccatagggcaggaagggaacccagagaccatcattccaacctcccaagtggtacattactgttt

SEQ ID NO: 386916 - DNA, 632 bp, Homo sapiens
ggtaaaactagttttaaattttctgagactcgtacacataaattaaaaacatcaaaacactacagttatttttcaagaattcaattactaaattaggcaaatgaaattgttcactccctggtatagtttttacatttctggagtctgayaaaaatagatcataaattccatttatatattctttctatttccaaatacaagaaaaaagtgttctttgccaaacaattagacccaatgaccacaaaggcaaaataaaaactagccaaattcacttaaagatagaagaaatgcagacaatgtgtatatagttgaggggagcacaaagcaaacacatcaagtttatcgtggactaattcactatggtttctccatccaccatcaaaattccatggacaatgggtgttgtataatgctgaataatgtatcctgaatgcattttaatgatttaaactagcatatttcatttccttcctccttctccccccgcctcaaatcagggcaaggcagagttatataaacttttaatgataatatttgtaaaagatatgctttaatgatttgagtctcatttttcttaaattatcagtcatttgaataacttatttaagcattactttaaacaagtaatttct

SEQ ID NO: 386917 - DNA, 632 bp, Homo sapiens
ggtaaaactagttttaaattttctgagactcgtacacataaattaaaaacatcaaaacactacagttatttttcaagaattcaattactaaattaggcaaatgaaattgttcactccctggtatagtttttacatttctggagtctgataaaaayagatcataaattccatttatatattctttctatttccaaatacaagaaaaaagtgttctttgccaaacaattagacccaatgaccacaaaggcaaaataaaaactagccaaattcacttaaagatagaagaaatgcagacaatgtgtatatagttgaggggagcacaaagcaaacacatcaagtttatcgtggactaattcactatggtttctccatccaccatcaaaattccatggacaatgggtgttgtataatgctgaataatgtatcctgaatgcattttaatgatttaaactagcatatttcatttccttcctccttctccccccgcctcaaatcagggcaaggcagagttatataaacttttaatgataatatttgtaaaagatatgctttaatgatttgagtctcatttttcttaaattatcagtcatttgaataacttatttaagcattactttaaacaagtaatttct

SEQ ID NO: 386918 - DNA, 497 bp, Homo sapiens
ggtggttttttttttaaattaatttcagtagatttagggctacatgcggtttttggctacatgaattacttgtacagtggtgaggtctgaaatttgagtgcacctgtcacctaggtagtgtacattgtacccaatatgtagttttttatccctcatcccccttttaccctccccacttctgagtcgccaatgtccattatgccactctgtatgcctttgtgtacccataacttagctcccacttgtaagtgacaacatacagcagcattttggttttccattactgagttacttcacttagaataatggcctccaattccatccaagttgctgcaaaatacattatttcattatttttatggytgagtagtattccataaatacacaatatatactatattttacttatccactcattggttgatgggcacttaagttggttccacatgtttgcaactgtgaattgtgctgcgataaatgtatgtgtgcaggtatct

SEQ ID NO: 386919 - DNA, 610 bp, Homo sapiens
gtttggaggtgcctcagaaaactagaaattgagctaccatatgatccagcaatccctctactgggtatataccaaaaaaatgagacatcagtatatcgaagagatatttgcactctcacatttgtggcagcactgttcayaatagcccaaatctggaaacaatctaagtgtccctcaacagatggatgaataaagaaaatgtggcacatgcacacaatggagtactattcagccataaaaaagaatgaaatcctgtcatttgcaataacatggatggaactggaggtcattacgttaagtgaaataaaccatgcacagaaagacaaacatcacatgttttcacttatttgtgggatctaaaaatcaaaacaattgaactcatggacatagagagtagaaagatggttaccagtggctgagaagggtagtgggtgttgtgagagaggtagagatggtttatgggtgcaaaaaaatagagtaaaaaagatttggtatttgatagtacaacatggtaagtacagttaatattaatgtagttgtatgttttaaaataactgaaagagtaaattggattgtttgtatcataaaggataaatccttgaggggatgt

SEQ ID NO: 386920 - DNA, 553 bp, Homo sapiens
taaagactccctcctaaaaaaaagtacagacatacttgtcttattgcacttcactttactgtgctttgcagatactgcagtttttayaaattgaaggtttgtggcaaccccatgtcaagcaagtctatcagcaccatatatttcccaatagcatgtgctcacttcatgtctctgtgtcatgttttggtaattctagccatatttcaacattttttattattatgtctgttgtaatttgtgatcggtgatcttcgatataaatatagttgtttgggggcgtcacaaattatgcccaaataagatggtgaacttaatcaataaatgttgtgtgtgttctgactacgtcaccatcccgctgctccccaatctctttcctgctcctcaagcctccctataccctgaaacacaacaatattgaaattaggccaattaaaaaccctacaatggcctctaagtgttcaagtgaaaggaagagtcacatgtctctcactttaaatcaaaagttagaaatgatgaagcttagtgagaaaggcatgtcaaaagcctcttgtac

SEQ ID NO: 386921 - DNA, 566 bp, Homo sapiens
catgtgactcactttatttccatatttactttattgcagtggtctggaactgaacctgcaatatctctgaggtacttttgtatggtggtgtagatatcagatataacttactctaccacatgtttggagcaggtacttaaaaatacattaaaacctagccaggcatggtggcttatatctgtaatcccagcactttgggaagctgaggagggcagattacctgaggtcaagagttcgagacaagcctggccaacatggcaaaaccccatctctactaaaactacaaatattacctgggtgtagtggcacacgcctctaatcccagctacttgggaggttgaggcaggagaattgcttgaacccgggagacagaggtttcaatgagccaagatcacaccactraactccagcctaggtgacagagcgagacttggtctcaaaaaaaaaaaaaaaaaattaaaaaattttctgtgtggtaaataatgatgcttttttctgaagtttagattctgaaatgtgggcaattggctttgcttctagctcatcttaagttagtgaagaagtta

SEQ ID NO: 386922 - DNA, 604 bp, Homo sapiens
aaataaatcttctattatgtattttaaagtaactttatgttcttctcgtctatattttccttttctctgaagcagcttcttctgtgctttttctcttttctgagaatgcaagttcctctacaacgttatataagagcaaatgccaggttcatcataaataggtacaatcttataaattaaagtttacctctaaatatagtttatattttgggttgaacttccaatttttgaaacatacatgataaaactctgacctactacagcacattcttccaatttctaatcaatgtccattcaaccacagcaataactgcttcataagctaaattagagtgccttcttattgctgataattcttggtacagcctcttgagcatcaagtgcaaatttcaagagaatccatccctatacaaattcagsgttatcagcctgaatccagacagcttttgcttccttttgaatgttactagcctgtacttttccatctctttcatttgtgctgcctttgtgaatccacaaaatcacgttcagaacagtagtggaagaaagagcacaggggttagacgcatgtttctttactaaagcacttcagcccttacaaatt

SEQ ID NO: 386923 - DNA, 578 bp, Homo sapiens
gtttctcatttataacttggtacagagaggttattcattaatctagaactataactaattcatggcaaacttgggaaccaggatctgagctactactctgccaaattccatatttttaagcattatagaatatccttatttttatagtaaaacattctactatacataaatcagtatgtggctgatgccacagaacacagtcatggggcatctgtagaagtcatgctttgttgacctaatggaatctctgtcttcagagaagtaaaaacttggttgtttctgtaggttataaagttccaagccattgcktgccacctgagagcattaattccattatattggttgtttccatagttaaggagtggcttgttagagtgctaactgtctatgtctcttccccaggccattaggtaataaattggatataatatataatttttaagttttttcaataatgaaagatattatgtaaaattctctgcactcaaatgatcttcagccatctcatataatctcattttctgacctgtgaaaactacaaaagctcccaggtttttagaagagactccattttgcca

SEQ ID NO: 386924 - DNA, 611 bp, Homo sapiens
tttttctttggcccatgttgactcttttcttgccattaaggtagtctgttgtgccaatacttttgcaatgaaagaggtgattacttttcttagatgttttcctgcattcaytgattggtagcaattccaacaactgatgacttgggcagaattcaaaccaggaactttatagggaaaactgtaataccatcattgaatttgtgagccctctcatcttgtagattggaaggtccaaaggaagcttttttttttttcccacacttcacatgcactgtgttaaattaggatggacgtcaaaaatctgaccttttcatggagttttagagatggaataaaaggaagctagtaactgatttcattccagctgtatttcccacagcttgtgggaatgttttatgaggagagttgtggatagtgttttatgtcatttgatgagaatgaatccatgataatctataatttaaagcaagataaatttccctattatggcaactcggtcttgtattaaaagctgacacttcaccacaggtcactgctttatttcttcaagacttttggtgaattgcccttgcaaaacaccaagagcacatctgtaagttttagtttcttaa

SEQ ID NO: 386925 - DNA, 588 bp, Homo sapiens
atagagaaattctgaatgttcttgtttggggatttatttttaaataaaaacctatggcttttgacaagtttcaaagaaataatcatctttcaggaaggtggagacttagcataggaacgcatgtgtctaacggatagaatgcctgctaatggatagtattccctgctcccaatctcagatattccagcaagaatattgggaatgaatattcttcactaaaatatagtcagcctactagacaatcagcattacaacgagcagcattaattccacacggcaagatccttattcaagaagacatcaaaatggagaagtattactattgcaatgactcatcatagcaccttttcaggctaaaatcctatgatctgtaatgagtgctttgtactgtaataaagactagaggatatgacctgagggaagcaaaagagttttctcttaattggcattgaattaagagacaaaatatataaaaagaggatattaagtcatcamataagtcccatatttaaaaactactagttcactctattttacaattttatacaatttagtattttccttcaaaaagtagatattctggtataa

SEQ ID NO: 386926 - DNA, 376 bp, Homo sapiens
cttgataggttccaggtgctatttgcaagtacttaacatgcattcatycatttaatctgatcaacaactcaattaggtaggtataattttaatctacatttcacagataagaaactgaaagcagaaaatgtattcaaggtccccaagctaaaaagtgggatttgtggaaacagagaacttcagacttaagtagtatggcttcagagcccatttcttaactcctacactataatggaggaggatcctgggctctctcatgatacccataaagataggatggttaaaagacggattataaagggtggtgtacccagctgataagagcttcagaagataagtgataagaagacagaattaaattgggatggcagtgatg

SEQ ID NO: 386927 - DNA, 598 bp, Homo sapiens
tctgattccacagttcttcataccactatgtccataatagttttttttttttttttaaataatccaatattaccaatgagaaaaaacagattttagaattttgtactcaacctacaattatggagcattcatacaggaagaaaggaggttgagaacaatagcagcagggacaatagggggtcagttatttgaaactggctatgtgtgcagccccaaccttcagtacccagttggagtgctggctagggaaaacccatttccagcatygtgcacaatgtttttaaggaggaggcataatgggtggtggttttgtaacagaaataatctggagagaatttgataacagtttatttcaaaaatgagaaaaaaaatggaaataagtctttattgtttagtctttcctaaatatggatattattttacaagagttgttctttcaatagtgcaggaggaatggtggagtactggtttgcaacttaggaactagacttttctagaaaagtcaaattttcaggtacatatatagatgtcagatttttaatttttggcttggaaaatgttaaactgtaaaatgttcaaattgttttcaatgtgttac

SEQ ID NO: 386928 - DNA, 590 bp, Homo sapiens
ctaaaacaattctccaagttttaaacaatttatatggttgccactttattttcwatgaaaacaaattaaatttctgctgaaagctaaaagctggccaattaccaagtgatcccacagttattgagtgttactacttggacagcattaaataaaccattctttaagttacagaaaagatttgaggtgattcctctcttcagccatcctacagtcttgatagaaaggcaaaactggcagttatgaaataattaaaaataaatcagtgctaaactctattatgtaaaataggagtatagatgagggagagatcagtgtggatcatagtagccaatctctgcactttaaagttaaaaggacccttagaaatcattcatttggagttttagaaatcatgaaattgtattttatcaggtttacacactcaagatttcacagccagctaatgacatgtccagtgcttgaataaaggtctcttaaccctcaatttcgtgatcactttttactagttagccttatacctcctcctggaggagtttgtccttaacaattcattaaaagatagcttggggtcagcaattatagaccgagtt

SEQ ID NO: 386929 - DNA, 612 bp, Homo sapiens
cacagcttatttaacccattgatgagaaccctcagtatggtgactcagttttaaagagactttgaaaagcagatatttgtatagttagtttggaaaagtgtgatgaaatatgtttgctgagttagagaaaatgctcattaatgtcccacaggataataaaatcataacctttgaacatatattttcaaccagagaggaaatggtttgtatcactaccagacaaaaatatacaagttaaaagtacccagaacaactctgggtacttaccaatagtaaatggtaagtaaaacaatgatgtattttctggttcttgggaacccaggtaatttttccccttagggttttttggcaaagtctggtgacatttttggtcttggcacctggagggtgcgaccatcatccagcatacagtctaaggatgctgctaaacatcctataatataaaaatatcagtyatttctgcctcctctcatacccccagaaaaaattatcccggccaaaatatcagtggttctcaagttgagagacactaccctagagacttaaatcacctttgtacaggcctgatagtgctccagtgtgacactgaaagggcttgctgccattcttttg

SEQ ID NO: 386930 - DNA, 612 bp, Homo sapiens
cacagcttatttaacccattgatgagaaccctcagtatggtgactcagttttaaagagactttgaaaagcagatatttgtatagttagtttggaaaagtgtgatgaaatatgtttgctgagttagagaaaatgctcattaatgtcccacaggataataaaatcataacctttgaacatatattttcaaccagagaggaaatggtttgtatcactaccagacaaaaatatacaagttaaaagtacccagaacaactctgggtacttaccaatagtaaatggtaagtaaaacaatgatgtattttctggttcttgggaacccaggtaatttttccccttagggttttttggcaaagtctggtgacatttttggtcttggcacctggagggtgcgaccatcatccagcatacagtctaaggatgctgctaaacatcctataatataaaaatatcagttatttctgcctcctctcatacccccagaaaaaattatccyggccaaaatatcagtggttctcaagttgagagacactaccctagagacttaaatcacctttgtacaggcctgatagtgctccagtgtgacactgaaagggcttgctgccattcttttg

SEQ ID NO: 386931 - DNA, 523 bp, Homo sapiens
ctatagttaagcatatttattatatatttaaaaataactgaaagagtagaattggaatgttcctaacacacatacataataaatggttgtgatgaatactccaatttacttgattattgcacattatatgcctgtatcaaaacactacatgtatgccaaaaacatatacaactactatgtacccataatcattaattttttttaatttaaaaatctatgatctctttaaggacaaaagtcttccaargcaaatattaatctactaaataagctcactgtatagagagcccagagtactgtaaaataatatgcattcatttggaaacaaaaactaatattataagagcacactatgtattaaggatgccttcaaacattttatgtgggtttttactttaatctttagttacactttcaggtagatgatatgcttctccgtttatttaaggaaacttcaaccgagtgaagttgccacatttttctaaataactcatctagtatatatttcattatgccaaagtct

SEQ ID NO: 386932 - DNA, 523 bp, Homo sapiens
ctatagttaagcatatttattatatatttaaaaataactgaaagagtagaattggaatgttcctaacacacatacataataaatggttgtgatgaatactccaatttacttgattattgcacattatatgcctgtatcaaaacactacatgtatgccaaaaacatatacaactactatgtacccataatcattaattttttttaatttaaaaatctatgatctctttaaggacaaaagtcttccaaggcaaatattaatctactaaataagctcactgtatagagagcccagagtactgtaaaataatatgcattcatttggaaacaaaaactaatattataagagcacactatgtattaaggatgccttcaaacattttatgtgggtttttactttaatctttagttacactttcaggtagatgatatgcttctccgtttatttaaggaaacttcaacygagtgaagttgccacatttttctaaataactcatctagtatatatttcattatgccaaagtct

SEQ ID NO: 386933 - DNA, 531 bp, Homo sapiens
gataaagaacataacaaacagttgggagaacatgaaagaatatatacatacacagcataaaaaatgtaagtgcagttaaaatatcattacactaagaatctaaagaattactgggtttcagctctgccatttctgcttaccaattcagtgaccatgagcaaatgacaacttcactgagctacattttccattttgaaacatgtagaccctaaagtctgccaggattatggtaaagaaagcatgagtccttatgcaaagcatgtgttgaatactattcactcttaaaaccatattatgctggaactgtgaaagagaactaaagctggctgaaggagggccatagggaatctgattttgtttccttcctccctgtatagttcaggctttgcaaagtagtttggtttaaaatctaggtgctattttctagacagagtaacaatttctgtttactgcttttattggccaggccttgcctcccaatccagacacccagttctcattcrctctttaaataacagattatttcaggaa

SEQ ID NO: 386934 - DNA, 610 bp, Homo sapiens
gctagttgtgttgtaaatttgtgcctgtgactttttgcctttatggagaaaagctgagaattcactgcgactgtacattcttcaaacatgcaaccttccaccacatcacacagtggacccagcttttggagctacttaatgagaattatttataaasttcatgaggaatttgaattaaaggcaattttccttgaaaaatgatatggtttggctgtgttcccacccaaatttcatcttgaattcccaggtgttgtgggagggacccggtgagatgtaattgaacatgggggcaagtctttcccgtgctgctctcgtgatagtgaataagtctcacgagatctgatgactttataaagaggagttcccctacacaagctctctctctttgcccaccaccatccgtgtaagacgtcacttgctcctccttctgccatgattgtgaggcctccccagctacgtggaactctaagtccattaaacctttcttcctgtataaattgcccagtctcgggtatgtctttatcagcagcatgaaaacggactaatacagaaagcttccttgctatgaattagacaaaaagaaaacaaaaaaaggaagagagagaacaag

SEQ ID NO: 386935 - DNA, 607 bp, Homo sapiens
ttataatacatcaccacatggagctaggatgtatctctaacatagaacttttcccartgggttataaagctttatctttttgtgtgtctcttgcactagactttaatctctcctatattctcaatacctagaatgtgactgaaataaagcatttaactttattaaatgactatttttcagtgttcaaaatataaaggtctttgcaattagttatgctttgtttataagtaggagcttattgtctctcttgtgaacttctcttaatttgataagaggaattatataatacatggctttggctcctaggaaccctacactaagttgaaggcttaacttcagggattctacttagtctatattcctaatttaactatcatctcgaccctatttcacaacatggttcttgttttcttcaatgaatatttttgtacttttccccctccttttaaaccttagcattagttattctattgtagatatgttttagactgcacactgccttaaatcatctttggaaataaatggaatataaatgtagtaaaaataaattcaagcttagatttatcacctggttccttgcaaaaaccaacaagtgacatcattaaca

SEQ ID NO: 386936 - DNA, 598 bp, Homo sapiens
aaggctgtttctacacttaaaaaaatgtaatttccaatggtggaaccacccagctgttttaccttcaacaaacattgatgaaacacctagagggtgtcaggcacgttgcttggtactttcccttttaaaattatttaatccctccaacaatccatgaaatactcattataatccttttaaagatgtgaaaactgaagctcwgaggaattaaataaatcctctattatcaaacaatcagtaaataggtgagagcaaagtcacattgttagaaactgtcagaacaaggattaaaatccagatatcttgattaatattatattggcataattactgtatagtaccttccttggcttaataatacacatttaatgaaaataatatacggattttttaaaatcattgtttgctcttttactattttatttctgattttctaaggattacatccttagggtgaatttttttttaattacaaaaaagggtaaataaggatagaataaagcaatcataatcccaccactcaggggcaaccattgttaatattgcacttattttgttccagtgttttgtctacatatttcttcataattgaaactat

SEQ ID NO: 386937 - DNA, 608 bp, Homo sapiens
tttgatgtgcttagatgaaccacttatcctaatgtgttatttgtaatttacatcatcactttaaaaacattgggcaatattcctagaagatccctgttaatatgccttaaatggataatactttaagctagcaattaaaaaacacttattgaaacagctctatgtatctattttttactaggcattgcaggcattgttttaagcaatatcaagttcagcaagggtgatagacattaaaacaataaaatgaaatgtaaagtattaagtaccatacttaatattgaagcagggatttgttaagctggccctgccatcatcccttccccttttcctaatggcaaaaaatttgctttttctcaaaggaatctattctgcttgtgacattgagttatatcaaagaaaggtgtgggtccaacattgatacatagccatcagaaagtactccatgcccacgtctctcagctcatcccaaatttattcagaaatgggcacrtgactgaaaccaaaccaactgcattctctttctcaggaatgtaaatcttatactaaatggcacaagggtagaaaacagtaatgtttgttccattctgatgacaacactctggaga

SEQ ID NO: 386938 - DNA, 529 bp, Homo sapiens
taaatgttcttctaagattatttccacacatctgggaaatatcagacagcatgctgcaatatatatcaattcaggctagagtttttagctaccgatatttggttagctgaggagtatcccttcctcccaccaccagccacatttctctctatgggaaatgtctaacactacattaagtgagaactggctttcattctgagatcaacaatgatgtgatgtgaaccttctggagtagaccaaactctgagacaaaatggaggtagctttacagagtggataaaaaccactattcaggagccaaactcctaagagtggaatccagctccactcttcaccagttgtgtgaccttgggcaagtgacataactgcttwgtgcttctgaacagaatcttaatctataaaatggagcccatacatagttgtgacctcacaatgttgttacgaggataaatgagttaatattttaaaagagcttagaacagttcctggtacatagtaagtgctaccggtttgttaagttaataaaata

SEQ ID NO: 386939 - DNA, 535 bp, Homo sapiens
agtccataaatattgagcagtgtatactgtatgctgctcaggtgatgggtgcaccaaaatctcacaaatcaccactaaagaacttattcatgtaatcaaatacaacctgtacygcaataacttatgggggaaaaaaagacattggtatgggcaaagattttttggggtaaggccttaaaagcataagcaacaaaagcaaaaatagacaaatgattacatcaagttaaaaaccttctgcacagcaaaggaaacactcaacaaagtgaagagacaaccaaaaagtgggagaaaatatttgcaaactcttcatcctacaggggattgataaccagaatacataaagaattcaaacaactcaatagcaaaactaatcatctgattttaaaaaatggacaaatgatctctcaatatctgtcctctgtcattttctttcatactacatcctaattcatcattgactctatacacacttttttaaaagctccataaaccaattgttgaaaagcaaaataaataaaaaaatgggccatggata

SEQ ID NO: 386940 - DNA, 564 bp, Homo sapiens
ggaaatgtacctgagttatgaacaaaggaatttataagtcaattaatagctttaacaagggaaatgttagctgacacaatagaatagcatttgcatccaaacaatatgggtaaattataaatttatctttttgttaaagcactcttttttcttcatctgtcagaagggttactctaattttaaaaatactgctaatagtcatattcaacatgtaatgagtaacaataatcatattcaacacattgtgtgccaggtacaattgcactatacccatgttaaatcaatagataggacaggcctaatgaggcargtgctaccagatccctattttacaaataaggaaactgagtcacagagtgactaaataatgtttccaaggtaacttcacaagaaggtggccaaaaatcctagtgttcacactccatacttggtctttttctttgattaaatcagcctctgattatgcagagttttattttaaaaaaatctgctcctcctcttctaataagagtaaattagcaagttcagctgcctgctctaagaaaagtgattctggttcaagaa

SEQ ID NO: 386941 - DNA, 646 bp, Homo sapiens
aatgctggaatgagctaaaactttaggggactgttgggaaggcatgattgtattttgaaatgtgaggacatgagatttgggaggcactgggggcagaacaatacggtttggttgtgtccccaccaaaatctcatcttgaattatagttcccataatccccacatgtcttaggagagacctggtgggaggtaattgaatcatggtggtggttacctccacgctgttcttgggatagtgagtgagttctcatgagatctgatggttttataagggggtccccgccaacacacaactttgctctgcactttttcttgctgccaccatgtgaaaaaggatgtttgcttcccttccaccatgactgtaagtttcctgaggcctccatagccctgtagaactgtgagtcaattaatttayaatttctttatcaattacccagattcaggtatgtccttatagcagcatgagaagggactaatataaggactttccccctcccttcatccaccactgcagacacacatggggcttctcccacaggagctcaatctgggtacacctatagacagcatttttggatcacttcagggtgaccatttttccagagaagaaatgacctccaggttaagccttgcatgaagggtggagt

SEQ ID NO: 386942 - DNA, 520 bp, Homo sapiens
aatttgtttctcctgtctggactgctatatgggccttaaaaatgttctctgtctgtttgatctcacccacctcctttggtgaaatctcctgtaattgctgttaccagaatgtcatttgctgcttcagactgttggctyctcactgcctgctctgtcagtgggcatgatcctgacctttttggccctttaccaattgcactctctttactcaactcctttctccggcccaaagtacactctccatcctggccaagtacattcatttggcatatgcatgctgccttgccctgcccatgccctcccgcctcctgcagtctgcatgcttcccctcaccttcctgactcccactgcactctcccagtgtgaaattctgacgtttcctaccagaccatgttctttttatatattcatctgttcagcaaatgtttgtttagtaaatgctgtatgccaggcattttgctaggcaacagggaaacaaagttcttgccttcacggagcttcagagtcctgtgggggacac

SEQ ID NO: 386943 - DNA, 574 bp, Homo sapiens
aaaatctatccccacagggagaattagtgaaccagagagtaggaatatatgtattaaaatgtcccaaaaatacacagagggcaattaaaatgagcaggtataaagagaaacacctagaaatactgtgaacaaaagtatagttgtggaaatgaagagttcaatagataggctgaggagcagcatgaatacrgctgagaatgaattcaggggctggaagattttttccaggaggcttcatgaagtaggtgggaaatacacaagaaaaaagacatgcaatacacagaagtgtcagtatctataatactagaaattccttaaaaggaaaagaaaatcaaccaggagtaagtaatttaaaatatgactaagaatttatttaagttaaaggaaattggaagatctcacagatactacattcacaggaaaaacacacattgaagagaaataattttaaaacttacaaatattaaagtgaaaattctaaaagcagatcccatataatggaacgcaaatctaaatggcttcagggttcttaatgacaacaagcgatacaagtggaaaatgaagtcatatttcc

SEQ ID NO: 386944 - DNA, 444 bp, Homo sapiens
gcagggttgttgggagacgttgaggktggattttctgtttcatgttggagagtcagggaagactttcagaaatgtcagtaacatcattctgttatgataatttactgagctacaaatttataatttgtgtacttttctgtgtactgtttcaaaaatgttttaaaaattcaatcatcaacagtgtttcaactattcaacagttttactcatttaaaaaattaaaatgtaaaattcatgactgaattatttttgtggtttatgcttatcttgtggactgttatagacattatataaagtaatatatgtagttttattatttatgactgagaaaagagggattactgagaactttgaaaactattaaatcttcatgcagatggtataatataatactaaagaaagagactagagtttcgccaaaattttgaacattttttgatgttt

SEQ ID NO: 386945 - DNA, 615 bp, Homo sapiens
tttaggggactgtcaggaaggcatgattggttttgaaatgtgaagttatgagatttgggaggggctggggcagaataatatggtttggctctgtttccccacacaaatttcatcttcacttgtactcccatrattcccatgtgttgtgggagggaccttgtgggagataattgaatcatgggggcagtttcccctatactgttctcatggtagtgagtaagtctcacaagagctgatggtttgataaggggaaacttgttttgcttggctgtcattctctctttgcctgctgccatccttgtaagatgggacttgcttctccttgccttctgccatgattgtgaggcttccccagccatgtggaactgtaaatccaattaaacctctttcttttgtaaattgcacagtctcgggtatgtctttatcagcagcatgaaaacgaactaatacagttacatggaagatacttatttttttaagatatttgcctttcctttgcattgtcacattcttcttaacaagccatcccatccttaccttcacgatgtagacactgattagactaagatgataatagtaattatcagattcacttgccactttactcatcagttt

SEQ ID NO: 386946 - DNA, 640 bp, Homo sapiens
agctccacaaatatacttcaattattacggagccaaaccatttaattaatcactacaaagcatttcttccctcaaaataaaacactttaaaatatatcattcataacattacaacctgccagatctaaatcttcttagcatttaccttctacatctccagtgagagacattaatatatttaaaaagtatattactaggcactagtggagcacttggaaagttgacttattctcttggaaaatgaactactattgagtgttgattcacattaagggaggagctaagacttcaccagagactagagaagtgaatctttgctggtcacccagcacatatttatcagataacttgctaaaaacaagcaccaaattagttgctgagggtggaggcaaagaaagcaatgcctgcaagaaatttacagtcaagcacaggggaaaaacatgcaaatcaatggtacaatataacctgatgagttttataggagatctagagaatctaatggaaataacagttgataaaataagtgaaacacttgggttaggaattggagagtaagaaggcattttytaggtaatagaaagggagataaattcaggcattagtagaggcaggaagaataccaaagaaatggccaggaggc

SEQ ID NO: 386947 - DNA, 412 bp, Homo sapiens
atacattttatatagccatactatatggctatatagtatgtgtttggaggtatagtatggcactggtggtgggggctctaggggcttgatgtagcagactggtggctggatccaaggttgggaaggccaagtcatcaagggccaggtcaataaggctctgtgagccatgtgaaagagttttagatttttatattctaaggcatgtatacccgctgaactcaatttgagtattgaataatgtgattacattttcactttaggaagattacgctggyagctgctgggacagggtggtggatcaacaagagagatttagaaaattatgtcagcagttcagacaataggttatgaagacctcatccatgaagatatcagtgaaaatgcaaaagataaggtaaaattagtaggagaa

SEQ ID NO: 386948 - DNA, 364 bp, Homo sapiens
tgtgagagagaaagtggcgaaagaaaattattttttaagacaattttatctattggaaagaacaaaacctggagcaggataagcctatgacaaaactggagtaagggaaatgtgcctctggtgcctttagctttcttatttgctgtgtttgtgttttttcccctccattcttgaactctctaggaaacttaggctctttctccactcatttttaaccaaatatgttctcagagagtctgcaatwtctatgagaaaacatgtctctaagtatgccatgggatactcacaacagcatttgcatcttgagtgtcctcactcatacaggatggagaacatttgctccttggtatcatgagaaaaatga

SEQ ID NO: 386949 - DNA, 483 bp, Homo sapiens
ggacattagaaaaggagagggaaagaagaatgaaggagaaagggacaagatgaaatgatctgccacatctgaggagggggccaaaagtaacgtcttgctctcttccaggcaccatttaacccttttgcaaaatataatatgatgccatctaatgttctctctgttataattatttgctctttatttctgaaaaacaaaaagcagcatatcaataatgttatttgaggattaagttttttgtttatttgtttcattagtttttgtttacattttgggtctgccaaaatgacactttctakctttattctcagaggtttatttttcctgtttttcccttccatatcagaaacttagcaaatttattcattttcaagcagggtctgaatgtcatgtcaatgacctcacccagtttctctattcctctgctcaaacctgcagatattagagtattctgccatggtacaccatcattaggaagcaaac

SEQ ID NO: 386950 - DNA, 613 bp, Homo sapiens
aaataaaaatttgttattaccttattttttatgttgcctgttccctgactgacagctgatattcaaaacatatctttacatttgctgctttcttatttgtttgtgtaattatttgatttatctttcctcctggattagatggcccaagagagtgacaactacatgtttcttttcaccattgcatcrttagtgcctagcactgtgccttacacatagtaggcagtcataaatcatctgttgaatgaatgaatgcatgaatgaatgaatgagagagacacttgtcctagtcatcatatgagaatattcacattctaaagaatatagagcacctacaggtagtacctttgggaaacttcatgtttcccctaatgagtttagtattactaaatcatttatggaaggcaagaaaacctgtcacagactttgttaaattaatatttttcacaggaattaaacgttataaattaaaggtggcttttattttaagagaaagccaaaggtcacacagtaaataagaagacaatgaacatatttgcatataaattttggtgttaattcctgggaaaatagccattgccaaaattctttccagagaagctgtgagtttacattc

SEQ ID NO: 386951 - DNA, 613 bp, Homo sapiens
aaataaaaatttgttattaccttattttttatgttgcctgttccctgactgacagctgatattcaaaacatatctttacatttgctgctttcttatttgtttgtgtaattatttgatttatctttcctcctggattagatggcccaagagagtgacaactacatgtttcttttcaccattgcatcattagtgcctagcactgtgccttacacatagtaggcagtcataaaycatctgttgaatgaatgaatgcatgaatgaatgaatgagagagacacttgtcctagtcatcatatgagaatattcacattctaaagaatatagagcacctacaggtagtacctttgggaaacttcatgtttcccctaatgagtttagtattactaaatcatttatggaaggcaagaaaacctgtcacagactttgttaaattaatatttttcacaggaattaaacgttataaattaaaggtggcttttattttaagagaaagccaaaggtcacacagtaaataagaagacaatgaacatatttgcatataaattttggtgttaattcctgggaaaatagccattgccaaaattctttccagagaagctgtgagtttacattc

SEQ ID NO: 386952 - DNA, 613 bp, Homo sapiens
aaataaaaatttgttattaccttattttttatgttgcctgttccctgactgacagctgatattcaaaacatatctttacatttgctgctttcttatttgtttgtgtaattatttgatttatctttcctcctggattagatggcccaagagagtgacaactacatgtttcttttcaccattgcatcattagtgcctagcactgtgccttacacatagtaggcagtcataaatcatctgttgaatgaatgaatgcatgaatgaatgaatgagagagacacttgtcctagtcatcatatgagaatattcacattctaaagaatwtagagcacctacaggtagtacctttgggaaacttcatgtttcccctaatgagtttagtattactaaatcatttatggaaggcaagaaaacctgtcacagactttgttaaattaatatttttcacaggaattaaacgttataaattaaaggtggcttttattttaagagaaagccaaaggtcacacagtaaataagaagacaatgaacatatttgcatataaattttggtgttaattcctgggaaaatagccattgccaaaattctttccagagaagctgtgagtttacattc

SEQ ID NO: 386953 - DNA, 469 bp, Homo sapiens
cttttcaccattgcatcattagtgcctagcactgtgccttacacatagtaggcagtcataaatcatctgttgaatgaatgaatgcatgaatgaatgaatgagagagacacttgtcctagtcatcatatgagaatattcacattctaaagaatatagagcacctacaggtagtacctttgggaaacttcatgtttcccctaatgagtttagtattactaaatcatttatggaaggcaagaaaacctgtcacagactttgttaaattaatatttttcacaggaatkaaacgttataaattaaaggtggcttttattttaagagaaagccaaaggtcacacagtaaataagaagacaatgaacatatttgcatataaattttggtgttaattcctgggaaaatagccattgccaaaattctttccagagaagctgtgagtttacattcatttggatgagattttttccactt

SEQ ID NO: 386954 - DNA, 568 bp, Homo sapiens
gtaatctcataatgtggaattgctgctttggagaacaaaactttctctctcgtttcatctcttatcccagtaggagagctagttacttctattttcttttatcctgtttctaatgrgtcttaaggttctaataataacacttacagtgtgagagtgactttgaaaaggaatcagaagaaaataacaagtgtggtgttcacttgttctgaatcttgtatatgagggtttatcaaagttgaagagatcattttctctggtggagctggcctaacttggagaaaatacgttagtcaatgtttggctgcatattgacaagtgttccctgctagattgtacaaagaggtttttggttttagtttcacagagatgaaaagagatattttatctctaaatttttagatatcacttaaattttagacacagggaatcttgagattaaatgatacacaaggcaatgtatatccttgtgacaatagccaacacaatgcctgacacataaaaagtgtcagtagatacaagttttcttctgtacaaaacataaagcataaaaagtattaatatctttttt

SEQ ID NO: 386955 - DNA, 568 bp, Homo sapiens
gtaatctcataatgtggaattgctgctttggagaacaaaactttctctctcgtttcatctcttatcccagtaggagagctagttacttctattttcttttatcctgtttctaatgagtcttaaggttctaataataacacttacagtgtgagagtgactttgaaaaggaatcagaagaaaataacaagtgtgrtgttcacttgttctgaatcttgtatatgagggtttatcaaagttgaagagatcattttctctggtggagctggcctaacttggagaaaatacgttagtcaatgtttggctgcatattgacaagtgttccctgctagattgtacaaagaggtttttggttttagtttcacagagatgaaaagagatattttatctctaaatttttagatatcacttaaattttagacacagggaatcttgagattaaatgatacacaaggcaatgtatatccttgtgacaatagccaacacaatgcctgacacataaaaagtgtcagtagatacaagttttcttctgtacaaaacataaagcataaaaagtattaatatctttttt

SEQ ID NO: 386956 - DNA, 554 bp, Homo sapiens
taaaagtctaggaagattttgagcaaaagagtgtcttgatctgacttatattttaaataaatcattctggctattatgttgaaaatacactggggaaaggagcagggaggcaaagtggaagcaaagagaccctttaaaaagctattgctgaaattcagacaaaagacaatagtattttgaaccagctgggagtggattggtgtgaagtgttctggttcwgtatacacacacacatttaactgacacatgggaattgtgcctatttatgaggtacaatttgatgcttctatagatttatatcttgtataatgatcaaattagggtacttagcatatgcattacctcatgcatttatcatttccttgtggtaagaacattcaaaagcctttcttctagctgttttgtaatatacaacaccttagtgttaactatagtcaccctgctgcgtagtagaacaccagaatgtattcttcttacctaattataactttattcccattgaacaacctctcccttttctactttctacttctattatcaacttttacccccta

SEQ ID NO: 386957 - DNA, 540 bp, Homo sapiens
gtgtgaattattgaggacctggtccgagttgttgctagagcacagagaggaaaactgacatraatgattgtcttagtccacttagactgctgtaacaaaatgcctttgatgcagtaatttataaatgacagaaatgtgtggctcaaagttctagagactgaggagtccaagatcaagatgccagcagatcagtgtctggtgagtgcttgctttctgcttcatagacagccccatttttatttatcctcatataatacaaggggcaaacaagctgttgggcctcttttatcagggcaatgatctcgttcatgaggactccctggtgctctactctcagagcgtgacttactctgtaggtgaaaaacatacaagcacttgcttcccttggtgtggggtaaaatgagactggcattcgtcctaggtaactgggcattgtccccatttctctcacctcctcagccagggccattaactcagtgtggcagcttctgttgaaagaagccccagttagtaaaacactgtgccaataaaataatcatg

SEQ ID NO: 386958 - DNA, 540 bp, Homo sapiens
gtgtgaattattgaggacctggtccgagttgttgctagagcacagagaggaaaactgacatgaatgattgtcttagtccacttagactgctgtaacaaaatgcctttgatgcagtaatttataaatgacagaaatgtgtggctcaaagttctagagactgaggagtccaagatcaagatgccagcagatcagtgtctggtgagtgcttgctttctgcttcatagacagccccatttttatttatcctcatataatacaaggggcaaacaagctgttgggcctcttttatcagggcaatgatctcgttcatgaggactccctggtgctctactctcagagcgtgacttactctgtaggtgaaaaacatacaagcacttgcttcccttggtgtggggtaaaatgagactggcattcgtcctaggtaactgkgcattgtccccatttctctcacctcctcagccagggccattaactcagtgtggcagcttctgttgaaagaagccccagttagtaaaacactgtgccaataaaataatcatg

SEQ ID NO: 386959 - DNA, 579 bp, Homo sapiens
aaataattattacagatctgtcactcaccagttaaacatacaaacggcttttttggaggggatgacctatttatatttttaaatcttatatcctaccttattcaaaagtcctatcagttttcctagtttagagaagcaaagtgacatttttgtgtacatttaacaggactgcttaccttcacaacctgctcagtcggctttccctggacttctcctaaccgcccatttttcctggatttggcaccgagagttacagtatttcacgtgcgatgataaaatgttacttaggagaaacagttccaataccaagaaacttcagcaattttaaagcattttaaagccacaaaaccatgcccgatccccaaaagggggtcctaactcctttacrctgtcagaatctcaattttaaaagggaggagtagagaagagatagaaacgctctctgttggtgaaaatctgtcttacttaccatttccccaacacaggagagactaaggaatttcaggtaaaaatcagatggctccaatcctccgatactaagagcccatcgccccagttcccaggagttccgccagttag

SEQ ID NO: 386960 - DNA, 409 bp, Homo sapiens
ctctgccctctgagtgtatgcacatccagctcttcagatgcctgcaacaacagctgttcaagaatcccaacctaatccattctccacagatgtggagcccagaagatttgtgagttgttaaaccaaaacaggatgcaggagcaccaggatggcacccggagactctaaccatggaatgcgtgggaattctgtgattatttctccatcacacatttatcacactgtagagatggactcaagaccagtgcttctgaggccttttccagcacttctcattctttcagatgccttttgcaacttaacgttctycttcttcttcatcatgccgtgtttattgaaaatctccctatctcattaatcagaaaaccccataatgacaggaaccacatcgttttgcttaccagagtat

SEQ ID NO: 386961 - DNA, 397 bp, Homo sapiens
ctttctgtgcctggcttatttcatttaacataatgattttcagttcaatccatgttgctgcaaatgacaggattttgttcttttttgtggttgcataatatttcaccgtttatgtataccacrttttctttactcattcatctcttgacagacacttgggttgattttgtatcttggcaaaagggctgcaataaacatgagacggcagatatctgcttgatatattgatttcctttcttttggatatataaccgcagtggaatttctggatcacgtggtagttctattttcagttttttgaggattgtccataatgttttccatggtggctgtactaatttacactcctgccaacagtgtatgagcattctcctttcttagggaggtttttgtggag

SEQ ID NO: 386962 - DNA, 526 bp, Homo sapiens
tgtttgctatttaattggatcttactcttctgtgaatgttattcttgaagccatgcacagagatgtttaagtttattgaaggtagagatcatgctttataattttactattgtctctaaagtaccttagaagcagtggatactaccaataaagagggtctggtttgccctcattagaccacagaaggaaaggaaggcaataccaacataggaacctgtcaaagaaaaatctgtcaaaggagaaatgtgcatattctacttcaatttatcctagcaacagaactttttgccttatgaaaaaaaaatggcattataaggtaactatagttaattatattgtatgatstattttagaataactagaagagaagagtttaaatgttcacaccacaaagaaatgataatgtttgaggtgatggataagctaaatactctgatttcatcattacacaatgcatatatgtatcaaaacatcatactgtaccccataaatgtgtacaattattatgtgtcagttgaaaatgaaa

SEQ ID NO: 386963 - DNA, 594 bp, Homo sapiens
aactgggtaaacacattgacttctaggctccccactgtactcttcttagctgttatttgccagcttgaaatttctgattttcattaccatctgaataacacagatattaaaaaataaaaaactcgtcttttcaatgtttataaccaaatgtaatttccttgagtaatgtacaagttcatattcataagagaaatatggaatctcaattaaaagtcctatgatgtggagctttgaagccctcctttcaagagttatccaagattatgtgacgtttcctcaccaccccgtctctctttcatatttaatcagatactgagattagagatgcaatttcctttttgtgtctagggaggtttatcagaatgctgcacactattgcttccactctgcttctcctcatccccaggttataggaccaaagtgtctatcttacagttattcattggaaattatttactttcttgatttaatgaacaaaaatactgtgaagtcacattttgtgtggtggtcaagttcaaaagtcaacaagtaaggtgaaaatcatatatcattmaaacttcacattaaaacctttctgctacccataaattaaaa

SEQ ID NO: 386964 - DNA, 602 bp, Homo sapiens
tcattgactaagtcttattagttctccccacgtacaccccaaatgcaagataacttgtacttcctgaaaggacatggttcataaagaccatacatagctgaaaacttgtagaagttaagactaaacctctgcaggtagccatgtttgtttgccagctaacatgtcactggcatctggttagagtatgaacaaagcttcaattcatttgacctaatagtttagaaaagaaccatatcatgcattttgcattcagggattcacatgatttcaaattgtctgtatgaaacaaaaccttgttaatattttatctcaatttttttacatctatataattgaatgtacctgagatggctcctgaatctgtcccttcctctacatcacygcctctcctttactttactcatcatctttttgtgcattgttaaacctacattttacatggtgattacgatgtctgtctatgtgtctgtgttcccatcagtctatatattgaagagtagggaagaatttctgttgatattttttctccatctctcttcttgcttggaagtgagtacatacattcacacacacacacacacacacacacacacacacacaca

SEQ ID NO: 386965 - DNA, 619 bp, Homo sapiens
caacccaagcctctgactccaaagtctattttctatctaccatgccagaactctattttcaatatttcccttgctcatttgaagctccttaaagacagaaactgtgcctttccatttttattttggtagcctttagcatagtaaaccacagccacatccaggctggcattcacaaaaattaataactgatgtgttggttattcctagagaatagtagaacatgacctggagagatgaggagtgcttaaaagtggagcaatttgttcagaagtgatggtgattaggtatgcctgtctttcgaaaatgttactgccagggcacagggttctactaagcataattcttgtcattgtttcccaaaatgatgtaagccaaactgaaagtccctaagacctggcagtgattttgatgttccctcagctacctgtttagttgttgaccttggtaactkgtttgggataatcgatcaaaggaaaaagaaagaaaccaaaccttggagtaaggggccaagcctagtggagtcttccccttttctgtacctcaccgaccttgttcagcaagcctggcacattttttttttcaaagtcaccaagtcactctcacctgagggcatttgtgc

SEQ ID NO: 386966 - DNA, 603 bp, Homo sapiens
tttgaactggcactttctccttcactgttatctttaaacgtcagatgtaagtctgggaattgccctcatcttcagttctggaatgtgatgtgttttaaatcttaaacaatgaaaacaacaagggcctaagttaaaatgaaaactcccctctttttattcaacgkgttcacaagtttttaggactcgttcattttccattttctaaaacaaaaagggtgattcatgctcacaataaagacactattgggcacagaatatatggaaccagactggtgtggagaatgacagagagccccaaagagcttttagactctcattagggagtctggaatgatatagaatttaacatgtaaataggctgaccatgttttttatcttccctaactgagacacttgtgagagtaaaaggaggtgataattattaatctggactaacctgtgtaaacatgtactgtctgggctaaacctgaacatatgtccatcctttatttaatagcactttgcaagaacaatgaaatagatagctccatgtagtacgtgactcattcgttgctaactgaattttacagttgataatactctagaagttcagagaaggaggcc

SEQ ID NO: 386967 - DNA, 547 bp, Homo sapiens
ttttagactctcattagggagtctggaatgatatagaatttaacatgtaaataggctgaccatgttttttatcttccctaactgagacacttgtgagagtaaaaggaggtgataattattaatctggactaacctgtgtaaacatgtactgtctgggctaaacctgaacatatgtccatcctttatttaatagcactttgcaagaacaatgaaatagatagctccatgtagtacgtgactcattcgttgctaactgaattttacagttgataatactctagaagttcagagaaggaggccggtggtatcactgcctaatgctgggtggttaatgagggctgtaataagaagatatattctgagctgcatttgagaggatgagcagatagagaggtaggttaggrgagcagattccctcatgtgcatgagaggacagagatgtttttcagcataaaatgctgaaatccactgatcttgattatttagcctgaagtgaaatttgtgaaaattatcaatatttcacacagaagaaaacactctctctttc

SEQ ID NO: 386968 - DNA, 437 bp, Homo sapiens
aaaaatgtaaatgcatgaatttatccattccatatgatatgaatgtgaactgtttctaaaccatttttgtgattgcaatacaaaagatccaatcgccaaatcaatggctgcttaccatataccttaccataggctgtattaatctgctctagaaaacataacaygtttggcaaggcagctattattgggactactacgtgttgagcttgcagtaatctaccatcattctccaagttccatccagctttgtcaggaccagatttatgaaataaatggaaatatgatgggaatctaccatcgtcctccaagttccgtccagtttttgaaaggaccagatttatgaaataaatggagttatgatggagaccactacttctgcatcctttagatcctttaagtatgacactaatctcaatcatcccctctatgatgtgata

SEQ ID NO: 386969 - DNA, 616 bp, Homo sapiens
  misc_feature (1)...(616): n = A,T,C or G
nnnnnnnntaattaaatggctctgacacaattgtccaacctgaagtacacgactcaatctgttgcatatgagtttgcacatgtatgtgcatatgtgtgtgtatttaacttttaaaatgatgttataatgaaccaccatatttgcgctccacaggctggccatgggaacactgtcccatgcagaagtttttaataagctagtggttcttttccagtgctttaggaaatttttatagaaacatgcactaagtctggaagtagagacttaaaaaaaaaactggccgggcgcggtggctcacgcctgtaatcccagcactttgggaggccgagtcgggctgatcacaaggtcatgagatcaagaccatcctggctaacacggtgaaaccccgtttctactaaaaatacaaaaaattaactgggcatggtggcatgcrcctgtaggcccagctagttgggaggctgaggcaggggaactgcctgaaccccgggaggcagaggttgcagtgagccgagatcgcgccactgcactccagcctggatgacagagcgtgactccatctcaaaacaaacaaacaaacaaataaaaaacagctcacccaaatccccacagcaaatat

SEQ ID NO: 386970 - DNA, 593 bp, Homo sapiens
atgagtttgagaagcagaactctgtcaatctatccacaagcaaagttagcttgtccctataagaaactgatgatcagatacattgtgcactttcctaccagccaaaagaattggcctgccgctgtctggtgttttcaaggcaagctctcactttctaaagaacgaaggagccaaagaatgaagagataccagaagtagggatttaagggctgctctggaaatacagatccaagagaaccactargtagtcagtgcattcatggaagtagcacctaactctgcttccttctgtaaaagaagggcatttttctggtccaatatggccacagataggcagtgaactaacttcaagactcattggtgcaaatattcttattatgaatctctgggattccttcaaatacatttcttcaggaccccataggttctaatccagttgaattgactggcctcttcccgctaaaagatcttccttactatatcaaattgaccacattataaggtgtcaagatcgctagagttaggcatcttgtcccagtcctctctgtgaccctcagtgtctgaccctaaggaagtgctcaccaaaataactg

SEQ ID NO: 386971 - DNA, 582 bp, Homo sapiens
aagcacaggcaatagaaaaccttactggcttaatagctggatagaaccagatccgggactaagaagaatcttaaagagcacctgatccattgtccttcattttcagatagtgaaacaaaggttttgtgggaggtgatgatcttccggaggtaacacgtgcagatgatgtcagaactggaaaccaggccagctaggtcctggtccagtgcccaaccccagccatgcctgcctcacacctcctcctgaggaccyccaccccgggaatgcctctcagcctttccatggcaggttttcttcatgcttcagttgcccccagggtaaggagggttgaggaagattctgaggtgacagagagcaataaactattgttcactcaggttaatttctcaggtcgaagctgctccaaaagatctaaaaagtatttccacatcattcaccttgctctctgtctttgctttacaaatacgtcaaacagcaaatgggacccaaacacctatggtcttgacaccctctcacgagccaagggccagagttaagccctggttctcaatacttctcccctgtagtctcctgggttctctc

SEQ ID NO: 386972 - DNA, 604 bp, Homo sapiens
cttctcactttacaaatttgctgaagaaagaatcaacagtagtagccatccatcatttaaacaaaagaagatgcrttactttttgccataaagttgtagcaacagatattcaacaaaagaagagtccctaactagtggtattattgagagtcttctaggatcatgcatttattagccactatgactcagctctgatggtccagcctccagagtacagccaaaattaagaattcagaggctgctactcaaagatgaggtggcgtatgattctctgtattgagttgtttgggtaatttttcagtttccatagagctgaagggctgccacccatttattaatgtagccatggctgtgatacacaagggtgggcagggaagccaactgcaggcagcaggaacagtttgagtaagctattggcattgtcacattgattatcacctataaggcactggaaaagcagaaggggctgaggggaacaacacattgctcttctctatcttttgctgagacatctctccaacatcagtttatattgaaaactggttccatgtttagaccaatgcactagaatatatggcagagtaaacattttgccatacaagtt

SEQ ID NO: 386973 - DNA, 604 bp, Homo sapiens
cttctcactttacaaatttgctgaagaaagaatcaacagtagtagccatccatcatttaaacaaaagaagatgcgttactttttgccataaagttgtagcaacagatattcaacaaaagaagagtccctaactagtggtattattgagagtcttctaggatcatgcatttattagccactatgactcagctctgatggtccagcctccagagtacagccaaaattaagaattcagaggctgctactcaaagatgaggtggcgtatgattctctgtattgagttgtttgggtaatttttcagtttccatagagctgaagggctgccacccatttattaatgtagccatggctgtgatacacaagggtgggcagggaagccaactgcaggcagcaggaacagtttgagyaagctattggcattgtcacattgattatcacctataaggcactggaaaagcagaaggggctgaggggaacaacacattgctcttctctatcttttgctgagacatctctccaacatcagtttatattgaaaactggttccatgtttagaccaatgcactagaatatatggcagagtaaacattttgccatacaagtt

SEQ ID NO: 386974 - DNA, 604 bp, Homo sapiens
cttctcactttacaaatttgctgaagaaagaatcaacagtagtagccatccatcatttaaacaaaagaagatgcgttactttttgccataaagttgtagcaacagatattcaacaaaagaagagtccctaactagtggtattattgagagtcttctaggatcatgcatttattagccactatgactcagctctgatggtccagcctccagagtacagccaaaattaagaattcagaggctgctactcaaagatgaggtggcgtatgattctctgtattgagttgtttgggtaatttttcagtttccatagagctgaagggctgccacccatttattaatgtagccatggctgtgatacacaagggtgggcagggaagccaactgcaggcagcaggaacagtttgagtaagctattggcattgtcacattgattatcacctataaggcactggaaaagcagaaggggctgaggggaacaacacattgctcttctctatcttttgctgagacatctctccaacatcagtttatattgaaaactggttccatgtttagaccaatgcactagaatayatggcagagtaaacattttgccatacaagtt

SEQ ID NO: 386975 - DNA, 590 bp, Homo sapiens
aatagtcaactggaaaataacactagaaaataagatactgataatgggcataaatatacaaaacacccagaaattaacctaatgaagaattgcagaagtcctttagagaatatatttaaaacaatattaagggacgtaaaaaatctggataaatggagagagtcatgttcagggatgggaatgacttgacattagatataagtcaaatctccccaaattaatccatgagtcctcaatcagtattcaatttagattcttttgaagattttgacagacttccaaaaacttatgttaggtttataaataagtcagcttcaaaaagtggagcaaagagaaagagaaacagaatagaagactcataaaccaatgcttgtaaatatgggaacttggtctatgataaagacagcaccacacaattaataggtaagtgatgaagtattttgtagccaataatggggatactggcttacttatttggtggaaaaaaagatgaactcctacattraaatcatataaaatgtttgtgtcatttacttattgaataccctataatatgccaaacacttccctagatttggagaaaataggaa

SEQ ID NO: 386976 - DNA, 591 bp, Homo sapiens
ggcctcaggaccactttattgctccagctagccctgggggttccctatctgaggaacactgagactccgtgtgtgatggatgtggagtcccttctgagtaatctgataggactggagaagagagagagttcaggctccatctgacctaatcactcaaaatcacctgtcttctaagccccctatacctagaggagtcggctccccaagctttgaggagtaaggacaagctggccaggaaaccctggtgtagccgaggaaagtggcagtgtgtgccccctccccctgcttgatggcagtacaactgagcaactcctactgcatagttgtgtggaccaaagtaastgtgtgctgtcagcagagggtgaccgtcccctctctcctggactactatggagcagcctgttggcaaggggtccagggaagccatactacaccactaaggagaaaggagctcatagtcagacccaacagagaatttctctttttatgacacagactttcctcctttgactttttgccactgagccttgctgtagctcagagatgttctaaagataggccatcggagataaaggtaacatctgaagtcat

SEQ ID NO: 386977 - DNA, 501 bp, Homo sapiens
gacaggcctgcctgctacccactcacaccctaccagtgaggtttgtcacctcttccacacagctcccactgcccccaagaggttaagccctgtcattttgtgtcattgccagatttcttatccatgtctctttttttgtagcaaagaattcagtgtcattaataacccctggtgatggccaagggcaggccccatgctatttgttatctgttggacacgcgttttttgatccccttctgatagacagaaaatacccatcttctctcttactaattggcagtatgtgccaggcttgggagttggcaamagccattgcttttcatcctttcagattacgtgttggactcctcatccaaaagtgcacgcttacgatgcggctaataccttcctcctgccatccagctcattaaggaataaaacccaaccctacttctgaagtggcacagagcttctagaggcagctgggctgctcatttccctgaaaggaggagatggaattag

SEQ ID NO: 386978 - DNA, 480 bp, Homo sapiens
ttttaacaacaaatctgcaggatgtatttcaactstatgttatgaggaagagttaagtagtggtacctcgtgttctccttctagttgcaagtccttgcctttgacttttcattttctctctctatgcttatctgaatctgcatttgactgaaatgctattatcaaacagcctaaagtacttctggagtttgcaattggctgttcccaacacagaaacagttgctacattgtagaaactttagtgaaacgatttttctgcgataattcgcatgttcatcaacggaaaggctaccaatcttacaatggcagggaacttgctttgtgcatgggagcccagtcttaaagttcattactaaaaaacactgctaaaagcttcatggcctctatttctctctgtcatgccctgtggtaagaggatgcctaggtttttccaagaggctggtcaaattattcttatagtatgactcccagcagacccta

SEQ ID NO: 386979 - DNA, 337 bp, Homo sapiens
gaacatttctgtcgtcaaaggaagttgtattggatattgatgtcctagaatattgtgcaacctagaagtatttagtgtcatgctttcactctttaaagcaatgtacatttcaatgatatggaaggaaagaactaaagggaactgaaactggctaccaagtaagaagcagagattttcaaaakacaaattagtttcttattcgcttaagaccttcatctatccatctttcaggctgttcccatgtgtatctaacatgcaaagagcagtaatgctgattccaagcaccaagttttaatgtggcattaatctgatgatcattgtactatttcatgctctt

SEQ ID NO: 386980 - DNA, 611 bp, Homo sapiens
agtcagcaggtgacgggtcctgccaggactggttcctttccttcaaggcagcaggttctcttctggcccaggatgtgtctagaaatggcatctggggccgggcgcggtggctcacacctgtaatcccagcactttgggaggccgaggtgggcggatcacgaggtcaggagatcgagaccatcctggctaacacggtgaaaccctgtctstactaaacaaaatacaaaaaattagctgggcatggtggcaggcacctgtattcccagctacttgagaggctgaggcaggagaatggtgtgaacccaggaggcagagcttgcagtgagccgagatggcgccactgcactccagcctgggcgacagagtgagactccgtctcaaaaaaaaaaaaaaaaggaaagaaaaaaaaaaaaaaaaatggcatctgggagctagggcttgggaaagaggcctcatgactctgactggtgccctttcctacagtggctgagctggtatccaagttgcaagacaaagtcctccccactctttcctcttctctcctcaagtggaaggaagaggtctcttttggagcagtaagatgagcagcctaggattgagggggttgcaca

SEQ ID NO: 386981 - DNA, 632 bp, Homo sapiens
ttaaaagttgtcttgacatttcaattagcccaaaattctgttaattcaaggaggggaaaaatcattaatggtatcacaatgggcaatcaactagttggtttaaatgtttactttccatcagttttaaggttttgtggacacaccctgtacttaagggatgttatcatggaacactgcaaaaacagaaatgcaaacatatgcyaatgaactgcaaataccttctcagtccttgatttaggtctgatcagtggcctcagtttactctcctctcactctgttttgacaatcataggtcagaaaagtgagaatcctaaaatggaaaggaaatagaagacagcagaatgactgaatttgtggctggctgcaattatctgcccagatgtctgaatccattctgcatttaattgattctaccttatcacctttgcacagataaacattccttagcatcagaaagatattggcttcatggagacttcatatccagtgctgctacgggacatacccatgctgctttcttttcatcttagccaagaagtgaaacaaactgagaggactcaggagtagggagagaaggcagggaaacagaaagccttggtgtggacgaatacgtgtcttaagagtaaagtaaa

SEQ ID NO: 386982 - DNA, 632 bp, Homo sapiens
ttaaaagttgtcttgacatttcaattagcccaaaattctgttaattcaaggaggggaaaaatcattaatggtatcacaatgggcaatcaactagttggtttaaatgtttactttccatcagttttaaggttttgtggacacaccctgtacttaagggatgttatcatggaacactgcaaaaacagaaatgcaaacatatgctaatgaactgcaaataccttcycagtccttgatttaggtctgatcagtggcctcagtttactctcctctcactctgttttgacaatcataggtcagaaaagtgagaatcctaaaatggaaaggaaatagaagacagcagaatgactgaatttgtggctggctgcaattatctgcccagatgtctgaatccattctgcatttaattgattctaccttatcacctttgcacagataaacattccttagcatcagaaagatattggcttcatggagacttcatatccagtgctgctacgggacatacccatgctgctttcttttcatcttagccaagaagtgaaacaaactgagaggactcaggagtagggagagaaggcagggaaacagaaagccttggtgtggacgaatacgtgtcttaagagtaaagtaaa

SEQ ID NO: 386983 - DNA, 535 bp, Homo sapiens
ttgatctggacctagtgtcaagcagaaattcttagaagagggctagttttttcagtagggacctctctgaaagcctcaaatggacataccgtgatgggagttcatgttaaattcatgtcattatttttctttgaaaaatatccctgattcttaccatcagatgacaataactgagtgactaaaatatgccagacaattacgtaaattaggcagctggggtgtggggtgagagacgcctgggtttaactcctgtttgacagctactagctggatgttttggggcaaattacttaaatactccaggcctcagtttcttcttcagtaaacagggaataatagtatctacctcaaaaattttttgtgagcattaaayaaggtaatgtatgcaaaatgctcagcgtgcccagtacataataataggtaatataaatcacatatatatgaagtatataattacatattattaatcaataaggtacacattataaaatgttggttttatcttctctctgcatcgataatatatattattggt

SEQ ID NO: 386984 - DNA, 535 bp, Homo sapiens
ttgatctggacctagtgtcaagcagaaattcttagaagagggctagttttttcagtagggacctctctgaaagcctcaaatggacataccgtgatgggagttcatgttaaattcatgtcattatttttctttgaaaaatatccctgattcttaccatcagatgacaataactgagtgactaaaatatgccagacaattacgtaaattaggcagctggggtgtggggtgagagacgcctgggtttaactcctgtttgacagctactagctggatgttttggggcaaattacttaaatactccaggcctcagtttcttcttcagtaaacagggaataatagtatctacctcaaaaattttttgtgagcattaaataaggtaatgtatgcaaaatgctcagcstgcccagtacataataataggtaatataaatcacatatatatgaagtatataattacatattattaatcaataaggtacacattataaaatgttggttttatcttctctctgcatcgataatatatattattggt

SEQ ID NO: 386985 - DNA, 538 bp, Homo sapiens
attctgggcatttacattgaacaatggtagttgggccagaggagagttgtggggggtggggggaatctagaaaataataatgtagcacacttagaaatgcagctgtgagacaggcggccttctgagctaaagagattgctttatgttagcagtcttttgtggggaaargaaggacccataatggtggtagcctagaagaaaacaagagctggctgagtgcctaaggggccagaggaagggatgtaaacccatgggaatgtccttgggtggcaaagtgaccccgagggataaatttgcaggaacatgtaggtgatttcacatttggactggataaaaatccaaatgcggaggtgagccatggaagctttgaaagatgttagtgactgtgactggatctggattttagacatacggacttataaaaaagtagcatggacaggggagtggggtgtgcagagtcagggaggccagtgtgaaggaatgacctctggaacgcagagcagggggagcaggagggagacagtggagaggcaaaggg

SEQ ID NO: 386986 - DNA, 538 bp, Homo sapiens
attctgggcatttacattgaacaatggtagttgggccagaggagagttgtggggggtggggggaatctagaaaataataatgtagcacacttagaaatgcagctgtgagacaggcggccttctgagctaaagagattgctttatgttagcagtcttttgtggggaaaggaaggacccataatggtggtagcctagaagaaaacaagagctggctgagtgcctaaggggccagaggaagggatgtaaacccatgggaatgtccttgggtggcaaagtgaccccgagggataaatttgcaggaacatgtaggtgatttcacatttggactggataaaaatccaaatgcggaggtgagccatggaagctttgaaagatgttagtgactgtgactggatctggattttagacatacrgacttataaaaaagtagcatggacaggggagtggggtgtgcagagtcagggaggccagtgtgaaggaatgacctctggaacgcagagcagggggagcaggagggagacagtggagaggcaaaggg

SEQ ID NO: 386987 - DNA, 542 bp, Homo sapiens
ttactgtactaattagcatgattgatttcatcccaygttatttatccttaagatatgaaattatgaaaaaaactttgagatacatgtgaaaaaatgttaaacagttcttgtttctactagtatactcattttaatcttctttatttataactacattatacaaatttatctaggatttttactttatattaatacttggattacagaactgagtcattattacttatcctaattttgtgcttggttaaattttgttacaatttataggtttagaaactttcactttaaaatgtgcaaggtattccagtaattctggggaaaatgggttccttatagtgaagattattacaaaaattataatgggtaaaattgtttattaattctggcaagacaccaaaaagaaattatagtagttgacagaaaactcagaaaaaataaactgtaagagaacataggaaattatcaaaactatgattatatggtgtcaaagaaagactcaataaaactttatttccttttcatacgaaaagatttgccccagt

SEQ ID NO: 386988 - DNA, 511 bp, Homo sapiens
tttaatgacgtatacttaaatacatacaatttttatttttcaattctamctcaataaagccaaaaaagttttaaaaataaattcttatattcaatttgtgactctttatttagtattttcagtgccttccttgacatttatggggttggattacaatgggttttcttttcaatttttttcccagtaattaaaatttaatacaatcttaagaatatttaatatttccaaatagttatgaaaaaagtaaataagaacaaaatctagagaactcactaaaatgaaaattaaaacatttataaaactctttgaattataaatccttacattttaaaacttcaactaagaatagcacagaagaaaataaatgccgaaatatatttttatattaaaaataatcgtcattacaaaaattataatagtttgcgtttagaatatatttgtatattttaaaatacagtatctaatgcaactgattgaataaggtatcttatttggaaatatttataaatca

SEQ ID NO: 386989 - DNA, 581 bp, Homo sapiens
aaatggtagcatcagttttctctacatcctgtgatttaagttcctgatatgtattctccaaatttcctatagttaaaatatattatattcatctttgaacaaatgaatgtctaaaatatgaacattgttagggttcatgcaataaaataaattcccacacatatcaatcaatctgtttgyaggtttgtgagagtctttttcttttcctttggaatcaagtaatgaatacaacaatttatttaaaattttgctttactaaatgcccacatttttctcacctatctattttctttttcttttttcttttctttttttttttttagttggagtctagctctgttatccaggctggagtgagtgcagtggcatgatctcggtccactgcaacctctgcctcctaggttcaagcaattctcatgcctcagcctaccaagtagctgggactacaggcacctgccatgacacccagctaatttttgtatttttagtaaagagagtgtttcaccattttggccaagctggtctcaaactcctgacctcagtgatccacccgcctcacagagtgctgggattacagggac

SEQ ID NO: 386990 - DNA, 490 bp, Homo sapiens
tttctctttttgactatatcataatatgaatagtagccagagattgaatattttatcttttttatactaataatgtaaggattttaaaaagtgtattgtggtaaaacttcataagaacaacattcttctgtctttaaagctataatttttaatgatagtttaatgtaaagtttattgtttcrgcattaaagttggaatgattttcaagcatacttttaattaagtatttaatttatttatatgtatcaatatattcactcttcatctctctcctaggacctttgctcaatcatgtcaagattgaagtatctaagtttaatatcttcttcctctgtatcttcttcttaaacatcattcacattctagactgcaagtataattaacataatattggtatctccaactgggtgttagttaatctctttgggccttgcttttctaactataaaattatagaataaattttgatgatttctatctatgttcaatt

SEQ ID NO: 386991 - DNA, 534 bp, Homo sapiens
ggattacaggtgtgagccactgcgcccggcctgcattgcttttataactcatttaatttccttagtatagaatttccaaacaggctccttataatctcccatgtattcacgtcttacataaatattcactgaatgaatttacctccattttatccaaatttgtttactgtttgctctcataaatccagtgcaggccactttctatcctttttttttctgaacattcattctatctagaatcccctttccttattcaaatcatgttgtcatcatagatgtattcagagagagccatactttctgaagttcatgaattacaaaatattattagagcaaccatgaatagaaatgcctagagtaggctcgttratagatttctgtgctcttccaagtgcactttgaacatctatagaggacgaaggctgtggcttcatggcaattgatatattagctctgacattgagaaatgaccattatgttggcatggattatcaggaataactgtaagaaatgaacttactctggaataaaatt

SEQ ID NO: 386992 - DNA, 624 bp, Homo sapiens
tgacagtggcctttcaactattatttttttgggtcctaaacacttcaaagtttcacacttctaaagaaaaaaaatttgattattttttagatagtaaggttaatattaatgtttgattattgtttacattgtttacacatttcttgtgcaggkatattatcactataatacatctgtgataataatgattcaaacaatttgaaacataagatgattgaaatttcaggcaaaatcaaaatagagaaaaacctagtaaggcctcttttgtgacttctttatttaaaaaatttaaaatatataaggaatataatcacttctcagttctttaaaacttagtataagattttcttaatgccaagacagttaatgaatttttggacagattgattaaagaaatggcattaccaaccaaaattgcccttttaatgataaattccttcagctttgaattatacgttatgttccataattctgatgatcttaaggagacattcattttaaacttaattatttgataagattagaaataaaatattaatatgcatctccaagatacttattttttattatctattaaaaatgttctctgttactatatacttacaggggaaaatattgaaagtg

SEQ ID NO: 386993 - DNA, 624 bp, Homo sapiens
tgacagtggcctttcaactattatttttttgggtcctaaacacttcaaagtttcacacttctaaagaaaaaaaatttgattattttttagatagtaaggttaatattaatgtttgattattgtttacattgtttacacatttcttgtgcagggatattatcactataatacatctgtgataataatgattcaaacaatttgaaacataagatgattgaaatttcaggcaaaatcaaaatagagaaaaacctagtaaggcctcttttgtgacttctttatttaaaaaatttaaaatatataaggaatataatcacttctcagttctttaaaacttagtataagattttcttaatgccaagacagttaatgaatttttggacagattgattaaagaaatggcattaccaaccaaaattgcccttttaatgataaattccttcagctttgaattatacgttatgttccataattctgatgatcttaaggagacattcattttaaacttaattatttgataagattagaaataaaatattaatatgcatctccaagatacttmttttttattatctattaaaaatgttctctgttactatatacttacaggggaaaatattgaaagtg

SEQ ID NO: 386994 - DNA, 581 bp, Homo sapiens
agaatttatacaatcttcgcccatatggagcttgtgctcatattgctgtgcttctgagagtttttattaagaaacaaagatattctaacacaattacaacacagcacaatatttaaaaacaaagagtttaaaaattttcaaattcactagttcattagtaacctattttaccaaaaatataagaaaataatgtttaaagataaataggcatctcaaggtattcacagatttaagtgggttaygactttttaaaagaaaacattttaaatacatataaaagagtaaaaaaagtaaaagaaagaacagtgtgattaagacaatgtttatagaagacaatataggtaagaaacacaggggaagaaagaagaattaagaacaaagtcttggagaaaaagtcctggcatcatcactcactgcaacctgactattagttactattttattcagtgtataattatatctacaagataagagtaggtaagagaatgacaaattctcctagaaaaaaaacattgaaacaaaatacattttaggaaaattatgagatctcaaaaacctagagaaattgaaaaaaaagtcct

SEQ ID NO: 386995 - DNA, 465 bp, Homo sapiens
tagaacactgagaaggattcagcatcaattctgcgatatttctgccaaaagtccataacctgaattaatcatgaagcagtactataaaaattgagagatggtctacaaaacaactggccagtcctcctaaaaattttcaagtaataaataacaaaagtcactcagcaaatttttcagattaaagaatgtcttagttcatttgtgttgctatgagagaataaccgaggctgggtaacgtataaaggaaagagttttatttagctcatggttttgctgtatgtataaaaagcatggtgttcccttccgttccacttctgtgagggcttttgtgctgtgtcaaaacatggcagagaagggtaaagggtaagyatgtgcaaaaaggagaaagcctgagggatgtcctgagtttataaccacccactatcataggaacaaatctagttttataggaactcactgacaaac

SEQ ID NO: 386996 - DNA, 614 bp, Homo sapiens
aagtctccccttaaagaaaagcctgggaggccttttattgcagtttgatagctttactgttaaattctaccaaacacttaggaagaactaataccaatcctactcaaattatcyggaaaaatagagaaggaaagaatactcccaaactcattctacgaggccagtattacactgatactaaaaccagatgaagagacatcaaaaaaggaaaattacaggccaatacctccaatgaatatgaatgcaaaacttctcagcaaaatactagcaaaccaaattcaacaatacattagaaagatgactctttatgaccaagtaggatttatccctgggatgcaaggatggttaaacatatgcgaataaatcagtgttacatcatatgaacagactgaaagataaaaattatgtgatcgtttcaattgatcctacaaaagcatttgatataattcaacatcccttcatgacaaaaatcctcaaaaacttaggagagaaggaacatacctcaacgtaataaaagccatatacaaaagacccactgctagtatcatagtgaatgggaaaaaaactgaaagcatttcctctaaaatctggaacatgataaggatgtctgctgt

SEQ ID NO: 386997 - DNA, 614 bp, Homo sapiens
aagtctccccttaaagaaaagcctgggaggccttttattgcagtttgatagctttactgttaaattctaccaaacacttaggaagaactaataccaatcctactcaaattatccggaaaaatagagaaggaaagaatactcccaaactcattctacgaggccagtattacactgatactaaaaccaratgaagagacatcaaaaaaggaaaattacaggccaatacctccaatgaatatgaatgcaaaacttctcagcaaaatactagcaaaccaaattcaacaatacattagaaagatgactctttatgaccaagtaggatttatccctgggatgcaaggatggttaaacatatgcgaataaatcagtgttacatcatatgaacagactgaaagataaaaattatgtgatcgtttcaattgatcctacaaaagcatttgatataattcaacatcccttcatgacaaaaatcctcaaaaacttaggagagaaggaacatacctcaacgtaataaaagccatatacaaaagacccactgctagtatcatagtgaatgggaaaaaaactgaaagcatttcctctaaaatctggaacatgataaggatgtctgctgt

SEQ ID NO: 386998 - DNA, 596 bp, Homo sapiens
taggctgcagaatggctgctatttagtaggcctgaaagccatattaatctttctttacagccccatcagagctcttggatgaccaagtgctttgtcaatgagtagtaatattttgaaaggcatctctttgtctgggcgataggtctcaacaatgggtttaaaatattcagtaaacaatgtggttaaaatggatgtgttgtcatccaggctttgttgtttcatttctacagcacaggaagagtagatttggcaaaattcttagtgccccaggatttacagtgtagtaaatgagcattggcttcatcttaaagtcactagctacattagctcctaacaagagtgtcagcctgtcctttaaagccttgaagccaagcattgacctctgtccagctttgaaagtcctagatggtatcttgtttcaatagaaagctgttttatctacattraaaatctgttgtttagtgtggccaccttcatcaatgatcttagctagattttctgaataacttgctacagcttctggaaaagcacgtggtgcttcaccttgtacttgtacattatgaagatggcttattcccttaagcttcagaaaagaa

SEQ ID NO: 386999 - DNA, 626 bp, Homo sapiens
aaagcgaggtgagataatacaacttatgcctgtattttatgcacattttgaacatgtcttgaccagattcttctctttggtggagaggagggagttgttgagaggggaagggtgtttgcagggagaggagtcatggcattttgaggatacagtccaggtgtcagtgatacacattgctagaggattggtctatttggaaacatagatagaaaatatgtctattttatgcaagtatatgagtcatatacttattcttgtacacttagaaaygtaggtttttatttgtccttaataatattatacctgcagctgatttattctacccaaacatgccagcttgctgtaacatcaccacagttatttccattatttcacagtaaagtcaaagcagtctcagaataatgtgatagatacactatcactgagaagctcaaatagttacaatattttttgtcatttttcccccttaagacatatcctactgtgggggtaatattcaaaatactgtatttttaaactcttacaaaaattcctcagttaagtgttatgccaacattcagtatactaatttgtttcattttcttgtctttacagaataagattttaacgacttcttttcatatata

SEQ ID NO: 387000 - DNA, 423 bp, Homo sapiens
tgtctgtctattgtacttgcccatggcagagattgtcatggttgaaaagaaggcggagtcagaagagagatgttaaaaaatgtttaagagatactgttgacggaacactttggtcttctacaattaccaatatcttctgttagatctgagtcttctaattagaacgacttggtagtagttccagtcgtagattctatcaagtggttctaatcacttcagatcttaatgatttttttttatctgctcatattaaaacatagtaaaatagaggcttcctctttaagaacgcacattccttggtttaggaatggccagcatccctattccttcccaacwctgaggggctgcttccagttcttagatctgaattcatactgcaacttttgttttttgcatcaattataagttttaaacctagactca

SEQ ID NO: 387001 - DNA, 600 bp, Homo sapiens
accaagccgtccagcctccctggctccagcaggggaaaagtgcagcctggagctatggaaatgggtgccacccttcccctgcccaagaaacttagtgtgttaggcagttgcaagtcctagtgatggctgctgcccctcccccaaggaactcaaaagcttagacaacaggcagccacagccagtactagttgtccatccctcccctgggagtttggtaggcttaagcagattccaactgagaggctgtaagaatttgcatgccttggggttggacgctaggccccagtggtgtgagttcacgagtggaatcttccaatctgtgsgttgcacagttccatgaaaaaaagcacagtttccctggctggatagcatgcttgctaaccacctcccttggctgaggggaaaggggttctccttccccctgtggttctcaggtgggccacgacaccacactgctcttccttctatctgtgggtcacgccggtcttctagtcatttttgatgagagaacctggataccttggttgccagtaaaggcttcacacacttacgtttttttctgatgggagcctgcaatcgctgctgcttctactcctacac

SEQ ID NO: 387002 - DNA, 587 bp, Homo sapiens
aaaggcttcacacacttacgtttttttctgatgggagcctgcaatcgctgctgcttctactcctacactaaaaattattcctactatatgtagtgacttcatttatttctagtggctttcattaaatattgtgaatgttttaaaatgttaataccatttaactttaattggttactttgttttatgatatatgaaacgtgcaataaaaaactaaggaaattatctgaatctactaatccatatatttcaggtaaaagcaaaatattgagctggcttaatattatatgtatgcatcatttgaattcctttaaatctcagcaatttcggacttttttttttgcttaattcctatgatttttttcatttcatctggttgtaatcttagctcttttaaatgctaaagtagaaagaatcaaaacaatagagcatatgaaattatgacacagatttctataagtgttctgttcaagactcgcaactagtaggcacgctccaatgtagattatcgtrtttgctatagatgacatttagttgttttccattattaaaggatgtttcctcttggaaaattatgtttcatgaatgtg

SEQ ID NO: 387003 - DNA, 579 bp, Homo sapiens
ctatgcagccataaaaaggaatgagatcatgtcctttggagggatatggatggaggtggaagccrttatcctcagcaaattaacgcaagaacagaaaaccaaacagcacgtgctctcacttataagtgggaactgagcaatgagaacacatggtcacaggggagggggaacaacacacactggagtttgttggggttgggtgacagggggaaggagagcatcaggatatatagccaatgcatgctgggcttaatactttggttttgggttgataggtgcagcaaaccaccatggcacacgtttacctaggtaacaaacctgcacatgtatcccagaacttaatatatatatgtgtgtatatgtgtgtgaatatatatatatggtatatccatgttgaaatattctatcactcatttatatatttgaattggattgtcttctacatttatcagatttttggtattcattgtaataggtagtatttttagtcttttattataaagacatacatattttcgcaactatgggcatatttactgaatgtcctttttttaaatcacaaagccacgggttcatgcc

SEQ ID NO: 387004 - DNA, 579 bp, Homo sapiens
ctatgcagccataaaaaggaatgagatcatgtcctttggagggatatggatggaggtggaagccgttatcctcagcaaattaacgcaagaacagaaaaccaaacagcacgtgctctcacttataagtgggaactgagcaatgagaacacatggtcacaggggagggggaacaacacacactggagtttgttggggttgggtgacagggggaaggagagcatcaggatatatagccaatgcatgctgggcttaatacyttggttttgggttgataggtgcagcaaaccaccatggcacacgtttacctaggtaacaaacctgcacatgtatcccagaacttaatatatatatgtgtgtatatgtgtgtgaatatatatatatggtatatccatgttgaaatattctatcactcatttatatatttgaattggattgtcttctacatttatcagatttttggtattcattgtaataggtagtatttttagtcttttattataaagacatacatattttcgcaactatgggcatatttactgaatgtcctttttttaaatcacaaagccacgggttcatgcc

SEQ ID NO: 387005 - DNA, 518 bp, Homo sapiens
tggcttatatttgtgcaaacaaatttatctccttgatgttgttattgaatgtcttaacaggaaatcaattacaaaatattaagacacaaatcttatgagctttctctaaaaacattgtccttttgtgaggatctttatttagaaaatggcttcaacattcttcctgttctaaagggcagtaaactggtatcatgatccactcttycaaattcagtaaatcaccaggtcttattgtctttgctttgtttcctaggacaggtatccctaaatgaaagaactggatgcaaatttattttatctgggaaaatatcccaggaagtgatgatgaagggaggaagggaggaagccagagaagggagaaaagccaaaaaatagatgtattatcagggaggttactgctgcaagcaagtggcactgaattcctctgaggaacttctgaaaaactacataatatacatctccaaattgttacttctctgtgaaggaggaaaactctgggtatttatccaccagcctcc

SEQ ID NO: 387006 - DNA, 518 bp, Homo sapiens
tggcttatatttgtgcaaacaaatttatctccttgatgttgttattgaatgtcttaacaggaaatcaattacaaaatattaagacacaaatcttatgagctttctctaaaaacattgtccttttgtgaggatctttatttagaaaatggcttcaacattcttcctgttctaaagggcagtaaactggtatcatgatccactcttccaaattcagtaaatcaccaggtcttattgtctttgctttgtttcctaggacaggtatccctaaatgaargaactggatgcaaatttattttatctgggaaaatatcccaggaagtgatgatgaagggaggaagggaggaagccagagaagggagaaaagccaaaaaatagatgtattatcagggaggttactgctgcaagcaagtggcactgaattcctctgaggaacttctgaaaaactacataatatacatctccaaattgttacttctctgtgaaggaggaaaactctgggtatttatccaccagcctcc

SEQ ID NO: 387007 - DNA, 588 bp, Homo sapiens
ggtgagtctttaaaagggactcaagtcaggagacaaattccaagtaaaagagatactcctcctaycctccaacaaacaaaaagtatgttgtgacctgcctctggaggaggccatgtggcaagaagctaagggcgccctctaggtgctgagagcagtccctggcccacacccagcaagaaaatgttacttcttttctacagaggcgcaaaactgaattctgataaccattgagtttgggagaggactctgaacctcagatgagatgacagctgtcactgacatcttgatatcagcctagtgagaacctgagcaggggactcagttaacatgtacccagattccagatccacagaattgttgagataataaatctatgttgttttaatttgtactaatttgttatatagcaatagaaaattaatacaggatgtaaagagaaggaatatagggatttagagaaatattagggagactggtaaaacaaaaaaaaatgccagaaaaaaaaaacagaaaaaagttgaagcataaggtatctgtattcatttttctaccatttgtgctttgtttctaagccataagtcctatgtt

SEQ ID NO: 387008 - DNA, 575 bp, Homo sapiens
cttcggtatttgaaatacagcatctcaagatattttctccrtatttttggtgttcctaattgtctgatagacactaaaatggtgcgtagacagcctagggactaggcactgctggttgttccttagatagcaccctaattgccctttgtcaggagttcttccccaaacttagtgttcttcttctttactgtacaatcagacatcgtaattacacaattacttgtgggagtgttgtattgattgtgattattgattctgctatttactactaataaatgaacttggctaacttatatgtctctctgaactttagtgtacatctgacaattgggaactataattgtgcatacctcacaggattgttatgagagttaaatgaagttgttttatataacttacttagcgcagtgcctggcatacagacagatttcaataaagtttagctattataatcatcatcttcctcctcttcatcacgtcagtatcccacacagttctctccctcctaatcaaatcaaatagtttcttactcctttcttcaactaatgttttcagctcctgagtggaaagaaaat

SEQ ID NO: 387009 - DNA, 588 bp, Homo sapiens
ggtgagtctttaaaagggactcaagtcaggagacaaattccaagtaaaagagatactcctcctatcctccaacaaacaaaaagtatgttgtgacctgcctctggaggaggccatgtggcaagaagctaagggcgycctctaggtgctgagagcagtccctggcccacacccagcaagaaaatgttacttcttttctacagaggcgcaaaactgaattctgataaccattgagtttgggagaggactctgaacctcagatgagatgacagctgtcactgacatcttgatatcagcctagtgagaacctgagcaggggactcagttaacatgtacccagattccagatccacagaattgttgagataataaatctatgttgttttaatttgtactaatttgttatatagcaatagaaaattaatacaggatgtaaagagaaggaatatagggatttagagaaatattagggagactggtaaaacaaaaaaaaatgccagaaaaaaaaaacagaaaaaagttgaagcataaggtatctgtattcatttttctaccatttgtgctttgtttctaagccataagtcctatgtt

SEQ ID NO: 387010 - DNA, 575 bp, Homo sapiens
cttcggtatttgaaatacagcatctcaagatattttctccgtatttttggtgttcctaattgtctgatagacactaaaatggtgcgtagacagcctagggactaggcactgctggttgttccttagatagcaccctaattgccctttgtcaggagttcttccccaaacttagtgttcttcttctttactgtacartcagacatcgtaattacacaattacttgtgggagtgttgtattgattgtgattattgattctgctatttactactaataaatgaacttggctaacttatatgtctctctgaactttagtgtacatctgacaattgggaactataattgtgcatacctcacaggattgttatgagagttaaatgaagttgttttatataacttacttagcgcagtgcctggcatacagacagatttcaataaagtttagctattataatcatcatcttcctcctcttcatcacgtcagtatcccacacagttctctccctcctaatcaaatcaaatagtttcttactcctttcttcaactaatgttttcagctcctgagtggaaagaaaat

SEQ ID NO: 387011 - DNA, 588 bp, Homo sapiens
ggtgagtctttaaaagggactcaagtcaggagacaaattccaagtaaaagagatactcctcctatcctccaacaaacaaaaagtatgttgtgacctgcctctggaggaggccatgtggcaagaagctaagggcgccctctaggtgctgagagcagtccctggcccacacccagcaagaaaatgttacttcttttctacagaggsgcaaaactgaattctgataaccattgagtttgggagaggactctgaacctcagatgagatgacagctgtcactgacatcttgatatcagcctagtgagaacctgagcaggggactcagttaacatgtacccagattccagatccacagaattgttgagataataaatctatgttgttttaatttgtactaatttgttatatagcaatagaaaattaatacaggatgtaaagagaaggaatatagggatttagagaaatattagggagactggtaaaacaaaaaaaaatgccagaaaaaaaaaacagaaaaaagttgaagcataaggtatctgtattcatttttctaccatttgtgctttgtttctaagccataagtcctatgtt

SEQ ID NO: 387012 - DNA, 512 bp, Homo sapiens
ttagtctgaggaaaggaacagtaatttaaaaaaatttaaataatattatattcagttttaaactcaattttgsattacatattttcccccaatttatgccaatgcaatgcatgaattcattaaaattgacaattttagaagcttgttactgggctttcttactatttctctgtacagtctctctattcataatgtatccatgtcaattgctttaaatatcatctacatactggaaattccaaaaattactgatcagtccagtgatgctccttccctgtgttgcaaatccaacagcctactcagcatctacacaccaaggtcctgtaagttcttgaaagtaacatttccaaaccaaactactgattgttatattagttttctaaggctgccatcacaaaatactacagattgtgtaacaaaaatatatttgtatatatataacaaaaatatattttcccccagttctggagactgcaagtctatgttcaaggtgctggtgtggttggttttct

SEQ ID NO: 387013 - DNA, 637 bp, Homo sapiens
acaggaattataaaaataaatgaactgaactacatctaaagtggttaattaacaatattaaacaaaaaaaagcaaggtaaaagaaatttattaaaatgacattagaaattaaaaagaaaatagtaagcattagaaataatacatataaaggaaaataatgtttaaatataaagaaaattttaattcattaaaatgtaaaagttcaaacatggattataaatgaagaaacagttaattatagatatggtataactttttgagttaaggaagcaatattactataaattacaatatttcagaatctcagaaattttgcaaatataaaatgctcaattatatacttgaattaggcgagatagttttacctgagatttatttcacatgttatattcactaatccagaatacaataaagcagggacgtcaacccccgagttaggaatcaggctgcacagcagaaggtcagctggcgggtgagggagcattaccacctaagctccacctcctgtcagatcagtgatggacttagattcttataggagcgtgaaccctattttgaactccagaagtgagggatattggttgtgcactccttatgagaatctgaggtggaacastttcatcccaaaattattcct

SEQ ID NO: 387014 - DNA, 394 bp, Homo sapiens
aattaaacttctttcctttataaattacagtctggcatatgtctttattagcagcgtgagaacagactaatacagggcattttgtgtatcaggttataagttattccgtcagtcaaaagtaagatccacaattattttattagagactggttttctctaccttgtgtagtgtgtctgggtattgtgaaacaacattctaaatattctcagaaacctttcacctggctgaractgtctactcagcaccaccttaaatggttttgaggtcttgataaagcttttcatagtaatacccagcttttggcctttattaaaaaaacctctttactatgaaaatttcttgcagtctgaagcgtctagaaataagaccaattttattttccaaactagcaaa

SEQ ID NO: 387015 - DNA, 547 bp, Homo sapiens
aaaaattaaatgtggtctgactaataaactgataaatactttgaaaaatttttgttaaatagacaaaaaactttatagaaatccagccatctcagacttataaacaagcaaataaataaataaataaataagatgccagcaagaattactggagttgagccaaatgttccatgctagctttgacctcacaaagaagaattttaacatgagacaagatcagatgttaagttcagacattaaaattgttaaaagattaacagggttctaactgagctcagaaattctattactttaagtttacctttaattgtagttacttctaattttctcatgttataaagygctattatgttccatgggagcgattgataacatgatctgtctttattaactttataattaaagaaagacactgcaccactggctctgctctacctaaacaaaccaacccattaatttaattgagattatgaactgtgcactcagatgacttggttctatttctttgcaagcagaggttgcatattttacctggaatcaagccaca

SEQ ID NO: 387016 - DNA, 599 bp, Homo sapiens
agcctaatacaaccaccttagtcttccaagtcccaaacattgtatgtccyggggtcagtgacaggacctacttttaagtacattgacatgggaatgaccattcatctctcttggggaaataactaaaagatattttattactggtattcctaggtgaaatgtggaataaaatatatcttatataaatatctaaatacatttagaaattatctttttaaaaaggaaatacataaaacagcatctcttcaagagaaaccaggctggacacagtggctcatgcctgtaatcccaacactttgggaggcagaaagggcagatcacctgaggtcaggagtttgagaccagcctggccaacatggtgaaaccacatctctactaaaaataaaaaaattagccaggcagagtggcagatgactgtattcccagctactcaggaggttgagacaagagaattgactgaaccctggaggccaaggttgcaatgagccaagatcacgccattgcactccagcctgggtgacaagtgtgaaactccatttccaaaaaaaaaaaaaaaaaaaaaaaagagaaaggagagaaaccaatgattttctaataat

SEQ ID NO: 387017 - DNA, 599 bp, Homo sapiens
agcctaatacaaccaccttagtcttccaagtcccaaacattgtatgtcccggggtcagtgacaggacctacttttaagtacattgacatgggaatgaccattcatctctcttggggaaataactaaaagatattttattactggtattcctaggtgaaatgtggaataaaatatatcttatataaatatctaaatacatttagaaattatctttttaaaaaggaaatacataaaacagcatctcttcaagagaaaccaggctggacacagtggctcatgcctgtaatcccaacactttgggaggcagaaagggcagatcacctgaggtcaggagtttgagaccagcctggccaacatggtgaaaccacatctctactaaaaataaaaaaattagccaggcagagtggcagatgactgtattcccagctactcaggaggttgagacaagagaattgactgaaccctggaggccaaggttgcaatgagccaagatcacgccattgcactccagcctgggtgacaagtgtgaaactccatttccaaaaaaaaaaaamaaaaaaaaaaagagaaaggagagaaaccaatgattttctaataat

SEQ ID NO: 387018 - DNA, 564 bp, Homo sapiens
aatatgaataaatttttaaagttgaacttttagcacacatagtaatatatttttkaacattaccaagaattatatatataatacacatataaacattttgtgtgtaaacttttatattaattatagtttgcatgtatcctttagcacttgcttaatttgctaaatattattttgtttaattaatgatttgttaattaatgattaaagattaccctttaatcatttcaactcaaagtattccatatattggataatccagatactgaatgtgtcttcttgtgcaaatgaataataaaagtttctctcgttgatcctttaaactcactgtgtaccttcttcaatttagatgtcatcttgggcagaacccacaattttcttataaatttcatttagatctcttggagagtgaaaattcactttcaaaagttaaaactacagccactagaagttaaaactttgatctcacataaaatcctatcattctctactaactggtcttaggaatcaacaatggggttgggatttattacagtcaacggcccttcctcagtgtcctccttcttc

SEQ ID NO: 387019 - DNA, 489 bp, Homo sapiens
actcagaaataggaaatgaaaacatgtttgtaaaattgagtgggatatacaatttaaccaaatcatacttcctaacctacctcattaagatattgtttattacgtattccgctatttaatagtgttgtgcctgctagggcatgtttctgcacacttgcccagaaaacgtaaagaagctgtrtatggtgtactgaacctattcctgtaccctccctcggtcttcaaggttgataacctattttccaggttaacagtgctaggtctgctagacttactgatacacggtagtcacatgattataaatgtgaacccttatgttcctgaagtattctccaacgtgctcttgtttttaggggttatatctctgattttagcggttattttctagatagtagtcctttgtcagttatgctatgtgtaaatattttctgctcaaactatagctaccttttcatcctccttaaatgttcttttatagtaattttattg

SEQ ID NO: 387020 - DNA, 489 bp, Homo sapiens
actcagaaataggaaatgaaaacatgtttgtaaaattgagtgggatatacaatttaaccaaatcatacttcctaacctacctcattaagatattgtttattacgtattccgctatttaatagtgttgtgcctgctagggcatgtttctgcacacttgcccagaaaacgtaaagaagctgtgtatggtgtactgaacctattcctgtaccctccctcggtcttcaaggttgataacctattttccaggttaacagtgctaggtctgctagacttactgatacacggtagtcacatgattataaatgtgaacccttatgttcctgaagtattctccaacgtgctcttgtttttaggggttatatctctgattttagcggttattttctagatagtagtcctttgtcagttatgctatgtgtaaayattttctgctcaaactatagctaccttttcatcctccttaaatgttcttttatagtaattttattg

SEQ ID NO: 387021 - DNA, 503 bp, Homo sapiens
tggtatgtttctccattcatatatatcttctttgatttcctttatcagtactttgagtttccttcatttattgagaaattttaatcacactgtatttttaattttggcatgcacaaattcattattagatataaaaatacagttgatatttgtatgcttatgtggtatcctatgagcttgctaactcagactctagcagtcaatttttcttttttttgggggggtgaaggatgattatttgctattctctatgtataagatcatgttatctgcaaayagagaaagtttaattccttcctttcctagtaaaatgtcgtttatttctattttttttttttttttgccttattccactggctagaacttccaacattattttgaataagtgataaggggtgacatccttgacttgctccccagcataaggaaaaagtgtttagtatcaccattaagaatgatgttggctgcagatttttaatattttgggtcaaggtaaggaactt

SEQ ID NO: 387022 - DNA, 503 bp, Homo sapiens
tggtatgtttctccattcatatatatcttctttgatttcctttatcagtactttgagtttccttcatttattgagaaattttaatcacactgtatttttaattttggcatgcacaaattcattattagatataaaaatacagttgatatttgtatgcttatgtggtatcctatgagcttgctaactcagactctagcagtcaatttttcttttttttgggggggtgaaggatgattatttgctattctctatgtataagatcatgttatctgcaaatagagaaagtttaattccttcctttcctagtaaaatgtcgtttatttctattttttttttttttttgccttattccactggctagaacttccaacattattttgaataagtgataaggggtgrcatccttgacttgctccccagcataaggaaaaagtgtttagtatcaccattaagaatgatgttggctgcagatttttaatattttgggtcaaggtaaggaactt

SEQ ID NO: 387023 - DNA, 461 bp, Homo sapiens
tcaggaaacacttgctcactgcactgacaagatgttctatcttttctctggacactgtctgctgaccttcattactgggctggccctgacgctattcactgggwaaccatcctgggaactgaagcagttcctggtgggccatgaatgttctggttaaaagccagaagaatggatgggtctttgttggtggtgacaagcaaagaccccgtggccttgtttatgtaatgaatgcttgtgttgctgagaaagggtgtaaatctgattttgtgaaagtctgatatatccaagctctttgtatgtagtatttaaaagagttctgagtacttatgatgcaaaagaattctatgataatttttagtagcacattaatcaacttctgttggaactttttagcaaaaaaaaaaaaaacctagatttcttttttgcttgatctgtatttgatttttataccaatgatcata

SEQ ID NO: 387024 - DNA, 502 bp, Homo sapiens
tgttatacattggggttggcttacaatcatctgcaggttaattttattattttgattcatacttgggaaattcatattaatgaagattacctcaaaagagctgagtttcattttcctcaagaattcagataaagttaatgtaaatttttttttgaaatggcattttagaagaccaggtagccataattacataccttcttatccttataatcagtaggtaaaaggttactgttataagagaaaagtaactactaaatattgaaataaaagagtaacttgcaatacatgattctggtagctacttgaataggattaggacacatctgtgcactcaaagaaaatgaaatattttaaagtgaattaaattacctttcagtaattcaagtagaaaaaaatctaacatgcaaggcaaaatctgcagaaatgtaagcataatacttttgcatagcarattcttaaagctctttatgtgatattagcaaaaaggcagatacgctattca

SEQ ID NO: 387025 - DNA, 627 bp, Homo sapiens
acctcacagttgttagaatgaatattttttaaaggacaaatatatcaagtgtcagtgagtatttagagaaaagttaacatgtgtgcaccaatggtggggatgtgaattagtacaacctttatgaaaaatagtatgaaggttcttcaaaaaattaaaaatagaactatcatatgatttagaaatcctatttctaagtacatatgtaaaggacatgaattagtatctcagagtgacatctacacttccatgttcattgcagcattattcacagcagccaagatatggaagtaatctttgtccattgatgcaatgatacgtgaataaagaaaacattatatatgtgtactataaaataccccataataatacactcactataatattattcagccttaaaaaagaaaacaaaatgttgtttgcaatgacatggataattctggagaatattatgctaagtaaactaagccaggtatagaaaaactaatacygcatgatttcacttatgtgtggaatctaaaatggttgaattggtagaagcagaatagaaaggagattgccaggagctgtggggtcgggtaagcaggagatgttagttatgtagtgtgaataagtgaataacttatggaa

SEQ ID NO: 387026 - DNA, 589 bp, Homo sapiens
tttggcatgaccgatagccattgactgtgtataatttagaatctaggctgaataaaccaagtcactctacactcttaattatagaactgttgagtaaaaattttacatgtagatgactgttggattcattgtctggcgaaggtcattccgaatgtaattaggtacattctttccttctgagtggtctaattgctcagtaagagattaaaaaattctcttatgtctatattgtratctctttttgtacttatgtacattttatggaaaagatctgaacatgctgttttctgtatgggattagggaagctggttttaaccatgctcaaaataaattcaagatatcattaaatggtggatggggaatattattgacctagcataaggctacttctgtgtctaacacgttttttgaaaaaatattacttctcttacagatatctcctgtgatggaagcagaagaattaactaatgatatattagcgataaaaaatattattcctacaaaaggtgatatttgggccacatttgaagtcattgaaaatgaagagctaggtaagtgatttttatgctagggattcttaaattactt

SEQ ID NO: 387027 - DNA, 623 bp, Homo sapiens
gcgatttgatttggcacaatattctgagtggtatgaattactgttatttaacaagaacaaggaatgttgatttaaaatattgtttattatataaaataattttaagagcagcagaagcttcattttttatttttcttttttctatctttagtgaatcacatattttgttgtctttcatctccaagatgcctagggatgaagggagcatttaaagcaccttgactaccccaacagtcaagtgctgaatgagcttaacattttaataacaccatgtggtttcaaagacctccagaaaaaaaaataatacacagaatgtctttgtaccttcaccatctgtctagctgctacctactaaggtcttgggacactttggagtatagctgccaaactgccaaaaggaaaatcttgccacccgcaagcttaggataaaarttaaaattcaatgtttaaaataccccatagtgtgttattaggagtgttgcaataagtgataaaatgaaacgggattgtcagtactttgtctttatgtttttattcctgtattatgattgtgcacaattctttaaaatttaaaatgtttcaatgttatttttaaatatacattgccaagatctaatgactat

SEQ ID NO: 387028 - DNA, 630 bp, Homo sapiens
tgatgttgttttgatgttgttgtggtagcttgcttgaatttattacattcttcaaaataaataaaaagaaatattcttagtcaatgatgagatacttgatgaatcaatgataatgattaatataattatgttaaaatgaagataaaaagtgtcaccttaggaataaaataaattatctctataccacagtaagtatttcatagcttagaattacgtccttcagttatatttttaaatacgtaaaattattaagtatggaatcatacaagataaaattttaaagtgactaaaatatctactccaagcatctattccacaatatctctaagtttctgttatatagcttttgctastatagctacaaaaccagaaaatttattttctcatgggacagatcctttcatcattgagaagctctacctattaaatacttacattttatatactctttgtaatgatctaaaaactgtcttcatataagtttcaccctttggttcttatgtaatttaatatcaatatacagccagtttacatcttctttcatgtgataacccattggattataaaggtagttttcatgttcttattcttcccctcttcttttctctgggctaagtgtcttccctaatt

SEQ ID NO: 387029 - DNA, 565 bp, Homo sapiens
agtcaatgaaacagattatccaatatgactgcattcggaagctagatcctttttgtgctttttgtgtcttctccttcggccaccatttagcaggagacatcctgggttctgcagagtctaaccataggagtcaagtgaataacattaggcctttggatggcctggcataccttagacaaccactaataccttagattggcccatcttggccyacacagctttatcgtgagggcaagaggtctcatctgcccaacctcccatttgcttccacagctttgttgtgaagagtgaagatatgcatttatgccaaatattttttctaaggtatatccaattttagataaaagtactacttgtctcaaaagactataaaggatcagggaataatggaggtcagagaagcagttaaaaagcctcatgtgtttcataaatatccaaagagaaattccttggaatatattttcctcagtgtaaaatagcacctatatttctggagttacttcagaatctcaaaagaccctgacaatatgtcttggccttatatattggctaaaatgtaacttcc

SEQ ID NO: 387030 - DNA, 605 bp, Homo sapiens
ccattaaaacgatctcctgtgcaagtccatgtctagggtctttggcttgaaattattccaagcttttccaaatactcttgacttagcaagtcactgtgataaaggaggatcagcaggactggaagaggtgtcataaagaaaggcatgaagaccaggtgtcagataaggatggaagagctctgaggacaaactttgttccctaaaatatattaactcagcagaagaagtttggttagggctgccaagagatgaargcccagataaaaaagaaaacagtgaattgtggaaaaggaaataaacttttttagtttagggaaagtttctgaaggagaccaccattagaagaagttgtagactcatagctagagggatttgtatgagaaagcacataggaataaatggacatgtgtactctatgattgcccctgaataagtgaagaataatgtgtttagtttaaaatggtcatttttagcatttgcaagttgaatcatatttttctcacaaaatagatttttgttctgtctatttactttgttattccttccaatgacacataaagaggtaaccaagagacttgggcaagagagtgggatgagcaaaacaa

SEQ ID NO: 387031 - DNA, 605 bp, Homo sapiens
ccattaaaacgatctcctgtgcaagtccatgtctagggtctttggcttgaaattattccaagcttttccaaatactcttgacttagcaagtcactgtgataaaggaggatcagcaggactggaagaggtgtcataaagaaaggcatgaagaccaggtgtcagataaggatggaagagctctgaggacaaactttgttccctaaaatatattaactcagcagaagaagtttggttagggctgccaagagatgaaggcccagawaaaaaagaaaacagtgaattgtggaaaaggaaataaacttttttagtttagggaaagtttctgaaggagaccaccattagaagaagttgtagactcatagctagagggatttgtatgagaaagcacataggaataaatggacatgtgtactctatgattgcccctgaataagtgaagaataatgtgtttagtttaaaatggtcatttttagcatttgcaagttgaatcatatttttctcacaaaatagatttttgttctgtctatttactttgttattccttccaatgacacataaagaggtaaccaagagacttgggcaagagagtgggatgagcaaaacaa

SEQ ID NO: 387032 - DNA, 523 bp, Homo sapiens
agataccatctcacactaatgagaatggctattactaaaaagtcaaataataacagatgctgacgagtttktggagaaaagtgaaactttatacactgttaggggagtgtaaattagttcaaccattgcagaaagtagtatggcaattctacaaagagctaaaagtagaactaccatcaacaatcccattattgggtgtatactcagagaaatataaatcattcaaccataaagacacatgcatgtgaatgttcattgcatcactattcaaaatagcaaagatatggagtcaacctaaatgcctattaatgacagattggataaagaaaatgaggtacatatacaccatgtaatactatgctgccataaaaagaatgagatcatgtcttttgtgggaacatggatgaagttggaggctattattctcagcaaactaacacaggaatgggaaaccaaagaccgcatgttctcacttataagtaggatgaaatcataagaacttaatgaacacaaagaagcaaac

SEQ ID NO: 387033 - DNA, 523 bp, Homo sapiens
agataccatctcacactaatgagaatggctattactaaaaagtcaaataataacagatgctgacgagtttgtggagaaaagtgaaactttatacactgttakgggagtgtaaattagttcaaccattgcagaaagtagtatggcaattctacaaagagctaaaagtagaactaccatcaacaatcccattattgggtgtatactcagagaaatataaatcattcaaccataaagacacatgcatgtgaatgttcattgcatcactattcaaaatagcaaagatatggagtcaacctaaatgcctattaatgacagattggataaagaaaatgaggtacatatacaccatgtaatactatgctgccataaaaagaatgagatcatgtcttttgtgggaacatggatgaagttggaggctattattctcagcaaactaacacaggaatgggaaaccaaagaccgcatgttctcacttataagtaggatgaaatcataagaacttaatgaacacaaagaagcaaac

SEQ ID NO: 387034 - DNA, 523 bp, Homo sapiens
agataccatctcacactaatgagaatggctattactaaaaagtcaaataataacagatgctgacgagtttgtggagaaaagtgaaactttatacactgttaggggagtgtaaattagttcaaccattgcagaaagtagtatggcaattctacaaagagctaaaagtagaactaccatcaacaatcccaytattgggtgtatactcagagaaatataaatcattcaaccataaagacacatgcatgtgaatgttcattgcatcactattcaaaatagcaaagatatggagtcaacctaaatgcctattaatgacagattggataaagaaaatgaggtacatatacaccatgtaatactatgctgccataaaaagaatgagatcatgtcttttgtgggaacatggatgaagttggaggctattattctcagcaaactaacacaggaatgggaaaccaaagaccgcatgttctcacttataagtaggatgaaatcataagaacttaatgaacacaaagaagcaaac

SEQ ID NO: 387035 - DNA, 608 bp, Homo sapiens
acttactcacttattcatccaatcaataaatccaataaacaaatgcgtttttttcttcttttttttttttttcaaacagggtttcactctgtcacgcaggctggagtgcartggcacgatcttggctcattgcaacctctgcctcccaggttcaagcaattctcctgcctcagcctaccaagtaactgggattacaggtgcccactaccatgcctgactaatttttgtatttttagtagagacaaggtttctccatgttggccaggctggtctcaaactcctgacctcaggtgatctgcccacattggcctcccaaagtgctgggattacaggtgtgagccaccccacctgcactctctttaaatgtttttatgtactaccatgtgcagacacctatttcttcctggctttacagtctaatcatacccatggttaagtagctttaccatgctaacaaagacatccctagttttcccccaaataaaataattgtaagtttgatcagctaattttcactaatatgaaaaaactgaagaaaaactcagagaactgcatttttcttcccatacttcacttatgtagtttaactagggtcttctgaaaattgc

SEQ ID NO: 387036 - DNA, 608 bp, Homo sapiens
acttactcacttattcatccaatcaataaatccaataaacaaatgcgtttttttcttcttttttttttttttcaaacagggtttcactctgtcacgcaggctggagtgcaatggcacgatcttggctcattgcaacctctgcctcccaggttcaagcaattctcctgcctcagcctaccaagtaactgggattacaggtgcccactaccatgyctgactaatttttgtatttttagtagagacaaggtttctccatgttggccaggctggtctcaaactcctgacctcaggtgatctgcccacattggcctcccaaagtgctgggattacaggtgtgagccaccccacctgcactctctttaaatgtttttatgtactaccatgtgcagacacctatttcttcctggctttacagtctaatcatacccatggttaagtagctttaccatgctaacaaagacatccctagttttcccccaaataaaataattgtaagtttgatcagctaattttcactaatatgaaaaaactgaagaaaaactcagagaactgcatttttcttcccatacttcacttatgtagtttaactagggtcttctgaaaattgc

SEQ ID NO: 387037 - DNA, 608 bp, Homo sapiens
acttactcacttattcatccaatcaataaatccaataaacaaatgcgtttttttcttcttttttttttttttcaaacagggtttcactctgtcacgcaggctggagtgcaatggcacgatcttggctcattgcaacctctgcctcccaggttcaagcaattctcctgcctcagcctaccaagtaactgggattacaggtgcccactaccatgcctgactaatttttgtatttttagtagagacaaggtttctccatgttggccaggctggtctcraactcctgacctcaggtgatctgcccacattggcctcccaaagtgctgggattacaggtgtgagccaccccacctgcactctctttaaatgtttttatgtactaccatgtgcagacacctatttcttcctggctttacagtctaatcatacccatggttaagtagctttaccatgctaacaaagacatccctagttttcccccaaataaaataattgtaagtttgatcagctaattttcactaatatgaaaaaactgaagaaaaactcagagaactgcatttttcttcccatacttcacttatgtagtttaactagggtcttctgaaaattgc

SEQ ID NO: 387038 - DNA, 643 bp, Homo sapiens
gctgaaaaaacgttctgtcaggtgttatgtttgctgtctgggtgacttgatcaatggaaccccaaacctcagcgttacacaccgttgtaacaaacctgcacatgtacccctgaatccaaaatacaatttttttttaagttgagttttaatctccttcaattagctctgcagccttgggaaatctgcttaacctttctaagccttagtattatcgtgtgtaaaatgaacataataatcacaatttttttagtgttgttattagagagtgtatataatgtgtggatgtctaataggtaatcaataaattgtagcaattattgcatgtttagatttagtttttcaagtatgttatttctcaaatcaattctgttttctcctgttatttctttttttaaaaaaaataacttttaagttcaggggtacatgygcaggtttgttacataggtaaacttgggtcatgggggtgtgttgtgcagattatttcatcacccagatattaagcctagtacctatcagttacttttcctgattctctccttccccccaccctccgccttccaataggccccagtgtgtgttgttcccctctatgtgtccacgtgttctcatcatttagctcctacttataagtgagcacaggtgg

SEQ ID NO: 387039 - DNA, 643 bp, Homo sapiens
gctgaaaaaacgttctgtcaggtgttatgtttgctgtctgggtgacttgatcaatggaaccccaaacctcagcgttacacaccgttgtaacaaacctgcacatgtacccctgaatccaaaatacaatttttttttaagttgagttttaatctccttcaattagctctgcagccttgggaaatctgcttaacctttctaagccttagtattatcgtgtgtaaaatgaacataataatcacaatttttttagtgttgttattagagagtgtatataatgtgtggatgtctaataggtaatcaataaattgtagcaattattgcatgtttagatttagtttttcaagtatgttatttctcaaatcaattctgttttctcctgttatttctttttttaaaaaaaataacttttaagttcaggggtacatgcgcaggtttgttacatagrtaaacttgggtcatgggggtgtgttgtgcagattatttcatcacccagatattaagcctagtacctatcagttacttttcctgattctctccttccccccaccctccgccttccaataggccccagtgtgtgttgttcccctctatgtgtccacgtgttctcatcatttagctcctacttataagtgagcacaggtgg

SEQ ID NO: 387040 - DNA, 471 bp, Homo sapiens
gattcttataagaaatctaagaataaattgatgggagaaagttattttttatggataagatattcatgaaaagattaacagattggagatacagattttggagttgccagcgtaaagaaggaagaaagtgaaattacttagggtgattctgtggaaataaaaaggaagaagtcctgtgttggagctttgatgactatacatcattttgggttaggggaatttgtcagggagaagtagctgcttgtttcctcagagagtgaggccagaaactaagagagagtacaaagtgttacaaagcccaggaagagggtgtctcaaaaaggaaggatcagttaaaaatgtcaagtgctgacagaaggacatgcctagtgagaatacatactccatragataagtgatttggagtccctctggtgacttgggggagagcagaagtgaacaggcaggtactagatcagattaagaatggaa

SEQ ID NO: 387041 - DNA, 643 bp, Homo sapiens
tctctcagttccatgaagttttatcgtggagtgaaaaagaaaatgaagcctccaacaaggtaaagtttgaaagggaagtgctgaaaggaaaaacttatgggaaaaatatgtctatttaaggatttagggatcagtggcattagtctaactttttataaagtaagttttaggctattttttttaagttgcttcccctgtcacagggttcttatggcagatcaaggaacttgtatgagtagataaggagggacgatgttcccactgagactgagaccaagctccttggtgattgcaatctctctgtgtaaagtaagaaatcccgggaggctctgtctactgggaagtacatggcttcctctgcatctcattccctgagctgtcacatcacaacctgagggcatctcaggcaagtctacaacacaggaaagcaaatgctgccctccagcttcctgatgcttggcttctacaatgttttggttctggctctgtaattttccctttttactatgctgactttggtactgaaaacccatcatagcatgtaagcgctakaggaggtgggtgcctcctacagattgcgtgcctctttaacacttcatgtaccccagcatttgatttacaccacaatttcttatcacaggtt

SEQ ID NO: 387042 - DNA, 549 bp, Homo sapiens
tgtgtacatgactgccgtttaactaaatgacgtaataccctttctggaataagctcacaaaagaataggaggataataaatrgttgctgctagtataaatgtctctccctagaagaatctactaaaaagggtgaggaattagttgagtgatgatgtggtttcaacatttttaccatgcctaaatgacacttgaaataacagagtagaaaggaagagaccatgagcatggaaagaaaagagagaattatggatacagggtgtttgggcacgtgagattttacattacaggaaagaaagtagcgtatatggatttagatcaagataggttagtatatttgctgatgggagcaagtggaatttaaggaaactatgacagatcatagcaggaaatgacctcatatgaaggagagttaacatacattagagaataataacctacccagagatttaatataatacaattattttaaggcaataattggtggacaacaccaattctgataacaggtaattataggaaaaacatatatatgacagaatccacactga

SEQ ID NO: 387043 - DNA, 549 bp, Homo sapiens
tgtgtacatgactgccgtttaactaaatgacgtaataccctttctggaataagctcacaaaagaataggaggataataaatagttgctgctagtataaatgtctctccctagaagaatctactaaaaagggtgaggaattagttgagtgatgatgtggtttcaacatttttaccatgcctaaatgacacttgaaataacagagtagaaaggaagagaccatgagcatggaaagaaaagagagaaytatggatacagggtgtttgggcacgtgagattttacattacaggaaagaaagtagcgtatatggatttagatcaagataggttagtatatttgctgatgggagcaagtggaatttaaggaaactatgacagatcatagcaggaaatgacctcatatgaaggagagttaacatacattagagaataataacctacccagagatttaatataatacaattattttaaggcaataattggtggacaacaccaattctgataacaggtaattataggaaaaacatatatatgacagaatccacactga

SEQ ID NO: 387044 - DNA, 578 bp, Homo sapiens
ctatatttaactactagtgggaatataaaaaacatgatgtgtcaatattatagactaactattgacataataggccaactagcaagaaattacatgacatcttcaatatatctctctgaagaatattcatccatacacattttgatttaggcaatcataattttaaatgcagcatatattcttagcatagagttaaaaagaacaagttttagaattacaatcaaagtctcacagaaaagtttttgatgatcaaaatatgtcaatcagttaataaaatgtagcaacagaaacatatgctggaataaaggaaattcaaactttttctcagtgcactgaaaatagcataattgaaaataataagaaaagaagctgtgacatgaagatgtcaatgctgctttcctagtgttgtagccatgtaaaagtcaawtcaactctttcacaccatccaaaacataaagcacataccacctgagctttttgttttcggttaaagtaatgaggctaaagacaaacaggaaagagcatatcaaaagcatcatacttgtatgatccatcataatgtaactgataataaaatc

SEQ ID NO: 387045 - DNA, 481 bp, Homo sapiens
tttggtttgaaaaaagacttaggtccctcatgaatctgatgagggagcagcaggatggcaactgggtgagagaattgttgtctttgataagcacaaatgtatccagtgcctaagaggctggtgcttgtatgtgaatcagtgtcatttcacatatggaggtaaaacttggactgggaaatgaggcacttgacacatccataaaatgtacaaataggcagtagatggctccttactggtcatagggggttggtcagggtgactctggaaagcatgctaattcatagtaggactagaccgytgtatagaattagcaagctcatttctttctagcctttctttatttcttttcaatgatttcaaatagtatatatatgtaatatgtgatgtatatttatttatattttttctaaaaatgctcacctatatcagttatatatcatatacaatatataaaatacaatatatagcatgttatataaca

SEQ ID NO: 387046 - DNA, 664 bp, Homo sapiens
taactaataaaaaagtaataattaaaatataaatgttctgttgttgagacgaagtttaaggtatattgggaaacaatgcaattcaattttataggctttatcatacaaccagtgaaatacactttttgattacatgttagtttggattctaagaattattcatacaaaacattttaaactgcttggaaatacaataaaggaagaaaacttaatgatatttggattttcttttcacaaaattttatttcttcagaacatacaaattgttgctgtacagctaaagatttttctatacatttcttagaaataaaattataaatgtcaaatggcaataatatacaaggataaggtaaatcaaacataatttattagggaaattgattttttatcaagtgtttctcttcaattaaatttcactgtgccaaatttagggttaatatcacatgaaatataatttgtatgttaataggaatattttaagaaaaaatatgagagtatagagttatgtgtcttttcttatccattttgacaaaatgctaaactgagaaactcaaggaaatatgcttcctcagaaccataattatataaagtgactatcatagtcttcctccataaactgtggataartattaattttaaaagatgacatgacaagtgaatcata

SEQ ID NO: 387047 - DNA, 591 bp, Homo sapiens
aagtcacttaacctctctgtgtcatgatgttgtgccacactatggtggagatgaagatggtatgtcacaataccaggcaaatagtgccatattaagtaatagatacatgataataattatcatgctgttaagactgtagtggcaatcgtagttattgttgtggttattttttccctaggtgtagtagtattggccaaaaagagggagtaggcaactctgatttgagtgtcagcgattgcttcgtaatgaaataaawcctgtagctgagtcttgacagctgagcccaatcagccatgaagaagaaaggcattcaagataaaggaaacagcaaatacaaaggcaccgagggaggcttacaatcagaggggaatctatgggaggaagcatggtagccaggagcacgggcttagatggatttaggttagaatctcaccttcaccagctgcatgaccttgaaattacctttgctctctgtgctttagtttttactcatctttaaatagagatgataatatatggtacctacctcatagagttattttgagaatgaaatgagtttacatacgtcaagtacagagaaaagcacctagc

SEQ ID NO: 387048 - DNA, 591 bp, Homo sapiens
aagtcacttaacctctctgtgtcatgatgttgtgccacactatggtggagatgaagatggtatgtcacaataccaggcaaatagtgccatattaagtaatagatacatgataataattatcatgctgttaagactgtagtggcaatcgtagttattgttgtggttattttttccctaggtgtagtagtattggccaaaaagagggagtaggcaactctgatttgagtgtcagcgattgcttcgtaatgaaataaatcctgtagctgagtcttgacagctgagcccaatcagccatgaagaagaaaggcattcaagataaaggaaacagcaaatacaaaggcaccgagggaggcttacaatcagaggggaatctatgggaggaagcatggtagccaggagcacgggcttagatggatttaggttagaatctcaccttcaccagctgcatgaccttgaaattacctttgctctctgtgctttagtttttactcatctttaaatagagatgataatatrtggtacctacctcatagagttattttgagaatgaaatgagtttacatacgtcaagtacagagaaaagcacctagc

SEQ ID NO: 387049 - DNA, 285 bp, Homo sapiens
ggtgctgtgactgaaaggacccaggagtctgggacccctcctgggatccccagcacattctcctgctcctgggagaggcctgggggcggtgctcactgggagggccaggactcagttcctgctctcatcctcccctgccctgatgtcagctgctttgcacaaaggtccttcttgtccayaccccttatccccaggctggtgccccgggagggctggagaccaggccatgggccctcacggagaggaagggaaggaaggagagggagggggaggatagagcccatc

SEQ ID NO: 387050 - DNA, 636 bp, Homo sapiens
gttcttctaccacccaaccaccctgcctcccgttcccgaaacaaaaacgtgtgcaccacaaacaaagcaccctgagtttacagaacayagtgccgtctaccgttgcacacatcccctcagtaccagctaggtgtagttatcccaactacttcagatgaggacatcacagctcagagaagtgaagtgacgtccaaagtcacacagctgggaagaaggagaggtgcacctcatcgaggggcgaggctccagctgctcctgcaaaccattgctggcaccccccactccaagcctagcctacctcgggatccagctcctgccccagccccatccaggtagatgagacaggaatgggccccagtcccgtccctttctcttctcccattcctcgttccctcctgcatcgttcctctgtaccttcctcaccctttcttctccatatcggcttctcttcaattcctttcctgtcccccaagtcctctccttccctcaacatcccccacacacctttaccagctcccagattcaagtccttgaccccacaggtatcacccctgccctcctccctgctatgtatccatctgtggggcaggagtgggtgtcatggacagctcaggagcactcagtatgccccatgca

SEQ ID NO: 387051 - DNA, 636 bp, Homo sapiens
gttcttctaccacccaaccaccctgcctcccgttcccgaaacaaaaacgtgtgcaccacaaacaaagcaccctgagtttacagaacacagtgccgtctaccgttgcacacatcccctcagtaccagctaggtgtagttatcccaactacttcagatgaggacatcacagctcagagaagtgaagtgacgtccaaagtcacacagctgggaagaaggagaggtgcacctcatcsaggggcgaggctccagctgctcctgcaaaccattgctggcaccccccactccaagcctagcctacctcgggatccagctcctgccccagccccatccaggtagatgagacaggaatgggccccagtcccgtccctttctcttctcccattcctcgttccctcctgcatcgttcctctgtaccttcctcaccctttcttctccatatcggcttctcttcaattcctttcctgtcccccaagtcctctccttccctcaacatcccccacacacctttaccagctcccagattcaagtccttgaccccacaggtatcacccctgccctcctccctgctatgtatccatctgtggggcaggagtgggtgtcatggacagctcaggagcactcagtatgccccatgca

SEQ ID NO: 387052 - DNA, 636 bp, Homo sapiens
gttcttctaccacccaaccaccctgcctcccgttcccgaaacaaaaacgtgtgcaccacaaacaaagcaccctgagtttacagaacacagtgccgtctaccgttgcacacatcccctcagtaccagctaggtgtagttatcccaactacttcagatgaggacatcacagctcagagaagtgaagtgacgtccaaagtcacacagctgggaagaaggagaggtgcacctcatcgaggggcgaggctccagctgctcctgcaaaccattgctggcaccccccactccaagcctascctacctcgggatccagctcctgccccagccccatccaggtagatgagacaggaatgggccccagtcccgtccctttctcttctcccattcctcgttccctcctgcatcgttcctctgtaccttcctcaccctttcttctccatatcggcttctcttcaattcctttcctgtcccccaagtcctctccttccctcaacatcccccacacacctttaccagctcccagattcaagtccttgaccccacaggtatcacccctgccctcctccctgctatgtatccatctgtggggcaggagtgggtgtcatggacagctcaggagcactcagtatgccccatgca

SEQ ID NO: 387053 - DNA, 580 bp, Homo sapiens
cttctctatccatcccttagtctggctgtcgagtctcagcctcttgtcttcctcctagacttttccctgggcctgaggctccccaccctgacccaacatgccaggaacccctctccaggtgccctccacctccttctccctggcccctctctctcagggtctgcctgagacagtgatgaggggttgggagagagttgtccagagcttgctcctcctgagagcagtggcttctctcagccctcggaactctatctattcacagcttccgtttctccagaaagctctctccctggctggcttgcttgcatcctccctccctcgcagagcccacagggttaacaggcaattagcggggccagggctcagagctgtggcagggsgagggccctgggcctccaggagataagaagcagccaggagatgctgaggccaggctaatcccagagctaatcttcggcctgggctttatctccactgccttctgggcaccctgcctctggtcccggcacttcccctgacattcttccatggtatcccttcccccaaattctatcagctctccccttgatggggtccaccc

SEQ ID NO: 387054 - DNA, 555 bp, Homo sapiens
atgctgggaacaccaggtaaaatgtgtgaaacacaacatacagcaacttaycctgtactggcccatctctagctggctgaaattacaacatgtaatttatcttgcaggaatattgtttctaccatctgtatcaaataatccaattacctaacagcagtaaaatgtatgcaagtaatatcaggaaccatattagactatgaacaacctgaggtctgtcgtattgggaaactagaccaaaagaggagatcaaaacccaaagaaatgtaaaacagaaaccttcacacacaacatgaagacttagccatccaacatcccatccaataactaaaataaacaaagcatccatttatcatgttacagtgtctggaattcttactggcctagtttctgacagttttctgagatatttcctttgttcgctcacactaaataatctcaaaccagatgtatgatgatcagccaggtttaggtggaagaagtatttattcccattaacctgttaacagataaatatgtcagtaatgccatgtagtaccatctgattcaagggaatag

SEQ ID NO: 387055 - DNA, 584 bp, Homo sapiens
aagggaaaagatccacgtgcagataatgtggtaaaggagaaggcaagagcagggacacaggaaaaactacaactctaagaaatgcttctgtaacacagtgaactggtcattcagtaaattggttcttaggtaaattaattttccgcaaattggccttggcatattgcaactggcatttaaatacatagctccatgaacacatatagttgtgagctaactcagaagtctcatgtaagccattatcccttcatataatctgttcatatagagtacaataattgttctttctcagcctagttaatgtttggttgtttcgtaatttttaaaaataccagatacttaattaatttaagctcattgttttccagtcttttaagttacaaattagcaagtttctgctatgcatacatttagcatatctgtggtaattgagaacagaatttggaggcttactaacagcaaccacatgaaggagaatatgaaatgctgattaccctcagggattgcaacaagattctgttggtgtatraattgcctggcatttaaactaagagctgatgaagatcaacatcaaaagaaaattt

SEQ ID NO: 387056 - DNA, 587 bp, Homo sapiens
gagaaaaaccagaaagaaaatgctgtgttatacacacacacacccccatcatttcagctttatatacttatatgcatatatatacatatataatttttatatttatatttacatatgtatgtgtgtatatacatatataatatgtatataggaaagtatacattgaaacgtaagttcatttaaaataatcagtaaacccttggttctcttagtgaatatctggatggaaattatttcttcaaaaaattgtatttatcagtcatcctgatgacatgtcctgaaagccagaagccaaaatggcctagaaagaatgcctgaattattctgtttttcctctgtagatccaggatgctctgagatgatggctcctgtaatcagagctgtatccattgttcartttcccaaagccagaattgtgggaaagttatgtgagaaaagaaaataaggtgattgtcttttctcttttctcctaaggaaaactaaaataccaaagtgcctaatgtgtaaagaagacacacttgcactatgtcacagatagtgatgtcctttaagattccaggacttggatttcttagatttaaattatt

SEQ ID NO: 387057 - DNA, 555 bp, Homo sapiens
cattgtgataaaatggtatccttggaaaatttattcttttatggaaacaatcaatctgggattggttttgtatggtacaaccagtgtttatcaggggaaataagagttaagaatataaaaacaagattgtaaacccaacgaagtaattttaattatcatagtgcttgtcattaagacaaaaaagtgtgsgtgttcttttacttataaagatcctttcagtgtgaaactaatctaactttttctgtgttgatccgtattttactgcatcagaaaatcatactctctttcacaatttgaacattttaattgagtactctgaggaaccattagcatggagacccacaaagcagtggaatgacacacctagctaccaatcattttacagtgatataaagtagcataggaatttatgaaaattagaagagtggatataaagcaatggttaacacagtattatggaatagtcatataggtttgctgaatatgaggcagataaaatctgataatatgatgagcaaagggaaaatatgaagattacaacttgtgattacaaag

SEQ ID NO: 387058 - DNA, 609 bp, Homo sapiens
ttcacattgattttgtaatctgaaacctttccaagattgtttatcagttgtagcctccttttagcagagtctttagggttttctagatatataatcatatcatcagtgaagacagagagattgacttcttttcctagttggatgccttttatttctttctcttgctagaacttcctggtccagttttctacagagagccagaggtctaaaatagatgctcactagctgtgtgcaggcactagaagaaattaagctacacatactgaaaagtggaaacaaaacagtattcaaatggcagttgtcatctagaggcaggacaaaggagtgtcctggatataacaatatggggagcagtatctggatattctaccaacaagtaataggtccacagactctgcagtcaagattaagaaaatgtcataataggtgttagattaggccccaaaccctaaatgcacccatctagacaaagatttacatacaagagattgtttgcttaaacaggacaagacrgagttgcaataatgagaactgtgcaagtgtcagaggtggataagcagcagagttttctgttcagtctaacagagtcaagataaaactattttaaat

SEQ ID NO: 387059 - DNA, 570 bp, Homo sapiens
gggacaaacgctcttattaacactattcaacatataattttgttgtagagaaattaagcaatttgcctagagttacaaratttgtacaatttcagatttagaattcaaatcagatttgttttccaacagagttcatgctcttaggcaatatataatgtagtaaagtctcaaaaatatttttaattcatctgttaaaagataaaaacattacatagcccttcaagaaatgaaacaagacaaaacagagatgccacaaagacagatttgcttgtttgtttgttgtttgttgattggttatcaaaatgaaaaaaaaaattgatcagcaaaaaaaagcatcccttggtctccatatcacaacaaaacatttcaggggctatttactcaagtttgtaggaagagaggaatggaggttagttggcatgttttagcacagtgaatttaccaagacttattggaagaagtaattaatgaacacttataatctgaaaaatttaggctaacattctgaagactcaaatctcagaaaaagaagatggccaccaactgtggttaatacatttgtggaaacac

SEQ ID NO: 387060 - DNA, 624 bp, Homo sapiens
gtcaaacaaccagatctcatgagaactccctccctatcacaagaacagtatgtgacaaacctcccccataatacaatcaactcctaccaggcccctccctcgacctgtggggattacaaatcgagaggagatttggrtgaagacacagagccaaaccatatcacctacaaagggaatggcagcccacaacgacaaaatgacacctgtgtctgtctttcagtacattcaaactcaatgattcaagaagctgataccctccactctggaatgaataaatgattgaatgattggctcagaacttagagaatttgttaagagaagtcccatggggactgagtagctgcagacttgactactgccccacaactaaaagataagccagtaaatcagcaataatgtcaactgcagctatacctgacaccttacaccaacattcccagcataatggctcttctgaattttaccctaattttttatggtgaactctaacacagaaccagacagggatgggaattctgggaaatgttcttgcagcttagctaaattgacagaacataaaacaccacactgcattgcctctcactaggactattgcagcagtcccctagctgatttgcctgccac

SEQ ID NO: 387061 - DNA, 624 bp, Homo sapiens
gtcaaacaaccagatctcatgagaactccctccctatcacaagaacagtatgtgacaaacctcccccataatacaatcaactcctaccaggcccctccctcgacctgtggggattacaaatcgagaggagatttgggtgaagacacagagccaaaccatatcacctacaaaggraatggcagcccacaacgacaaaatgacacctgtgtctgtctttcagtacattcaaactcaatgattcaagaagctgataccctccactctggaatgaataaatgattgaatgattggctcagaacttagagaatttgttaagagaagtcccatggggactgagtagctgcagacttgactactgccccacaactaaaagataagccagtaaatcagcaataatgtcaactgcagctatacctgacaccttacaccaacattcccagcataatggctcttctgaattttaccctaattttttatggtgaactctaacacagaaccagacagggatgggaattctgggaaatgttcttgcagcttagctaaattgacagaacataaaacaccacactgcattgcctctcactaggactattgcagcagtcccctagctgatttgcctgccac

SEQ ID NO: 387062 - DNA, 580 bp, Homo sapiens
agctgggtgtggtgacgcatgtctgtaatctcagctactcaggaggctgaggcaggagaatcgcttgaagccgggaggcgtaggttgcagtgagccgagttcgcaccattgcactccagcctgggcaacaagagcaaaattctgtctcaaaaaataaaaaataaataaaatacataaataaaaaataaaataataaacttttgtagctttgtatttttctaaacagatgtggaggcttttaaacaaacatattcaaattctatttcaactgcagattcaaaatttgtacacatacatgtatatataattcaaaagattttcagactatttattaactaatgattttaaaaatacaatttgagtaaacaagccctaatgttaaattttgttttgttgatctcaacwattagttttaccaagatcaaacaaaacaaaaagtaattacttgagattaaatgacagattaagtatgttttcatgacttttatttaaaacattgttggttctttaattaaatattttgtttcccagattaaaaatatttttctctcttaacatgtctgtagtttacaataatttg

SEQ ID NO: 387063 - DNA, 624 bp, Homo sapiens
gtcaaacaaccagatctcatgagaactccctccctatcacaagaacagtatgtgacaaacctcccccataatacaatcaactcctaccaggcccctccctcgacctgtggggattacaaatcgagaggagatttgggtgaagacacagagccaaaccatatcacctacaaagggaatggcagcccacaacgacaaaatgacacctgtgtctgtctttcagtacattcaaactcaatgattcaagaagctgataccctccactctggaatgaataaatgattgaatgattggctcagaacttagagaatttgttaagagaagtcccatggggactgagtagctgcagacttgactactgccccacaactaaaagataagccagtaaatcagcaataatgtcaactgcagctatacctgacaccttacaccaacattcccagcataatggctcttctgaattttaccctaattttttatggtgaactctaacacagaaccagacagggatgggaattctgggaaatgttcttgcagcttagctaarttgacagaacataaaacaccacactgcattgcctctcactaggactattgcagcagtcccctagctgatttgcctgccac

SEQ ID NO: 387064 - DNA, 602 bp, Homo sapiens
tactgccccacaactaaaagataagccagtaaatcagcaataatgtcaactgcagctatacctgacaccttacaccaacattcccagcataatggctcttctgaattttaccctaattttttatggtgaactctaacacagaaccagacagggatgggaattctgggaaatgttcttgcagcttagctaaattgacagaacataaaacaccacactgcattgcctctcactaggactattgcagcagtcccctagctgatttgcctgccaccatctccctccctccctacacattcttcacactctctttagtgttrtctccaaaaactccaaacaatatttccatttcaagatgagttaaacttctctgcttcccatcttccaaagcaaagaaatatgagaagtttttaaaagtacatttctgatgtcactaggccggacatctataggatatcacacgagacacagtgcaaatgaatttgtactctgggaagtatccatgtgcttatagctcaaaaaaatccaaggaagaagtcttctaggaacagaatggacacaatttcacagttgcagaaactgagagagatggattgactgtggaa

SEQ ID NO: 387065 - DNA, 384 bp, Homo sapiens
atatggctattttagcttgtctatctcttggttccactaggtatgtgtagaccagaaataagctctccagctgcagataaacatcagtgacagggcataagaatcaatcctgttaatgttgtctcccgaaataagtattcatatctatccatacatacatcagttttgggggtgagagagggtttcttaatatcacccaaataataayataaatgcttcagcatatctatagtaattatgaaaagcttatagtattaaaattacttttaatattttaattttgtgaaaaccatcaactggtaactgcacactatctaaatgacaaatatcagggagctgtttaccactgacaatgtcagtgatctgttattcactttgagtcac

SEQ ID NO: 387066 - DNA, 384 bp, Homo sapiens
atatggctattttagcttgtctatctcttggttccactaggtatgtgtagaccagaaataagctctccagctgcagataaacatcagtgacagggcataagaatcaatcctgttaatgttgtctcccgaaataagtattcatatctatccatacatacatcagttttgggggtgagagagggtttcttaatatcacccaaataataacataaatgcttcagcatatctatagtaattatgaaawgcttatagtattaaaattacttttaatattttaattttgtgaaaaccatcaactggtaactgcacactatctaaatgacaaatatcagggagctgtttaccactgacaatgtcagtgatctgttattcactttgagtcac

SEQ ID NO: 387067 - DNA, 575 bp, Homo sapiens
acagggcctggcagatagtttgtactcaataattatttcactattattgtcctttttagcaccttaatttcttccctgagatttcctattaggtatctcatatatgcgtgtgtgtgtttgtgtgcgtatatttatgtatatatgtaatgattttatgtatatatatgattcatatgtatacacatatatgcatatatatgtgatgacatatatatgtgtatatatatatatgtgatgattcgatggttaagtgggtagactcttgagctagatgtgtgtgtgtgtgtrtatctatatatacacacatatatatgagatctataatagaagaaataaatggttcaccctttgcggaaaataattttaaaaaacaggccataaaccaattgaaagccctcaaatatgcccttttagaaatgttgccatagtatccatctacctctttatctttctacatcttctctcaaattcaaaatagcaatattatttaattcatttatttttgtttatttgtattaaaacactttgtttttctacttttttttaaaaaaagtgttgtatttatactgtgggta

SEQ ID NO: 387068 - DNA, 575 bp, Homo sapiens
acagggcctggcagatagtttgtactcaataattatttcactattattgtcctttttagcaccttaatttcttccctgagatttcctattaggtatctcatatatgcgtgtgtgtgtttgtgtgcgtatatttatgtatatatgtaatgattttatgtatatatatgattcatatgtatacacatatatgcatatatatgtgatgacatatatatgtgtatatatatatatgtgatgattcgatggttaagtgggtagactcttgagctagatgtgtgtgtgtgtgtgtatctatatatacacacatatatatgagatctataatagaagaaataaatggttcaccctttgcggaaaataattttaaaaaacaggccataaaccaattgaaagccctcaaatatgcccttttagaaatgttgccatagtatccatctacctctttatctttctacatcttctctcaaattcaaaatagcaatattatttaattcatttatttttgtttatttgtattaaaacactttgtttttctactttttttwaaaaaaagtgttgtatttatactgtgggta

SEQ ID NO: 387069 - DNA, 522 bp, Homo sapiens
gggtcacgtttatgttgaatatttaattctatacagctttcagactgataaagcatgtgtccttttcaattcagatttacagtgggtctattcacattttttcaatgaagatacaatttcaaagctcagcttattcttaaagaaaaatgacattattcctttaagttccactggtttattagactgatacctcctgacttgatatatcaaatgataaaagaccacaagaaaaagatctgtgacatmaggaatttcccaggctctgtttattacctaaaatattttggctaacaaagctgaatagattccctaagttcattgtgtttcaaaaacctataaagataccttgagaaaaatatgtgcacacattatgtttatatgagctagagtatttaatatctcaagcaaagggtatttatgaatgataaagataaccaaaaagaaatgctgaaatcatccaatatattatatatttttcctatagaataacagctgttagaaaatacacttaaaagaaaagta

SEQ ID NO: 387070 - DNA, 364 bp, Homo sapiens
aaataccacatgttcacacttataagtaaaagctaaataaygtatatgcataaaacatcagagacttggatgggagggaagctgggaaggaggtaaggggtaaataattacttaatgcaaaaaatatacattatttggatgatggttacattaaaagcccacacttcatcgcatgcaatatatctatataacaaaactgaactcataccccttaatttatacaaataagtaagataaaaataaaagaatagaaatcatgcaatgactgctgtcagactactaaggaattctactagaaattaataacagaaagatacctgaaaacatctccaaatacttggagattaagcaacatatttctaaa

SEQ ID NO: 387071 - DNA, 364 bp, Homo sapiens
aaataccacatgttcacacttataagtaaaagctaaataacgtatatgcataaaacatcagagacttggatgggagggaagctgggaaggaggtaaggggtraataattacttaatgcaaaaaatatacattatttggatgatggttacattaaaagcccacacttcatcgcatgcaatatatctatataacaaaactgaactcataccccttaatttatacaaataagtaagataaaaataaaagaatagaaatcatgcaatgactgctgtcagactactaaggaattctactagaaattaataacagaaagatacctgaaaacatctccaaatacttggagattaagcaacatatttctaaa

SEQ ID NO: 387072 - DNA, 535 bp, Homo sapiens
tactgatttctctaaaagtatagtagtttaatagactcttctggtgcaactggaattgcagtaagatcttttaggctaaagcattattcagaaggaaagcatcaaagtataatttacctgtttgtgacaagtgctagaagttcctccaataaattacagtagagaaatcatagtaaagtcaccgtacttcaatatctagcattttagccaatggtacacataaaaagtaagatcaatagtactatcattttgacttgatttgccaagggtagacgccacatttggcaaaatataccaagaactattatatcaactaagacaatataaaggttgaaacgatattatgttgccaaagaggaccatgaagaaatagcaaaatcataaaggaaaatcaacatgcagtacaagcaaatatgggcaattttaaggatcamaacaggaaaagaaaaggcactatttaagtatttccagagtgtattaccctaaccttagaattgggtatctcagacaggtaagaggaagaaagtgagactca

SEQ ID NO: 387073 - DNA, 410 bp, Homo sapiens
tgtccttcttcattaatataagacattttttcttttaaattctggtttctgatgactaggagatgtgarttcatattagttacatttgagtttattaataaataatttattctttcaaataatttatgctatagagtaaaaaagtccctagtctctggtttaaatcctgaggtaatacttaagtaaatgcattaagaaagatgaccacagctgtgggttcaaactttgtttactaatccagaatgccgtgaactaatgttttccttttttttcattattttgagtgaaaaggagaaaaataaaaatgagaggagttggcaataaaataaagttttagtgaaaatggaaaaaaatgatgtttcaattggaagtgaaagaaaagagttaaagctgataatataagttagaga

SEQ ID NO: 387074 - DNA, 609 bp, Homo sapiens
cttacaaattactacctcttgttatcctcattgtcaactttctcatgatgattaaaggcttcctctttcttttttcttcttcttttctgagactgagtctcgcactattgcccaggatatagtgccgtggtgcaaccttggctcactgcaacttccacctcccaggttcaagtgattctcctgcctcagcctcctgagtagctgggattacaggcacccaccacaccaccatgcccggctaatttttgtatttttagtagagacgaggtttcaccatgttggccagcctggtcttgaactcctgacctcaagtgatctgcccayctcagcctcccaaagtgctggggttacaggccactgggccaggcttggcttcctctttgagtaaaatgatcacatcatcccagctgaactatttttgaggaaattgagagggagagcaggaaaagactcaaacacctatactgaatatgtacatctacaatggggctaaattattgtgtatgcgagtgtccctcttagcaggttgtaatttaattcaccagttgctattatcttaggtgttaactttctcagtagtaagtgtggttacttgagtgtggttgacag

SEQ ID NO: 387075 - DNA, 522 bp, Homo sapiens
gaagaaactaccagtcatctattactcctctctgcttataagcagataccacaatatgttgtgtttttctcttagagggagggtgaagaaaaccttggttatcagcttttttttcccattaatagatataaaatggttctttatgaaacatctgagtataagttccaaatttccctctgtgaactcaccatggctatgaaatattgcaatcatgtaattctcctgtatattcttaaacagacattgactttcaaattaggtcaatgttagtaaacactgtctaaaaccaagtgaacataaatctgaaagataattcagcataaaatagtcawtgtagaataattttaactaatagtcacagtgctcactattttcttttcttttctctctttttttttttaacataagaagtttttcaaatacccaaccccctggcaattcagaacagattcaggaaaggacattacttcttactcaagaattagttccaaactaatacagatgatggaacaagaaagcata

SEQ ID NO: 387076 - DNA, 516 bp, Homo sapiens
ataggacaggaaaggaaaggacacaaagttgttcattgttatctcaaaactcactcatacaaattagcagaatattcccagaaagtgtaatactctatcttctatctctaagtgagatgctgcaaagaccagagttcttatgagaagactggagaattcagagctccgcccttaggcaattcaaagcagactcctgtccctcttaattaaacgaatccctsagcactgcatgagcaggctgctttccagaatagaagagatgtcacacagatgtttccaacaaaatttccacaaggtttaccttgttgagaaagaatgactccattcaaagcaagaattttaccaaacctatgagaatgaacaagagcagaagagttggaattcctctctttttgaaagaacaacatacacaatgtacaaccagacacatattcagaaagtccagatgtcttcaccatgtaggggaataatttttataactccacagaaataagaaaaggcactaagagaatcatg

SEQ ID NO: 387077 - DNA, 561 bp, Homo sapiens
catttaaactaaatgtaaagctctggaagggacttctctggcacatgctatattcatcctcagaaatgatggtttaaacaaatctgcaaaactctgtttcaaaatatattacttcaaattaacatactctttcatagaagacacaaatgtctgtgcttacccaccattactttgaaataagtgaagattttggtgttatttcaactttctatgtatattgaactgtaatcagtatcaccttactcttgagaaaaatgaagaaattggtcattaagaaattaaaatcattgyttaaaattcttagtcaacaataagatgaaaattagaagaacatcactagcccatgccattacaaaattcaacaaagctgtttcttaaatgtgtacatttaaaagaagaaaaggagggaaggagagaggggagaagaagaggaggagaaggggaaaggaaaagataggaagagaggaaggaaagaaggcagggaggaaggcatctgagactacaacttgatgagctacatttcttctaaatatttactagacaattattcaaagaataaag

SEQ ID NO: 387078 - DNA, 598 bp, Homo sapiens
ggaattataggcacaattgccttccctccttcccacgatgtaggacttgctgttcacatttacctgctctttataaaagaagaataatgactggaaatatacagcagagctctaatttaggcttgctctcaaaactttcacctccctttaatatttcctttacagctggtattggcaaactatggtccatgggccaatgtatcctgcaggtagcttttgtaaacaaattttattggaacacaaccacacccacttacttacatatcgtctatggctgctttcccacagcaaaatttgagtagcggcaaagagatgctggggcctgcaaaactaaaaaaatatttactatctgatcctttgcagataaggtttgcctaccacggatcyagataatatttacagttgcctcagtagtaatccctgtcaaacagaggtaggtagaggcagaggtggtgcatgcctagcatgatgaaggaagaaattttatataaatattattgcaagaaaaaagggacagcttgatcataaaaagtgaaaaatgtctattcttacataaaataacttctttcaaaagtgagactttcactaagttgctatt

SEQ ID NO: 387079 - DNA, 595 bp, Homo sapiens
tgattgaaaggaccctgtaatccaaaggaagacagggttagaaccttgcattttaagaactgggaagtaggaaaactatagagagaggaggaaagcccacacagacaggatgcctgagatctaatagctaataaaacaatagttgagcagatcttcatttgcttcctctgtaaaataaccccaaatgacccttctgagtccaaaattatatgttttcaagatattgcatggggactgtttgtgatgggtaattttggagggctatgacctcttattttatcagtgcagtcagtacattaaggggtaattagtgtttagtataggaggaatatagttgaggatgcataaccrctcagatgtattctatctgacatcaatttatagagttcaaaatactacccatgcaagagatattttaattgttctcactaccataatgttccaaatgttccaccatgtttgccaaaacaatttgtatgacaagggtctctaacttctaggagagaagcaatttacttcaagattttgctggatccatggtgaaagccacttatactacttggatgcctcttcagtaaattcaagatccaagatg

SEQ ID NO: 387080 - DNA, 576 bp, Homo sapiens
cctttgatcatcaagttgctgtgaatagttcaaaggaaactggaggaagagaagattccctcagtcctaagggcactctatctacaataaaggccaagaaagggaatattgaagttgagtcaggccaaggtggaggttcacattgtcaccatagccctggctcaagcaggaattatctttcaagttgtattcatttattcaacatattttgtgaacttactctatcaaagatactaggttaaatgtctctaaaatctcctgtctttaagtataycaacaccctatcctctaaaaatatgtagactttcaaaacagaacaacaaaaacaaactactgagccaggaggatatggtaagaatagtactcaccactccattttgaattttgtgttcaaagcaatgcttttatttttcttcttaatttgctttgggtaagctatgcctaagttctttctcatctcctgcaggatgaaaatgtttacagcaatgtacccagtcactacaaaacaatttagctgtctcatggaattcattaaaatgtgacttttacctgctcttgattatttcaagaccctcc

SEQ ID NO: 387081 - DNA, 610 bp, Homo sapiens
gtaaagtcacagtatcgaaagaccaaaaaatgaaaaggaattttgagttatattaattatcacatattataactatacatgcatacacatamaaacattatcatggacagttttacaggctagccaggcttggctaggctatagttcccagttattcaataaacattaagcattgttataaaggtatttaggacatgtgattaaagtctgtaatcagttgattcttaagcaaggagattatcctagagaatctgcatgggtctgattcagtcagctgtaagcccttaagagcagggctgcggcctctctaacgaggaagaaattctggtgtggattgatgcgtcagcctgaacctgataattcagccttccctttctgatggcctgccctaaggattttggacttggctaccaaccctcacaatcatgcaaaccaattccttgcaaaagctcacttagtatttccctcctacctgttctgtttctctggttgaagccagactgatacgtgaatctcctccagtaactattagcagctgtgattcttaatattgccttagtaataatttactttaaatgccatagacactagctagctgatcaccaaactc

SEQ ID NO: 387082 - DNA, 610 bp, Homo sapiens
gtaaagtcacagtatcgaaagaccaaaaaatgaaaaggaattttgagttatattaattatcacatattataactatacatgcatacacataaaaacattatcatggacrgttttacaggctagccaggcttggctaggctatagttcccagttattcaataaacattaagcattgttataaaggtatttaggacatgtgattaaagtctgtaatcagttgattcttaagcaaggagattatcctagagaatctgcatgggtctgattcagtcagctgtaagcccttaagagcagggctgcggcctctctaacgaggaagaaattctggtgtggattgatgcgtcagcctgaacctgataattcagccttccctttctgatggcctgccctaaggattttggacttggctaccaaccctcacaatcatgcaaaccaattccttgcaaaagctcacttagtatttccctcctacctgttctgtttctctggttgaagccagactgatacgtgaatctcctccagtaactattagcagctgtgattcttaatattgccttagtaataatttactttaaatgccatagacactagctagctgatcaccaaactc

SEQ ID NO: 387083 - DNA, 610 bp, Homo sapiens
gtaaagtcacagtatcgaaagaccaaaaaatgaaaaggaattttgagttatattaattatcacatattataactatacatgcatacacataaaaacattatcatggacagttttacaggctagccaggcttggctaggctatagttcccagttattcaataaacattaagcattgttataaaggtatttaggacatgtgattaaagtctgtaatcagttgattcttaagcaaggagattatcctagagaatctgcatgggyctgattcagtcagctgtaagcccttaagagcagggctgcggcctctctaacgaggaagaaattctggtgtggattgatgcgtcagcctgaacctgataattcagccttccctttctgatggcctgccctaaggattttggacttggctaccaaccctcacaatcatgcaaaccaattccttgcaaaagctcacttagtatttccctcctacctgttctgtttctctggttgaagccagactgatacgtgaatctcctccagtaactattagcagctgtgattcttaatattgccttagtaataatttactttaaatgccatagacactagctagctgatcaccaaactc

SEQ ID NO: 387084 - DNA, 540 bp, Homo sapiens
tggcatacttatatcaaataaaatagactttaagtcaaaaactgtaaaatgagactaagaaggtacttatataatgataaaggggtcaattcagcaagaagatataacagttgtaaatacataagcacctcatattacagcacttaaatatatcaagcaaatagtaatatatctgaagaaagagatagactgtaatacaatagtatttgacttcaatactccacttctagcaatggagataattcagacagaaaatcaataaggaaacaccagatttaaactatgtgttagatcaactggacctatcagacataagaacattccatccaacagcagcagaatacacattcttytcatgtacacacagaacgttctccaggatagatcatatgttaggccacaaaacaagactaaacaaatttaagaatattgaaatcatatcaggtatcttttttgaccacattgggaaatttgggggtaagtaaaaacatctatttttctaatgttgaaattggtttctgacaatgaaaaggatataat

SEQ ID NO: 387085 - DNA, 623 bp, Homo sapiens
ccatcagtgtgatactgtttaccttcaatctgactgacaaaatttaaaagaatgtttacatcccagaatgtggagaaatgggcttcctcattaattttggggtacaagtatgatttaatgaatactgtcttgagaaataaacttctaaagatgatttaaattacaattacacaggatctttgtgcctgcaatctgactttgggaatctatcttctaaataaaaataaaagtattaggctggtaatactaatgatgagagtgttcaatgttacttgcagtacataaaaactggaactaacttggatgtcaatagggaaatgctgcagagctactataaaacaaacaataatttatgaattagacctgtatcttccaacctggaaggtatcttttttgccttgttttatgttacctgaggagtgcagttttcagagttacgtgcacttatgcttgtatatgtttgatcatcatcaggtgtgagaggataaagatagagtgtttgcacctgagcaygatgaaaattgaagttggagtggtagacgattaacaacagcaacataaaagacaaacttctttatgtgcttggaatattgatatgtgtttctggatttgagaagtagtta

SEQ ID NO: 387086 - DNA, 607 bp, Homo sapiens
tcaggcaattctctgcctcagcctcctgagtagctgggattacaggcacccaccaccatccccagctaatttttgtatttttattaaagatggggtttcaccatctaggccaggctggtcttgaactcctgacctcgtgatccacccacttcggcctcccaaagtgctgagattacaggtgtgagccaccatgcccagcctggatattcttatatgaaatatttgcttataataacccaaacctatggctaacctccattttacaaacagagcacaaaatattgcttgcactgatttaatatatgcttgattttctgagaatgtggccattttgtgattcaaagcaaaggtrtgttttctgttcagaagcttctaaaaattgttcaccatattggaagtcacatcaccatttatgatgttggattctttgcatcatttttttgtcctttaaaaatgttaacactagatgctttaggaattcattactttatactttgacaacacttaatctaaggaatcaaagtgcaagagtctaaaatcaattaaattctcaattatattttaaaaatatatgattaaccccttaattgatagattattttgtata

SEQ ID NO: 387087 - DNA, 579 bp, Homo sapiens
cattttgtgattcaaagcaaaggtgtgttttctgttcagaagcttctaaaaattgttcaccatattggaagtcacatcaccatttatgatgttggattctttgcatcatttttttgtcctttaaaaatgttaacactagatgctttaggaattcattactttatactttgacaacacttaatctaaggaatcaaagtgcaagagtctaaaatcaattaaattctcaattatattttaaaaatatatgattaaccccttaattgatagattattttgtatactgtacaatgactytcattctggacacagtagatggctctttacagtaaatcttaaaaacattttaaagtttgttaatactttctgtttgtattcaactgatgacaagaaagtgaacatcgtaattgctactttggtgaaattgtgaaaataatttgaaagcttttgaatgtatttggaaagctgcaaggaaatgagactaatttctctaaatgaaggacattttatgacttatgaaatattaagcaagcaaacttgcttaccaagaattttccattttcatattctagcaattatata

SEQ ID NO: 387088 - DNA, 566 bp, Homo sapiens
tagtgtgacttgctgtactgcaatattaactttattgcagtagtctgaatggaatccacactatctctgaggtatgcatgtacaaataaatagaataatacaattaatctttagttttattctattgttcatctatatcaccgctctgtaatttttcctaacttgtacagaatgacgtttcttttttttgtattaattacaatattattcactttaagtaggtgcaagcacataactacttcatggtgctgtctaatatagtcattctcaaaccttttcatattcatatactaaatttattagaaatattttctttttattttcccctttatattgcattatgacattatatatgtgggtagttgatattatctatgaatttaatttcaaaatggcaaaatattcataacatttaatttcaggatagtgaaggaggcattagtaaatatttataagaacaagtaggcacctggattagtttaaaattttttaggttggartgtaaatgggacagttgaaaaaaatagaaccaaggactaaactgaataaaacatactaacctgaaa

SEQ ID NO: 387089 - DNA, 507 bp, Homo sapiens
ggtttgttgctcaaaaaagtttgggaaataatgctatatattatttctgtaaatatacagttcacattttggcatactaaaactgtgaaacaaactaaagaaaaaaattaccaaatgttcttaacttggtttttcctaaacttatttaactataacattttttatgaaataacaactcacgtcctctagtctagtgctttaagaaattttggaaaattttgacttagtgtataaaaatctatagagttcatacaaatctctggagagagcgagagagggagaaacacatctttaatcygttttacagcagatgtcagaaaaaaacattaggaacaatagagaactctgaaatctggaacaaaatgagacactctggaaaggcagaccacctatgatcaaggacgactttgaggatgaggactcaccttggattcctgtgcttaagaaaatggacattggaaacatttttgatttatacctctcctcgggagacaagttcagggcttc

SEQ ID NO: 387090 - DNA, 504 bp, Homo sapiens
ccacatgtcaacaatgtggtcatgtcatgctggagtaactttgatttactgatttaatattcttcatattagtagcatgttgattatgagcagcctccttgtagatcttataaaattatgtccttcagagaatataaattttcattatgaaaaattatgtgattctattatttcaatggatggtacccatttttgtaactctgcattctgtttaatgtccaagttaaggttcccactgtaatgccaacgcagagttagcacctgagtgtgagtgcctccttaaattctgcatgtgggtgttttgctgtgtctttctctccttcgtgacactatcacacttatttgggagatcaacttcctcaaagatggctgatttaatacgaagacatctcaattccttaacttgatgccctttctaatcaatcatctttctcttcagccatttgtttytatgtttacaccatagatcttgttactaccaaagactacaccatttccaaggca

SEQ ID NO: 387091 - DNA, 585 bp, Homo sapiens
agttaatgtaattcctttggctttgttcctttatcttaggattgcttgacacatattttagaattataattacttgttaaatcccccccccaaaaaatcagaataaagcaattaccagtggacaaaaagacttaaagtggccatggttaaagacctgatgggactttattatactccacaatcaaaaataaaattaggttatttctgtggcataacattttaacataaccaaaatgatgactaaaaacattaatttctagggagcttatacaattttcatgcaaatataccaataacatatttatataaatattactcaaagaatgttaaatataatttattgacaataaattctgtataattttaacatagcaaataaggccaattagtttaatatatttctcctatgtttccagtggcccttctgaaatgtccaaaagttagtttaaggttgaaaagmcttaatttagttcttggaatttgattttggaaagtctgccaaatatgtaaaggtttataacacttgattataatagaattacagatcattatgagatcatagttattaatttaaacaaaacacca

SEQ ID NO: 387092 - DNA, 555 bp, Homo sapiens
catttgatagcatcgtttaatttctgttttcaagtaattcatctggagtatcctaaatcaacttgaaagtcttattaagacaaatgtaatatgaaacactcctggaacaataatattttgaaaaaaaattattagaaaaattaataaacacaaagtcagaggtcacatttgaaaatctgcattacctcttactgcctttataaatttaactttctggagttttcagtctccgtataatataatggtcttgtatcagtgtaaatatcacaagaaacaagtaaacaaaggaggtaaaaatttggaacatagactataagacaaatagaaaactttttatgttccattgtttcactcaatagggctatttttatgtaaaacattttcaatcaaaatatctagctttgtccacttgaattgcttgggtatgctaagatagttcagctctcaactactgtasctatgggatttctacccccaaacaacattatgaatgaaaacaggtgtttatagagtcagaaaaatatgtgtttaaatcctacctgcaccatttaccac

SEQ ID NO: 387093 - DNA, 582 bp, Homo sapiens
gcactcatagcgatgtccgcatctcaggaggttgggcatttgcttatagttttctagaaactttcctgaggaagttaagtaaataaatactttggtttcatagaatccttactgggtttaatcctggatttttctgtttttgaatcctggctctaacactaaccaactatatgaccttgggaatgctatgtaacctcactaactgagcttccaccttcctaatttataaaacaattgttgtgttttaacaccacttatatatgattgtagtgaggatgaaataaaatattaaatataaatgtcttaattagttccagaaacttaatatatgagaaatattatttattgtaactgtgatgaccatttcttttgcatgctccttatctctctttttgccttataaaaggcaactttatgccaacatttaaaacatattgtttcagcttcccacattaatgactgagaaattacagttaaaatgtatgcagtcacaacaccaaagacactgcatgaaacaaattattaataaacttaacctcratacaattaaaaattactgttctggtgaaatacattgttagg

SEQ ID NO: 387094 - DNA, 483 bp, Homo sapiens
aggtgaatgaatatagaagacacagactggaagagaatatttgccaaagatatatctgatcaatgactgttattcaattatatgaagaacacttaaagttcaataataggaaaaataaccccctaaaatgggcaacaggcttgaacagacaaccaacaaaagaagatatattgatgaaaagtaagcatataaaaagatgtaccaccakagaaatgaaaattagaacaataatgagatactcagacacatctattagaatggtcaaagtttaaaacacgaacaatggcaaattctggggatgatatggagtaacacaaacaattgttgatgggaatgcaaaatggtacagttactttggaagactgtttggcagtttcttacaatgcaaaacataatcctaccatagcaaccagcaatgacattcattggtatttaactaaatgagctaaaaacttatgtctacacaaaaacctgcacacagat

SEQ ID NO: 387095 - DNA, 483 bp, Homo sapiens
aggtgaatgaatatagaagacacagactggaagagaatatttgccaaagatatatctgatcaatgactgttattcaattatatgaagaacacttaaagttcaataataggaaaaataaccccctaaaatgggcaacaggcttgaacagacaaccaacaaaagaagatatattgatgaaaagtaagcatataaaaagatgtaccaccagagaaatgaaaattagaacaataatgagatactcagacacatctattasaatggtcaaagtttaaaacacgaacaatggcaaattctggggatgatatggagtaacacaaacaattgttgatgggaatgcaaaatggtacagttactttggaagactgtttggcagtttcttacaatgcaaaacataatcctaccatagcaaccagcaatgacattcattggtatttaactaaatgagctaaaaacttatgtctacacaaaaacctgcacacagat

SEQ ID NO: 387096 - DNA, 283 bp, Homo sapiens
gtggtttgctatatttatctcaaagctatgcttttgaaaataagtacattctaccttgtcaatttaaaaagagaatttagctgcacttgattgaatatgctagacctggtatacartgttcctatggagacaccaacatttaatgtgcacccccaatttttaagctaataaaacaatatgatgaagaagaagaagatgatgatgatgatgatgagaatccatccatcattccatcacaggtaacattgaatattttgtatgctttaaattttttactcaacac

SEQ ID NO: 387097 - DNA, 390 bp, Homo sapiens
taaatgaactaatgttgtagcactaaaatatgaaaacattcttatttgaccatgagaaatttgcttgcctggcaacaataataaaaagaaaataaacattaaataataaattacttctttaaaagaaagtttttatgcaattctttaatattcatagcgttgtaaaccaaggtgtttaaagctttgtagtgctgcattgtaaaagagaaggaatatattttacttaatttaagaaatgttttgtgatttctttttaaaatcactgtgtattccttagtgctaacatttttctctgtgtatcctctattattaakcaattaatgttatttataattaaatgacactatttagttgccattctatcacataatacttaataaacgaataatg

SEQ ID NO: 387098 - DNA, 545 bp, Homo sapiens
ctctggccaaactcttctctgataattctggccaaactccgtgtctttctgacgatcgatggcctgcggtgcctgccagtgtgctcttcccctggcggattctccamgaccagctgcttttgtcttcttccgctgatgtgttcctcatgacgtccagccacttccgcatctgcccaatagggtctcgggtttttataggcccaggatgggggcgtggcaggccagagtggtctgggggaatgcaacatttgggcaggaaatgcctgacctcaggtaggtccatttgggtggagccccgggcaaagaccatgccctcctctacctagcgcttccctcccctacttctgtatcatttaaatagaggcaaatagagggaagatatttagaataggaataagtttagaattttatacagattttaattctgtttccttcaccaagtaattttagaccctttgcaatagtaatctcaaatactacaaaagcaaaaattattacaaaaaattaagaggaaattgtcaatttatagcaggagggaggagaat

SEQ ID NO: 387099 - DNA, 601 bp, Homo sapiens
tattacaaaaaattaagaggaaattgtcaatttatagcaggagggaggagaatactaggattaagaggagggaaaacttcgttagcttcttcacaaacagacaaaggcrcaacagaagatggttgcatagttctatgggtagtaaaaagtacaaatctcattgttcaagaaggaaaaactcgcatatgactctaggatctgggctaattttcttatgtacataattatacaaaagattttgagctctgtattgaatgttcttgagagtttcggtacagaaaaatttgagaaattccctgtaagtacctatgtgaaattattttatgaaatctaaaagcacaattttagctgtcatagcatacacgtaagttcataggaatcagaataatatgtctattttcagagaatgtgggtaatgtgctcaataaaaggagaaatctcagagaatccagaggagatttcaaaccccagtacctacaggtgcctggaatgtaaatgcaaattagtaacagaagctggttctaataagaattaatgcctctagagtgcttactaggtgaaaggatgtttaacagacttagtgaataaaaataaaaaatgg

SEQ ID NO: 387100 - DNA, 601 bp, Homo sapiens
tattacaaaaaattaagaggaaattgtcaatttatagcaggagggaggagaatactaggattaagaggagggaaaacttcgttagcttcttcacaaacagacaaaggcgcaacagaagatggttgcatagttctatgggtagtaaaaagtacaaatctcattgttcaagaaggaaaaactcgcatatgactctaggatctgggctaattttcttatgyacataattatacaaaagattttgagctctgtattgaatgttcttgagagtttcggtacagaaaaatttgagaaattccctgtaagtacctatgtgaaattattttatgaaatctaaaagcacaattttagctgtcatagcatacacgtaagttcataggaatcagaataatatgtctattttcagagaatgtgggtaatgtgctcaataaaaggagaaatctcagagaatccagaggagatttcaaaccccagtacctacaggtgcctggaatgtaaatgcaaattagtaacagaagctggttctaataagaattaatgcctctagagtgcttactaggtgaaaggatgtttaacagacttagtgaataaaaataaaaaatgg

SEQ ID NO: 387101 - DNA, 601 bp, Homo sapiens
tattacaaaaaattaagaggaaattgtcaatttatagcaggagggaggagaatactaggattaagaggagggaaaacttcgttagcttcttcacaaacagacaaaggcgcaacagaagatggttgcatagttctatgggtagtaaaaagtacaaatctcattgttcaagaaggaaaaactcgcatatgactctaggatctgggctaattttcttatgtacataattatacaaaagattttgagctctgtattgaatgttcttgagagtttcggtacagaaaaatttgagaaattccctgtaagtacctatgtgaaattattttatgaaatctaaaagcacaattttagctgtcatagcatacacgtaagttcataggaatcagaataatatgtctattttcagagaatgtgggtaatgtgctcaataaaaggagaaatctcagagaatccagaggagatttcaaaccccagtacctacwggtgcctggaatgtaaatgcaaattagtaacagaagctggttctaataagaattaatgcctctagagtgcttactaggtgaaaggatgtttaacagacttagtgaataaaaataaaaaatgg

SEQ ID NO: 387102 - DNA, 601 bp, Homo sapiens
tattacaaaaaattaagaggaaattgtcaatttatagcaggagggaggagaatactaggattaagaggagggaaaacttcgttagcttcttcacaaacagacaaaggcgcaacagaagatggttgcatagttctatgggtagtaaaaagtacaaatctcattgttcaagaaggaaaaactcgcatatgactctaggatctgggctaattttcttatgtacataattatacaaaagattttgagctctgtattgaatgttcttgagagtttcggtacagaaaaatttgagaaattccctgtaagtacctatgtgaaattattttatgaaatctaaaagcacaattttagctgtcatagcatacacgtaagttcataggaatcagaataatatgtctattttcagagaatgtgggtaatgtgctcaataaaaggagaaatctcagagaatccagaggagatttcaaaccccagtacctacaggtgcctggaatgtaaatgcaaattagtaacagaagctggttctaataagaattaatgcctctagagtgcttactaggtgaaaggatgtttaacagacttrgtgaataaaaataaaaaatgg

SEQ ID NO: 387103 - DNA, 592 bp, Homo sapiens
ggaagcaatcacctttttttaaggaaataagattaatcctatcataacttacatcctaatccatctcagtgaaggccatagattataagtagacttcagaaataaccctctttacacatatttttattcccacatgattttatatctaccctaatctcctccctgttccatctccctgacatcctaatataaatttaacccatgacattatcacgttttcactgtttgtagtttcaggaggaataagttatgtctctttcattttccgtctctgtctccttgcacataccttcagctcccttcattataatagtctgacataagcaaaaccccagttatgtctggcaagagaatatggctggagaaaaaataaatacaaactttttcagcataaaccacaactgggactccatcattgcttgaaaaccctattcaactatcctctaaaagaagcatttctttccttttctctcttcttcctatttactgtagaaaaatagaaatgattacagtagagctacttcatcatgctrgcacaaaatctatcaggttgcattaatatctagaactctttcctatgtttctccataat

SEQ ID NO: 387104 - DNA, 581 bp, Homo sapiens
ttatttctcaaatgaggtttgtgacgattgtgttggtcttttcttctttctccttttctccttcctctttctcctcccccttctttcttcttcttattagtatacatattcctaaaatcagttactactttttactggcaatggccaaatctctctctgcagttcatacctctcccctgagtttcagaayactcgtggaatttttttttttttttaatcgaagtctcactctgtcgcccagtctggagtgcagtggtacaatcttggctcactgcaatctctgcctcccgggttcaagcgattctcctgcctcagcctcccaagtagctgggattacaggcatggactaccatgcctggctaattttttgtatttttagtagagacggggtttcaccatgttggttaggctggtcttgaactcctgacctaagatgatccacccacttgggcctaccaaagttctgggattacaggcatgagccaccgcgcccggcctaccagtggatccagtggattttgtattctgtttctctctagtataattccaagcacaaagtgatattgatcctatgaatgaca

SEQ ID NO: 387105 - DNA, 581 bp, Homo sapiens
ttatttctcaaatgaggtttgtgacgattgtgttggtcttttcttctttctccttttctccttcctctttctcctcccccttctttcttcttcttattagtatacatattcctaaaatcagttactactttttactggcaatggccaaatctctctctgcagttcatacctctcccctgagtttcagaatactcgtggaatttttttttttttttaatygaagtctcactctgtcgcccagtctggagtgcagtggtacaatcttggctcactgcaatctctgcctcccgggttcaagcgattctcctgcctcagcctcccaagtagctgggattacaggcatggactaccatgcctggctaattttttgtatttttagtagagacggggtttcaccatgttggttaggctggtcttgaactcctgacctaagatgatccacccacttgggcctaccaaagttctgggattacaggcatgagccaccgcgcccggcctaccagtggatccagtggattttgtattctgtttctctctagtataattccaagcacaaagtgatattgatcctatgaatgaca

SEQ ID NO: 387106 - DNA, 581 bp, Homo sapiens
ttatttctcaaatgaggtttgtgacgattgtgttggtcttttcttctttctccttttctccttcctctttctcctcccccttctttcttcttcttattagtatacatattcctaaaatcagttactactttttactggcaatggccaaatctctctctgcagttcatacctctcccctgagtttcagaatactcgtggaatttttttttttttttaatcgaagtctcactctgtcgcccagtctggagtgcagtggtacaatcttggctcactgcaatctctgcctcccgggttcaagcgattctcctgcctcagcctcccaagtagctgggattacaggcatggactaccatgcctggctaattttttgtatttttagtagagacggggtttcaccatgttggttaggctggtcttgaactcctgacctaagatgatccacccacttgggcctaccaaagttctgggattacaggcatgagccaccgcgcccrgcctaccagtggatccagtggattttgtattctgtttctctctagtataattccaagcacaaagtgatattgatcctatgaatgaca

SEQ ID NO: 387107 - DNA, 539 bp, Homo sapiens
gatgaaacaaaacctcactaactgggttgtttaaacaacagaaatttatttcctcacatttccttaggctagaagacagagatgacaatgttggtagggttggtttcttctgaagcctttctttgtggtttgtagatggcaatcttctctctsggccttcagaggaccttccttctgtatctgttatctgtctatatcgaaatattctctcattataaggacatcagtcatgtaggattaggacttaaccctcaggacctcattttaacttaattatctctttatagaccctatctctaaatacagtcatatctggggtactgagggttgggacttgtattagcctgttttcatactgctataaagaactgcccaagattgtgtaatttaagaaggaaagaagtttaactgactcagagttcagtatggctggagaggcctcaggaaacacacaatcatggcagaaggcaaatgggttttttgatatattactaggtcctcgtaaatacaaaacacacaggacaccaaacgaccatgga

SEQ ID NO: 387108 - DNA, 552 bp, Homo sapiens
tctaaagccagaaaaggcaagagtacaaataatcctttacagccttcagatagaatgcagccctgatggcagcttgattttagctcttgtcagaattctgacctgctaaaatgtaagatatcacatttgtttygttttatgctactgagtttgtagtactttgttatggcaacagtgaaaattaaagaaagattttcatgtggggatggagtgctgctgtaccaaatacctaaaattgtagaagtaattctgaaattggcagtaagtagaggctgggtgaattttgagaagaaggacagagaaagcacagattaccttaaatatcctgttagtagaaacagggatgttaacaattctaccagtgagtactcaggcagaagtgaggaacatggtaagggcaacataaatcttcttagagaatacagtcagccctgcatatccaagggacccacatccataattcaaccaacaccagatttaaaatatttttaaaaagttaaaaataacaatatgacaataaaaataaaacaaatagaataatacagtataaca

SEQ ID NO: 387109 - DNA, 552 bp, Homo sapiens
tctaaagccagaaaaggcaagagtacaaataatcctttacagccttcagatagaatgcagccctgatggcagcttgattttagctcttgtcagaattctgacctgctaaaatgtaagatatcacatttgttttgttttatgctactgagtttgtagtactttgttatggcaacagtgaaaattaaagaaagattttcatgtggggatggagtgctgctgtaccaaatacctaaaattgtagaagtaattctgaaattggcagtaagtagaggctgggtgaattttgagaagaaggacagagaaagcacagattaccttaaatatcctgttagtagaaacagggatgttaacaattctaccagtgagtactcaggcagaagtgaggaacatggtaagggcaacataaatcttcttagagaatacagtcagccctgcatatccaagggacccacatccataattcaaccaacaycagatttaaaatatttttaaaaagttaaaaataacaatatgacaataaaaataaaacaaatagaataatacagtataaca

SEQ ID NO: 387110 - DNA, 570 bp, Homo sapiens
agaaagagaatagaaagtgaaaacagaagactgtcaaagtaagacccctggaatactctaatatttttaaaggaagtctgcaaataaggctgagaaagatagacagtgagatcaaggggaattytagaaaacggtatttccccaaaacaaaaaatacatagtaaatactaataagaaagaggatcaagtctatcacaactaaagctactgaatggtagagtaaaagaaaaagagaaattaatcaacactctttgatcaccttaattaatagcaatacagtggggttgtagagacaaacatacaaccagaataaaatgagaaaagcatagccatgaacaagcagaaaatacaaaagaatgagtttagactagtatgtccgaaaaaggtggaaagcatggaataaacttatctttaaatgttagttacattttccaataatttccaatattttaacttgttaattactttatttcttataatattgtttttagcttccagacaccttttaaattgtggcacctctaaatttaaaaccaacatttcagttgtttattcaaaaagaatgtaata

SEQ ID NO: 387111 - DNA, 540 bp, Homo sapiens
tcttcacatagtgatgaagataggccagtcactagcagtgactgttagccctttcataaattcacttataagctgctatatcatgcaaggaagattgtacatagagattaaagcatctctctcagctatttattagaatgtcatttttctgataatgaaaatgaggcatatgataacattctttgaaagtttatgaaggttgactaagacaatatgtgtgaacacaacaagagttgtacacataaggcacttaaacctcacggtgcaatggtcttgctctgtggctcttgtccttcttgatttcttgttctccagcaatgtgtgtaaaacagtgtacttcgcttgaaacaacagtctcctggcttgacttyaatataaaatctcactctgtgtatctcttcatggtattgaactaactagcaaggcggcaagagaaaatgacaatttcatacaaaactcaatgtgttgagataaagggcctgtcagaatctcattccctaagggaagagcaaagcctgcacatcagcaaatgagcagcat

SEQ ID NO: 387112 - DNA, 591 bp, Homo sapiens
atataacaaattgagatttaagaccaaatataaatgctggaaaaagtgtgatccctacatcagtgttaaacttcaagtagagactcaatatatttttgttaattaattatttccacctcttagaaaataatttggattgtaaataatttccttcattgattaacatcattggtaaagatttcagcaaaaattgcaaaatgattactttcttggccttttcaacctaygtccccaatccagagatatctccttaaagcagttacatattattgctgaatcccttggaaacttgttatggtaatcaatgagacaagggcaaaagcatctgccttttttcttattggtttatagaagtcatgaacaaaataatagacaaggagaattgtacaacacagggttgttgccttcttggaatacgggtgatcccagcatctgaaatatagattgagaacagtaggaacctaacccacttatcacagtagccacagggccatccaactacaacgctagcgtcagggactaattctttcctcacacttcatttatagactcaacatgaacaattacttgacagtaccacctcatggcctt

SEQ ID NO: 387113 - DNA, 523 bp, Homo sapiens
agaaaatgacagcatcgtcatcactgactcctaactctaaagacagtacagtttaatagtctataagaactaaaaaaagatgscatttgtaaaaagtttatcatttttaaaggtgccctgtggttctgtttaggggacttttatttaacatatattgttttatttaacactgatttaggcattcaaaaaattaaaaaaaaaagatatgttgtaaagccctggtcataaaatcaaaacatctttgcattttcacttctccatttcctagctaactttggataagtcactttcactccccactttccctccatatatatttgggttattaatagttcctgcaatacgttgtttttataaaattagtgcaaaatattccttggtgcattgttggcattcagcaaacattagattatttggatagctcatctgaaaatgatctttgaatcagacagaatctgaaaataatattaaccataaagaaagattcagaaatcatgaattatgttcttagggcattattggg

SEQ ID NO: 387114 - DNA, 565 bp, Homo sapiens
gtacattgcaaatccaaccattagttttgaatttaaagaagaaagtgatttttgctatcrgaacttccatatttaaaagttcatgggcaggcaggcagggtggctcacacctataatcccagtctttttggacgctgagggggtggatcacctgaagtcaggagttcgagaccagcatggccaacatggtgaaaccctatctgtactaaaaatacaaaaattagccgggcatggtggcacgctcctgtaatcccagctattcaggaggctgaggcaggaaaaacgctcgaacccgggaggcagaggttgcagtgagctgagattgtggcactgcactccagcctgcgcgaaaaagtgagactgtctcacaaaacaaaacaaaacaaaaaagttaatgggtaagtgggaatttcaaaatgaattgccagaagaagaaaggaatgaaggcaatatctaaacaggtaaagacattgagtagattctcaccttttgtaaagaaacggtttcactagttacaaaagaaggcaatttcacatcttacctttgtttctcttaaacaattgta

SEQ ID NO: 387115 - DNA, 591 bp, Homo sapiens
atataacaaattgagatttaagaccaaatataaatgctggaaaaagtgtgatccctacatcagtgttaaacttcaagtagagactcaatatatttttgttaattaattatttccacctcttagaaaataatttggattgtaaataatttccttcattgattaacatcattggtaaagatttcagcaaaaattgcaaaatgattactttcttggccttttcaacctatgtccccaatccagagatatctccttaaagcagttacatattattgctgaatcccttggaaacttgttatggtaatcaatgagacaagggcaaaagcatctgccttttttcttattggtttatagaagtcatgaacaaaataatagacaaggagaattgtacaacacagggttgttgccttcttggaatacgggtgatcccagcatctgaaatatagattgagaacagtaggaacctaacccacttatcacagtagccacagggccatccaactacaacgctagcgtcagggactaattctttcctcacacttyatttatagactcaacatgaacaattacttgacagtaccacctcatggcctt

SEQ ID NO: 387116 - DNA, 591 bp, Homo sapiens
atataacaaattgagatttaagaccaaatataaatgctggaaaaagtgtgatccctacatcagtgttaaacttcaagtagagactcaatatatttttgttaattaattatttccacctcttagaaaataatttggattgtaaataatttccttcattgattaacatcattggtaaagatttcagcaaaaattgcaaaatgattactttcttggccttttcaacctatgtccccaatccagagatatctccttaaagcagttacatattattgctgaatcccttggaaacttgttatggtaatcaatgagacaagggcaaaagcatctgccttttttcttattggtttatagaagtcatgaacaaaataatagacaaggagaattgtacaacacagggttgttgccttcttggaatacgggtgatcccagcatctgaaatatagattgagaacagtaggaacctaacccacttatcacagtagccacagggccatccaactacaacgctagcgtcagggactaattctttcctcacacttcatttatagacwcaacatgaacaattacttgacagtaccacctcatggcctt

SEQ ID NO: 387117 - DNA, 573 bp, Homo sapiens
tgtagaaaaatttatggcttaatttataaggaaactatcagaaagtaaaatttctaaactagctatgagacatagtgggatttagtcctttgaaattcataataatgacatccagaagtaacattatggttctattaggaaaaatgtaaatatcctaaagaaggaatcttttaaaatatcatttaagatgatttttagatttttattcaaatatatttaaataaaactaggcaagatttttatatcaaaacttctctttctctctttccatcacaagcacatacaggaggctttggtcctgcaattgatttttaatgaggcaaatccctcagatttagagtagaatccctaaaggccctctatcaattcctttttattaagctaatgactttttaaatgaattattttaggsaaaagaactaatgggcttacgaatgttgttttcaccccaggtgaaaaatcttcaggcaagatatgatttaagaataaataccttttttatttccaagcaaattgctttttaattattattatcaaaatgagctggggctaagagcaacttctgagggtctt

SEQ ID NO: 387118 - DNA, 628 bp, Homo sapiens
aggggacatgctttattgatgcaacttctgtttcattttggtttttaaatcataaataaaaagccacattgaaaatatgtatatataataatcatgtgttcatgtctatggtgcaattttctcctaaaataatatttgaattaaatcaaaagtttttattttttatttgatttagatgtttaggtccatcttgtgtcaaggaaattgaattcaaactcttcaagtagaagcctcttctccatacctgtttttctatctccctcaacaatggcgaaacaagctgtatctcagaaaataaatctttggygcataagcctactttatgctgcaatatactttccacttatgtgaaggagataatttaatgagtgtaaagatcacaggctctgggagacaggtagctcatctattagctctgtgacaatgaaaacattactctttgatctcttttctcatcatctgttaaaagagctaattatacctactttatactcttgtaaaaaaataagccttggatttgtgcaaagcatcaagcaccatgtatagaatagttctctattttgttcatctatgtattttcatcacctagaacagagctgagtacatagtatcattattagttttgatt

SEQ ID NO: 387119 - DNA, 526 bp, Homo sapiens
tgatagcagctattttaataccttttgggcataaaatacatgaatctttacttttatcatattttaatgatccatgcaaaagttacaattcttttaagagtttaataaagaaagagaagcctaacctaggtttttttatagtatgcctacgagaattttatttttacaactctctataatttacattttgaaatcccttatttccaaaattataacagtgataaataaggtttcccagagaaatgcaactagtttctctgttcccaatttttaaaaaatgttagaaagatatagcttcaatagtgtgtttgatcatcatgctaggaaaagatttttgaaaaattatattttattttatttttattgaagggaaagcacagtcatraggaccagtagaagattttccaaagttatatgacatgacagagagagttcagaatcctgattacctagctcttctcactgtatttttatcacctattagtttcaaccgacatcaaatgccacccagttaatatattccatc

SEQ ID NO: 387120 - DNA, 620 bp, Homo sapiens
gtagagccaaatcttctttactaaggtaacatttaagtggttatgtgaatacagtgagaaagagttgagccatgcaggtatctggcagcaggacattcaccatagtgggagaaataaggaacacagcatgatgcaggattacgatgtgtttcacatattccagaaacagcaaggaggccagtgtgactagcaaatcttcataatgggcatttataaactgatgtatgcattacaaaattagtttactctgtaaatgaattcagttctttgtttctcaatcattatcacaaaatatctcccccaaagttgcctgaaatcctagatgctgcctagtatttaagtgcctactctgcacaaaataaactggttattcaattctcaatcttgtcacttgctctgtgcccagaggacaattattcatctgctctcttrttatgtcaatcagatattaatttgcttacattcatatagttaatcaatacttcatcttttggtctgccaatttattgtgtgtgtgtgtgtgtagtttctgtttggctttggttgtgctttttctttttcttattccctcaaatttcctgcctcccattggcttaaaagtttttattttctcttttgta

SEQ ID NO: 387121 - DNA, 576 bp, Homo sapiens
aaaactctgtctcaaaataatatcaataataatcacatttacaataccatttttgtccaaccacttttctacacaactatccacttctttcatcagacttagcataaaagtacatagttttctctcggtctttgggttttttctgaagattttcatgtgtaatgtaaaagtttgttacattaatttgtcattgctttctcttgttaatctgtcttttgttaatctgtcttttgttatagaggtgccagccaagacccttgcaatgtttgaggaaaagatactacattttcttccctacacgcatattttacatttaaaaaaatcaaacattcaaatggttgtgtcaatgtattttcttactacaaatctgtagaagttttaatttttccatatccttgccaatatttgtactgttgaytttcttttgctttagtttttttgtcatttcagtaggtgtagattggtatttcatcctgattttaatttgaatttcctgaaggcaaatgatgttgaccactattatgtacttacaggccatatgttttcttatatactcatttgtgaaacttctattca

SEQ ID NO: 387122 - DNA, 581 bp, Homo sapiens
tcaggccattgcttcagatggtgcaagccccaagtcttggtggctaccacaaggttttggtcctgtgagtaggcagaaggcaagagttgaggtttgggaccccctgcctagatttcagatgatgtatggaaatgcagggatgtccaggtagaagtctgctgtaggtggggaatcctgatggagagcctctgctaaggcagtgcagagaggaaatatggtgttggagcccccacagggagtgcacactggggtacttcctagtggagctgtgagaatagggcaacagttctttaaaccccataatggtagatctactgatrgtttgcactgtgcacccagaaaagccacacacactcaatgctagctcgtgaaagtggccatgggggctgtaccctacagagccatagaggcagaacgtctcaagacccttgggagtctaccccttccatcagcatgccctggatatgagacatggagtaaaaggacatcattttggagctctaatatttaatgactgcccttctgggttttgaatttgcatctggcctgtagccacttttttggccaatttatcccatttg

SEQ ID NO: 387123 - DNA, 538 bp, Homo sapiens
tcttggggatgatcttctcatggagtatcttactggggttctctacatttcctaaatttgaatgttgtcctgtcttactattttggggaagttctcctgaatgaattcctgaagtatgttttccaacctggttccattatccccatcactttcaggtaccccaatcagttgtagattcagtctcttcacataatgccatatttatcagattttttttattccttttcattcttattttctctcttcttgtctacgtgtcttaattcagaaagccagtcttccagctctgatattcttttttctgcttggtctattctgctattaatactagcaattrcattttgaagttcttgtagtgtgtttttcagctctaacatgaccttgcagtttctaaacacaatgctcagtcataaactcttacttagatatgaactagtgatatcctttcttcaacttaccatatcactggcttggcttggggacatacactttttgtcttatatcactggctgttctttctcagttttattagctacca

SEQ ID NO: 387124 - DNA, 495 bp, Homo sapiens
tttccagtgcctggctactggagcataaatggtttcttcagtgccagattcctgtagtataataattttctccagcactgggatcctgcagagcattatggttatttcagtaccagaaaaaaagcttctcctgacctcactcttagggaattctatttgtgaatatgtttccccaacatcctaaagggtggattccagtctggcccacaatcagagcacctaagtgacttctctgccattcagtgcaccacagacatgcactcaaaaacaagatattatttgccatattcaagttattgatttgcaataatttttagaataygtttaattaggaaactccacttttgtgaacagaaaacaatattattaaatattttaaaatatagctgtcatgggcatattttatctatcttttcatgtacttttaaacattacacatttgtatcaaatggactaaacacttttattattcttaacaatgactcccatacaatc

SEQ ID NO: 387125 - DNA, 294 bp, Homo sapiens
tcgttctcttaagagaatctgtcacagaacaaaagatttttcacagaacraaacttaccaaattttccttgactcgttatgcttttggtgttgactttaagaattctttcctagctctagctcccaaagattttctcttactttttttcctaaaatctttatagttttacattttacatttaagtttgtgatccgttttgagatactttctgtataaggtgtgaggtttaggtaaaggtgggtatttttggtttggttttgttttatgtttgttttgccaatgaatgtttagtt

SEQ ID NO: 387126 - DNA, 558 bp, Homo sapiens
gcattatggtcagagctcatgctccagaaatggacacacttggattggaatcaggctttttcttggttgtatgactttgagcaagtaatctaatttccataaagctcagtttattcatctagaaaatggaaataatagtgtcaaaggttattttgaagaatacatggaaaaatgcatttaagactcttagaaaaaagtttggcatgaggtaggtgtatattttttcttgaaaaagaaaaacgggcacaaaagacagtgtggtatcatgtcagagataacataggatttgcggtaacagagactacttaatggctagtgagagtgaggaggatgttatggaaaaatgtagaaaatcacttgcatcttaaagaacagttaggattgcaggtggctgagggaaaagtaaggaagatattccagaggaagaaacggcatatgcataggcaaggggaagaatgcaggctgtgttcatggactgtagggagacaagatggcaagggtgaaggcggactgagatgcgtgcgtgcccctgaygagctaatcatttgactccttaaa

SEQ ID NO: 387127 - DNA, 601 bp, Homo sapiens
cacatggtcatttcctagccgaaaggagggctaccgttttccttaggttttttttttaacataagaaataactcctccctatcatcatattccccagatatagctgtattttcaactaccaaaaaccaaacagaatgatttttgtttccttaagagtttagaaattcttgtgaaacaaaataatcaggaagaaaacaaaagttcagcaaagtagctaaaatctgtacttcaaaaaacacaggtagaaaacattttggttaagtgtgctggggtgctggtgaatgtggaggacgggctttgaacaatgcagtgggttaactcagtggtgttgctacccyttgtcctggttagttcaaatggttaagacaatgcagagggctaggatttttcctgtttcacctctcctctttcccagaaactatctggagcaggttgattcactagagattcctaatcctccttggcagaaagagaaatgtgaatttgacaaataatatgcataaaatattccttaacctggaaacattaggaggaaataatcaattcagaagaactgaaataaaaaactaaacatagaaaagtgctgctgccaggcagctgt

SEQ ID NO: 387128 - DNA, 617 bp, Homo sapiens
agaatttaaaataattatatggtagtattgtgagcaacctcacaccaacaaatcaaataaattaaatcacagacaaattcctaaaagatacacatcaccaaaactgactcaggaagaaatagaaaggatagaactataataagtaaggaaatcaaattagtattcaaaaatcttcccacaccgaaaagcacaggcccagatggcttcacttgtggattgcatcatatatatataaatccttcattaagccattctgaaaatagagaagggaacacttctgaacttaggatactaatgccagacaatgatattacaagaatgtcctcatgagcatagatgcacaaatccttaayaaaatattagcaaattgaatcctgaaatataaaaaagataatgcaccatgatcaggtgggatttatcccattaatgtaaagttggttaacatctgcaaattaatcaatgtaacataatgtattaatagactaatgggcaaaaaccatgttatcatttcattaggcaaagaaaaatcatttgacaaaatcatttgacaaaacccaacacccatccatgataaaaacttcaacaaataggaatagcagaaaatttcctcatcccga

SEQ ID NO: 387129 - DNA, 474 bp, Homo sapiens
gatggggctgccaagtttccactaggtgggaatttctgatgcaataaatgacacacctaaaacaataactgaatctaaaacactaccaccctaaaaatgcctttaaaacatgaaatttctgtaggataataaatcatacaggaacaaagttaaaattcaagcttatatgtgttagcaaaattaggtacgatatagtccaatttaaatgyttatctaataatgaataagcctaatatattgggttacatgcatacatttaaaatgtgagaactactctaggctccaactagagctagaaaattacctgcttctatgttatagtgactgcagtttttaaggaagaaattctaaacacctcatttctcagcaaaccaacaagatgtagtggaataaacacaagcttcagaggcagatgtggcttcaaactccacctctactacctagcgacaatatgacttcactggttgtaaatgt

SEQ ID NO: 387130 - DNA, 634 bp, Homo sapiens
ccagtggtttagagattataaatgtattaggtccaagtgccattttgcacactkatgaatagtgccactgattcaccagccataagggttataaactgcatgcctaaaagctgtccagcaataatatgagtaaaacgtattaggactgactgtggcaaatcgagtagcctgcacctctaaaaccagcaagccctactcagccccaggcaatgttgccatatggagtacagtcctaatattgccacgttgtccaatttctctaaaaggtagaaatttatattttcatttaatcttctaacttaaaaatgattggcaagttatttgagttttttataaaacatggtgtgggccaaacacacaccaatccatggaaggacttagaactatgagaggcagcttcctgatgggttttcataactgtagtgcacatggtaagtccttgatggaatcttgattgcaaaaattgaggaatcatagttaattgaaagattgaggcaatagtctaaaatagatgtgaaatcagtatgttgaagagatatctgcactcttgaagctgttcattgcactgttcattgcaggactatttacaatagccaagatatggaatcaacttcaatgtccatctatatatgaa

SEQ ID NO: 387131 - DNA, 607 bp, Homo sapiens
tttaattaaaattgtgacatttgctttgaatacctataggaggtcatcatttaaataaatatatatacatagttgtatttagatttgttgtgtttaattgcgtttagattaacttagttgcatttgacagaaccttccaatattttaaatakggatacacactcacacatgtatacttacaaattataaatatataaaatttattttacaagtattaaaatcccaattcaaagtaacttaaacaaaaaaagaagtctgtctatatgttttcatcataaatagcagtaagtcctgcagatagttgcagctccatcagagagtggtttgagtttttcctgactgctttggattctgattgataaagaaatgcatttgtctccctccttctcgtgattggatattactaattttttaaaaacttttattttgattaaattagttttaagttataaatttttctattagttatatttaacatgtcttcatatagttattgtttaaattttctgttctggaattgcctgtacatacaatttgcccatttctctatttaatggtgtgactttttcttacttttagggaataactttaatttatcagaattgaa

SEQ ID NO: 387132 - DNA, 607 bp, Homo sapiens
ttgattgaggaattgccagggatgggaataaaccttcatagttaaagatatttgtagaaaatkttgtgcatttctgccatgttgtacaatctaatggtatattctcctctgtctataataatttacattctggcaaatttgggatccaacatttgtcatgattgatgttcagctttatactagagtgttctgttaatacatctttatgtatctcatacatacttgcattctttccagcatacttttaggcccagtagagtttagtaataaaactttccctatgttatcagcaccaatatctatagcatcaaagcaattttcaaatcattctagtcatttattccaagagcttgctgtagtaccaacataaatgcaatcagaaatgggcacgcctttacctttctggtcaacctgcctccaatgtatacatactcgtccctttgcatgcagttgcaaagtcattaatatctgaaacagcacattcttatatgacattgtggaagtttgtgtcatatagctgtgaaagatgcttggaaacttacccttgcaaaccaggtttcttatttgcttcatagtcgaacactgagaagcttgttgagagattgcc

SEQ ID NO: 387133 - DNA, 576 bp, Homo sapiens
ttgtgttcttattttcaagactctctagctttctatggagagggtctgtaaagcagatgttctggtataaatccatgtgcctggaattattttactccctctggtaagtcatccttctccaatccctttccaggwtgtactccttttcagaaatgtgaacacatttgaacactatatattggggaaagcagaaggcaccagcagtagagcatttccatgcagtctccaatgcccatatccttaatctttaaaatgaacaagtcttcaaactgagctaataaaaaaatgagttcacagaaaattatctcacagtgaaagaaaggaaaagtaaggaaagtccttgagttgcaaagtaacatataaggtactttaggacaacatctagaactggtctgttttcaaggagctgctgtgacctccctgatactctctgtgccttccaggcactttcagcagaaggggcatgagatgacagctgccatcatttgctcctctctggcggattgatgagaaaagtatgtcctgcctatccctggttttgccataccagcagccttgccattcctcggctcacac

SEQ ID NO: 387134 - DNA, 618 bp, Homo sapiens
gtaccttatcactgttgatgttaaccttgatcacctggcctaggtagtgtttgtcaggtttctctgctgtaaagtgactctttttttaaaactccccatcttgtcacactgtacttttggaagaaagtcatgatgtgtagcccatatttaatggttggggagttatgctctacctccttgagggcaagtatgtccacagagtatttgggatacttctgcacagaagatttatttgttctctttatttatggattgattcagtcattgatttaagcagtatagactatgagtgttttatatcctggttagtaacacaatctgtttttttttttttttcacaactagatcaaaagttcctaggtgcttaraactgattcatgcttctacgcccccctgcttgcctgatgcaaaacagattacccccaaaatagacatttgttggttgatagaactaaagtaagaattaagttcccaatatctgtaatgatgtcccaaagcagtctaattgatctgttgacattatcttactatatttaactgcctttctgaaaatgttatctgaggttgaaagacccttagaaatcatctagtacaacccttttgcttacaatggtaaaa

SEQ ID NO: 387135 - DNA, 618 bp, Homo sapiens
gtaccttatcactgttgatgttaaccttgatcacctggcctaggtagtgtttgtcaggtttctctgctgtaaagtgactctttttttaaaactccccatcttgtcacactgtacttttggaagaaagtcatgatgtgtagcccatatttaatggttggggagttatgctctacctccttgagggcaagtatgtccacagagtatttgggatacttctgcacagaagatttatttgttctctttatttatggattgattcagtcattgatttaagcagtatagactatgagtgttttatatcctggttagtaacacaatctgtttttttttttttttcacaactagatcaaaagttcctaggtgcttaaaactgattcatgcttctacgccccsctgcttgcctgatgcaaaacagattacccccaaaatagacatttgttggttgatagaactaaagtaagaattaagttcccaatatctgtaatgatgtcccaaagcagtctaattgatctgttgacattatcttactatatttaactgcctttctgaaaatgttatctgaggttgaaagacccttagaaatcatctagtacaacccttttgcttacaatggtaaaa

SEQ ID NO: 387136 - DNA, 588 bp, Homo sapiens
gagccttttgcaatcctctggctcttaacactccaaatgatttgattatgtttgtttatataatagttgcaatattgattcaaactagaggtgrccaggaagggtcaaactgtgctttatgtttccctgtagtcgtatagatcatagcctattacttccacatcatctagaggaaagaattgccatcatctttctaaaaccaaaatgcattgcaaaaaattttatagaccttaagagagctttgacaaaattggttggcacagtagtaatttggttttcatgaagtagttttctttcatgaataaatagcattgtgtttacacacagaataaagctcactgaaaatctttctatttgtttttgacaaattcactgaaaaattgacaaaggaaacatttattttagacactgctagccaatccaataaagatcctggtgaactaaacttttaagatttttttggccgacagactgaaaggttgttttcaatacttctttatgtttacacatcaaacacccatagatgtactgcagtctataatatataacccttgcattaaagaaaccctctagcatgaaggaccaagt

SEQ ID NO: 387137 - DNA, 588 bp, Homo sapiens
gagccttttgcaatcctctggctcttaacactccaaatgatttgattatgtttgtttatataatagttgcaatattgattcaaactagaggtggccaggaagggtcaaactgtgctttatgtttccctgtagtcgtatagatcatagcctattacttccacatcatctagaggaaagaattgccatcatctttctaaaaccaaaatgcattgcaaaaaattttatagaccttaagagagctttgacaaaattggttggcacagtagtaatttggttttcatgaagtagttttctttcatgaataaatagcattgtgtttacacacagaataaagctcactgaaaatctttctatttgtttttgacaaattcactgaaaaattgacaaaggaaacatttattttagacactgctagccaatccaataaagatcctggtgaactaaacttttaagatttttttggccgacagactgaaaggttgttttcaatacttctttatgtttacacatcaaacacccatagatgtactgcagtctatratatataacccttgcattaaagaaaccctctagcatgaaggaccaagt

SEQ ID NO: 387138 - DNA, 580 bp, Homo sapiens
atcacccaggtactgagcatagtactcagtagttagtttttcaacccttgccctctctcttccttcccccctttagtartccccagtttctatttttgccatctttatatctatgtgtacccaatgattagctcctacctgtaagtgagaacatgtggtatttggttttctgttcatgtattaattcacttaggataatggcctccagcagcatctatgttgctgcaaagaatgtgatttcatccttttcatggctgtgtagtatttcatggtgtatatgtactacattttctttacccaatccatcactgatggggacctaggttgattccacatctttgctattgtgatacatttcctttttttaactttaactccattaccctatttctggtctttttaccttatatattccaaaattacatttccatttttatacctcgctcatttaaacaaacctgtcttccaggcaaactggtctactcaccacctgttaaatatgcatgaaggtccttctgcttgagttattctcttcacttgaatgtgctcttctcttgcagttccaatcatctatcctgaa

SEQ ID NO: 387139 - DNA, 497 bp, Homo sapiens
atttacagaattgtggaatgactgaacactttggttttaaatctatttggggatatatgacaagtttgggaattatccttggtatatgttaaaacagagtttaaatggcattctctttttttaaaaaaatttattttatcttgagggagtgcacgtgcaagtttgttacctggatatattgtacgaagttgaggtttagggtattaatgatcccatcacccaggtactgagcatagtactcagtagttagtttttcaacccttgccctctctcttccttcccccctttagtagtccccagtttctatttttgccatctttatatctatgtgtrcccaatgattagctcctacctgtaagtgagaacatgtggtatttggttttctgttcatgtattaattcacttaggataatggcctccagcagcatctatgttgctgcaaagaatgtgatttcatccttttcatggctgtgtagtatttcatggtgtatatgtac

SEQ ID NO: 387140 - DNA, 455 bp, Homo sapiens
ataagtttaaggggttaagagtttaatgggaaatggagaattgataatatgaggactactcattcaagaagcttggctgaaaagaatgagatcaggaggacrgtatgtaagagggatcacaaagtaaaggaaacttaaaaaggtgaaaacaaaaaacctatagataagcctgatcattttaataagctgagagatagtgtcagtcgtgaaaaagagactaagaattcggtgagagaaggagaatggagcagagtggaaggtgtcaagagcaaaaatagacaagttgtccttgaataaaatgattccttgtccaggagactggaaggaagaggaaaagatggatggaaacgcggaccctgttagaagttaagtacttgagaggagagtaaagggcagccagatgagagaggcagaaaaacaaaggatcaataaataaatacagtactgagccagat

SEQ ID NO: 387141 - DNA, 593 bp, Homo sapiens
cttctcctgttcttggaggtcctgattctcaggccttcagactttgaattcttttgcaccatgaactctggctttcaggccttcgaactatgccactggctttcctgtgtctycagtttgcagactgcagatcatgaaatttcttacccttcataattagatgagccaatatcttataagaaattatctatctatctatctatctatctatctatctatctatctatctatctacctacctatctagctagctagttatctctatccatatccatccatccatccatccatccatccatccatccatccattcatccatccatttgtccatccattttttctgtttccctggagaattctgattaatataaaagaagaatagggctaagcatgatgactcactgtaatcccagtacttcgggaggccaagggaggaggctaggagtttgagaccaccttgggcaacaaagtgacacctatcactacaaaaataaaaaattagccagatatagtggctcatgactacagtcccagctacttaggaggctgaggcaggaggatcacttgagcttagcagtttgaggctgtaatga

SEQ ID NO: 387142 - DNA, 508 bp, Homo sapiens
ccgttggggagggaggtgagatcccaggaattttttaaaggttaaggtgaaaaacattgcagcatatttgggggttgatggaagctaactagtagagaaggataaattgatgatgcaggagagagagggacaattgttggagcattgctgagacataaatgagaggcaatgagatgcagacacaggtagaggggytgcccttgggaacacaaacaatccatctatagttgcaactctaaagctgtgaagaggctggaatgctaactgactggtgtcagggacactatttattctggaccttcacttagtactgctaagcatagtatacgtcacagtaagtaatgattaataaagttgaacacagaaactttatacagtgaattgcatttcagctgtcaaggagaagacaactgaatcactgaatgagcaatgctaataaattgtgacaattaaaaatctgtgtggtaagctatgaaatcagtatttagtgtgactttcactttcagaa

SEQ ID NO: 387143 - DNA, 508 bp, Homo sapiens
ccgttggggagggaggtgagatcccaggaattttttaaaggttaaggtgaaaaacattgcagcatatttgggggttgatggaagctaactagtagagaaggataaattgatgatgcaggagagagagggacaattgttggagcattgctgagacataaatgagaggcaatgagatgcagacacaggtagaggggctgcccttgggaacacaaacaatccatctatagttgcaactctaaagctgtgaagaggctggaatgctaactgaytggtgtcagggacactatttattctggaccttcacttagtactgctaagcatagtatacgtcacagtaagtaatgattaataaagttgaacacagaaactttatacagtgaattgcatttcagctgtcaaggagaagacaactgaatcactgaatgagcaatgctaataaattgtgacaattaaaaatctgtgtggtaagctatgaaatcagtatttagtgtgactttcactttcagaa

SEQ ID NO: 387144 - DNA, 508 bp, Homo sapiens
ccgttggggagggaggtgagatcccaggaattttttaaaggttaaggtgaaaaacattgcagcatatttgggggttgatggaagctaactagtagagaaggataaattgatgatgcaggagagagagggacaattgttggagcattgctgagacataaatgagaggcaatgagatgcagacacaggtagaggggctgcccttgggaacacaaacaatccatctatagttgcaactctaaagctgtgaagaggctggaatgctaactgactggtgtcagggacactatttattctggaccttcacttagtactgctaagcatagtatamgtcacagtaagtaatgattaataaagttgaacacagaaactttatacagtgaattgcatttcagctgtcaaggagaagacaactgaatcactgaatgagcaatgctaataaattgtgacaattaaaaatctgtgtggtaagctatgaaatcagtatttagtgtgactttcactttcagaa

SEQ ID NO: 387145 - DNA, 555 bp, Homo sapiens
gccatctctgtactaacccgctggtcctagtgagaaccttgagagcagcatcttttctgctggttatgattttcatccttactatgccctgctccactctactctcttatctagtttatttctatacatcctttctctctaagcacaaatgttacattttaagggacactcctgtgaattcaccaaagaggtggattcccgttatccttacatgatcccatatatcttatgtgaaaattgtgacattatatttgtttttatgattatctgatggatgtttgtctcccgtcctagactctgaatttgaaaagaagyaaggattctgcatgtttgtttgtaattattcatttaaaattcaataaaatttaaaatttgtgtatcctctacaactaacatcttgcctggcaccaagtagatgcctcataaaacattgttgaataaatgttttgtcctagctgagaatgagattgattagtcagaaatcaaaatataggggattataagctatacagtaagaaaaacctaagtacatacaaagtaaaagagaaaaagaag

SEQ ID NO: 387146 - DNA, 593 bp, Homo sapiens
aattggcaatgccctgagggagctgttaaacacccaaagaaagccaagaaaagaaaaagaagagagatgccagaggacagccacacaatgacattccataagggtaaggaaaatgctgtctaaatacccttgatattgattgaggtaataaattaaactttcagattccaaatcaatacctgaaatgcagtgctgagttaattctagcgcagttaaaagaaaagtggtcataaataaaagaccagatcacattcagtattaataactctcctatccaggagtgaattaatggcactcagttccctattacataaattaataagataagtaaaaaaaaaaaaaagagcatatattattgttcaatgaggctttcttaaatgcaaagatttctcttcaggaagggctactcacccataaagaamttggcagccaggatgcaggaatcggcctgttgttacgacagagatgggggaagtggccacttaggccctttgctctgggctcttttttgcatagaatgttgatttttaatcttatctcttcctttcattttctctccaagcctgctcctcccgctttaatctctagctata

SEQ ID NO: 387147 - DNA, 388 bp, Homo sapiens
aatgtacaatgtcatatattcaccttatattgtcattcacaatagcttcactccactaaaaatcccccatggtccacttatttatccctccatcccttccccaaaccctgaaccatggcaatcactttttttttttttactgtatccatagctttgcttcttttaaaatgtcatgtaattgaaattatagagcatgcagccttttcagattagcttctttcaattaraaatatgcattaatgtttccttcatgtctttttgttccttgatagatcatttctttttattgctaaagaatattctattgtatgaatgtactacaatttgtatgcccattcacttactgaaggacatcttagttgcttccacattttggcaattatgaata

SEQ ID NO: 387148 - DNA, 281 bp, Homo sapiens
ttgtagttttgcttttatgttcattttcaatctcaaattacttttggtgtatggtgtgaggtaaaggttgaagctcatctttttgcatatgtgtatccaactgttccatgtgytgaaaagactttctcttctctgctgagttgtactaagaaaagcatagcttcgttattgtggtattcgtgccaaaaataattacctgaatctgagtttggtcattaggaaacattaaatggaccaaagatgaatgtcatcttacagaatgtaaggcttgtgctttttaa

SEQ ID NO: 387149 - DNA, 281 bp, Homo sapiens
ttgtagttttgcttttatgttcattttcaatctcaaattacttttggtgtatggtgtgaggtaaaggttgaagctcatctttttgcatatgtgtatccaactgttccatgtgctgaaaagactttctcttctctgctgagttktactaagaaaagcatagcttcgttattgtggtattcgtgccaaaaataattacctgaatctgagtttggtcattaggaaacattaaatggaccaaagatgaatgtcatcttacagaatgtaaggcttgtgctttttaa

SEQ ID NO: 387150 - DNA, 281 bp, Homo sapiens
ttgtagttttgcttttatgttcattttcaatctcaaattacttttggtgtatggtgtgaggtaaaggttgaagctcatctttttgcatatgtgtatccaactgttccatgtgctgaaaagactttctcttctctgctgagttgtactaagaaaagcatagcttcgttattgtggtattygtgccaaaaataattacctgaatctgagtttggtcattaggaaacattaaatggaccaaagatgaatgtcatcttacagaatgtaaggcttgtgctttttaa

SEQ ID NO: 387151 - DNA, 529 bp, Homo sapiens
ccatcatttgtcatcttggtgaggtcgttctatgaatgtgtccccttctctgagccagaaagagaatccagtactcccaattgcagtgtttctcaaagttttcttctatacagtaaatcttataaaggtacagaaagggcaacttgaaatacttaatcaattttactttattttatggggaaacatcttayagtagtgcagcatttgtggattgaagattaaaaagttctccagtatatctctttcagatatcaagagtatattgtttctggtttatactagaatatgatattgtgaatgtatatttgaagggaaaatagaaaatattcaacaaaaatagtaatcttgagaaaggaaagcatgccatcttttcttcctttctaatcctaaatctcttttaggaaatcattaaaacccagccttctccttaaagacttctaacatactgaattttcatggtaagcgctccctttttataattgtgaaacatttgcaattattttggtgcctgatattacggtttctgttg

SEQ ID NO: 387152 - DNA, 530 bp, Homo sapiens
tactcatttaaaaggagaaataatctttaatattggaacaagtaatctgtggtttgggcttaataaggacaaaattttttttttctgttgtttgagaagtcctcttattgtctcagttctataaaatcacagctaatatcacacacccttgtcattcagaatgttaagtattattaggcactgaaggagatctctgcttgaattctccaactttatttcactctttaatatcaggaagtcctgttattttcggggtagtgttgttaatatattgtttatctttcccccctttctcctctccatgtgcagttttcttccatttcaggccttccaggccaggcactcatgttaactttacatgtagtttatcgactgggtatctacacatttatttgaattctcttgyggcatctgaccatctcatagagttcaggtggagaagacaagtacttttgctcagacaggacactagcaaaaaggatgagaatgtttcaagccagtcagaggttgcagtaaagtaaggtgagggt

SEQ ID NO: 387153 - DNA, 598 bp, Homo sapiens
tttattgatttgtgtatgttgaaccagcctttcatcccagagatgaagccaacttgatcgcggtggataagctttttgatgtgctgctggatttggtttgccggtattttattgaggatttctgcattgatgttcatcagggatattggcctgaagttttctttttttgttgtgtctctgtgaggttttggaattgtgtccagagttggtgtgttcttggtctcactgagttcaagaatgaagctgcagaccctcgcggtgagtgttacagttcttaaaggtgacatgtccagagttgtttgttcctcctggtgttcagatgtgttcagagtttcttccttccagtgggttcatggtctcgctggctsaggagtgaagctgcagaccttcacggtgagtgttacagctcacaaaggcagtgtggacccaaagagtgagcagcagcaagatttattgcaaagagtgaaagaacaaagcttccacagtgtggaaggggaccccagggggttgccacttctggctcaggcagcctgcttttattcccttatctggccccacccacatcctgctgattggtccattttacagagagctgatt

SEQ ID NO: 387154 - DNA, 615 bp, Homo sapiens
aaactgactcaaaaccgctcaactacgtggaaactgaacaacctgctcctgaatgactactgggtacataatgaaatgaaggcagaaataaggaagtcagtgtattcttattccacagaggaggaagctgagacttgggcaggtgggtaagccacagtgtctatgtatctgtatgtggcagcgtagaattttgaacttgggtgtcatgastacaagtataatattctttttattaaactattttctccagagccaacagggagcatgttgatcatgatttatattacttagatttttaggtctatagattttgtagttttgcagagaagtcaccttatttaataattacacagtgtcttctgagagtcagtattaatgtgattaatacaaggaatctgaagactttttgaaggcctttgtttcaggtgctctctgattacttactcactggactccagaggactgttgcttgctacattactcaatgtagcctttaggagcaaaagaaagcttcttgtcacctcaccctgtggatacttttccactactttcctaaaatcatttctgtaggttaatgacatcaaaaagcattctgtagtggataaagttagcttc

SEQ ID NO: 387155 - DNA, 615 bp, Homo sapiens
aaactgactcaaaaccgctcaactacgtggaaactgaacaacctgctcctgaatgactactgggtacataatgaaatgaaggcagaaataaggaagtcagtgtattcttattccacagaggaggaagctgagacttgggcaggtgggtaagccacagtgtctatgtatctgtatgtggcagcgtagaattttgaacttgggtgtcatgagtacaagtataatattctttttattaaactattttctccagagccaacagggagcatgttgatcatkatttatattacttagatttttaggtctatagattttgtagttttgcagagaagtcaccttatttaataattacacagtgtcttctgagagtcagtattaatgtgattaatacaaggaatctgaagactttttgaaggcctttgtttcaggtgctctctgattacttactcactggactccagaggactgttgcttgctacattactcaatgtagcctttaggagcaaaagaaagcttcttgtcacctcaccctgtggatacttttccactactttcctaaaatcatttctgtaggttaatgacatcaaaaagcattctgtagtggataaagttagcttc

SEQ ID NO: 387156 - DNA, 510 bp, Homo sapiens
gactattctggacttttattccatactgtcaagaagcctcttggagccagcttgcttttctctagtgtcactctgagaaggcggttattaaatggtttagaatgtagccaatccttgtggctcaccactcttcccagtaccctctggtttctggacaaggcttcttaaataaagaggtgctgggtgaacttggttgacacctgaggaggaagtggagcagctgaagagttgccctgtgttgctctcctccatgcagtacccagaatctctctcaaggccagaggccaaggggaagaagagagtgagctaataccttacgtaggaacagaaatgaaagctactgaaaaygggctattcatgaagtgtgggggaaggtggaggggcagaaaataagaacttttgtggaaagttgcattaagctttaaattttatgacaacaacctcctttggattccaggggccatatattttgaggggtatggctatttcttatgtttcgtattttaaaaa

SEQ ID NO: 387157 - DNA, 539 bp, Homo sapiens
taccttctccctaattacaatttacgtgagcatagaagggcatctgatccaagggcagctaatacaaatttatgacttgcttttgctgtgaaaagctgcaactggggttttggttattactgaaacaatattgtttcttcttttaaaagatttgtgaagagaatgggctagtaaatacaaagaagtgaattaaacrgagaagactagaaaacatagttgagttgaaattgcagagcatctgattgaatccttgtatatttctgtcacttggtctctggacctaacttgggtcatggatgatgcttcttcatgaccacaatcatgcatgtttcacaaccaatgaagtctgcctatgatgattcctatacttggatttaccatgaatttacagttcacttacttccatgtgtgtacatacgctggctttataacatctctttgttacagtcaaagggtttattaaagcatgtaccagagggccttgagggcctttctatgtggttctccttctgcttgaaatactttctgctttccttatt

SEQ ID NO: 387158 - DNA, 441 bp, Homo sapiens
tgttagcctctgcaagtcttgaactttggcaggttcagggctaatgcccagtaaagaagagtctgaactggaattagaatggagagcagtatattgagggaggatatattttgtttcattttattttgttttcccagttcggaaacaattgaatttaaaaaaaggaaagttttaagatatagaaagaagcttccttctttcctyccttccttctattcttccttccttcctttcttttaacttaccctgcaagagaaacaagcaataccaaattaattatgttattgtttaagtgtacatttagtgctcgccgtgagtgctatggtatctgaagaaaagaattagacatgtttactctttctcagaggagaaaaagaatgcacaaaaatagttgtaatgctataaaaaagttataaaatattacatatattctatatttct

SEQ ID NO: 387159 - DNA, 403 bp, Homo sapiens
ataagttcctgaatgaatagatttgtgaagaattcttcatgtttacataggcatcaattctttcccctgcacttggctgatatttagccaagctgattctcatccatttgcttatctttctaagaggaaaaaactttctcaattattattttcctcatcttcaycctaatttctctgagctaactgaaaaggagtaaatctcctatggttctctatttcctcttcgtacctgtagcccaaggtgggctctttgtgtttataagcaacatgtgtcgccggtcttcagttctcatagacatcttcagttcatttccttctcaaattctttatctaccttctatttgccacctacttctcttgatttacatgaattgaattctgatctcttgcttgaattaaagtt

SEQ ID NO: 387160 - DNA, 489 bp, Homo sapiens
ttctttctgttctggtttcttgcttctacattagttagcatataggatatrtatggaaatgcatgtagtaataatgagaatggggcattcagtggctgaaataagatagatgcttacttgtctttctcatatctccaagttatgttggctgagatctagaatgttcttccagaactaaagcactttccctcttcttatgcatttaccatccccaagatcttgtcctggtcctcatggtccaaaataaagcactattaaatctgtattctaaccttttgtttgatgaaagaatcgaatacaatgagataaaccaaaagttgcacatattgcttgcgttcttatgccattagtgtagacacagtcatatgaccatatcaaactgcaaaagaaattatgaaatgttgtaactaggtaaaatatctgaaaggtaaaatcagaattaaaaactaaaactcagtagtatttattggactcattgattattattct

SEQ ID NO: 387161 - DNA, 493 bp, Homo sapiens
aaatttattacataggattctgctatttttggtaaaggtgttagatcacaaatttagaatcatatattctcatatttgtgagatcatacatgtcattctcttttctttcttagatttcatagcaaaaaaagcttttaagataggaataaagtaaattattgaaatgtatgtcaccytgacaactcttggtattaaacatgaacctaagccaaacatagacttttagaaatgattgtcattgagataaaggtttctcctgttcttccatatcctaataaaacattacctcagggaggagttgcaaatttcttcctcttctggctgaattcagccagcatatgcatttcatgtggcccagccacacttttatttttccatttttaataacttggtctaattttggaatatgaagtggttttacactcgaaatctgcattccagcttctcttgaacgttagaagatgtggcaataccaagcccttaatatcagtgg

SEQ ID NO: 387162 - DNA, 571 bp, Homo sapiens
gtttgtggatttctctatcctttcccttgactgtgccatgaactcattgttggcagcaagaaagagtgaggaaaaaaaaaaaaaaagcaagtctctgacaggtgctaaaagcccaatacaaactgaaagactcaaaatcagaatgagtttccaatgtctacttacccactttccttttagcttgattcatggacattaggtttattgtcactgtttgtaaaaatattactgagagaaactgcagattagagccctacttaatttttttcaagttctgtgaatcttgttttctttaaccatatacgacctttcacctcaatcctttctccaacatagagattgtaagttcatgtgtcttgttagtgcatcttttgaatataggtgataacgctcatttaaaagtcgatatcaagcagcggaagccctataaccagataaaggacgtgttctatttaygcagttggtaccctgagaattcctctgccttattctttttcttcatcttcgtgatcatcagctcccttcacagttatctctttcctattatttcgatgtctgatgtaaataactc

SEQ ID NO: 387163 - DNA, 534 bp, Homo sapiens
tcaaatggtcatacttagatgtaaggagatgggagtgagacaattagaccttagataggcagctacttccagtgacatgtgtataccttggaaaggggaacattgattttggtactgaattagcacctcaactatatggatatgtaagtaaagagggaaatagataaatgattttttaaaatgtaaagcaaatattatatattatatattatatttttaatgaaaatatatttatttgcttcaaagtaaaacaagcaaaagtaactgaagtgaaattaaaggatatgctaaattcaaggtaaatatttttaatctacagtaaacattacattaaaaataaatctttaaatttatttataaaagattatggaaggcygggcttggtggctcatgcctgtaatcccagcactttgggaggccgaggtgggcagatcacctgaggtcaggggattgagactagactggccaacatggtgaaaccccgtccctactaaaaacacaaaaaattagccagcatggttgcatgttcctata

SEQ ID NO: 387164 - DNA, 568 bp, Homo sapiens
actatacaaaacaaacatcacccaggcatatagtgactagacttctcaaggtcaacctccattaaaaaatactaaaatcacctagagaaaaagttagatcatggacaaaagcaactccattagtctaacagtgaacttatcagsagaaaatctgaaatgtaaggagagattgggtctctatttttagccttcttaaataaaagaatttccagaacgaatttcatatcctgcaaaaataagcttcataggtgaaggaaaaataaaatcttttccagacaagcaagcactgtggaaatttgttaccactataccagcctcacaagaggtccttgagagaattctaaacatggaagtgaaagaacaatgcctgctaacacaaaaacacagatacatagctcatagaccctataaagcaaatcacacaatagaaaccacaaagcaaccagcttacaccttcatgatagaattaaaaccttacacattaatattaactgtacatgtaaatggtttaaatgtcatatttaaaaggcacagggtggcacattggataaaaaccaagacccatctg

SEQ ID NO: 387165 - DNA, 533 bp, Homo sapiens
tgatgttcttcacataaataattaaaaaaactattctaaaattcatatgaaaccattaaagacccaaaatagcccaagctattctaagaaaaaaaaaaaaaaaaaacaaaattggagaaatcacattacctgatttaaaaatgtactacagaactacagtaatcaaaacagcatggtactggcataaaatcaggcacataggtcaagggaacagaacagagcatccaaaaagaaatccacacttctacagtgagctcaatttcgacaaagttactaaraacacacactggggaaaaggcagtcttttcaataaatagtgctgaaaaaaccagatatccatatgcagaggaataaaactagaccccatctctcaccatatatgaaaatccaatcaaaatggattaaaagctaagaccacaaactatgaaactactacaagaaacattggaggaaatcttcatgacattggtcatggcaaaaattccttgagcaatgccacacaagcacatggaaccaaaggaaaatagacaaaa

SEQ ID NO: 387166 - DNA, 533 bp, Homo sapiens
tgatgttcttcacataaataattaaaaaaactattctaaaattcatatgaaaccattaaagacccaaaatagcccaagctattctaagaaaaaaaaaaaaaaaaaacaaaattggagaaatcacattacctgatttaaaaatgtactacagaactacagtaatcaaaacagcatggtactggcataaaatcaggcacataggtcaagggaacagaacagagcatccaaaaagaaatccacacttctacagtgagctcaatttcgacaaagttactaaaaacacacactggggaaaaggcagtcttttcaataaatagtgctgaraaaaccagatatccatatgcagaggaataaaactagaccccatctctcaccatatatgaaaatccaatcaaaatggattaaaagctaagaccacaaactatgaaactactacaagaaacattggaggaaatcttcatgacattggtcatggcaaaaattccttgagcaatgccacacaagcacatggaaccaaaggaaaatagacaaaa

SEQ ID NO: 387167 - DNA, 602 bp, Homo sapiens
gctgattaattattagtgagaaattatattggtgaatctgcataacacaaaaagctacccattagcattcattttcccctcagtaaataagtctatcagactattcaccttcaatgtctgtaaccctggcaagagaaacatcacctactttcmaattaagtttaacctttcacagcattaattatttatgcaacaatttcctttctgagtattcaagtacaatattactcacatgctttgacttttgtgacaatgaataattacaaaacagggactgaaggaatggaaccttggtggttgaattggttttagggagtttctattttagttcctttaactagatgacactgaaaaaagttatatgttttcagcattagaaatttctaatcaaatgaaggttttgtataaaaaaatgataatataaaataacaatatataaaatgttaatttgtatttaatagatatttacacgcagagtaatcaaattgaaacagtaagtcaagtgcaaagtttatatgtgaagaaaaacttgatagcttttaagatgtaaattattactctcatttttctcagaaaaggagtagttctgaatttactgaagc

SEQ ID NO: 387168 - DNA, 614 bp, Homo sapiens
agaaaaacttgatagcttttaagatgtaaattattactctcatttttctcagaaaaggagtagttctgaatttactgaagctaattttcttattgtctcagaaccacttcagtgaaaagatagaggcgtggtaaaaaagatagtggcattacaaaattctgtatttcaactaattcccatcccaagggctcatccccagagattctgagtagattcgtttggggacacaatcaggcattgttacatcatcaacactcccagatgactataatgtgcaatcaggagagaagaaaaaaaaactttaattatctttaagacagacttctaaatcttattgaactttggatttatctgggaagctttgaaaaatatasttggctgggtcccaccttcagatagtccaatttcattgttctgggctgtggcctgagcatcagggtttttatagctcccacagataactccatgggctgaaatggtcgcctgcatcagtcaacagcaaattctagcatgatcttgatgttcatggtcaagatatgtgccaattgttataatatgctgttgctactacctacagacattgctgtcaatctctttttggcatcactttgtac

SEQ ID NO: 387169 - DNA, 575 bp, Homo sapiens
tgtgaaatccctttttctgctgtacataacttattggtaaagctcttgattgcattttaaacatttaattcactgaattcttcagcttcaggatatatgtttgattctttctttataatatcttcatttttgttgaatttattattgaaatcataaatgattttttctgattttattgtactgtgtatgtgtcttttcttgtatctcactgttttttaaatcattatttttcatttcttctcagttatttcatagattttcttttctttaggatctgtactatagaattattgtgcctttggaggtagctttggagatgtcatgtttccttgctttttcatatttctcatgtccttttaataatatctatgcatttggtgtaacagttgcttctttcaattttatggattggctttcataggaaaatactttcctgtagatatatctatagtgttggttgtgtraagtgcttcggttttgattctggcggggctcaatagggtagtctctgtgtgatattgtctgctgtaatcaatgtcaatggtgacagcgggctaggcatgccagtccttagg

SEQ ID NO: 387170 - DNA, 616 bp, Homo sapiens
ttttgtcctctgagaagacttagaaacaatgaacttgcaaagcaacaagcatatctggcatctgtattttggattctcctgccattttccagtataaggaatcagagcttctttgagaatgtctgattaaattactgggctaggaaatatatagaataagtctgaagcatcttatggtatcagaaagtaagaaaacattctaaattaaatgcaatggtggagatacgtcacaggaataaaaagagcttccaatggcaaagatacaacaatytgagtaactaaataaataatgtagtgttgaattataacccagtgtataaacagaatatgcatgaggtcataagtatataaataaatgattgaataaataactaaatgggggggatagacaaatatctaatataggagaattcccaaacatgatgtagataccctgtccacaaggtgatggaacataacttttcactccttaagtgtgggctgtgcatagttgcttcctttcaaagatgatgatatgaaaagggtgaaaagagacactatgcagtagaaagacctgacatgagctatatcatgatcacaattaacatcgacagaaatgtcatgttgacagtatgta

SEQ ID NO: 387171 - DNA, 616 bp, Homo sapiens
ttttgtcctctgagaagacttagaaacaatgaacttgcaaagcaacaagcatatctggcatctgtattttggattctcctgccattttccagtataaggaatcagagcttctttgagaatgtctgattaaattactgggctaggaaatatatagaataagtctgaagcatcttatggtatcagaaagtaagaaaacattctaaattaaatgcaatggtggagatacgtcacaggaataaaaagagcttccaatggcaaagatacaacaatttgagtaactaaataaataatgtagtgttgaattataacccagtgtataaacagaatatgcatgaggtcataagtatataaataaatgattgaataaataactaaatgggggggatagacaaatatctaatataggagaattcccaaacatgatgtagwtaccctgtccacaaggtgatggaacataacttttcactccttaagtgtgggctgtgcatagttgcttcctttcaaagatgatgatatgaaaagggtgaaaagagacactatgcagtagaaagacctgacatgagctatatcatgatcacaattaacatcgacagaaatgtcatgttgacagtatgta

SEQ ID NO: 387172 - DNA, 595 bp, Homo sapiens
atgccaattgtaactttaagtctacaatctaagtctagttcctaaaactgaagtgtgttccattccacatggataatgtcattataagcttatctttccaggacaagttcttggacaaagtcaagactctttcttctactcacccagagatagctgcataattgactcttcttttactccctttgtctcttcagatattcactttatctcatgtaaaatgaagatttactggtcactaattaaagtctcataagaatgtaactactcatccaactaactacctgctcctctacttatctgtgtccctcaccaaccccatttttaagaaaatgtataaatactaaacctgaaaacctcatcggaataacagccactcatttgagttgtcactttatagaaataattcaaaagttagcacattttaacttataaacagttatgttatktttatatgtcttatacttattttaaattatatttaatttaaattaaattataattttctttggttgatttactctgagaatttgttactataactaaataataaaattttaccttatttgttatttgcttttaagagaaataaattttt

SEQ ID NO: 387173 - DNA, 575 bp, Homo sapiens
ctcttcttttactccctttgtctcttcagatattcactttatctcatgtaaaatgaagatttactggtcactaattaaagtctcataagaatgtaactactcatccaactaactacctgctcctctacttatctgtgtccctcaccaaccccatttttaagaaaatgtataaatactaaacctgaaaacctcatcggaataacagccactcatttgagttgtcactttatagaaataattcaaaagttagcacattttaacttataaacagttatgttatttttatatgtcttatacttattttaaattatatttaatttaaattaaattataattttctttggttgatttactctgagaatttgttactataactaaataataaaattttaccttatttgttatttgcttttaagagaaataaatttttttgtggaatttttttccctaraacagtatatttcagagcataactaggagaataaaatcaatatttcttgtaatttctagaaaattaacaaggcttaaaaatctatgtgtagatttagatcacaattaatatataaaaataatat

SEQ ID NO: 387174 - DNA, 638 bp, Homo sapiens
catttgctggatgaggtttcttttcaattcagtgaaaattctattcaaaaaagaaaatgataataaagaaaaggttggtcctggaaccgtttctcaactctgtacaaaattactaaacacatagcaatttcagratatttggtgttttaatctatcaaaattcttaagttagatatcacttgagatcaaaaccagagtgattttatatgtaaagataaaaatatttaagagttcaggagattcagggactatttaccaggaagcaaatgtaactgtctttattcctacctctaggaggaggaaaaatctttgctccatttattatttattgatacaattgatatttatggataaatatcagttggcccacccaatgtaagaataatgaacccaaatgtatatataaactgcataggcattaaaatataaatatgtgagcattttcatccagtagatagatgtttttattaattcttttcagctatggagtagaaatttttatcttgaatttttagtgaaaatttttataacttttaattgcttttttctttcagcaaataataattgttttgcatggtgttcaaagcaggtcaaaacattgaatgtttctctgtaacaaatactatattgaggtgagg

SEQ ID NO: 387175 - DNA, 583 bp, Homo sapiens
tgacagcctactcgatctgtcctccacaggggtaaccctcagatacttctagctcaacagggcctaaactaaaactcctctctccctcacccatccacgacccatgaaaaaaaattccaacctctgtctctaggaggtatgtcaccattcttcagctgggcatcattcttggtttcctccctccctcccttccgtccttcctccctcctttcctcctgccttcctgcctgccttccacatttactgagcatgtgccaggcactgtgcgaggaagtggaggttggcaatgagaaagtcagttgtgatccctgccctccttcagcttacagtttggtcagaagaataaacagaaaatcgctgggcaggttactaagggctgagatgagagtagtacaaggggctgggggagcccataagagaagtatctgattctggcttggggtggggatcatggaacacctcccagaaagctgactgagccccagcatgtagggtcactgagttaggctcagrgttcggggagcgggagggctggagtatcccaggtagagagaagagcagatgcaaaggccagaggtaaggg

SEQ ID NO: 387176 - DNA, 583 bp, Homo sapiens
tgacagcctactcgatctgtcctccacaggggtaaccctcagatacttctagctcaacagggcctaaactaaaactcctctctccctcacccatccacgacccatgaaaaaaaattccaacctctgtctctaggaggtatgtcaccattcttcagctgggcatcattcttggtttcctccctccctcccttccgtccttcctccctcctttcctcctgccttcctgcctgccttccacatttactgagcatgtgccaggcactgtgcgaggaagtggaggttggcaatgagaaagtcagttgtgatccctgccctccttcagcttacagtttggtcagaagaataaacagaaaatcgctgggcaggttactaagggctgagatgagagtagtacaaggggctgggggagcccataagagaagtatctgattctggcttggggtggggatcatggaacacctcccagaaagctgactgagccccagcatgtagggtcactgagttaggctcagggttcggggagsgggagggctggagtatcccaggtagagagaagagcagatgcaaaggccagaggtaaggg

SEQ ID NO: 387177 - DNA, 545 bp, Homo sapiens
cacctcttttctggtcctttggctacagagaacaggcttttgttggaattggtttttctgtttgttttgttttgttgttttttttwaatctgttctcattggtgtttctgtttgctgccttctccagcacccaaggaagtcaccaccatattgttccttgagtcctgtgtttcttagctggtctgccttcttctctccacttttcagagtcagatagatagatagatagatagatagatagatagatagatagatagatagatataaaagataaatagatagttctctatacagatatagatgtatatcattccaagtttttagctgtattttgcaggaggaaacaagagaagtatgtctacttcttttcctctggaaccagaggtttcccctttgttaccttgtttttccatttaaggaaggccacaaggagaaccatgaatctgctctaattgatttttacgaaaggaaggagaaaaagacaggaaataattcacaatctccaactctttcatcgtaattagtgagtgacaagtagtttgtaa

SEQ ID NO: 387178 - DNA, 535 bp, Homo sapiens
agaaaataaaacctataatcccactaaccagggaaaatcactgttaactttttggtatctacatacacacacacacttctcctttttatacatgagatcacactggctatctttttttttttttaaattgkgctaaaacaatttatcacataaaaacacataacatgagcacgttggctcaggcctgtaatcccagcactttgggaggccaaggcgggtggatcatgaggtcaggagttcgagaccagcctggccaagatggtgaaaccccatctctactaaaaatacaaaaattagccaggcgtggtggtgcacgcctgtagtcccagctacttgggaggccgaggcaggacaatcgcttgaacccgggaggcggaggttgcagtgagccaagattgtgccattgcactccagcctgggcgacaagagcaaaactccgtctaaaaaaaagaaaaaaaaaacaccacacacataacatgagatctatcctctgaacagaattttaagtgtacagtacagtattgttaactatgag

SEQ ID NO: 387179 - DNA, 555 bp, Homo sapiens
tattgcagctttctcatacattttctaccaccactactctttggcagaaagcaattgcctgaattatctaatctaatatactcatgacttaatcaattatctcagaaaagagattatgacagacactatcagacactgatacaaaagccattctatactttcttccttagtaagagaacactgaagttttaagagtcatggtgttgacagtgtcttgggataaataataactagtcaaaatgaatcattaaaatttttttctctttcaagatatttgttttcctagtatttcctgctgctagagtttgccagatgaatgagttctcaccaaatacataaatggaaataacatggatttctaataaaattttacttgcctgataaatgacagcactttgtgaaaataataatttcacctcatccttgtcatgctgattgaatgctggtatggagatgtgatctttgtgcagaaayagccacttggtatccatgaggacaaggccaagggagttgcagaacccagtgtagagccctgtcataactgagtcagaagta

SEQ ID NO: 387180 - DNA, 629 bp, Homo sapiens
ttcagtgagctacacaattttcttttaataaattccttttctgtttaaatcagcaaaagttattttcagactgatataacctctgatctttgtaagtgtccagggtttctcttttttcctgatcttcgttgttctaactttttcagtttgaaattaattttcttcaatgaaaaaataaagataaaagaaatggaatagttttgccttccttctatcaactgttatgaaacaaccaatactcctgtaactttttgtcccttctttctcagagaataaaagaaaggaattgtgtcttctttttgcatgcttacttaataatcctaaactctccctgcctttctgatgccattctggggcttcatgccattcctccaattcatatttggttagttgcctccatctcatctttgtgtttttaagatctttgtctttcagcaaattctctctgcaactccaatgaactcttcagctgcctctgtattaggcaggaactcaactcgccctgaatttctccaaaagagaactgatgggttgaaaccaagagatcctggcatggcttacactaagcgctaaaataatgatgtgaaatttttctcyctttctcctgcctcctcttcctccttgtcctc

SEQ ID NO: 387181 - DNA, 571 bp, Homo sapiens
agtagtagtggtagaatagagactattctaggatcttgcatatcagtaaataaatgcaagaaaaagccctaccctcatggagagtatattctagtggagtagtgatattaaaataaataacactgcatgcaaattaagtataggacaattagaggtggggtttcaaagaaccctaacgcttcaccctaccctgtatccataccctttgtcatgcaaatttgaagttcaacaaaaacaccttatatttcctcatgtgatttgccaatagactaaggcagaaaagagtgtgtgstcctgagactagaccctcagaagtcttgcatgtctctgcttttgctttagcccctctgccattgccgtgcaagcatgctggggttggccagctaaaagagaagagacatatgggccagaggccagtcacctcagtctccccaagcaagacccaaccaacctccagacacctgaatgagcccagccaagatcctagatgcataaacattaaatttactgccatatgctattagattttgtgattgcttttcatacagcattttggggcaatagacagatg

SEQ ID NO: 387182 - DNA, 571 bp, Homo sapiens
agtagtagtggtagaatagagactattctaggatcttgcatatcagtaaataaatgcaagaaaaagccctaccctcatggagagtatattctagtggagtagtgatattaaaataaataacactgcatgcaaattaagtataggacaattagaggtggggtttcaaagaaccctaacgcttcaccctaccctgtatccataccctttgtcatgcaaatttgaagttcaacaaaaacaccttatatttcctcatgtgatttgccaatagactaaggcagaaaagagtgtgtggtcctgagactagaccctcagaagtcttgcatgtctctgcttttgctttagcccctctgccattgccgtgcaagcatgctggggttggccagctaaaagagaagagacatatgggccagaggccagtcacctcagtctccccaagcaagacccaaccmacctccagacacctgaatgagcccagccaagatcctagatgcataaacattaaatttactgccatatgctattagattttgtgattgcttttcatacagcattttggggcaatagacagatg

SEQ ID NO: 387183 - DNA, 634 bp, Homo sapiens
tgcaccaaacctttgtagacaaagtttcctcagtaagtcttcaggcagaaagttcaatggcatgtcaactttagatcctagcagtttttagtccattaatgtggcctaacaggcatygcttaattcatttgcagaaattttcaacaactgaaaattcatcacactctgagaatctagaaggtaatagaaaatattatctctgttttgcagatggaaaaactaagctaaagagagtcaagccacttggtcactcctgtaacagagactgaaatacaaacccaacttcctaatcctgggatcaatacttctgttagtttcactccatgcactatcccccaaaaacctaaatgcccctaaaattttaaaaaatttcttgtattaaaaagttaaagtacagacagggtctcattatgttgtatcgactatgaagtcgataattcctgaagttacttctatgaagtctataattcatccaaacacatgctattaaaaaaattggcaaagaattctcagaactgaggcagataaatgaacatggtataagtaactatttctgcaagaaaaacaaacaaaccctctaatcttccaaaagtataaaatcctgtcactcaaggctgctgataaaagcaagaag

SEQ ID NO: 387184 - DNA, 634 bp, Homo sapiens
tgcaccaaacctttgtagacaaagtttcctcagtaagtcttcaggcagaaagttcaatggcatgtcaactttagatcctagcagtttttagtccattaatgtggcctaacaggcatcgcttaattcatttgcagaaattttcaacaactgaaaattcatcacactctgagaatctagaaggtaatagaaaatattatctctgttttgcagatggaaaaactaagctaaagagagtcaagccacttggtcactcctgtaacagagactgaaatacaaacccaacttcctaatcctgggatcaatacttctgttagtttcactccatgcactatcccccaaaaayctaaatgcccctaaaattttaaaaaatttcttgtattaaaaagttaaagtacagacagggtctcattatgttgtatcgactatgaagtcgataattcctgaagttacttctatgaagtctataattcatccaaacacatgctattaaaaaaattggcaaagaattctcagaactgaggcagataaatgaacatggtataagtaactatttctgcaagaaaaacaaacaaaccctctaatcttccaaaagtataaaatcctgtcactcaaggctgctgataaaagcaagaag

SEQ ID NO: 387185 - DNA, 606 bp, Homo sapiens
tagtcccaatcataaaacattccagcacatgtactttatttatgggactgagaccctgaatacatattccaaaacttggctcctaggtaagccactgggctcaagcaaggatggattaattagctcctcggttccaggactttccatggaagcacttcatgggcacctgggcaagcagtactccaggtagggtgagaagccctttaggaagggcattacttggggtgtcatctgctggcgasgtagctgccaagggcaccaagcgtgcaagacacttttggcaaatttcacatactttgtcctcactggatgatgggaatctgcttgcaggcagggaaatgctgaggaccgacagcctctatgaaggtctcattgagctgccatgggcttggtgcttgcggaagatgaggacacacagcccagggctgccaggagcccctgatggaggcgaggaacagatggaagaaagggagattagaaaggaagaaaggatttctaatgtgctctaactaagtgtgttaatgtggcaataattatgattcctggtcttcatcctatcagattagagggtaaaagaatgaatttagagatcttcttacttattct

SEQ ID NO: 387186 - DNA, 606 bp, Homo sapiens
tagtcccaatcataaaacattccagcacatgtactttatttatgggactgagaccctgaatacatattccaaaacttggctcctaggtaagccactgggctcaagcaaggatggattaattagctcctcggttccaggactttccatggaagcacttcatgggcacctgggcaagcagtactccaggtagggtgagaagccctttaggaagggcattacttggggtgtcatctgctggcgacgtagctgccaagggcaccaagcgtgcaagacacttttggcaaatttcacatactttgtcctcactggatgatgggaatctgcttgcaggcagggaaatgctgaggaccgacagcctctatgaaggtctcattgagctgccatgggcytggtgcttgcggaagatgaggacacacagcccagggctgccaggagcccctgatggaggcgaggaacagatggaagaaagggagattagaaaggaagaaaggatttctaatgtgctctaactaagtgtgttaatgtggcaataattatgattcctggtcttcatcctatcagattagagggtaaaagaatgaatttagagatcttcttacttattct

SEQ ID NO: 387187 - DNA, 415 bp, Homo sapiens
ggaaaaggaaggtcccaaaatsaggaggacaggaggtctcggatgatagccatggacagagatataaagagcgactatgccagattgaaattaacagaaaaagtgctccagggatgaggtctttaataaaaaaacatgccactgacagattatcagaggggatatattggaggacatagaaatgaagcaattattaactccagaaaaagaaaactgtacaaggaagggctcagggtcataatacatattttattcagccaagaatatctgcatagtcataatatcataaacatggaatgtgaatttaacaaaaaaattgtgactcagaggggaggggaagtagccaggtagaagagcagatactcgtctaccaacagatagcggaagtcagtaaataatgcctaaaaccgatgaa

SEQ ID NO: 387188 - DNA, 591 bp, Homo sapiens
tccccgtttttaagttgttcattactaaggtgtccagagatcatcagtataattaattgtttaaatacaaactagttttaaaaatctcccactaatatgatattgtgtgtatatatgcatatatatgcatatatagtatacatatatacatattgtatacatatatacatattgtatgtatacatgtgtatgtgtatatatatatatmtctctctctctccctacaacaggaaagtgaacaatgctatcaccttctcctgcattcgtgtatatatacacatatatacgtatatatgtgtatatatacacatattatatatacatatatacatattgtatacatctatacatgtatacacatattgtatacatctatacatattgtatacacatattgtatacatctatacatattgtatacacatattgtatacatctatacatattgtatacacatattgtatacatctatacatattgtatacacatattgtatacatctatacatattgtatacacatattgtatacatctatacatattgtatacacatattgtatacatctatacatattgtatacacatattgta

SEQ ID NO: 387189 - DNA, 591 bp, Homo sapiens
tccccgtttttaagttgttcattactaaggtgtccagagatcatcagtataattaattgtttaaatacaaactagttttaaaaatctcccactaatatgatattgtgtgtatatatgcatatatatgcatatatagtatacatatatacatattgtatacatatatacatattgtatgtatacatgtgtatgtgtatatatatatatatctctctctctccctacaacaggaaagtgaacaatgctatcaccttctcctgcattcgtgtatatatacacatatatacgtatatatgtgtatatatacacatattatatatacatatatacatattgtatacatctatacatgtatacacatattgtatacatctatacatattgtatacacatattgtatacatctatacatattgtatacacatattgtatacatctatacatattgtatacacatattgtatacatctatacatattgtatacacatattgtatacatmtatacatattgtatacacatattgtatacatctatacatattgtatacacatattgtatacatctatacatattgtatacacatattgta

SEQ ID NO: 387190 - DNA, 591 bp, Homo sapiens
tccccgtttttaagttgttcattactaaggtgtccagagatcatcagtataattaattgtttaaatacaaactagttttaaaaatctcccactaatatgatattgtgtgtatatatgcatatatatgcatatatagtatacatatatacatattgtatacatatatacatattgtatgtatacatgtgtatgtgtatatatatatatatctctctctctccctacaacaggaaagtgaacaatgctatcaccttctcctgcattcgtgtatatatacacatatatacgtatatatgtgtatatatacacatattatatatacatatatacatattgtatacatctatacatgtatacacatattgtatacatctatacatattgtatacacatattgtatacatctatacatattgtatacacatattgtatacatctatacatattgtatacacatattgtatacatctatacatattgtatacacatattgtatacatctatacatattgtatacacatattgtatacatmtatacatattgtatacacatattgtatacatctatacatattgtatacacatattgta

SEQ ID NO: 387191 - DNA, 498 bp, Homo sapiens
tagagcaattttaggtccacagcaaaactgagcagaaggtacagaaagttatcatatacctcttgtcccctgacaagacatccctgctatcaacataccccaccagagtggtacatttattgcaatcaaacctacactgacacatcattatcacccaaagtccataggttacattggggtccactgttggtgttgtgccttctatgggtatggacaaatgtataatgacatgattccaccattacagtatcatacagagtagatttactgctctaaaaattccctgtgctctacctcttcatccctccttccctctaacccctggcaaccacgaatctttttaccatctccatagtttttccttatccagaatgtcatatagttggaatcatgtggaytgactctttttacttagtaacatgcatatctatgtctttttatggcttgataactcatttctttttagcgctgaatgatactccattgtctggatgtaac

SEQ ID NO: 387192 - DNA, 498 bp, Homo sapiens
tagagcaattttaggtccacagcaaaactgagcagaaggtacagaaagttatcatatacctcttgtcccctgacaagacatccctgctatcaacataccccaccagagtggtacatttattgcaatcaaacctacactgacacatcattatcacccaaagtccataggttacattggggtccactgttggtgttgtgccttctatgggtatggacaaatgtataatgacatgattccaccattacagtatcatacagagtagatttactgctctaaaaattccctgtgctctacctcttcatccctccttccctctaacccctggcaaccacgaatctttttaccatctccatagtttttccttatccagaatgtcatatagttggaatcatgtggattgactctttttacttagtaacatgcatatctatgtctttttatggyttgataactcatttctttttagcgctgaatgatactccattgtctggatgtaac

SEQ ID NO: 387193 - DNA, 510 bp, Homo sapiens
tgagccaccacgcccagagagaattttctaaccatgttttctaaagtagctccatcctcaggagttggcctttcccaggttagcctcttttattcctttataacttttagccctatatgaagttacttttcttgtttatatgcttgtgtgtttacatatatatttttttctttccattattaagtaagatttaggacacggagacattgaataccctgctttcctaacatctgtaactaattgctcactggagaaattaatctccaatctgcagttgaacttctggaaatagcaaaacttgttcagaatgaattttggagcatgcagtagtaattaagatgaataatgtctttgggaagacaaaataccacgtaaagtaatrgagaaatagttctgtgctttttcacacatgactcaaacttgtttcagaggcatttccaaacaaaaatattcagtcatatttcagcaatgcaattccatgttactttgaggtggttactttatagagta

SEQ ID NO: 387194 - DNA, 611 bp, Homo sapiens
atctaacgttttgagaatgtctgtctgattgtcacattctgytatgctctatgacaattaattctgtaacactgaaatctctttattgttcctcctttctacttgtttctttctctacttggtcatccatgcacagtggtcagaagccaagagagagacaaaagattcaaaattgctgttaaaaatcagttcttaatagaatgtgtaaaagtttactggatataagcttcaataggggtgtccaaggtatttgtaacttccgtttacttttgttacccgctaattaaaataattgaaagtttattgtaattcaaaatctatatagtctccacgatctaggtatagaaatactgcctttctcatacataaatggcagtgagcctaacagcttggattttatgacgctgcgtgcaaatattttggcattagcctggaaagcagataaggccatgtggcattttgttgagtgtgcttggtcacttcccacatctgtttgacctttaccttaagtacagcttgtgagctactactgctggtgacatatgttcctgagatgtgtttttcaaaagatatgtgtggcagtaggagggtgtttaccagagaaattaatt

SEQ ID NO: 387195 - DNA, 463 bp, Homo sapiens
tttacataaaagcctgttgtaaaccttttaaattaaagtgcattgtgtcatgcactctcttcaccccagggttcttttgacctctcacctctcactttgtcttccaggcactccactgctggtgaggagaagcagtgacccagtgccaggcccacctgctgatacccagccaagcgcttcacaccctggtggccagagtctgaaacyggttgttccagtaggtatcctgctgcttgtagttctaatgaaagatcaaagtgctgtacccataggttaagtgggactttgcagttttaaacacattgataactagatagagatcttttgatagtatatatagtattagttatactaatagctagtatgggctattacttgtatatagttatagcgatagctattacgtatatggcactgattatgtgccaagtactattttacctgttttatattaagtcatcta

SEQ ID NO: 387196 - DNA, 575 bp, Homo sapiens
cactttaagtctcactgtctataacgccttaagaaaaaataaacacatcatttataggtatatacggatgctgaaatgagttaaacagrtttttctgatttggtataaaatattcttatcaagaaccaatgtcaatgtgtatgagataggagtcactatttgaaatcattagctctttgctaatagatttgtggcaatattttggcatatttcttttattattaaaagaaagcaggtgtcttgaaagtattttagatgtaatgtttttccactaacctatttaaaactctatccttctaaggaaatatatttgatggaacattaataaaaatcaggtgtatgtgttctattttaatgtacgtacaaacaaaactggtatgtggtatgacttttcttaaaacacacactggttgagaccatgttgagtctaattatgttggattgggggaagacagctattcagtgagagaagaattacataaaagagcagaactacaatttagttttcattttcatgatgtctgtgtgtctgtgtaccctaaaacgagagtgtgtctgattaatgtgttagcatt

SEQ ID NO: 387197 - DNA, 596 bp, Homo sapiens
gcagaccacagacccaaaaaggagagtctggtccttgcccttgcatggaatagtggcacatcttaggtgtctcttgcttcagttgtaaaataatctccatgaatactttaagctttaacatcccaaggtacagacattgtgccttatgtatctttatctagggccaagtacatggaagatgctcagtgtatatgttttggacttaggaatgcaagacacgtgtaagtctaggaagagtcctaraagttcttagaaattaaccagctaattaattattattaattaatatatattaatatataaatatataataatactaattaataataattaatctgactcagccattctctccgtttcccaaagagcatctaccagggaaatgtttatctgctccaaggtctagttcaccacaggcaagtgacagatagtttaacttccctattatgcaaacattaataaagacacttaggtgtgtttatttttactagaaggaaggtgtgtgtgtgtatatatgtgtgttataactgttaatatatccttgcatagccaaacttatggaatgtttagatctacagtgtctagtttagtagcca

SEQ ID NO: 387198 - DNA, 599 bp, Homo sapiens
cagaagatgttaaaacaaatctggattgcctgaatgtctgtaccatgactaatcaaggaaactaagaagtgagatccctatttaggtgtgtgctccccgatttttcttcttgggtcttagtctaacactgaaaaactctaaaagaaggatcactatttaggtcaatttcagaaattaacaaggtaaccatgacatgtcttttatatatatatatatatatatatatatatatatwtttttttttttttttttttaattatactctaagttttagggtatatgtgcacaacgtgcaggtttgttacatatgtatacatgtgccatgttggtttgctgcacccattcactcgtcatttacattaggtatatctcctaatgctatccctttcccttccccgcaccccacaacaggccccggtgtgtggtgttcccctttgctgtttagccttgatctgcacacaatgaaaactgaatgggttttgttttcatgtcaaaataaattgactaatcccttagatgcccaagatttctgctgtgtgctttctagaaagcctaagacatggttcctgtcctcaagaaacttacaacctcgttacaga

SEQ ID NO: 387199 - DNA, 625 bp, Homo sapiens
gggtgcaataaatcactatttgagtcttgactctatagaaatggtatgatgtcggacaagttattaaactctctaagcataagtttacttctaaaatggatgtgatataaatgtttactttatagatttagtatcagtacatgatataatgtccagaagaaggttagtacactgcctcccaagtaataccttgcattcaccgagaatctactactgtaacccatcgctttctrttcttttttattacctgtcacaaccttccccttagattataaactcctcaagcattggtctttgttttttccttgtggaacttccccaatgaaacaactcaattaatatttgttgaattcaagtgaagtaagtggatctcatcaccaacaacaaagtctttgatagatttttactcagtacatttgcatcctcaagatatttcaccatcaagtagagttcaaggttatccacagattcttcctggaggtttcgctctgtagtccgcctctcatactattgcatgccacagatctatgaatccacccttccagaaaatcagctaacactcagccatgtgctgcagtcctttgtcttctctctgcatgtcagcagtctgattgcaaataaaacg

SEQ ID NO: 387200 - DNA, 555 bp, Homo sapiens
ttgcaaataaaacgtgttcctcaatcctgcagtatttaaggcttttttaagaaagtcttactgaggaaatcaatagaaaaaaatggattattctcttttagcctataagcttgtttccttagacagttctaacaatcatactaatagcaggtagttattgaatgctttgtaaataccagatgtggtatgtgtaacatatatgtgttatgatctttatttttcttattaaagccaacaactctaatagggaaatacctaatctttttttttttttttttttttgagatgaagttttgctctttcacccaggctggagtgaagtrgtgtgatctccgctcactgcaacctctgcctcctgggttcaagtgattcttatgcctcagcctcccgagtagctgggactacaagtgtgtgccaccacaccctgctaatttttgtatttttagtagagatggtgtttctccatggtggccaggctggtctcgaacttctgacctcaagtgatctgcccgccttggcctcccaaagtacagggattacagacgtgagccaacg

SEQ ID NO: 387201 - DNA, 560 bp, Homo sapiens
ctttttgcatttcttaatgataataggcttgcaaagaaaacacattaaaaatcaacctaatccactgatgagaatatatttaatgtatttattttagattgctgataatttagagaatacttcgtgcagagtgaattcatcatgcattttgcttaatgctgttctcaactttccagcaagaagtcaaaatttcaccattttcaatttggagcagaaagcatttgtagcagctgtagctcttaatttgacatctagtttcaggtcattttcatgtaaatagggaacaatggagaccggcttacaatttccataacgtggatgtttccttcaactttattattttcttatgacaattatattttctctgtgggattaacggagccagtaattgttcacagttattatttwtaatctttatgaaaacttggtagttctactctttagtactcaaaagctcccagtgccttctatatttcagtcatacacacaatccattaatgtttctagctgatcctttccttaatcaggggtaggttaggcaggtcaggctttctatttct

SEQ ID NO: 387202 - DNA, 560 bp, Homo sapiens
ctttttgcatttcttaatgataataggcttgcaaagaaaacacattaaaaatcaacctaatccactgatgagaatatatttaatgtatttattttagattgctgataatttagagaatacttcgtgcagagtgaattcatcatgcattttgcttaatgctgttctcaactttccagcaagaagtcaaaatttcaccattttcaatttggagcagaaagcatttgtagcagctgtagctcttaatttgacatctagtttcaggtcattttcatgtaaatagggaacaatggagaccggcttacaatttccataacgtggatgtttccttcaactttattattttcttatgacaattatattttctctgtgggattaacggagccagtaattgttcacagttattatttataatctttatgaaaacttggtagttctactctttagtactcaaaagctcccagtgccttctatatttcagtcatacacayaatccattaatgtttctagctgatcctttccttaatcaggggtaggttaggcaggtcaggctttctatttct

SEQ ID NO: 387203 - DNA, 542 bp, Homo sapiens
tgtacctcttttaaaatatgttgatttatgcagattaagttaagtaggaagttatttttgtaggtagtcatttccatttgttcctcttctaggagtaaaagtaagaaatcagatagacttttaaacattttgttttctggatcatctgaacataccaataaattatgtactcttttgactttgaagttgtattagttgatataatcctgagcrggggtgtgtgtgtgtgtgtgtgtgtgtgtgtgtattttagatgtgctccctctgttttttagcagacactcatttgtgctcttgtttttttctgccccagtgatatgacaagaacagtggagatttctggggaaggaggcccattgggaatacatgtagtgcccttcttttcatctctgagtggaaggtaagatgtttttctcattccagaagctcatgctaatgaaaaccctgatttgagctccttttcccaaatatttttcacaaggagattaaatgtgaattctattattcaaatggatacctcaagacatacttctgttggccac

SEQ ID NO: 387204 - DNA, 575 bp, Homo sapiens
attccctcataacaggtgctctaagtagtctcaaaatgttgcacaaacattccacaggcataaaaagttgtttgaaataccaagatattagtggattttcaaaaacttcatgcagttaaattgagctaaatttatctttaggaggtatcaccaaaacagacatgttatttctcttggagttgtaaactgattgaaactttagaataatatttactttctcattctacaaatakaatgaaaaatatttctaagcaaaattactggatgaattgtcttgtctgaataaatcatcagaaaagaatttcaaaactaacttcaaaacatttcccccagattctgagattatagtttgggcagaaaaagactgaggctaagaaaataaagtgacctttatttctagcatggattctttgataaaccttggcttttcccaaatgagtttttttcaggaatttttaaaaaagttatactcatatgatacaggcaaacttcatcatttagcatctgactcccccgtgttacttcgagggcatacaattctgcttcaccttcagttcaagaaaaagctgcatcca

SEQ ID NO: 387205 - DNA, 397 bp, Homo sapiens
caggcataaaaagttgtttgaaataccaagatattagtggattttcaaaaacttcatgcagttaaattgagctaaatttatctttaggaggtatcaccaaaacagacatgttatttctcttggagttgtaaactgattgaaactttagaataatatttactttctcattctacaaatataatgaaaaatatttctaagcaaaattactggatgaattgtcttgtctgaataaatcatcagaaaagaatttcaaaamtaacttcaaaacatttcccccagattctgagattatagtttgggcagaaaaagactgaggctaagaaaataaagtgacctttatttctagcatggattctttgataaaccttggcttttcccaaatgagtttttttcagga

SEQ ID NO: 387206 - DNA, 562 bp, Homo sapiens
aggttcctagtgaccccaaggaaggctgagcagagaccagggtgttctgctaaacatgccaagggtggggtatcacaggacataggccacacaaactgttactcttacttttcataggatgagyataagagtagccttgatagtgggggattaaacaagaatcttgacatgaggcagtgtagagtgtagatactagctctttactgaggtgctctacaaaggccagctgcctcacacctggaaatctttgggacggtggaaatttactatgcctgctgctggtgccagggagccactggtcccttgaagctgagttcaagtgcggcttcttctacttagggtgaagggtgagggctctggtcctagctagcttatttttcagacaacccagggtaagaccacagagttgtatcagtcaattctgcttgttgtatcacagtaagtataatctacttcaaatttctgtgttatgaaataaaatatatatatgctaaaatttatgaataatgagcaaagaatacaagtaacatttgtagatttgaaacaaagagaaaaaaggtgg

SEQ ID NO: 387207 - DNA, 562 bp, Homo sapiens
aggttcctagtgaccccaaggaaggctgagcagagaccagggtgttctgctaaacatgccaagggtggggtatcacaggacataggccacacaaactgttactcttacttttcataggatgagcataagagtagccttgatagtgggggattaaacaagaatcttgacatgaggcagtgtagagtgtagatactagctctttactgaggtgctctacaaaggccagctgcctcacacctggaaatctttgggacggtggaaatttactatgcctgctgctggtgccagggagccactggtcccttgaagctgagttcaagtgcggcttcttctacttagggtgaagggtgagggctctggtcctagctagcttatttttcagacaacccagggtaagaccacagagttgtatcagtcaattctgcttgttgtatcacagtaagtataatctacttcaaatttcygtgttatgaaataaaatatatatatgctaaaatttatgaataatgagcaaagaatacaagtaacatttgtagatttgaaacaaagagaaaaaaggtgg

SEQ ID NO: 387208 - DNA, 589 bp, Homo sapiens
tcgttcttatttttcaagattgctttggctatgctgggtctcttgcatttccatattaattttggaatcagtttgttaatatctgcaaaaaaaaaacagttgggtttttgctagggattgcattgaatayatagatcaatttggagagtatcacaatctaaccatcataaagtctctcaatccatgaacagttaacagtgacagttaattaaaataaatattctttttagttttataattctgtatgggatgtatcctcagagtgtcaaagaaaaaaactgatatttgctataaagttttatatcattattgttgcctctgcaccatactctaaatggaactttgttgttgatccctaacaaggtagaaaaataacatactttctggctcaaatcaacattacgcaagattaaaaaatgaatttttcatctagttccagttagatagcaagtaaagattctattcatatcaacaagttacttaattctctgagtatatggaaatatcaattacaatttgaaagtaatattgggccaaatacaatgtcataatctgctcaagggtaattctgaactgactacacatttgg

SEQ ID NO: 387209 - DNA, 624 bp, Homo sapiens
tactttgtgtgtggtcttgcctgggtgacaaatccaggtgcctagtgctcactaccaaagccaaagttgctagatacgcatatrtctctggagtggtaaaatgtaggtgtgttagttcgttctcacactcttataaaggtgctacccaagactgggtaatttataaaggaaagaggtttaattgactcacagttccacatggctggggaggcctcaggaaacttacaatcacggcagaaggcaaggggaatatggaggcaggaaagaaaggagtgaggagcaaaggtagaagagcccttataaaaccatcagatctcatgagaattcactcattatcacaaaaaacagcacaggggaaaatgcccccatgatctaatgaccatccactgggttcctcccttgacatgtggggattacaatttgagatgagatttgggtggggacacagagccaaaccatatcagtaggggtaagaatgaggcttaagcttagtcaataatgtctcttggaggtgtgaatctcactgaaatgacccaaggatgagaaaagtctgatgtctgcttgcagaactatatcctgactagcttattccttctgaaaaacagttttgactcgtttcctcat

SEQ ID NO: 387210 - DNA, 624 bp, Homo sapiens
tactttgtgtgtggtcttgcctgggtgacaaatccaggtgcctagtgctcactaccaaagccaaagttgctagatacgcatatatctctggagtggtaaaatgtaggtgtgttagttcgttctcacactcttataaaggtgctacccaagactgggtaatttataaaggaaagaggtttaattgactcacagttccacatggctggggaggcctcaggaaacttacaatcacggcagaaggcaaggggaatatggaggcaggaaagaaaggagtgaggagcaaaggtagaagagcccttataaaaccatcagatctcatgagaattcactcattatcacaaaaaacagcacagggraaaatgcccccatgatctaatgaccatccactgggttcctcccttgacatgtggggattacaatttgagatgagatttgggtggggacacagagccaaaccatatcagtaggggtaagaatgaggcttaagcttagtcaataatgtctcttggaggtgtgaatctcactgaaatgacccaaggatgagaaaagtctgatgtctgcttgcagaactatatcctgactagcttattccttctgaaaaacagttttgactcgtttcctcat

SEQ ID NO: 387211 - DNA, 639 bp, Homo sapiens
aaccttgaaaccactgtaattatatcttgaaaagataaatcatttgcacaatttagtgcttattattgatgaggaatttcttgtaagattgctgtcagctgcttcaaggagctactcaccctgttttctccaactcacagacgaccaagttctgtggatcaggcatgggtgtggcctagaccagctcagagcacagctgcaaagtctccccagatcctccccaagttaagcacacaagtacaggggcttggccacatgctgcagccaccagttcacactgattctgatagctctctttcttgccccactaatccacataacaatatgttgtccatattgctttgcagcatcgtgaaagtgctgactcatgtttcacaccagtaccaactcactctaacactcacaatctttcagctcaagctaaaagattttaattaggtatatggtgacacaaaacaagtkttctaattaaatttttgaaatgagtaaggaactgtaacattgcccctagataatggataaaagttcagtattaaatagactgcatgtactcacgcttaaattggtatagatgtaaaaaagaattagtcattgtatctgataaaaagtaatctattttatgaatttgtagtatactct

SEQ ID NO: 387212 - DNA, 632 bp, Homo sapiens
ccttgcatgcctgttttctggtgtatactgtcagcctagtcgacctgtggagtaaggggggaaaacccagtgtcccagttttttacaattatccatggttatattacttaatgaatgatcgtattatgaagagttgagccccaaaacaggttacatagtgaaactttcacctaattcttgagatcagctgcaggcaaaacactggcttgaagttagcatggtctggaatccggattttctcttcatcttccatctaccttggcaattctaagatgttaattctattgtaatctaactaaaatctgaaaaagaaacgttttagacaaattatttgctaaacagagaaaaagaacaatattgaaggggaaaaactctatttaaaaacagggctttgcatattttatgagaaaaatcaatccaaaatctattttgttctagcccattaagattcactctaagttggtttcgctagaatgaaatttaaaatacatttctaaagatcatttgtaagaaaatttgaatggaagcatttccaattcagtgttggcyggcaaattccaatttctgttacaatccagtcatagatactatgtttaaattggaatgattagagaagatactggcatagtatt

SEQ ID NO: 387213 - DNA, 561 bp, Homo sapiens
caatgaacccactgggatacttgaaaccacatataaaataatgtgaatgatacaagataattgtatcactaagtaccaagctgtgtgatgcaaacctctttaaatgccacacaagggataaaaaggatgttaacatcgtccaagaggtcagagaggttgctccaagcaggtaggcctgatgtccccaagtcttaaggatgagatttggatgaataaagaagtcatcctaagtgaagggaactataaaatcagtgacatggtgacagaaaagaccgtggactgtagggttgrgatataggtggggagtaagagtgaatatccccaatccactcagattagaaagcggcaacagctttgtgctggaaaaactgggtgtgtgagaggtagctacacacaaacacacccctgcctttcttctggggactataactttattgccattaagcttgtgtcatggctataatctggacaaatgagctctctggagatttcctctgccatgccctattctctcagacagttctctaaccaactttgacttatatgtttccatccctaata

SEQ ID NO: 387214 - DNA, 571 bp, Homo sapiens
gccacatcagcagccatgtggcttgacacagtagctgtcatctctcttatacctgtccttaggcaataagacagtaattcttttatcagataataaygccaatagtggtcagtgttcttatcaagaacaattttccgcttacctatttaatcttttacttctcccaaatccacgacttctgtggatgcatacttcttaagacacaagttgaaccacaagtttctacttttggcctttgtggaatgctcacaagtaatgtttttatacattttatgcttgttaaaagctagagtttctgacctgaagttacctttatcatatctagctctttttatcaattcctgttgccacaaattgaggcttatgctctctaatgttaattggattttgttttctcaccttaaatcatatgttctgacaatatctcaaccagttttggctctggtgatgatctcagcactcttactcagatttccaatcctcactgcatcattgaattcattacttccatgaatcgtattttatttctaaatagattaggccaatctcttaagctatttaggctggaata

SEQ ID NO: 387215 - DNA, 428 bp, Homo sapiens
tgatcatcaagttcattgactgaattacttctggaccattcctgatgcattccatatgtcttctccttagatgatttcagagatggggagttcactgttatgtgaggtgggatgctctgcttctgacccacagtctctaatatctgcacctaatattcttccaataagtgcatgatgaggatccactttgtgctgggttccaaatattaataataataataaaatatagcttctgcactcaaggagtgaattatggtcatgatgatatgttgartggatgtaaattattcatttactccttcatgagcagttctggtgaaccaggtactttgctgggggctagggatacaatggagcaaggatgccatccctacccttgtggaaattgcagtataatggaagagaaagacatgagtcagaaattcacc

SEQ ID NO: 387216 - DNA, 551 bp, Homo sapiens
gacattttttctttagattctargtaccttggtggttgttaagtggccagtggagttttttcttgatgcatcattactaaaataagattactggtgtcctcttaccttgccttaaacaatattcccaaaatgagtatttcagaagtgccaagagccaaaaatttgtggtgtggagttcttgcagaggctaacgtgtctccattattcctctagagtgtgatgttttgttttcatgttgcaaatacttgtaatagaggactatcctaaaaagaaagaacagaacagaaaagaaaagcatatcttactttgtttcattttgcccaattagtatgacgagctgagccagtgatcactggggtctgtttattggattacgtgaaagagcagtggaaatgaacaggatacattactttcccaggctactttacttctatgtaaaggtggatcctttgaattagcacataaccacagtagtgtgtaagcgtcttacttttctcctctgattttttaaaagacaaagatagaatccatgacattgtcttatattttta

SEQ ID NO: 387217 - DNA, 551 bp, Homo sapiens
gacattttttctttagattctaggtaccttggtggttgttaagtggccagtggagttttttcttgatgcatcattactaaaataagattactggtgtcctcttaccttgccttaaacaatattcccaaaatgagtatttcagaagtgccaagagccaaaaatttgtggtgtggagttcttgcagaggctaacgtgtctccattattcctctagagtgtgatgttttgttttcatgttgcaaatacttgtaatagaggactatcctaaaaagaaagaacagaacagaaaagaaaagcatatcttactttgtttcattttgcccaattagtatgacgagctgagccagtgatcactggggtctgtttattggattacgtgaaagagcagtggaaatgaacaggatacattactttcccargctactttacttctatgtaaaggtggatcctttgaattagcacataaccacagtagtgtgtaagcgtcttacttttctcctctgattttttaaaagacaaagatagaatccatgacattgtcttatattttta

SEQ ID NO: 387218 - DNA, 470 bp, Homo sapiens
tttttttttaacctgtgtgaccattgaagcacatttatagaaaatctcactgacagtgagttagctccattctagagaaggaagagaaatgtttggaaggttttyaaatgggagtatttactaaaccttgggtgtgtatatgtgtgtgtgtgtgtgtgtgtgtgtgtgtgtgtgtgtatgtgtttgtgtgtgtcctcttagtgcaggtaaatgaggaaatcatcagctattagagcccattgagtctggtatgtgtagaatgttctctattcaagctttttctctgccacttatttggtgtttggctgccatttcaatgggacggtgtcttagtttcctctaaatccatttgatagagagagaaggagaagaaggaagatgagaaaagagagagagagagagaaagacagagagagaactctttagtacaatgtgcattttgaatggcttatgtatgatacatgaacaga

SEQ ID NO: 387219 - DNA, 470 bp, Homo sapiens
tttttttttaacctgtgtgaccattgaagcacatttatagaaaatctcactgacagtgagttagctccattctagagaaggaagagaaatgtttggaaggttttcaaatgggagtatttrctaaaccttgggtgtgtatatgtgtgtgtgtgtgtgtgtgtgtgtgtgtgtgtgtgtatgtgtttgtgtgtgtcctcttagtgcaggtaaatgaggaaatcatcagctattagagcccattgagtctggtatgtgtagaatgttctctattcaagctttttctctgccacttatttggtgtttggctgccatttcaatgggacggtgtcttagtttcctctaaatccatttgatagagagagaaggagaagaaggaagatgagaaaagagagagagagagagaaagacagagagagaactctttagtacaatgtgcattttgaatggcttatgtatgatacatgaacaga

SEQ ID NO: 387220 - DNA, 470 bp, Homo sapiens
tttttttttaacctgtgtgaccattgaagcacatttatagaaaatctcactgacagtgagttagctccattctagagaaggaagagaaatgtttggaaggttttcaaatgggagtatttactaaaccttgggtgtgtatatgtgtgtgtgtgtgtgtgtgtgtgtgtgtgtgtgtgtatgtgtttgtgtgtgtcctcttagtgcaggtaaatgaggaaatcatcagctattagagcccattgagtctggtatgtgtagaatgttctctattcaagctttttctctgccacttatttggtgtttggctgccatttcaatgggacggtgtcttagtttcctctaaatccatttgatagagagagaaggagaagaaggaagatgagraaagagagagagagagagaaagacagagagagaactctttagtacaatgtgcattttgaatggcttatgtatgatacatgaacaga

SEQ ID NO: 387221 - DNA, 581 bp, Homo sapiens
agaaagccacacgtccttgtggaagtttcaagcacattatcacccacttacaggcactaatgacttcgataatatagtgaagtttagtataaataggctcatcattaaagttgatggcagaagtataaacaaggcccacactattaaatttgctattcgtttgttatgcgtctggaattatcctgctgtctctagctgtctcatactgagtgtttataaacctaagtcgaacgtggtattattttgtttttctgtccaacctagaagaatgaggtgatttttaaacattgcctctcctacaaatgggattacccaagctgggaaggacaatccttgyatttcccaaggcagcatctgccattctggtcacaaagcctttcagggcatcagagttttacagaaaacaaaaagaaacaactcagcaatagagtcaaggaagcaggttaagggtttgatgaggtgacgttggcaagacactgagatttgaactattgtgctgtaagcagagatggtcaaatggcgttatcaactattatctgttggcagcaatggtcatatggcactatctaccacaaaggggt

SEQ ID NO: 387222 - DNA, 428 bp, Homo sapiens
ctattgccaaaaaaaaaaaaaaaagagtacgtgcatgtggatttttttaatgtttgaaactttttaatgtactgttaytttttaagttttattttatttttaattgactaacaatcattatctacatttatggggtagaatgtcctgtttccatacttgtatacattgtaggatgaccagtttcttggttcttagaaccagtgcctccctcaaatgcaaagatcctgtttggggtcttttcatcctacccatttaatctaacacagtactgagcactgtgttataggtgccccataaatgtctgctgaaggaatggccattttctaaaatcgccctgtcagggtgtggagggcatgctgctcttgaaattaagcattcactttgaagcaatgctgtttgtttctgcatgaggggcagccacctcctat

SEQ ID NO: 387223 - DNA, 570 bp, Homo sapiens
attatgggatttggagagaaacatgttcaaatctcatctctgttccttattagctgtgttatcttgagcaagtcatttaacctctctgaagctcaattttacaatctgtagtacatgacaacactcgccatagtaagcaccactttttcttctctaccatgaaacatcaagtcgtgtcacttctgtttggcagaatcttgaaggcttttcccccacctgtttttttacagccccctttcaccctctcattcctcattcctttctgaggacatccatgtgcttgtgtatctcaccatgtggaaaaaggatctgaggaacacaggcagtaccagggaccaggatttaatttcttacttayctagaacatatttgtagtttgaaagaggaggacttgatggatacaggcttaatgcaaaagcataaaccatgactagtaagacatcagcagggaaacattcatttgggaagctatgtataggcaacagcatctccttcttgtgtccaagattaactttatcaatgcaaagttctcatgagaacaaaagggctgcatacaaccctagctcatgc

SEQ ID NO: 387224 - DNA, 429 bp, Homo sapiens
cgagatttttcttaacctcagagaaaatgttgattgtctttgttatttacaagaaaagagaaagagtcgaaagagttaaagggatgctatgagwtaagacttggcttcaaattaagccaagggattttgtgggtggatccatctgggagcctggataattagaaattgggagtaaagatttttctctggaagtttataacagacaaaaccctgaaatggcagtagttatttatcattgactgagtacgcaggagaatttgcacaatgcctgcaactacggtccacagaaaacttttttttcaacttcatagagctaaatgtttacaaacactttataaataaaaaggtgaggtctattttcaatatgatttctccactcagcattttttttcacataaggccattcaatctgacatatgtcagaggcaa

SEQ ID NO: 387225 - DNA, 600 bp, Homo sapiens
ttttggtatattttatttttgttttatttgtctcaatatattttctaatttttcttttgattttttttgacgcttttaatgttcaatagtgtcttatttaattatgtttgtaaattttccagttttcctttggctattgattttagtttcatttcattgtaatcggaaaggatacttggtatgatttcaatattttaaaatttgtttaggctagttttgtggcctaacatgatcacaaaacaagaatttccatgtgtttaaaaatatgcaatttactgttgttggttggagtrttcggaatatatctgttacatccaattggtttatggtgttattaaagtcctctctttccttattgatctcatctgtttgatattcattgttgaaagcagagtatttaaatttcctattattttttgtgttactgttaattacttccttcatttcttttaatgtttgcttcatatatttgagtgctatactgttaagaccatagtcataattgttgtatcttcctggtgaacaaatccttttctcattatataatgcccatttttgtttcttgtaactttctaaacttaaagtctacgtttttaacat

SEQ ID NO: 387226 - DNA, 617 bp, Homo sapiens
agagaactatgctatctgaaatgagatataggattggcataataagtttttctttgttaaygattcaagaagttttgtaacattaacattactgtttaaatagtatctccaaattaaaattctgatgtattctcaaattaagttccaggtttttacctgctctggaggatgaagaaagattagaatatgttgttctctagctctagttctgatttgcaggtctgcaatttcttagctttctctcatatttttggctgccctttcatcatcaccttcacttaactctctttcccttacctacactctattgggcttgtaaacaaaattatatctaatgcataggtttatatagattacatataaacatatgtgtatgtgcatagatagatatagagggtcataatttatatttatgtttaccttgtatatatttccacagtgattttcttcatatttgcatagttttaaaattttaaattccaaaaatagggtatgagataagctttttctttaaggttgattgatatttgaccaggattgttattattcaccattccaataggtttaataagttatgttgttcctttctcaacgtaaagaaagaatgcacatttata

SEQ ID NO: 387227 - DNA, 496 bp, Homo sapiens
ggaagtattatagataacttctgatttcaccttcaccatttcaattcagttttcaacaggttgattttattacgagcatgcaattattaatgtaattcatttcagtttataaatcttctgaatgtaagatgcattaataactcaaaggaaggaagattatatctcaaattgggaaacttagtgatgatctcataaaataggtaatattaaacaatgactttgaagtaaggttatttcagacataactttaaagcaacctaaaaacaaacattgaaaagataaaattaatttgcaaataacttaaattaatgccagaaacaacagaaacacttttaawcatacaaaaaaatttaacactcagtagtgtaaaactgacgatgaaaaataggaaaatgtgatccataagaagcacaaatatgagaaaatagaaacaaactcaggtatgatagagataagggggttactagacaatgctattggaatagctaatacaaac

SEQ ID NO: 387228 - DNA, 496 bp, Homo sapiens
ggaagtattatagataacttctgatttcaccttcaccatttcaattcagttttcaacaggttgattttattacgagcatgcaattattaatgtaattcatttcagtttataaatcttctgaatgtaagatgcattaataactcaaaggaaggaagattatatctcaaattgggaaacttagtgatgatctcataaaataggtaatattaaacaatgactttgaagtaaggttatttcagacataactttaaagcaacctaaaaacaaacattgaaaagataaaattaatttgcaaataacttaaattaatgccagaaacaacagaaacacttttaatcatacaaaaaaatttaacactcagtagtgtaaaactgacgatgaaaaataggaaaatgtgatccataagaagcacawatatgagaaaatagaaacaaactcaggtatgatagagataagggggttactagacaatgctattggaatagctaatacaaac

SEQ ID NO: 387229 - DNA, 566 bp, Homo sapiens
cacaaacatttctattgaaatagttgaatactgctctgaaataaactgaaggactgaatgagaacaggaataatgtcataaaaagcagaagcttttcaacttcacaacagggcagacaggaggagctggggagagtgtctgctgtgtctcaaaytctggctttgtattttgaagctgcacagactcatctgcaaagtgatgtgagatccaaggacatcagcctcaactaaccagggtttacaggcaatgagtcattgtccaaattgaaaccaatgcttttattgtggatatatcagaaagtccttcaacagtttgtgggtatctgtgtttattcaattatcttattttaatccaaaccaccattctttaataaatgcagcatcctcatctgtaggtttagcttgtgcacacttccactttgcctagtaatccctaatcatttgtgaagctcaaaaatgcaacagttagaaactctgtatctctcccctcttctaattcagcaagtttcccccacctggggctctgcattgcacctggtcaacactccctcccacacttaccagtca

SEQ ID NO: 387230 - DNA, 566 bp, Homo sapiens
cacaaacatttctattgaaatagttgaatactgctctgaaataaactgaaggactgaatgagaacaggaataatgtcataaaaagcagaagcttttcaacttcacaacagggcagacaggaggagctggggagagtgtctgctgtgtctcaaattctggctttgtattttgaagctgcacagactcatctgcaaagtgatgtgagatccaaggacatcagcctcaactaaccagggtttacaggcaatgagtcattgtccaaattgaaaccaatgcttttattgtggatatatcagaaagtccttcaacagtttgtgggtatctgtgtttattcaattatcttattttaatccaaaccaccattctttaataaatgcagcatcctcatctgtaggtttagcttgtgcacacttccactttgcctmgtaatccctaatcatttgtgaagctcaaaaatgcaacagttagaaactctgtatctctcccctcttctaattcagcaagtttcccccacctggggctctgcattgcacctggtcaacactccctcccacacttaccagtca

SEQ ID NO: 387231 - DNA, 590 bp, Homo sapiens
aagcaaatatgtctttccagctgttgcccaagctccctatctctttttgttttttaatcacaatatcctcagatcctagaacagtaactggcactggaaaattatttgctgaatgtgtgttattgattctttcttcaaagtcaggcttcctcaaataatagtccacttttactgacattctttttttcctcattcattcccactcagtaattttactttcttctctaatgaaaacattttgctcttcctttgtcgtcatagtgaatgacaccatagaagctccccaaattatcctcttcttcatgaccatcatttaatgttaccacacatcaaggctgtcctacytcttttgcattgtctacatataacttcttctttcaatactgtaaatgttatgaccctatactttcccacctggattattataatcccttttgactcattttgcatatcatcagccttattctgctcatcttacacatttttctcagagtaaagttgctaaaattcatataatcctgaatcaagttttttttacataaatcaacatgtttcattataaaaaccaagctcatactcatgttgtataa

SEQ ID NO: 387232 - DNA, 613 bp, Homo sapiens
atttgcaagagaatttaattttcaaattttatttttttttctgtgtgtttcacaatgagcgtcagttamcattgaagtgtaaggtatctatctctattatgccgaaattttatctcattgccttacctctgataggttacataggataatgcagttgcagataatctaagctgcataataaagtgaattttcaggcttaactacagagttaacttgaagttgattcattaaatgtataatcctgacctatttcttagaatttttagggcaaaatttatacttcaaattcctatctgtggtggactcccaaagaaaattggttgcagaagtagataagtcatgaagctaataaaacaagcttcagggcccttaacctgcataggccccttctaagaccttgagagggacccagaaatgtgttcagttggatatatattttggtaaaattttcaaccttaaaaatattacttgcattcagttaagatcattgtcctttttttactctgacaccacttacatcccacttttctccctgttacgtagtgctcaaggatctgcaggtactttttggatccaaattaaggaaagatgagtggaaaatatatgtaatgtg

SEQ ID NO: 387233 - DNA, 591 bp, Homo sapiens
gcttgtgcccaggagtttgagaccagcctgggcaatatagtgaaaccctgtctctactaaaatatacaaaaattagccaggtgtggtggcatatgcctttagtcccagctgattgggaggctgaggtgggagtatcacttaagccaggaggttaagactgcagtgagctgtgatcctaccactgcagtccacactgggcaasagagcaagaccatctctcaaaaaaaaaatagtgtattataaacatttttgtatatgtcattggtcaagctatacaagctatataagtatttcttccatttagctatctagtagtttaactgttgagttgcaagatttgctgttgttcacctttaagtgatattggcaaaagacttttcaaggtggaaattggcagaccaagaagcaacatataagcacatcagatactccacattttacaaatagtgtcattttcattttagccattgaacgagaaagtacacagttgtatcccattgtgatttcaatgtacatttccataatgaaatgttgagtaacttttaatctggcatttgcatatgtttctttgtgaggtgcttgttcatagct

SEQ ID NO: 387234 - DNA, 618 bp, Homo sapiens
ctgcaattcaaaataggcaaaaatgattatttctttattttaaatatctctgcacattgaggcaagttataaaaatcartgtccccacacattaaaaaaataagctatgcttagacttgtttttcttgctgtttgtcttattattttttcagtttttttaaggtcatgccatagaggttcacaagacgtgtattgtttaataatagaaacagcataggtagagtaaaaatgtttccagttttgatttgttttgtttttcctgagggtagattttttagcactctggagagtgcccggagcttgcttgatataatgataataatgtactctctaataagaaaccctggttctttagatgtgatctcatttatttttcaccattcccatgagatggaagaaggcacagatttttgaagcttaattaagacaaccagagatagtagatgattgaactggggaaataatttaggctcactgactcatactctaccaaaattgaaggagacatgggatctgacctatacttggctccagacaggtttgagcttatgtcaggctcactgcatttcaacctcagacaccgtgagaagaatatgagtatgcttctgacatggccta

SEQ ID NO: 387235 - DNA, 618 bp, Homo sapiens
ctgcaattcaaaataggcaaaaatgattatttctttattttaaatatctctgcacattgaggcaagttataaaaatcaatgtccccacacattaaaaaaataagctatgcttagacttgtttttcttgctgtttgtcttattattttttcagtttttttaaggtcatgccatagaggttcacaagacgtgtattgtttaataatagaaacagcataggtagagtaaaaatgtttccagttttgatttgttttgtttttcctgagggtagattttttagcactctggagagtgcccggagcttgcttgatataatgataataatgtactctctaataagaaaccctggttctttagatgtgatctcatttatttttcaccattcccatgagatggaagaagrcacagatttttgaagcttaattaagacaaccagagatagtagatgattgaactggggaaataatttaggctcactgactcatactctaccaaaattgaaggagacatgggatctgacctatacttggctccagacaggtttgagcttatgtcaggctcactgcatttcaacctcagacaccgtgagaagaatatgagtatgcttctgacatggccta

SEQ ID NO: 387236 - DNA, 510 bp, Homo sapiens
tggggtataaggagactttgtaactcctgttcagtatatatggacatgggaggtgctagaaaggagagaaagcattgttctttcagagtgccatttaggcatcaataggctgtgttattatagatgaaaaaaatgcctgaagttagacaagtgaaacctgaggtcttgcactagtctctgctgaccatttgttttttgtattcctagcattcggttattgcaaggactgttacattttcttactaaamcttgagcttttaaatgtctaacaatatcctgtaatcctttgagagctttaggccttaaggtatattgcctttaataaggaaaagtggtggggtcttttagcttgatttggactggatgggcattctttgcctttccaaattgtcgttttaaggcccatacctcaaagttgattccttctttaattagggacaacaaataggtaatttgttccccatattcctgtagataatggccccagctttggctaatatgtccctccct

SEQ ID NO: 387237 - DNA, 510 bp, Homo sapiens
tggggtataaggagactttgtaactcctgttcagtatatatggacatgggaggtgctagaaaggagagaaagcattgttctttcagagtgccatttaggcatcaataggctgtgttattatagatgaaaaaaatgcctgaagttagacaagtgaaacctgaggtcttgcactagtctctgctgaccatttgttttttgtattcctagcattcggttattgcaaggactgttacattttcttactaaaccttgagcttttaaatgtctaacaatatcctgtaatcctttgagagctttaggccttaaggtatattgcctttaataaggaaaagtgstggggtcttttagcttgatttggactggatgggcattctttgcctttccaaattgtcgttttaaggcccatacctcaaagttgattccttctttaattagggacaacaaataggtaatttgttccccatattcctgtagataatggccccagctttggctaatatgtccctccct

SEQ ID NO: 387238 - DNA, 617 bp, Homo sapiens
ttatagatgaaaaaaatgcctgaagttagacaagtgaaacctgaggtcttgcactagtctctgctgaccatttgttttttgtattcctagcattcggttattgcaaggactgttacattttcttactaaaccttgagcttttaaatgtctaacaatatcctgtaatcctttgagagctttaggccttaaggtatattgcctttaataaggaaaagtggtggggtcttttagcttgatttggactggatgggcattctttgcctttccaaattgtcgttttaaggcccatacctcaaagttgattccttctttaattagggacaacaaataggwaatttgttccccatattcctgtagataatggccccagctttggctaatatgtccctccctaataagggtgtgggacttttgggcataacaagaaaggcatgtgaaaagaacaaagtctcctaatggcagctgaggaggcaagagaaatacctggttacaggctgtcttaagattcctcggatagtaatggactttgaggacagtcgttcagggcaggagattaaaactgagaagaccacaccagtgtccaggaggaagtccacttcctggacctcaacagtcaa

SEQ ID NO: 387239 - DNA, 547 bp, Homo sapiens
cctgggcacggccatgaccctgctgggtatgcacatgctcagggtggcaccgacacaccagaaccctgctgtctcgagcccctctggacwttgggtgctgataagcatgggagggacggcaaagagaaggttggcatgggtctgcaggctgtggatggcaggttgatgatggcagaaagcagataggctcctgggtggaaagaggtgggtccctggtgaagactcacctttatgctagggatggcctgaagcctgggtgccaggctgccagttgcttggagcagagtgaaaattatggtgccttttccgggcccagccatggccgcccatggaacaatcagcacacacttcctcctctttgaagcccataaaagcctggactcagccagatttgtagagacattaggacaacctgcctgtggggaggagctacccactgtgggtcttctctcagctgagagctgaacagacatctggatgatctgcctgttgaaagaagctacccacttcaggtctctggagagctgtactgtagctcaataaaaca

SEQ ID NO: 387240 - DNA, 547 bp, Homo sapiens
cctgggcacggccatgaccctgctgggtatgcacatgctcagggtggcaccgacacaccagaaccctgctgtctcgagcccctctggacattgggtgctgataagcatgggagggacggcaaagagaaggttggcatgggtctgcaggctgtggatggcaggttgatgatggcagaaagcagataggctcctgggtggaaasaggtgggtccctggtgaagactcacctttatgctagggatggcctgaagcctgggtgccaggctgccagttgcttggagcagagtgaaaattatggtgccttttccgggcccagccatggccgcccatggaacaatcagcacacacttcctcctctttgaagcccataaaagcctggactcagccagatttgtagagacattaggacaacctgcctgtggggaggagctacccactgtgggtcttctctcagctgagagctgaacagacatctggatgatctgcctgttgaaagaagctacccacttcaggtctctggagagctgtactgtagctcaataaaaca

SEQ ID NO: 387241 - DNA, 592 bp, Homo sapiens
ttagggcccacctgcatatttacaatgtcttcttatgtaggaaagattcattctcaaattgcacctggcagtgaaaaatgaaaatttagatacacatggctaagattcttatagtaactcagtgtgtttttaggttgatatatattctttcggctccatgtaaggtctctctatatatggctattataatttctattccacaaccactaaaggaaatgtgaacaaatgatacaacagtatgaaacatgggcaattgcatgtgaactcctagttcaaaatctattcagtttctaatactttagtttgacagacatgtattaccagcaaatgtcagtcaggtaaatatatgggycctaaatgccaatgtttctatgaataaaattttaaaaaataaggattttgaattaaatgtgaatatgtataatacataagcataactttttaaagagcaaataattttagtaaattccttttcctcattctccagaccaactacaatttcaaaatgaaagggaaaaagagctatgatcagaggtttgtttatgtatgctagaaaaacatactatcccaaatataacataggcttacttgt

SEQ ID NO: 387242 - DNA, 633 bp, Homo sapiens
tgccaaaacatgtgtctttggataattttattctactactgggttttctaacttgaaaaccctcaggaaaaattttttgccaggcttgttcctgggtcgtatatctgtattttatcaagaaacgttcctatgtaaatgctactatgtagttttcttttcaaagctttatatattatttccctttttkgaaaatgaagaccccaaatgaaaaaaaaatgaattttatgtttaacatatttttgagcaaaaaatgcattacagcaaacttcccactgagaacatggtaattagttaagttggcagctcacatctggcataataaagaagggaatataaaagtccttgatgtaaccgaagtgtttatcagtttttagatccttcgtgttactgccagattcaagaaaatatttcattaagagttggctctcttctcatcttcactaacttgaaggtgctgccctccttactctcctgggtgctaaaaagatcagtagcataaacagcattacattttacttctcagatatctcccttaaaaacgaggtatgatgagaagtcaaatctgttagctactgggctaagaaaagtaaaacagcattcacttacagaaagataagttcccttacacactgg

SEQ ID NO: 387243 - DNA, 556 bp, Homo sapiens
caaaaatctaactctactctccagtgaagtaaatgaacaaacagaggaagaaatacctagtacactctcaaagaggctttcaattgcattttcttctttgtataaattgatgacattacagttacaatttgtacttattttatccaataactgaatttttgataagttakgcaagtgaatatttatgtatcatgttatagctaacatttgaatttctatttcagatttattctcactaaggaataacatctttccaactacactaaaaagtgaaatgtaaaaagagggcaaaactcactgtgacaatgtcaaaattcattttcaaggagatttcagtctttgtaaatgtggagtcagtatgcattgaaatttccaatacaagctctgagtgaaattcattaaaagggaaatcaatccatattgtcttagtactctttaaagcatatgtaaaataaaatatattgcatagcgaattctaattttattgacacttcttactgcctctcagggatttaaatgtttaaatattttagcagccacactggttaatgtttca

SEQ ID NO: 387244 - DNA, 657 bp, Homo sapiens
tacagtgaatgcttatttttgctcttgagggtaggggagytcaaagcagcagagtagctgaggtcagtcacacagacgctgcatacttaagtacatgactccccataaaaaccctgaacactaagagtgaggtaagtttctctggttgccaacactttgcattttatacatgaggaaatcaaggtatagaaaggcaaaatgactttcctgaagtcacataattagtaaggaggagaacctggcattgacctgtggtatttcagctttggaaataatttgttaattccacagataatatcatttacaatattcactggcataattatatatgtgtgtatatttatatatatccctatgcatgtattttgaaaagtaatatagctcagcctctcctgtttatcattcatcaggaaatctaggtaaggcaaagcaaagttgatttcatttgctaaaaaacaataattagtttttctaagaaccgctaagatgtggcctttttcttttttctccttttttattttcacttactattaagtatggattttgctccagactgccaaaaaagataagagaatagctacataataattcagtttatagaactataaatgactttagccatctttaaaaaaaaatccttctcagctatgaatgaaa

SEQ ID NO: 387245 - DNA, 547 bp, Homo sapiens
aactacaaattaaaatgagataccactaggtacttactaaaatagccaaaatgcagaacattaataacacaacatgctggttaggatatggaacaataggaactcccattcattgctagtgggaatgcaaaatggtacagccattttggaagatagtttgtcagtttcttactaaactaaatctactcttacttactatatgatctagcaattgcactacttagtatttaccaccccaaagttgaaaacctaggttcatgcaaaaaccttcacacaggtatttatagaaacgttatttataattgccaaacttggaagcaacaaagcaacctaattctcgtaggtgaattgataaatcaactgtagtatatctagacaataaaattgtattcagtgctaagtagaaatgagctaccaaagaatgtaaatacatggaggagacttaaatacatattatgaagcgaaagaggyaaactgaaaaggctacaaactgtagaatgccaattatatgatattctggaaaaagcgaaactatggaaaagaaaaa

SEQ ID NO: 387246 - DNA, 555 bp, Homo sapiens
gagacttttcattagctgaaccctaaggaacaaggacaaactgtcactccttcaggatgggggcccgcaccttctgatttttgaatctccagcaccagtggaatgcccgacacgtgtaaacactccacgaacatggaatgaatgaaaccatcctctgctgctctttagtttctaccaaacgccctgtgacaggctgttagggaaagacaccctggagcaggtaacacaggcacatcctgaagaaagtgacaggctgttagcaggcaggaggcactccagccaaggacttggaatgagtccatcagctgtgctgccccctcccagcccttggctgcagcaggaggatcaggaaggagaggaacaaggactgagggtggacaggacaagyggctaagagacagtcatactgactctcggtcagtgcttttttaaaacccaactcctctgtcacacagaggaaatggattaaaaaggtctcttgctggaatacaaattgctcaaatgcataccatcacatccccaaaatggaatcaatgagaacactgaggctgtttt

SEQ ID NO: 387247 - DNA, 586 bp, Homo sapiens
ggcagctattactgtttttatatgaagaggtctacatggggtgctatggagcccagaggagccgctcccagccacagtccctaacccctcaggcctgagtctcctttctcctccaactccagcccagccgagcatggccctggctmccctgttacctcttttcccatggtccatgctagggcctgtgctcagtgagggctggacactctgtgagcatggccaggttctggtggccccagaagacctctggcagaggagaaaggctgcagcaggtaaatcagctccactgtgctgagctcagtcctgctcctgggctgttcgtgggggcgggcaggtgggtggggtcttcctgagttgtgagcccaccaggcctctcagccagcagttgtgggtgtggccagcggcctttgcaaagcttctagcaagaaggaaccttcctgggcatcttccctgcttccctgcaaaaggaaacaacacaaggaaagagctctccatatccacgtgtccaaacacaacagcttatttcagtgtattgtgaagtcattgtatttcactttgtgctgttttgcgggttggtatttgttta

SEQ ID NO: 387248 - DNA, 586 bp, Homo sapiens
ggcagctattactgtttttatatgaagaggtctacatggggtgctatggagcccagaggagccgctcccagccacagtccctaacccctcaggcctgagtctcctttctcctccaactccagcccagccgagcatggccctggctaccctgttacctcttttcccatggtccatgctagggcctgtgctcagtgagggctggacactctgtgagcatggccaggttctggtggccccagaagacctctggcagaggagaaaggctgcagcaggtaaatcagctccactgtgctgagctcagtcctgctcctgggctgttcgtgggggcgggcaggtgggtggggtcttcctgagttgtgagcccaccaggcctctcagccagcagttgtgggtgtggccagcggcctttgcaaagcttctagcaagaaggaaccttcctgggcatcttccctgcttccctkcaaaaggaaacaacacaaggaaagagctctccatatccacgtgtccaaacacaacagcttatttcagtgtattgtgaagtcattgtatttcactttgtgctgttttgcgggttggtatttgttta

SEQ ID NO: 387249 - DNA, 583 bp, Homo sapiens
cgctttccaaccctgggcctttgctaatgctggtccctcactgcagaagatccttccccatccttttacagatgacctaaaatctcccccttgcagggtctggacttgggctgtatggagaagttctaatctttactgtaacctcagctagagctacataatttcagcgcctcccactgtgcatctttcaaatggktgcaaaggtcttatctgatatgttgctgagcagctgtgtgtggaggtgaaatataaatggtgacatgggcacagatgtgagggccccgttgatgtcaacgtcacattatatgaacagtagtaaactttcctcaacactgactacatgcccggcacttttgtgatgctactttcattcccattttacagatgaggaaactgaggcacagagtggccaagtgactttttcaatatcatagggctggagaatggtgactagttttaatggccagcaaaagcaggaacaaaagctaccatctgcttggaagcgtcgttacttttgaacagaaactctggtgtctggcagacagcaatgaattcatctacttttgcataggagtacggttat

SEQ ID NO: 387250 - DNA, 626 bp, Homo sapiens
ctgggtaactgagccatgaaaaataatcctacccatgttcctccactggcctcagagaaggaatcctgaaagcaaattgttgtggtggaaagactcttgtctgcatgccaaggggttctttctgggggatgagagcattcccatggttcctaagaaagtatccacagaattcatacatttccaggttagcttcggtgcagaaaatcatctcctttccaggttctgatggatgcttgtggkgttggtgaccatgaatgtgttactgaagttctctgtgcctcagcttccccatatataatagggcatcaggacccacttcctcgggtggtttgaggatttgtatatatgtattagtctgttctcatattgctataaaaaatacctgagactgggtaatttataaattccccatgtaaaataggtcatgaggacccacttcctcgggtggtttgaggatatgtagatatgtattggtctgttctcatattgctataaaaatacgtgagactgggtaatttataaagaaaagaggtttaactgtctcatggttctgcaggctgtacaggaagcatggtgattctgcttctggggaggcctcaaggaacttgtactcatggtggaaggca

SEQ ID NO: 387251 - DNA, 612 bp, Homo sapiens
gattagcctgagaaaggaagagtcacagagggacatttgtgtgaggtcttgagcctctaccctggctaccacggctcccctcgcctgtgtctgacgcacatttcttgaaacccagaatgtttattttctaggagcttggggagttcttttctcacagactcaggaaggactaaaactggaagatttctaagatccattttccatataaatgtatatcttcaaaatgccatgccccacacatcttacaagctcccagagagagggaaatggagtggaaagggagaaccttatggccagtagtacyggggcagctgtgtccaggacagcatagccccagtcttccaaacaacagtccctgtagcagagaagcaagaaaaccagcacaacatgtgctcccacctctatagcagcttcttctctgagccctagagtaggggtccccatcctctgaactgcagactgatgccagtccctggcctgtcaggagctgggctgcagagcaggcagtgatcagcgggccagtgagcattactgcctgagctatgccccctgtcagatcagtagcagtattagattctcataggtgcacaaaccccattgtgaactgtgcac

SEQ ID NO: 387252 - DNA, 656 bp, Homo sapiens
gcttgtctagaaattatatatttatacctacgaatatattatgaatgttaaaaaccttacacaaaaatagaaatttcaaacctaggcacggtgatatgtgtctgtagtttaaataatcaggaggctgaggcaggaggattgcttgaacccaggaatttgaggctgcagtgcattgtgactaagtctgagaatagccactggactccagcctgggcaacataatgagacattgataatggtttggctgtgttcccacctaaatctcaccttgaattataataatctccacgagtcaagggcggggccaggtggagataattgaatcatgggagcagtttcccccatgctgttctcatggtagtgaataagtctcatgagatctgatggtttcataaagggaagctcccctgcacatggcccttgcttgccaccatgcctttgcccttcctttgccttctgccatgattgtgaggcctccccagccatgtggaactgtgagtccgttaaacctctttttttaaataaattacccagtctcaggtgtgcctttagtagcagtgtaaaaatggacgaatacagrcatcatctctagacaatttgattaatttaaaaataataacaatagccaggcgcaggactcacgcttgtaatgccag

SEQ ID NO: 387253 - DNA, 464 bp, Homo sapiens
catttagatataccttgtccattctgaaaatgatgcatatttatatattccacagataaaattaaaaactacaatataaaagtaaaaacaaatataaaatcataaacgatttggggtattttatatatatatatgtattttatttccagaaaatctaggataagaaaaacttttaaatctgagaataacaattagctttgartcatcttctagactcaaaattcttccagttcatttttcacatagcttcaggacagaaaactaccaaaaatattataagaaatatttcttcaaactactgctttcattgtgctgctccccagggtggggaaaaataaaaaaaattgaaaaaaacttaaatggcttttctttattctattacagaagtccaaattcctttacctgattttaggtcccttcataatttaaactcatacaatatatgtaatttaacttccaacaca

SEQ ID NO: 387254 - DNA, 498 bp, Homo sapiens
gtgtgtgttctacagaagcaagaataatggcaatatttaatgacacactcgcatatttaatcaagaccacttacatcattattttattcttcgtgtattactctatgctttttaaaggcattttgagaaaaatatatttattttacccaaattatttatttatttttakaaaacaaatttgtaaattattaacagttatacatttttaatgttaaaagttattcatggaaattgggtggtacttaaattttgtatttataagatatttatctagtttttcatttatttactattgctgacaaatcaataaataggtggatgtgttcaaaccaatacgggattttaaaacagggacttttcagtatatagttgcatagatgatgaaatagatgaaaggcaacatatttagatttaatggaagaagataaaactgtgagaacacgaagaagcacacagctgagaaggttttctgatgatagcagagctatcatttagtaa

SEQ ID NO: 387255 - DNA, 584 bp, Homo sapiens
tatttttctctcttaattgcctgcctcatgagaattcaaagcacattgggctttacattactgtttgacaataatataaatatatatatatatttgtaaattagagctgagtgatgcttattttcatctttgagatatgaggctttcagaaagaaaaaaaataggctaaaattccctataccactctaaaatgcatgttcttgatgtaatggtaagtaatgaggatacaaggatgaaaaagtcagacgtgccccctttctttataaaagttagtcaaattggcatgcggaccaattttttaaaataaaattaatgtgctatgataattgccawgatgagaatagtactgggtgccatgtgaactcataagaagcattgctaacctaggctggtatagacaggaacaaagtctattgaaaattgtgactgagggctttgtgattaataaactggctccagttagtgtatctttagtacatgttgtcgaaatttatgaaagatgtatcatggccaaaatggttatatggccaaaagggaagaacaactgacctcttcacggtaaggatatgtcttgactaatgtag

SEQ ID NO: 387256 - DNA, 584 bp, Homo sapiens
tatttttctctcttaattgcctgcctcatgagaattcaaagcacattgggctttacattactgtttgacaataatataaatatatatatatatttgtaaattagagctgagtgatgcttattttcatctttgagatatgaggctttcagaaagaaaaaaaataggctaaaattccctataccactctaaaatgcatgttcttgatgtaatggtaagtaatgaggatacaaggatgaaaaagtcagacgtgccccctttctttataaaagttagtcaaattggcatgcggaccaattttttaaaataaaattaatgtgctatgataattgccaagwtgagaatagtactgggtgccatgtgaactcataagaagcattgctaacctaggctggtatagacaggaacaaagtctattgaaaattgtgactgagggctttgtgattaataaactggctccagttagtgtatctttagtacatgttgtcgaaatttatgaaagatgtatcatggccaaaatggttatatggccaaaagggaagaacaactgacctcttcacggtaaggatatgtcttgactaatgtag

SEQ ID NO: 387257 - DNA, 591 bp, Homo sapiens
agcatttaggtcaatagtaagtctaacaaaatataattagatagtataacgaaagaacagatggcttttacataattctgaccatgtatatttgagcctttgcaatttgagtcttgcaaattatctcccaaaacagtttgtatgagcttgtaccaacatttcctatgcagtagcatcccttaatttgccatctcctcccttccttcatgtataactagcctgagagaatgcaggcaacttcctgcaagtattatagttacccscaaagcaaacacaatcatggagacctaagaggatatcaggtaagtttcctaaaataggtcttttcattaaccaagaaattaaatttcctttggaaaaagtctaaactcttgggtattattaaacttgtgaaccaaaactgtttttaggactgtcattaatattttctctctctctttctctctctctcatttcctctcttctgtcaagttttgagcagttggcattgttctgtgaaatgataaactacaaactagagagcctgagcatattttgttgaggagcagaattcaatttagttcacactttaggacccagaggccaatactt

SEQ ID NO: 387258 - DNA, 591 bp, Homo sapiens
agcatttaggtcaatagtaagtctaacaaaatataattagatagtataacgaaagaacagatggcttttacataattctgaccatgtatatttgagcctttgcaatttgagtcttgcaaattatctcccaaaacagtttgtatgagcttgtaccaacatttcctatgcagtagcatcccttaatttgccatctcctcccttccttcatgtataactagcctgagagaatgcaggcaacttcctgcaagtattatagttacccgcaaagcaaacacaatcatggagacctaagaggatatcaggtaagtttcctaaaataggtcttttcattaaycaagaaattaaatttcctttggaaaaagtctaaactcttgggtattattaaacttgtgaaccaaaactgtttttaggactgtcattaatattttctctctctctttctctctctctcatttcctctcttctgtcaagttttgagcagttggcattgttctgtgaaatgataaactacaaactagagagcctgagcatattttgttgaggagcagaattcaatttagttcacactttaggacccagaggccaatactt

SEQ ID NO: 387259 - DNA, 591 bp, Homo sapiens
agcatttaggtcaatagtaagtctaacaaaatataattagatagtataacgaaagaacagatggcttttacataattctgaccatgtatatttgagcctttgcaatttgagtcttgcaaattatctcccaaaacagtttgtatgagcttgtaccaacatttcctatgcagtagcatcccttaatttgccatctcctcccttccttcatgtataactagcctgagagaatgcaggcaacttcctgcaagtattatagttacccgcaaagcaaacacaatcatggagacctaagaggatatcaggtaagtttcctaaaataggtcttttcattaaccaagaaattaaatttcctttggaaaaagtctaaactcttgggtattattaaacttgtgaaccaaaactgtttttaggactgtcattaatattttctctctctctttctctctctctcatttcctctcttctgtcaagttttgagcagttggcattgttctgtgaaatgatraactacaaactagagagcctgagcatattttgttgaggagcagaattcaatttagttcacactttaggacccagaggccaatactt

SEQ ID NO: 387260 - DNA, 606 bp, Homo sapiens
tttgcctgtgctggaaaataggaattaatgaaggaatagaaatggaatggattgaatttggaagccaggtatttcagattgatgacagggttctttgaatggtcagaacacaacatgaagggaggaatagggaggtgggagatatgtgcttaatctttacaacgggagatgagaaaagctggagagtgactggggcaaggagtcaggaagatggatacttttctttgtgattttacaatactaccacgccagctgtgcttttctttatggctctatagagctttcctactgggcctatgtggagttagtttttgttgcttatgtcaccttatacctgatacttcttcaaacctgatcccaaggttaaagcattctgacggaaatattcccaacagtgcctttaatataaattcacaacakgcactttaatcgcaccaaggagatgtaacactgtaaattgatcattccttattaatcatgctttgtggctattgctgttgttattgtcaaccttatcactagccctgcttttctctcaaatctaaggcttattacaaaagatattgttagcgggaagaccactccttagtttgctataagcaagca

SEQ ID NO: 387261 - DNA, 606 bp, Homo sapiens
tttgcctgtgctggaaaataggaattaatgaaggaatagaaatggaatggattgaatttggaagccaggtatttcagattgatgacagggttctttgaatggtcagaacacaacatgaagggaggaatagggaggtgggagatatgtgcttaatctttacaacgggagatgagaaaagctggagagtgactggggcaaggagtcaggaagatggatacttttctttgtgattttacaatactaccacgccagctgtgcttttctttatggctctatagagctttcctactgggcctatgtggagttagtttttgttgcttatgtcaccttatacctgatacttcttcaaacctgatcccaaggttaaagcattctgacggaaatattcccaacagtgcctttaatataaattcacaacatgcactttaatcgcaccaaggagatgtaacactgtaaattgatcattccttattaatcatgctttgtggctattgctgttgttattgtcaaccttatcactagccctgcttttctctcaaatctaaggcttaytacaaaagatattgttagcgggaagaccactccttagtttgctataagcaagca

SEQ ID NO: 387262 - DNA, 495 bp, Homo sapiens
acaaaaaacaatgtacacaaatcagtagcatttccatacattaatagtgatmaaagtgagaattaaatcaagaaatcaattccatttacaatagctacaaaaaaaaaaatcctaacaaggaagtgaaagatctgtataagaaaaaactagaatatggacaaaataaattttagttaactcaaacaaatggaaaaacatcccatgctcatggatcagaagacttaatatagttaaatgaccagacagctcaatgtataccaggttttcagttggaagaaaagataaacagttgaaacaaatgaaaatgtcgggggttgtgaattattatctatgatactgaaagtgtggatacatgacacaatgtatttattaaaattcatagaattggagcataaagagtgaaactctggtttgaatttcaacatataaaatatttttaaaaaggaaaaacatttgcaataagaggatccaggataaaatgaagaatgtgaaaaa

SEQ ID NO: 387263 - DNA, 495 bp, Homo sapiens
acaaaaaacaatgtacacaaatcagtagcatttccatacattaatagtgataaaagtgagaattaaatcaagaaatcaattccatttacaatagctacaaaaaaaaaaatcctaacaaggaagtgaaagatctgtataagaaaaaactagaatatggacaaaataaattttagttaactcaaacaaatggaaaaacatcccatgctcatggatcagaagacttaatatagttaaatgaccagacagctcaatgtataycaggttttcagttggaagaaaagataaacagttgaaacaaatgaaaatgtcgggggttgtgaattattatctatgatactgaaagtgtggatacatgacacaatgtatttattaaaattcatagaattggagcataaagagtgaaactctggtttgaatttcaacatataaaatatttttaaaaaggaaaaacatttgcaataagaggatccaggataaaatgaagaatgtgaaaaa

SEQ ID NO: 387264 - DNA, 508 bp, Homo sapiens
gttgctccttctaatgttgttttggatgtcataggtatgctagttacactgattytaaaattttctaaaataggactgaagaatgggaaattcaagggaaatacaatgtggtctcaaaaggaaaacaaagctgtgaatgcggagtatagaaataacacaacagcagggaactcgcacagtaaagaggagcagctctgcactgttggattgtattggtgtttcaaagtgtggcactcccactgctaatgaaagttctagaaatggctgaatttattctgtgtcactgtgtttcaattcaggccctcatgacacatgagcagttcaatcaccaacattaagcagagcctctgccatggaagttggcagtctgaaatgaacatgttgtgatccaagacataaacatatgatgtaccaggtctagccagcaaaagtagagaagaaatagaaaatcaggacttaaggacctagagctgaaagcagtttgtttgtaagctgaacctctaatctc

SEQ ID NO: 387265 - DNA, 508 bp, Homo sapiens
gttgctccttctaatgttgttttggatgtcataggtatgctagttacactgattttaaaattttctaaaataggactgaagaatgggaaattcaagggaaatacaatgtggtctcaaaaggaaaacaaagctgtgaatgcggagtatagaaataacacaacagcagggaactcgcacagtaaagaggagcagctctgcactgttggattgtattggtgtttcaaagtgtggcactcccactgctaatgaaagttctagaaatggctgaatttattctgtgtcactgtgtttcaattcaggccctcatgacacatgagcagttcaatcaccaacattaagcagagcctctgccatggaagttggcagtctgaaatgaacatgttgtgatccaagacataaacatatgatgtaccaggtctagccagcaaaagtagagaagaaatagaaaatcaggacttaaggacctagagctgaaagcagwttgtttgtaagctgaacctctaatctc

SEQ ID NO: 387266 - DNA, 529 bp, Homo sapiens
tgcgactctttgggtttatagaagacagagactatgcatgcccaatttaatattagcttaaaaaggtatcttaattcctatgttatacataaatatgtttttgaagaaaaaagaaaatctcacccaacttcaactagcactctgtttggactgagatatctctaggccacgtgtaaaactgatattaatgctaacatgagctgccttcagggtcctagcctaatcttccttatgagatttcccacactgttcaaattattccatgtactagaaaagaaggcacaaaagcaattaaaataggacaaactggtcaaaattatgagtgtgatagtgtctgatgcattagtgtatatgagattttttaaaaaactaaatctgaacaactctacaagaaggtttcacttaaatcactggagggaagagaaaycttgttgtcaagcagacatcaagtagacactggaaaactgttaaaaataatagcaatgaagaacataaacatattgaaattatgcatttgtcttagtgttgc

SEQ ID NO: 387267 - DNA, 611 bp, Homo sapiens
aagcagaagatattctacttattaaagctttcattgccctccatttacacagcgaacaaaatgcaaagttgtccaaagtgtttaatcatccaagccaaatcagattttcctaacttttcttgtgttaaactctcttccacttgtgcaacctcttcaattgtctgtaactgatcaagtaagcatgtcctgtgctttatcactctatctttgcttgaacaaatctttcccctccaaggcactcttctaaggtgtctgccaacactgaatctgttctcacaggtcactttcagttttataattacacaatttttttctatgttctctagtttaagtaaaacctgtctactcctattttctgtgtgcaagctgttaagaaaattagtctcatatttaagtcctttgagaacaatatttctctctagatatggttcaagttcctggtcacctctatgtgtgggttgttgtataaataataactagcmccgctctgtctccataataggcattcagtttctggttgttaaattgaattttaattaattaagtcccagatgttgaaatgaatgctcttttattaaggcacatcattttgaaaaaggatttgtgacatg

SEQ ID NO: 387268 - DNA, 434 bp, Homo sapiens
cttgaaaaatagcaggtataaaaatattcattctgatgtttgcactgtttcttaaaagcagaagatgaaattgtcatgtaataggcaccctgtctccttatgcttgaaaaaaaggtaacacaattaatcttcaaggataaaaaaattaagataaagataatactgtatggacctggttagaataattgttatcttttaagcttccttacattattttgtcatattttmacagttaactattctttgtccattattttggtaactaactcttactactttaccccaaatttggtgcacagtcttataagatataagtcttataagattaagtactgggataactaaaaaatattaaagtttagccttgactgttttgttaaaaatataatttggatccaactgtcttcatataacctgatgaagttatattatta

SEQ ID NO: 387269 - DNA, 582 bp, Homo sapiens
cataacaccccttgggactctgtggttgctggcatctctgagtttttgagtgacgccrcatccacctcatccagactctggcacccaaggttggaagcagatcacagcatgcccagcccagctgcaggctgagtgtggaccttgcagcaaccacagcctgctgggcagagtgggtggagcaagcccagtggtgagcctagagccgagtgaaggctgtgcagaggcaccaatggccacgatttccaggtgtcaaggagcacttaaagaatcccattaagatcccattttgatcaagtgttttagaccttttgacatctttgtcaggctttcctgtgattaaattatgtatatatatatatatttttttacctcaaaccaatgttgggatgtttcagagagtcctggaaagtctcaaaggtttataaaagagagatattgaactaaatcaggctttttgagatgttgggtagatacagaaaactttgtcaagtgagaagtgatgctagatcttctttcagtcaatgtatgggtatattattcatatgaagtttccaaaattatataaagttctttaaaatctat

SEQ ID NO: 387270 - DNA, 582 bp, Homo sapiens
cataacaccccttgggactctgtggttgctggcatctctgagtttttgagtgacgccacatccacctcatccagactctggcacccaaggttggaagcagatcacagcatgcccagcccagctgcaggctgagtgtggaccttgcagcaaccacagcctgctgggcagagtgggtggagcaagcccagtggtgagcctagagccgagtgaaggctgtgcagaggcaccaatggccacgatttccaggtgtcaaggagcacttaaagaatcccattaagatcccattttgatcaagtgttttagaccttttgacatctttgtcaggctttcctgtgattaaattatgtatatatatatatatttttttacctcaaaccaatgttgggatgtttcagagagtcctggaaagtctcaaaggtttataaaagagagatattgaactaaatcaggctttttgagatgttgggtagatacagaaaactttgtcaagtgagaagtgatgctagatcttctttcagtyaatgtatgggtatattattcatatgaagtttccaaaattatataaagttctttaaaatctat

SEQ ID NO: 387271 - DNA, 651 bp, Homo sapiens
tggactggtatcatggaagaactatctaccttagttgtctttttcttggccttgtgttgacttaagtcaaagatcatcttccagtaagtcagttcattcaggaggctcagccttctttagatgagaagtgtgaatccatgagtttatgccttctagccttgcagcacaattattcttaaagtacctcttagggacctttctattttggttgaggagactcctttagaagatatcctttccagtaggcaaaatcttctggctgaagtcygtgggttttacctttttttggttcccaggatttaccataaaatatatatttttcaaccaaattgtaatttttagttagttgttttataaatccattacagtaatgtaatatgtgtcttttttgcattatggattcatagtttcctggtgatagtttcaaatgtctacctgttattaccttagttggagatacctcatttctgaggttcagcaaaaccaatgaaagagcttttgaccacaaaattttaaaagccttagtttattttgtgaattcagttttagttatttcatttgtgcattctactaacccagatgattgagggtgatatgaacaatgaaaatgttgaagaattggccacatcttacatattgactggataacat

SEQ ID NO: 387272 - DNA, 631 bp, Homo sapiens
atttacattctaattagctgtagtttctggaaataatgatggcctattttacccaaaaataaggtaggaaatttagtagataagaagataccataataaagtttctcaataaataagwtttaagtacaatgtaaggtctacatgataattagatactcatgaagtatacttctggggtaataaagttgagctccctccagttagagttttgatgggatattcagcaaactgttaaagaaaaactcacagataatttttaatggctaaaggatggttttcttacaataataaaacattgtgcaaggcctggcacagtgactcatgcctgtaatctcagtactttgggaggtcgagccagacggattgcttgagctcaggagttgagaccagcctgggcaaaatggcaaaaccctcatctctacaaaaaatacaaaaattagccaggtgtggtagcacacacctatagtcccagctacttgggaggctgaggtaggagaattgtttcagccaaggaggtcgaggctgcagtgagccatgatcataccaccacattccagccgggataacaaagtgagaccatgtcttaaaataaggtaaaattaaataaaataaagcagtgtgcaaagaaatt

SEQ ID NO: 387273 - DNA, 602 bp, Homo sapiens
gactaaaacagtgccaaagaaaaactgaaactgaggaatagccattggtgaaaaatagaattattgacataaagaaaatttgagataatcttggttaatttaagcaaaaaggcaaagggattaaaagaattagaaagaaggtgacagacacaaataacagagatgatccaatataggaatacattctgaccttggagctgagaatcccagaaagaaaataaaaaatatatttacgaataaaagtttttggatttttgttttttatttctttgattttgctrtattaaggaagagctaaatctatagattgaaggggtatcctgtgttatagaaaaataatttatgacaaaatattaatacaaaacatatcttgattataacattttaaaaataaataatttgctaataattcaggttgaataaacattcacaaaaaattaaagaaatggatataccatgttcagggatagaaatgcataatgacacaaaagtgtcagtttacctccagttaatccatagagccaatgtaactccaacaacaacaacaaaaaaaactaggttttttagggaacttgacaagttaatttttaaatttatatgaa

SEQ ID NO: 387274 - DNA, 602 bp, Homo sapiens
gactaaaacagtgccaaagaaaaactgaaactgaggaatagccattggtgaaaaatagaattattgacataaagaaaatttgagataatcttggttaatttaagcaaaaaggcaaagggattaaaagaattagaaagaaggtgacagacacaaataacagagatgatccaatataggaatacattctgaccttggagctgagaatcccagaaagaaaataaaaaatatatttacgaataaaagtttttggatttttgttttttatttctttgattttgctatattaaggaagagctaaatctatagattgaaggggtatcctgtgttatagaaaaataatttatgacaaaatattaatacaaaacatatcttgattataacattttaaaaataaataatttgctaataattcaggttgaataaacattcacaaaaaattaaagaaatggatataccatgttcagggatagaaatgcataatgacacaaaagtgtcagtttacctccarttaatccatagagccaatgtaactccaacaacaacaacaaaaaaaactaggttttttagggaacttgacaagttaatttttaaatttatatgaa

SEQ ID NO: 387275 - DNA, 581 bp, Homo sapiens
agccaacaactatataaaaatgtactgcatcccattcgtaatcaggtaaatacaaattgaaaccataatgcttcaatgttataattaccatattgccaaaattaagcaatctgataatagcaagataagttgttgaggatgtggaaaaaggaaaccataatattattgctggtaggagaaacaaatggtacaactcttccagaaaataattgggaakgacctggtgatatgaccccatatttccacttctaaggtgtctgagagaaactcttacacttgttcaccaaaagatatacttaaatattcgtagaagcactgtttatatcaacaaatactgaaaatggccaaaatgaccattgagaaggtactggataaataaattttgacatattcctacaatagaattcttacatgtttgtgaaaataattcagttacagctagacacatcaatgagcaatctctgtattataatatttaattaaaatttgcagaaaatacatttatataaagatacaaatgtgcattaaactaacaatataatgttcatggataatggaccaatatgctcatttaggtaaaa

SEQ ID NO: 387276 - DNA, 534 bp, Homo sapiens
atgcttcctctttatccctgataattttcctttttgtaaaatctgctttgtctggaatttatgtaaatactgaagcttttatttattatcgttagcatgatctttctctctctttacttttaacttgttaaagtcttttgagctaaagtggaattttggtaaatatcatataggcaaatcatgttttttaatctactttgacaatctctctcttttaattggtatatttagtctgttcacatttaaatgcttttcatatagattaatattgatcatgtttttaactattttctattaatttcatgtgttctttgttctgtatctgcccctttttctgcctgattccagtatcttatgtgattacatttgctatcctctcttggtktactgattctacttaaaatattaattgtttctctaaaatttttaatatacatttttaactaatctgagtcaatttcatgtagcactgtaatacttcccatgtagcacaggtaacttacaactgagttttcccatttaccctcatgtcct

SEQ ID NO: 387277 - DNA, 563 bp, Homo sapiens
ggcctcagcttctcacttcacctccctgtaccccagctgttcatccatgagatggtgtcttagtccattctgcccactttaacagaatgccacagacttggtagctcataaacaacagaaatgtcttactgttccgggggctggaagtttcagatgtggcagatcttgtatataccattcctgaggggtcttgaggcttctttttcattgaaaggagcagcagtgcggttctatttgttgatgcgagagatggagtcacaggtgccatcgatgaaccaggagataaagtcaaggtgctgtcaacggtgcctcacaccagaggacctgcttcctggttcatcaatgtcatcttctcactgcatcctctcctggtggaagggggcrgcatctctctgatgcctcttttcataagggcactaatcccattcatgaggttccaccctcataatctaatcacctcccaggggccccgccacctaatacatgggggttaatatgaatactagggggatgcatatattcaagacacagcagatgggaatgtggctttggaagcagactgg

SEQ ID NO: 387278 - DNA, 463 bp, Homo sapiens
ttacaaattctatggcaactcctggaagttcccctatatgttctaaaagggggtagaacyctcagttccaggaactcccctccctcccccagaaaactcatgaatattccaccatttgttgagcatacagtcaagatgcaaccatatatatggccagtcagcagcgtatcggggtgctctgcctatggggcagccacccttttactcctttactttcttaataaacttttttcactttactctgttggctcgtacttgaattatttcctgcatgaagccaaaaacccacttggcttcccaggctgagccccagccttggggaacttttgcttataacagctcccattacatttttctgccccagagttcacaaaagtacatttcgcactgtctcttttattctccacaaccacctttcagcaggtattattttacccactttgcagagggcgatgcagtatgt

SEQ ID NO: 387279 - DNA, 410 bp, Homo sapiens
tccatcttcacaaacgttcacatagcacacactgtttgttttgcatcttactttgagtccatgaaaaatgcatcttacacagcatttccatatcataacatgtagagctggctcattctttttaataggtacaaataattttattgggcacatgtactgtgatttatttaaccagtctcctactaggatatacttagcttgttcccaatctttattttatrtcatgccacaaaaagtattttatgcacatatcatattgtatgtgtgtacacatatctgtctcctaaatgcttagaagttgagccaaagaaagagattgccaaattctatagaccaattggattctcctgtgaaagggaagatttcaaaaataaaaataatgacatagtacttagaataggcaagagtag

SEQ ID NO: 387280 - DNA, 560 bp, Homo sapiens
ccaccaggtggatacaactattattcatggttgctatacttctcttcagtttttcctttatgtgggtatactgtatacatttcattgattctgagactttcttttcatacktgctatctctgaaatgagaatatgtcttaaaatttatgatcttttcacatttcttttgtcctgaaattacttgggattcagttcatttgctagggctggtcataaatgttcatgtcttaagcacttctatatgtaaatgcttttaaaataaattttcaatgagtataaagtaaaaattctaagagattacaatttttgtgtcatagctcagcctcttagtggtacataaaataatggtttactttaaaattaataggatctgagattctatgaaatatgatatacatttttgtgttataagctaaacatcctctttctttattcagtcaataataatttatgtgatatctgcttcaggccactaggtcaaacctcctactgagaacaagtagaaaagctgaagaatacgacaacaaaaaaacatgcattaaaggcattagagagctttg

SEQ ID NO: 387281 - DNA, 596 bp, Homo sapiens
ttaatcaaagtgcagtactcaagaataggaaaatcatgttaaatgagaaccagataagcactgaaaacatttacrtgtagaatacattcagatagagagtttcaaatacaggcaaaaccccacacattgaaaatagtaataaaaaattcagaatccaaacactataagtaatttaaaatttataaacttaaaaatgccaatagacttagggaacaaaagaaagttaaagtggactaaatttgtatcttcataagagatatcagtagatatggctttattttagtcaatgacaaccaaataaaaatatgtccaactatacttttctgataacttaaattttggtttctatgcttatagattagtgggaagaactgaggagagaggacagaaacagtttactgaataatctattgaatgcacagataaacaaaaatagaaaacaaaatatgacagaagaacaaatttatgagttatgatattatatataagtggcttagattattccattaaaagactaagattctcgagctggctcaaaagttaaaagaaaaaaaagttaagctataaattgtctccaggagaacttaaataagttg

SEQ ID NO: 387282 - DNA, 573 bp, Homo sapiens
ccgttgtcacccacaggcagtgaagtttcctgtagaggggagtctgtcatcctgagttcctgcagggtgagtacctgcggatgaggtcacctcttgatagcccgttagcatgcatggcagggacaccttgctgcttttcatggtgcgtgtagcaactgagctttatcctcatttcccamtagcaagcatttaccctctgggattgtgctgtctaaaacccataatcaggaaggagcttttgctttttttaaaaaaaaacttttccttattcacaatggtctttaaaaaaaatccctaaatattttctttctctaaggtagtgtgtactttcttccctttgcattgggaatagcagatcaaaaatggggtcaatttacttctaattggctgcttcctaaattcagaaagacacactttggcagtgcccctttttcgaaatgagcccacggtgcacatgcaagccacttctgctgtttgtgtctcctctccctccgtcttcaggtgcattttaaatttcttttttattattattattttttttgagatggagtctcattctgttacccaggctgg

SEQ ID NO: 387283 - DNA, 609 bp, Homo sapiens
ttaatcctcaaaacaattctatgatgtaggtgctattattacttacatttttcagaagaggcacaaactgaaatacaaaaaaggttaaacaactggccagaggccctatagtttataagagaatttaatttaagatattgaaagcctaccctttctaacatgcagccccagagcacatgtgttggraaattcttcttcataaatgcgaaataggaaggcagtcactgatactgcgagattcctttttttttttctttaagagcactaaagtgactgagctaactaaaatattttctttatttaacatatatttgttgaagattaagcttggtgctggggattaccagtgaataaagcacgctgccagggcctttcctgagtgactgatgctgtgaggatgagcatgtggtgtttgcattggagggacaaggtgccaacttaagtcagcgcttctgagagcggatcaagtgaagttgtatctaccatgaccaaaatctgtaagtctctttttttttttttttttttttttagagatggagtcttgctgtgttgcccaggctggagtgcaatggcgcgatctcggctcactgcaagctccacctcctgggt

SEQ ID NO: 387284 - DNA, 534 bp, Homo sapiens
ggaaaaggagaaccaaaaaggtgccattgtgagaagaattcagttgaacattgctggcttcagagactgatgaaagtrtacatgagctgaggtcagtgagcagccttctaaaagctgtaaaagtcaagaaaatgaattctccccagagcctctagaagggaatacaaccctgccgacaacttaattttagcccaatgagactcattttagatttatggtctacaggctgttagataataaatatatgctttttaagccactaagtttgtggcaatttgttacagcagaaatagaaaaggaatacagtgaatacactgtatgaatgcactgtattagctactactggctgtgtttgacaaggtattacaagaaagagatgcactcagaggaaacttggccagattgtgggtataatgaaaggaaatggaaagtccagcactgtttccttttttttttttttccacttcaaaggggagttaataacacctgtttactccgaatttgaaaagtagcactgtaaaagtccttgagctg

SEQ ID NO: 387285 - DNA, 534 bp, Homo sapiens
ggaaaaggagaaccaaaaaggtgccattgtgagaagaattcagttgaacattgctggcttcagagactgatgaaagtatacatgagctgaggtcagtgagcagccttctaaaagctgtaaaagkcaagaaaatgaattctccccagagcctctagaagggaatacaaccctgccgacaacttaattttagcccaatgagactcattttagatttatggtctacaggctgttagataataaatatatgctttttaagccactaagtttgtggcaatttgttacagcagaaatagaaaaggaatacagtgaatacactgtatgaatgcactgtattagctactactggctgtgtttgacaaggtattacaagaaagagatgcactcagaggaaacttggccagattgtgggtataatgaaaggaaatggaaagtccagcactgtttccttttttttttttttccacttcaaaggggagttaataacacctgtttactccgaatttgaaaagtagcactgtaaaagtccttgagctg

SEQ ID NO: 387286 - DNA, 555 bp, Homo sapiens
atgaagtacaggacaatgtatatttcccttcagtgtacaatttgcaacaactaattcctttgtatctctgccacctctgaaatccaagctacttataaaatttcatcactcagcagtctgttcttagttaaaatattttaaaattagatagtaaataaaaaagaacaagaaatatattttatcatagtagaatttggaaaacggagtgttccagatttgaaatgcaatagacagaaaattcctctctatatatatctttgtttaagtgttttgtgtgtgtgtgtgtaaatatacactgtgctttatttaagattttctaatttaggcttaaagagataaagagtatgtcccaatggaattgcaccattctttttattcatttaattatgaattggagagtaaaataaattgactgtattatcagttcctaagcactgtatgtatttttttcctctacctaatctatgtgcygatacttaatgttcttcctctttgtccaattattttctctattaatattgcggttagtaggaaagtggagaatgtcccagcata

SEQ ID NO: 387287 - DNA, 495 bp, Homo sapiens
tctaatcttgtggataatttgttaattttacagagatgatcttgtcctcaagtaaagtggggttcgttttggggaggggatgttrtcatctttgtttcaatgttaaactctaaactaagttcttctcaaagttagttcaacctgcacccaagaatgaacaagggcagcttggaagttaaaggcaagttgaagtcagttaggtcagatcacttgcactgtcataatttcttcactgttataatctttgcaaagagtgtttcaattaatgtttttgtcctttggttttgaacattttagtgtagtaagttcttaaaagcattttacatctaaaattgttattaagtaaatagaatgtgtatgctctttttgtgcaggttgttttgaagcatttttatttatttttaattgtgggtaaataattgatattttgcaaaaatacattttgttatactggtaaaaatctacttactctttaaaaataaaatttatgtctct

SEQ ID NO: 387288 - DNA, 587 bp, Homo sapiens
gagacttgctttatggccatgcatttggtcaatcttagagtgtgttctgtgtgcatgtgagaacatatttgctgtgattgttggatagtttattctgtagatgtctattagatctaatwggtcaagtgacaactttgagtctagaatttttggttaggtttctgctctgatgatctgtctaacaccttcaataagattgtgaagtcccccacagctattgtgtggctttcaaagtcttttcataggtatagaaatacttattttatgaatctggttgctgcaatgttgggtgcatatatatgtaggattgttaagtcttcttaatgatttgaaacttttatcatgtaatgcccttctttgtccatttttactcttgttggtttaaagtgtgttttatctgatacaagaataactatccttgctctttattgttttccatttgcctgatagatcttactccattctgtaccttgagcttatgtgtgtcattacatgtgacatgagtcattgaggacagcagaatttggggtcttgttttttatccaacttgccattctatgcctgttaagtggggtgtttagactgtt

SEQ ID NO: 387289 - DNA, 587 bp, Homo sapiens
gagacttgctttatggccatgcatttggtcaatcttagagtgtgttctgtgtgcatgtgagaacatatttgctgtgattgttggatagtttattctgtagatgtctattagatctaataggtcaagtgacaactttgagtctagaatttttggttaggtttctgctctgatgatctgtctaacaccttcaataagattgtgaagtcccccacagctattgtgtggctttcaaagtcttttcataggtatagaaatacttattttatgaatctggttgctgcaatgttgggtgcatatatatgtargattgttaagtcttcttaatgatttgaaacttttatcatgtaatgcccttctttgtccatttttactcttgttggtttaaagtgtgttttatctgatacaagaataactatccttgctctttattgttttccatttgcctgatagatcttactccattctgtaccttgagcttatgtgtgtcattacatgtgacatgagtcattgaggacagcagaatttggggtcttgttttttatccaacttgccattctatgcctgttaagtggggtgtttagactgtt

SEQ ID NO: 387290 - DNA, 620 bp, Homo sapiens
tgaaaaattcactgaaaagtttttgagctgcaatttaaagcacaattaattagcagtcaagacaatacgataaaacttagccaatgaaggtaatcattatgagactttggttatggctttttttaacttaggccttagatttctcaaatatgaaataaatgtttttcttcatgatattgagattatttccagctatgtctttctagccttcaaaatagcccaatgatctctaattttttcaaaaaaaaggaaagaaaacactcattttcagcctgaaatttctttgattgatggactttgaaaartagatgttaaccagtgtgttagaacataatgcttcaggatggtttcttaaacatacaaagtaaagccctacagaattctatttcttaaaagaaaaatgtattttatcatcaagatgtgttcattcaaaatttcttgtctttatcatgaaatttgcactgagagaaaaataatttgttttcttaaactgacacaaaaatatctaccatttctttcaaaactgggtaaaatgatacatgttgaacagtttgcttacagaatccagaacttacacttgacacagaaagttggtttcattcttgagtcagtatgatcat

SEQ ID NO: 387291 - DNA, 582 bp, Homo sapiens
tcttacctcaaacagagggtataccaagaagattgagaaatctttcttgcctgcaccataagcctagcactgaataacaagcagcaaaagtctaccactttagaagtgtgaaatgtgtgggaaaatraattgcaatagcaaaaacaaaaaacccagacccaactcaacgggtgactagaatgacccaatactatacatacactaatgactggatgacaaagaaaagtgcccatttgcagttggatatgtctctgtatctactgttcttttttatacaaaaccttttacctaactaaaaatgacaatgtatgtaaacaagcacaaaaatgatgtattttcaagacataaactcaaagatgacacagttggaattactctacaaagactttgaaataactatgattcctaggttaaagtttgtagtgtgttatgggttgaaatgtgtcctcccaaagtatacattggagttctgaccccaggtacttgtgactacatccttattcagaaatagggtttttcaaacatatttagttaaggtaaaatgatatcatactggattagggttggcactaaatccaatat

SEQ ID NO: 387292 - DNA, 437 bp, Homo sapiens
cttgtggtgttgtttgtgtggatggtgacaagtcctactgctggacagagtgagtaggtcctctctgcagtttcttagctacctcatatggcttagggtggatcctgctgtgggatttataccagcgtgccaatgctaagaggggcctaattctccctctggggagtggccagagaggataacatgactgagaagtgtgcgagggaccttcagagggggaaagtgaggaaacagttcaacctcccagggcaggcaaagcaagacatccctggtttaaggggttgagtcttctggggcaggcaaggcaagacatccctggtttgaggggttgagccwtccagtaatttcaggagattgaacctgacaagtacccaacatgggaaatgtttctagtaaaacaaggacagggagtaaagatgactcagggaaaggtgaag

SEQ ID NO: 387293 - DNA, 437 bp, Homo sapiens
cttgtggtgttgtttgtgtggatggtgacaagtcctactgctggacagagtgagtaggtcctctctgcagtttcttagctacctcatatggcttagggtggatcctgctgtgggatttataccagcgtgccaatgctaagaggggcctaattctccctctggggagtggccagagaggataacatgactgagaagtgtgcgagggaccttcagagggggaaagtgaggaaacagttcaacctcccagggcaggcaaagcaagacatccctggtttaaggggttgagtcttctggggcaggcaaggcaagacatccctggtttgaggggttgagccttccagtaatttcaggagattgaacctgacaagtacccaacatgggaaaygtttctagtaaaacaaggacagggagtaaagatgactcagggaaaggtgaag

SEQ ID NO: 387294 - DNA, 437 bp, Homo sapiens
cttgtggtgttgtttgtgtggatggtgacaagtcctactgctggacagagtgagtaggtcctctctgcagtttcttagctacctcatatggcttagggtggatcctgctgtgggatttataccagcgtgccaatgctaagaggggcctaattctccctctggggagtggccagagaggataacatgactgagaagtgtgcgagggaccttcagagggggaaagtgaggaaacagttcaacctcccagggcaggcaaagcaagacatccctggtttaaggggttgagtcttctggggcaggcaaggcaagacatccctggtttgaggggttgagccttccagtaatttcaggagattgaacctgacaagtacccaacatgggaaatrtttctagtaaaacaaggacagggagtaaagatgactcagggaaaggtgaag

SEQ ID NO: 387295 - DNA, 542 bp, Homo sapiens
caaacaataacaattaagacagggtatcaggatgtaaatgcctggctaaaatggattaaatattccatctgcactccaaataaaagcaactgttacacttgtgcacacagtagaccagaggcccagattgtcccttttccactgggatggtcctcaaaccaagcagacatggattgcacggtagctctttttcaagattccactgcctggaataacaaattgtgccaagctctttctctgctatttcctgaagttcaacaccctgcgggtcagcccccgagggccatccagcctccatcttccaagaccaattttacctcgtgtctccaatgacaaggggaaaattttggcattccttggagacttaacaggatgcagtgaagttaggcacttccaagagctgacctatcagtccgttyttattcatccccaaaaggatgtatggtggtattatggaggatctttactagaccctttgccaaataattagagcagtacttatgccctagttcaattggctatcccttctaccctggcatttc

SEQ ID NO: 387296 - DNA, 473 bp, Homo sapiens
tactttgcattatgagagaactttggtgtgtaataactaggtagaaaatatactttaagtgttggctaatagtaactatgaagggatacttaactctttgcacatttgaattgaagaagcatggttttggccacctgaaawatatggaaacatcccccaccacctattaagagatgagacttccatgacagatgggctaattacaaaattgattgattggctttgggttgccttgcaatgaaatgaatggtagaagcaatgcactgtcttctcccttactatctccctccttttgggaacccaagatccaatataaaatagcacacttaattttggcgatctgcctttgcttcactgtgcctgcttattaagccctaaagatgcatgctttcctggccctgttcctccaaaggctccaccctgaagccagtaatccaattaagaaactagaaataaaaaatcttacaaacact

SEQ ID NO: 387297 - DNA, 556 bp, Homo sapiens
taaataaataaataaaaataagtgcttaaatcaaatattttttaaaggaaagataaaagctgtaatgccttttatgttatgtgactttaatcattcaaaaaaagtcttaagagatcgttggtaaaacacatatatcatcaaaatgtaaataggtggtctaagtcatataagtcagacactaggtttgctaagtgtttcaaggctgtaaactgcatgctttacaacttggtaaggcccagggacatatgaaattaaccacatccctaaataggctggaaatagactttctctatgcctaatatgtaatcaaaataagttactaggtttcacactaaagttaaaaatttataaaagttaccatcataacatgtaatttaaactattaaaagtaaattyacatgtatgatgtgtaaaaacaatagaatgtgttctagtaaaatattataagccaaggaaatgtaaaatgtaaattttgcctagtcatgaaggattgtcttaaattagacaagaaagatgaaggtttaagaaagttatagaaagactgtaaaaattaatc

SEQ ID NO: 387298 - DNA, 605 bp, Homo sapiens
actaggatcatcaatcatatctacagcttcccctcagttgatttatggatagtttgtattttcactgtatctgtctcacacctttttgaaaagggaacattgtatggctacttttatgtgattaactcctccatcaatttatgtgtcaatgattgccttcctgtaatggattcaatttctctgtcyccattgtttctttctcactaaagaagttctttaaaattctatgaaaatgaaactgtgctaaattaaaaatctactcatgataataggagacactcaaaattatgggtttcagtttcaggcttctcaccatgtcctcagattgtactccctttctagcccttctgcagcaaataaacctttgccatcagttcaccaaaagcactcatgagaggaaaaatggcatatcactaaatatagagttctttgtcacttcttgatttcaaatttacaactaatactcaacactttaattaaatctttcttttctcttcttcctaaaacatacatgcaaattaaaaaaaaaatcttgaccctatttcctgtctctcttactcttcttctgccttctgtatgcacatgcaagaaatctattttcatct

SEQ ID NO: 387299 - DNA, 605 bp, Homo sapiens
actaggatcatcaatcatatctacagcttcccctcagttgatttatggatagtttgtattttcactgtatctgtctcacacctttttgaaaagggaacattgtatggctacttttatgtgattaactcctccatcaatttatgtgtcaatgattgccttcctgtaatggattcaatttctctgtccccattgtttctttctcactaaagaagttctttaaaattctatgaaaatgaaactgtgctaaattaaaaatctactcatgataayaggagacactcaaaattatgggtttcagtttcaggcttctcaccatgtcctcagattgtactccctttctagcccttctgcagcaaataaacctttgccatcagttcaccaaaagcactcatgagaggaaaaatggcatatcactaaatatagagttctttgtcacttcttgatttcaaatttacaactaatactcaacactttaattaaatctttcttttctcttcttcctaaaacatacatgcaaattaaaaaaaaaatcttgaccctatttcctgtctctcttactcttcttctgccttctgtatgcacatgcaagaaatctattttcatct

SEQ ID NO: 387300 - DNA, 661 bp, Homo sapiens
aataagtcatctccatcagcacatggaataaatagttggaaacgtggaagaagtgcaacatgaagcaaaatacaaattgaatcaatcaggaagcattcagaaagcattaaataatcaggcagatgagggagtaaatggcaggggmtaactgcttttctgactttggcatggctgaccattagaccctcttatgaagtgtaaatgggacccacttataggtagataggaatgaacctacagcctggatgggtacattctcttaattataggcataaaaaagaagagtgtcttgaataaaaattgtttacaacaaattatataggaaatacagtgctgtagtagatacctctggtgcctatgacatgccccctcagcccacctcagatgcagccacagctgttgtgaactgttatgaggagctcagactcatttcctgctgccaatgactcacctagtgtcaactccgcccaactttctgcattctgttgccaggtcttcttcagtggcaatttcatctggaagggcaggggcttatcatcctcaaggcaacctttaactaacagttactgcagacagtgggaaaaggcattagctttttaggtgaacaatctaaaaagcatcctctatgattgtcagaagtctcatgctgcctacagatgac

SEQ ID NO: 387301 - DNA, 661 bp, Homo sapiens
aataagtcatctccatcagcacatggaataaatagttggaaacgtggaagaagtgcaacatgaagcaaaatacaaattgaatcaatcaggaagcattcagaaagcattaaataatcaggcagatgagggagtaaatggcaggggataactgcttttctgactttggcatggctgaccattaraccctcttatgaagtgtaaatgggacccacttataggtagataggaatgaacctacagcctggatgggtacattctcttaattataggcataaaaaagaagagtgtcttgaataaaaattgtttacaacaaattatataggaaatacagtgctgtagtagatacctctggtgcctatgacatgccccctcagcccacctcagatgcagccacagctgttgtgaactgttatgaggagctcagactcatttcctgctgccaatgactcacctagtgtcaactccgcccaactttctgcattctgttgccaggtcttcttcagtggcaatttcatctggaagggcaggggcttatcatcctcaaggcaacctttaactaacagttactgcagacagtgggaaaaggcattagctttttaggtgaacaatctaaaaagcatcctctatgattgtcagaagtctcatgctgcctacagatgac

SEQ ID NO: 387302 - DNA, 587 bp, Homo sapiens
accttgtgtttttatttcaatgctcaatttacagaaaaaccatataatactcttttgaatcttgtcaatatgttcacataaagaatttatttgctaagattaatttttacaaatctttcataaattttttaaacattcagctttatcttatctaatttaagacaatcctttaaccctctaactaggcaaaaatttacattgtcatgtctttttataatcttttagtaaaatcacatttaactttccttacataccttgaatgtaaatctattttcagtagtctcagtataacaattacatgtaataatggtaactcttagcaatttttacttttaatgtaaaacctggtaagttattttaattacgtactaggtgcatataaggtctgactctttccagcawagttgggggcgtggttagtttcatatgtctccaggccttaccaaactgtaaagcaggcaaattgaacaattttcaaaagccaaagaagcagtttgtgactttaaagcatttagcaaacctaatatctgaacataatttagaccacaattttacattttgaaaacatttgtattttaccaataatc

SEQ ID NO: 387303 - DNA, 552 bp, Homo sapiens
tccaaaattgggtatgtggtgccttctttgtttctcccaaggagtcccaagctatcagaagttaccttagggcctctcgtgtgtgcattaaaagtgaataaagataattcaattgactgagaagaaaaaaccctttttccagcaaaacaagatccaagaagattaaaaaaaaaaagacataaaggccctgtaaatatatctatagcttggatatccatatttaatgaagctgaattttaaacatagcactcttttaaaaaattattttaaatccattattacacgactttagccacgccaagtggccaatatttctggcttttgaacttaaccaaaagtaacctcacagatgaaaccaataagcgttaactayggttatgacttaactgcgagtgtatgaggtattttcaaagaggtgataaggagtttttacaatatctagaatcttcaatggtagctcagagaaagaaagatttaagaaaggattctagaagtcgttcatggaagggaagcgaatcagcaaatgtcacacagatattaaccagaaagtac

SEQ ID NO: 387304 - DNA, 457 bp, Homo sapiens
aagtctcatgctgcctacagatgacataacaataatagaccttaagttagcttttcctcttttcctgtctcatgctctaaaatctgttattccatagatcatctccccaaaaaacatctgtatgtatgcaagttcttttttctgtccatttttgataaccctaaattaagacaagcacattttgatatttttttttcctaactcrataataaatgtgtaattacatttatgcaagaattattttcttccaggctaaccctgttaatttgtctttcaaattcccaaaattttatttttgtctgttcgtagtcttcagcatgtggatgagaatgtgacattttttctttagtgctcttatttagtatattttggtattcgtttattcacttgcttcagcaacaatctttaattaacaaaaacccttaattgaattccacaatatgctttagtttccaac

SEQ ID NO: 387305 - DNA, 660 bp, Homo sapiens
tgattttgtgactcctaggctgggtcctatcagtccacagaatataacagaaatcatggaatgcaaatattttctatatcataacccaggtcacctttgcaaggactcttcgtagagtccaaaagtgagtaatcaaattcgctttctagtattagccaagtacaagtactggttctaaaaggatggcctgggtcttaatcrggtgctaatcccaaacgtagtttgaaaatgaagttcagggagagttccaagttgccagagggggccctccaacaaccttgggatatgattctaacccttactgtcctgcccggcagcaacgtcccaaggtgctgctccttacttagcagaaacagtcttcagtatctgcagctgagtatgtcagccctgagatgagtacacaagccaagtaattgggcagtaggcctggactgctctctacttctcattaggcaatgccccttgttgattgagatggccttagggctaggcaagcataactcagtctggctctgttgaggctctgtccactctagccctccctcactggggcatatatgtggcaggacctgagttgtaggatattgcatgtgctatggtagtaatcctgtatgagactgcaatcaggcagtttgtcaaatccagatgctggttatggag

SEQ ID NO: 387306 - DNA, 522 bp, Homo sapiens
agttgttagcacctttcaatacagatgagtttaaaagtaygtcctgttgaaaggccaagaggtagtttacctgtcagcgtgtctaaatatattagtgcaatatgggcattgtgcaaatggatccaagattgactccagtcttaaatacatttcttccttgtgaaagaattgtttttcaaatatacaggcttgtgtgttgttacagaatgtttctcatatctctgaggatatttctaaattaatcaattggtattgtttgggaaaagattagatatatttatcttctagaggacccctgtaatgtttcagtttccaactttattaaactaatgccaattctatttatcaacttaaatgtcctttcttctaggaagtcttcccttacttaggtgaggtgttcctactttggctctagggaagtctaggggagcaaaggtcacagatgccagtgtctatgttccattaagcaccaaaattggtgattctcaggcattgctttagaaactacttagctccctgcct

SEQ ID NO: 387307 - DNA, 600 bp, Homo sapiens
cttggtgttgtttctacttttattgcactgtgctttgagactgtggttagtatgatttcatttttttttttaatttgttaaggtgtgctttatggacgactgtgtgttcagtcttagagtatgtgtcatgtgttgatgagaagtgtgtatattctgttgtcgttgggtggagttttccatagatgtctcttacatccaattagtcaaatgtctagtttatgtccataatttctttgttagttttctgcctcaataatctgtctaatgctgtcagtggggtgttgaagtcytgcagtattattgtgcagttgtttaaatctctccgtagatgtctaataatttgttttatgaatctagatgcttcgatgttgcgtgtatatatttaggacaattaagtcttgctggattgagcccttcatcattatgtgatgcatttatttgtccattttgattatcatgaatttaaagactgtttttatctcatataaggatagctatccctgctcttctttgttttcctttggcttgatatatatttatccatccctttagtttgagcctatgggtattcttacatatgagcatacaattaatgggttt

SEQ ID NO: 387308 - DNA, 583 bp, Homo sapiens
gacaagaatcattgctatttctcattatagaaacagaaaatgaggttggatgagattgcaaggggtcatccataccctcattgcttggccttttcgtttatacacacacacacaaatatgtcttctaccacacatatactagggaccaaagatagcactattaatctggaatgaacatgtgcragtagcaggggaaacgattagcaaataatgagtacctactgtatgcagagccctatgctagccactggggtggcttcaagagggttctttcagacattgatgttgattctattcaatcacatccaaaacaatctttccatgaaggagaaaaataatttgatctgtccttctcaacccctctatggacaggtcctgcaaaaatcctcatgagtacaattcgctgggttcaggactggggcccttgtgtcccccttgtggggcatgaggtcattcttggattacagagttggatagaacctatatttggaaactcccccctttctttccctgacaatttgcatctacctggatttcaaattgtaacttactcaattgtgctatttcgtcatgagacagtcag

SEQ ID NO: 387309 - DNA, 371 bp, Homo sapiens
tgatgttgattctattcaatcacatccaaaacaatctttccatgaaggagaaaaataatttgatctgtccttctcaacccctctatggacaggtcctgcaaaaatcctcatgagtacaattygctgggttcaggactggggcccttgtgtcccccttgtggggcatgaggtcattcttggattacagagttggatagaacctatatttggaaactcccccctttctttccctgacaatttgcatctacctggatttcaaattgtaacttactcaattgtgctatttcgtcatgagacagtcagccctgggtacacctcacctttgcttttaccatacacagaaggaggtatcaaatgtgtactatatgcac

SEQ ID NO: 387310 - DNA, 461 bp, Homo sapiens
actaaataaccacacaaagaaatgtaaaatcaaaccatagcactaagacgagtaagtacaccatttaagtctcttctaaaatgctctacttgagctccattcccaggttctcattgcatcttaggatctccagattccccaagccctgaaaagccatatcttattcacaactaaccaaaacactgactagactactctatacaattattgccccttctgaatgcagaactccagggaagccaaccccagaaagaataaaaaggcagattaagcctgctaaacttttccagatacacgtcctactttccattagggccagaacaggtggcctcccaccctagcttctgactgccatggtggatttcatctttgtacccactgctaggcactccacagctgcctagctgggaggyggattcacctcttttcaaggtatccatgtgtggagtgcctggaggttg

SEQ ID NO: 387311 - DNA, 570 bp, Homo sapiens
gtgaacttgggaggggtgtctgtgaaaatctgaatgaatagggtagggaaaacctgccagacttggaaaagccctggtgcatatgagagttggcatccctatcctggatggggagcatttaagggattttctaagtcaayacactttttaggtctgaaaagggaaatagcaagataccttattgcctacgtcagtctcttaaactcattctcattcccatttacctgcctgttttcaacatagaaaaatttgagtctgccaagaagtgtctcagcaaatcatatagtcttggacctagaatccctctccatttcctcctcagttgctagaacataatgctgaggatgtcaacgtgatatgaaaggaagttgtccaaagtaaaagaacaagcttactggatttcaacctatgagaaaaggaaaagagaacaagatctcggcatactctcagagcaggaagaagttgggatatgggactgaagatgggctagacgaaatgttactaacaacaagttagataaaaggatatcttggcaaccagtgtgaatgtaccaccaagtttcttcactcc

SEQ ID NO: 387312 - DNA, 570 bp, Homo sapiens
gtgaacttgggaggggtgtctgtgaaaatctgaatgaatagggtagggaaaacctgccagacttggaaaagccctggtgcatatgagagttggcatccctatcctggatggggagcatttaagggattttctaagtcaacacactttttaggtctgaaaagggaaatagcaagataccttattgcctacgtcagtctcttaaactcaytctcattcccatttacctgcctgttttcaacatagaaaaatttgagtctgccaagaagtgtctcagcaaatcatatagtcttggacctagaatccctctccatttcctcctcagttgctagaacataatgctgaggatgtcaacgtgatatgaaaggaagttgtccaaagtaaaagaacaagcttactggatttcaacctatgagaaaaggaaaagagaacaagatctcggcatactctcagagcaggaagaagttgggatatgggactgaagatgggctagacgaaatgttactaacaacaagttagataaaaggatatcttggcaaccagtgtgaatgtaccaccaagtttcttcactcc

SEQ ID NO: 387313 - DNA, 614 bp, Homo sapiens
taactcacatggcccagccaaggtgagttatyagaacctaagaaagttatgcattgcaacgtaaatccatcagataatgagaaaggtgacatttttaaccagaaagcataatagattagactgaaatagaccaaccaaccacataccatggcgtgacacttgctaacatagtctttttccaacctagaagaaggaaaaaagcattagcctcccatagcctgcacactgaattctcccctcacattcacccctttttatcattcctggcaaatcagtctgcctgtggctcagtgcaagccagagcagctggccttaggacctgacttccaacacaacacacggagcaactgactgactctcctgggaaaataaggagcagaaaaaaaaaaattatgtgttcactgtgcaaattaagatgctacataaagatgtaaacaaaaaagaataaaattactctgtaatcttaccagccatcaataaccacagttgaaattaataatttagagtatatagttcggattttttttcatccataacaaaatggcacatatttaggagatataagaatttattataaagtaggatcattgtaaacattccatattgcaccctga

SEQ ID NO: 387314 - DNA, 614 bp, Homo sapiens
taactcacatggcccagccaaggtgagttatcagaacctaagaaagttatgcattgcaacgtaaatccatcagataatgagaaaggtgacatttttaaccagaaagcataatagattagactgaaatagaccaaccaaccacataccatggcgtgacacttgctaacatagtctttttccaacctagaagaaggaaaaaagcattagcctcccatagcctgcacactgaattctcccctcacattcacccctttttatcattcctggcaaatcagtctgcctgtggctcagtgcaagccagagcagctggccttaggacctgacttccaacacaacacacggagcaactgactgactctcctgggaaaataaggagcagaaaaaaaaaaattatgtgttcactgtgcaaattaagatgctacataaagatgtaaacaaaaaagaataaaattactctgtaatcttaccagccatcaataaccacagttgaaattaataatttagagtatatagttcggattttttttcatccataacaaaatggcacatatttaggagayataagaatttattataaagtaggatcattgtaaacattccatattgcaccctga

SEQ ID NO: 387315 - DNA, 566 bp, Homo sapiens
gtatagcaaaaagagcatagatttgctgattagaaaaacctgtattagaatccaggctctagcatttactagctgtgtggctttaggcaaatcaattaaatcctccgaacttcagtgtcctctatctgtcacagggggctaatgaaaataaatatctcatagaactgtgtggaatttaagaagacaatacgtagcaccgtgcatgaaatgggctcttgagaagtattagttccctttctggtctttccttccccgtctgtccaaagcggatgataaacatgcttcgcgcagttcctcaggtataagtatactgcatgctttgagattgacaagagggacacytgagcagtgcagtgttgaggggccaggaaagtttccccaatatgggcccttcagcatctaaacagagttaaggatcatcagcacaaacagcattggccattatgcagtgttcttgaacacttcttaacctgacaccgccaaaaaagtgccttcgcacactgaaggaatgtgggttgtatatttttatttatcccatggtgatccctctaggagccacagattta

SEQ ID NO: 387316 - DNA, 477 bp, Homo sapiens
tagttcatcttatgatccaacacacatgcaactgaagcaagattcataaaacaatatttactcctattacatgtgatgccagctattttctgttctcttcagatgcttatttgaagctcactaaattgatttcataatttattggggggttgcgtttgaataacactgcctccttttgtaaacctccttgcataacccttaacctaaatccttgtggcaatgttatttcaaccagtgccgcctctgagcaaccttaagcraccttagactgcttaaagggtacactcaacaaacaaaaggtcagagaggaacacacgcttttctctgcctctctgaagcctgctttttatgttctagtgtcttttctcaggacaagcttttcccctgatgatttatagcaggaatgtccaccccagtctgggcagaccaagcctataccaaaaggtcatgaccgcaccctgcagacaacagcaggag

SEQ ID NO: 387317 - DNA, 577 bp, Homo sapiens
ttgctccaggacttcccatcagcctggccaagactttctcagaatcacactgcaggccgaagctccttttcctcagtcctcctgccttccctcctggctttctctctcccctttcacaggtgtcagatccacattgtgttcaaagagctctcttctcctatttctgatacctcacttgtttatcctctgtaggtgtttctcctaatacatctcttgcacatctggttccaccttggcatctgtatctttgaggacctaaacagacacagaaatcaagtaacaatgcaaaaagcctgacgctcactgactattarattgttgacaaatataagattgctgggccttgggaaagcataatttcacttgttcctaataactgaaaatgctttttgaaaaactaaatatgccatgcataaagggcctaagatttaggttttcctgtagaaaaacatctgtgccctagtgggaaagtatcacttttaaatataaaattttaaaatgaatccagggaagacattaaattcccaggattgaggacaataaccaagaacctgaacagcatttacgtgtttgttgg

SEQ ID NO: 387318 - DNA, 519 bp, Homo sapiens
attacggagctccacactacctatttcccaaatcttgctatcgtgcttctctggaactcttagggtttaagggagcagagtttgaaaaccactaaactggtctaattcttacagtatatggatcaggaacgtgaggycagggaggatattaacctactgaaggttacacagcccattaatggtagataagatctgatttcaggtcttagattcgaggccttggattctttcccttgcatcagcagttttccaaatgtgttccacagtgatgccctaggggtctccatgagagtcaagagaaggaggggcaacagccaatgttccaggcaccagccaattcaaccaaaccgtctaggctttatatgttctaattatttaattttgtttaaagaaagggctcagtaattaaaagctggcttgagaagcacagcacaccatgtgctcaatgacattatctgaagtcccctgcttgggaaaagaagtagtagtaataataatagtggctagtatatatactta

SEQ ID NO: 387319 - DNA, 442 bp, Homo sapiens
ctactgccataaaattactggatgacgttctcagccatgctgctgcccaaaccctggaacatacgtggatacccaatacacacatgtgtgctgacagataaacatcacttgcatcactttctttccaaacccttagaaccctcagataacattttaatctaaaatgatcccaccctatagaagacgcatggttagtatttctaaaggtctgcatattggcatcttatcttggggaaaagaaaaagcagaagcccaagtgaccagcaataacacaggctcccttgctttatcccatgagccatccgcactgcactccttagggtgggattaatgtcaatatggcaagcctatttgaaygtatttagagctgtcaaataattcatggtggtttacccacagaatcacagcatttatttcaaatcttctatggaaatatatatat

SEQ ID NO: 387320 - DNA, 621 bp, Homo sapiens
gtaaacctggcattttgggaggccaaggtgggtggatcacttgtggtccaaaaccagcctggccaacatggtgaaaccccatctctactaaaaatacaaaaaaaaattagctggctgtggtggcaggcacctgtaatcccagctactcgggaggctgaggcaggagaaacacttgaacccaagcggtggagattgcaggttgcagtaagccaaggttgcaccattgcgctctagcctgggtgacggagtgagactccgcctataaaaaaaaaaaaaaaaaagsgtaattgagagttttgtaaagagaaatattaacagtgtgaacaagtttatattttagaaagatcactctgctgggcaggaagaaaatcaagatttatgagagaccactgcttccagatagggtactaggtgctgtcatatgtattgggccatttactacttatagcaactttaaggtatagaaggcatggtatttccattttacaggcaagaaaactggatctcaaagagagtaaatcatttgtccaaggtcacaaagccagtaaatgagagaaatttaaaatttaacttcccatttctggcaatgcttttagtaattttttaaataataaacttatt

SEQ ID NO: 387321 - DNA, 621 bp, Homo sapiens
gtaaacctggcattttgggaggccaaggtgggtggatcacttgtggtccaaaaccagcctggccaacatggtgaaaccccatctctactaaaaatacaaaaaaaaattagctggctgtggtggcaggcacctgtaatcccagctactcgggaggctgaggcaggagaaacacttgaacccaagcggtggagattgcaggttgcagtaagccaaggttgcaccattgcgctctagcctgggtgacggagtgagactccgcctataaaaaaaaaaaaaaaaaagggtmattgagagttttgtaaagagaaatattaacagtgtgaacaagtttatattttagaaagatcactctgctgggcaggaagaaaatcaagatttatgagagaccactgcttccagatagggtactaggtgctgtcatatgtattgggccatttactacttatagcaactttaaggtatagaaggcatggtatttccattttacaggcaagaaaactggatctcaaagagagtaaatcatttgtccaaggtcacaaagccagtaaatgagagaaatttaaaatttaacttcccatttctggcaatgcttttagtaattttttaaataataaacttatt

SEQ ID NO: 387322 - DNA, 608 bp, Homo sapiens
tatggtttgtttttacttttatatctgattatagtcttcagtgactagtaagtctcaagttaaaagaggcacttaattatccaaatttcttggatataaatcccctaccccaaagtcccaaggggcctgggggaagggaaagaagaaggagaaggaggaggagaggaggaaggagggaaagagggaaggaaagaaagaagaaagaaagccaatctccaaaccgtctaaccctaaaaattagcaagaaactaccagggaaagggggttgtaaaataacaactacaacattaataatatttttgaaaatttacaatgtgccagccacttttctatttacctcttttaatccrtttaattctcagtgattctgtaaagtcggtactattattatctcagtttgcagatgaggaaactgaaggacagagatgttaaatcacttgcctaaggtaactcacctagtgagtgacacagcctggattcaaaggcagtctggtttcaaagcagatggtttttgctacttcactccagttgcctttaaaatgaccacttgtctattttatcgtggtaaaatacaatagtcatacaacgaaaattaaataagagtttgc

SEQ ID NO: 387323 - DNA, 608 bp, Homo sapiens
tatggtttgtttttacttttatatctgattatagtcttcagtgactagtaagtctcaagttaaaagaggcacttaattatccaaatttcttggatataaatcccctaccccaaagtcccaaggggcctgggggaagggaaagaagaaggagaaggaggaggagaggaggaaggagggaaagagggaaggaaagaaagaagaaagaaagccaatctccaaaccgtctaaccctaaaaattagcaagaaactaccagggaaagggggttgtaaaataacaactacaacattaataatatttttgaaaatttacaatgtgccagccacttttctatttacctcttttaatccatttaattctcagtgattctgtaaagtcggtactattattatctcagtttgcagatgaggaaactgaaggacagagatgttaaatcacttgcctaaggtaactcacctagtgagtgacacagcctggattcaaaggcagtctggtttcaaagcagatggtttttgctacttcactccagttgcctttaaaatgaycacttgtctattttatcgtggtaaaatacaatagtcatacaacgaaaattaaataagagtttgc

SEQ ID NO: 387324 - DNA, 550 bp, Homo sapiens
tagtatagcaatgagagatgcttggaatattaagtgacataaacaaaatatttgtttctgtggtacaatttcagacacataaaaatatgtttgtagaggatttctggcatcatggaagactgaactggcatagcagaaattcttcccactgaaataaaatagcaactctagctaaaatgaagcaaacacacacacacacacacacacacacacacacacacacacacacacactctgttttgaaagaaagtgaaaacactggtttccaraagaaaggagacatatcaaagctgggtcaagaaataggaactgacattgtggtggcctgcaggtctcttaaacctgatttaggtcctagatctggagttttaacctatatggggcctggagctattgtcaggagcttcttaaaagacagcaggagataataaaggagactgagctggaactgggcccactgattgaagcctgactgggaaaacagcaaagaaatttgtcatctgagtggagcctttggtcaagataagttacttgtaagaagataaaaccc

SEQ ID NO: 387325 - DNA, 453 bp, Homo sapiens
tttaacctatatggggcctggagctattgtcaggagcttcttaaaagacagcaggagataataaaggagastgagctggaactgggcccactgattgaagcctgactgggaaaacagcaaagaaatttgtcatctgagtggagcctttggtcaagataagttacttgtaagaagataaaaccctcagtatatggagtctagctttacattagtaatctgtgcagaactccaagtgaagaaattaacatctaattgaagttttagaaggagagaataaaaataataagacaaatttgaagagataatggcagaaatttttctagaactgaggaagatgtgtgtgttttctatctaagcaagataaataaaataaattagtactgataaaggtcgtgataagccttcagtatatcaacgacagaaaacatcaaaggtgacaaaatagaaaagaca

SEQ ID NO: 387326 - DNA, 453 bp, Homo sapiens
tttaacctatatggggcctggagctattgtcaggagcttcttaaaagacagcaggagataataaaggagactgagctggaactgggcccactgattgaagcctgactgggaaaacagcaaagaaatttgtcatctgagtggagcctttggtcaagataagttacttgtaagaagataaaaccctcartatatggagtctagctttacattagtaatctgtgcagaactccaagtgaagaaattaacatctaattgaagttttagaaggagagaataaaaataataagacaaatttgaagagataatggcagaaatttttctagaactgaggaagatgtgtgtgttttctatctaagcaagataaataaaataaattagtactgataaaggtcgtgataagccttcagtatatcaacgacagaaaacatcaaaggtgacaaaatagaaaagaca

SEQ ID NO: 387327 - DNA, 537 bp, Homo sapiens
tacactgtagttgcaaaggagcaaagatggtaggtcccttaatcaacccctggttttaacctaagtaaatatattgaaagtgtggctgtaaagctaagccacataagcctttcttctaaatcctcctgcaggcattaatgctcagatttgagatggcatccttatttgctaagtgcaaagatggttacaaaagagcttttctcactttgaggataaaagctaaagtattctttaattttggttaccgcctggctcatctcagcaccataatagttatttggctcaaaaccaaaaagtagcaatacagtacttacatgtctrtggatcaaaattagatgaaaaattgctgtttctcatctccaaagctatttgctgcacattttataaccctcaagatgccttttgtaatatgtgataacagagccaactgcagcatctgcctggaaagagattactttaattatggactcaatgtcctattttctgcaagtgatccccagagacaggcttcctgccgaaggagaggtgcaaggatgc

SEQ ID NO: 387328 - DNA, 559 bp, Homo sapiens
agagcatttattctgtaacttcaattccatattccactttggtaactctcaatcgagcttttatttaaacagttaagttgtttaatccaagggttgtattatatctggaatatatacttaccccactaccaactgtttcagacattgtatctttctgagttttgtttttgtttttgtttttttgtaaaagcrttgagttaatttttttttggctttctgtatttcacatttgggttagaatgcaaaatgtcttagtttagacttataatttaaaagaatttcagtaaataaatatatgtcataaatagagttgatttttaatatttaaacttgacagtaaaacttattttaaaatgagttttaatacaattttacctctgattatgaaagcaatgcctatgtacataaaaatacagctaagcaaatattcatatatgtacagagacgcacagtcacactgacacctgcacatgtgcacacgcatatgcatatttccactatcccagagataacagtgtgtatcttggggtatatttctctagatatatgtgtgtgttga

SEQ ID NO: 387329 - DNA, 598 bp, Homo sapiens
agagcctttaaagtccttttcacctgagtaaaagtctttttcacctccatctctgcttttgctaaattaaaagcagagccttatctcaaatagagagggcctggccacatatttagatcctgtcctcctcttytgggtatctgcctgtccttggtctcaattaatggatttataaatcacctagaagtgaggatttacagtgaaatattcaagtttatgggggacacaaaactgttctagagagtgaaatgctaacttgatgtgaataaattgtgatattgtatacatggtaagcagaagagtggaaaacagaatcaatatgtatacaaacataaagaaatataagcaaggggctgagcgtggtgggtcgtgcttgtaatcccagcactttgggaggccaaagcgggcggatcacttgaggtcaggagttcaagaccagtctggccaatatggtgaaatcccgtctctactaaaaacacaaaaatcagcgaggcatggtggtgcactcttatagtcccagctacttgggaggctggggcaggagaatcgcttgaacctgggaggtggaggttgcagtgagccaagatcgcgtcattgc

SEQ ID NO: 387330 - DNA, 512 bp, Homo sapiens
cataaaagtcacacttcccctgttatgtgtgtctctgatgcttatggtcacagcagggatcctcttttagctgattgtttctaaatgttcctccatatctctaaataacatgcttattttgccaattcttgttttttctagtttagacattatctattaactttctacaaatgacaattagattgtcatgttaatgatctacaatgttaatgrtctacaatgctgattatgtaaataccattcacagcccagacgggtcaaagactgcactgtaatttcttttcctttccaaacccaagttttttattttcctagaattagtaattgccttgcttttcacttgctttgttttctaagcatttatacctcccctaattgtataaatcttctctcaacacgttcaaacccactacagtttccatcagtctaaacctcttgaataaatctctcctggaggtggctggctgctcgcgaggcctgtagcacaggtggtacactggggtttccctctc

SEQ ID NO: 387331 - DNA, 568 bp, Homo sapiens
ttgttttacatctttctctttttttctactacctgcaccctcacccccacttttgttaccactgtcgttatttggagaaaatcctccagtacctcactgagtcaacagaaacattttttgagactttgttggtctgagtatgttttagttctaccctcttgaatgataggttggttgtgcatagaactttaagttggaaatgtgtccctcagaattggaaaggcaatgctcctcagaattgtaatgcactgacttctagctttcwgtgtggcttgagaagcccaaggccattcccattcttaacgctttctagggaagaaacttttgttctttacacttgtttggggtgttccctttgatctcaggaacctggaatttcttgatgatgtacattttatgattctgtttttaccattgaaactcagtgggcctttccatctgcaaactcatgtttttgaggaccaggaaattttattgctttatgtcattgaggattaaccccgtttctgtttcagttttctcttttctcttttttctggaatgcctccatcataacattaaacattct

SEQ ID NO: 387332 - DNA, 589 bp, Homo sapiens
acacgtttattgtgattaagaggctctaagttgcctgtcacgctacagttaaaaaaatttgtttttgtagcaccacaactctttaaaaataaaactttttttgattataaaaacattacgtgtttgctacagaacaggatacacttgttaataagtcaaagaaaactctttcatcaaaaaaaccattatttttgtttttyctaacactttacttatgatcacacatggacttctgaactgtctgtaaattgttgtaggtaatactgtcaactggagaagaaaataacccaaaatgtaatcaggtgacttcacatagtacctcctacacaggctgaaacaaggcacagtgatgaaaaagtgacaaatacatgacttaaagaaaactgttcttcagcacaatcaaccacagtgggctcctggctgtagaacactgacttgcaatttggaatagaagaatcctgagagaaacagtccttttgctaacggcagaccttctaagatatggaagcgactggaggatgctgttctgagcatggctgggggacacctgcaattctcatgccataggaaatggtcaggagggggtttc

SEQ ID NO: 387333 - DNA, 608 bp, Homo sapiens
tgctgaccaaaaaaactaggatcaaaccataaacataaaagaaaaagaaaggctttgaaccagtgttttgtcttccactgtaacaagctccttggtagattgcaagcttgttattttgttattagttctctattttttatttatttattattcaggtggctgttttttttcatgggacaaagtattacatatgatggtacctttgaacagtagagagtatacttctgaagatataactgggttttttaatcctgatttttaaattattaggcatgaaaatatgctcaaccacccattcattgggcacagaggaagatgaagtgaaatgtccctgtagtctggggtccccacatagcartgactcagacgggctctcaggatgcaggaaagaggaggaggatgaatgagaaaattgagctcctttgcacaaccagagatttatgaatggttggtggtgacatcatcttgataacaataaataactgaaatattgttttctcaagagcagtctaatggcatgactcattctttttagatcacagtgaaatcactcagcctgtagtcaggtactctgctgaagcaagttaatcacctagaaactcactgac

SEQ ID NO: 387334 - DNA, 584 bp, Homo sapiens
ctacctttgcactaataagacacctgacacttagctcaaaaacaaacaaaaaaaaatagaagagacaagccagagttgactgaaattaagtttccaccaacatggtaggaggaggagaatataaagaaattagrttaggttatggaagaataaagaaagttttatttctctgatactcaagtttctggacagaattcataactgctacacttgtgtaagcatgaacaatttccagaaggactcacagaaactattacccaagttgttgaccctggagaaagaataaaggtctaatgtgggaaggaggcttatttttactgcttatatttttggattatttgaaattttaaccacataaatttttaaatttttaaataatttcaaatattcaaactgaacagatagtacattcaatattgagttgacataaaaaacatttcttatttctattccaactgtcataaaaaacttggaagagtaacttatctgttacctttatttataatatcattttatgttcctcattttttatgtacatgtacagtcattagtaaatgagataaacttgaatattaaagaattat

SEQ ID NO: 387335 - DNA, 584 bp, Homo sapiens
ctacctttgcactaataagacacctgacacttagctcaaaaacaaacaaaaaaaaatagaagagacaagccagagttgactgaaattaagtttccaccaacatggtaggaggaggagaatataaagaaattagattaggttatggaagaataaagaaagttttatttctctgatactcaagtttctggacagaattcataactgctacacttgtgtaagcatgaacaatttccagaaggactcacagaaactattacccaagttgttgaccctggagaaagaataaaggtctaatgtgggaaggaggcttayttttactgcttatatttttggattatttgaaattttaaccacataaatttttaaatttttaaataatttcaaatattcaaactgaacagatagtacattcaatattgagttgacataaaaaacatttcttatttctattccaactgtcataaaaaacttggaagagtaacttatctgttacctttatttataatatcattttatgttcctcattttttatgtacatgtacagtcattagtaaatgagataaacttgaatattaaagaattat

SEQ ID NO: 387336 - DNA, 584 bp, Homo sapiens
ctacctttgcactaataagacacctgacacttagctcaaaaacaaacaaaaaaaaatagaagagacaagccagagttgactgaaattaagtttccaccaacatggtaggaggaggagaatataaagaaattagattaggttatggaagaataaagaaagttttatttctctgatactcaagtttctggacagaattcataactgctacacttgtgtaagcatgaacaatttccagaaggactcacagaaactattacccaagttgttgaccctggagaaagaataaaggtctaatgtgggaaggaggcttatttttactgcttatatttttggattatttgaaattttaaccacataaatttttaaatttttaaataatttsaaatattcaaactgaacagatagtacattcaatattgagttgacataaaaaacatttcttatttctattccaactgtcataaaaaacttggaagagtaacttatctgttacctttatttataatatcattttatgttcctcattttttatgtacatgtacagtcattagtaaatgagataaacttgaatattaaagaattat

SEQ ID NO: 387337 - DNA, 569 bp, Homo sapiens
tgttacacaggtaagttaaaataaaggttctactttgcctaaaaaacaagtaaaagcaagccaacagaatggaggaattaaggtagaatctctctaaaatcaccagggtttttaaaagcttttttccagctaggcattcagaatgaaagcctagcctactttgacttgtttttagttgaaaaagccaaatttctttaaaactatcaatacaaattggtagcaatttttactaggaaagtattgataaatgagaatctacttaatttcwtaagtcaaatccctcttgagagcagagcagttaaatgagaaaaaaatgaaattttaaagttttcagcataatataatcttttcatactagataagtaaataaatgttatgagtgtcaaaaccactcataaatgtgtacttatgatttcttttccagattctttttcatgtttgtgatagtgccacttaaaagttatttgtcctccaaattctctctccagtggggcctatccagatgatgttttggcaaaatacaaagatttagatcagcaatgaaatgcttcagcaacattctaagtctt

SEQ ID NO: 387338 - DNA, 553 bp, Homo sapiens
ccaatcccttgaagttctttccttttttttttttttttttttttttgarataatctcgctttgtcgcccaggctgaagtgcagtggtgcaatctctgctcactgcaacatctgcctccggggttcaagtgattctcctgtctcagcctcctgagttattgggactacagacatgtgccaccacacctggctaatttttatatttttagtaaagacagggtttcactgtattggccaggctagtctcaaactcctgacgagtgttccacccacctcaccctcccaaagtgctgggattacaggcgtgagccactgcttcctgccctctattttcttaattctatagaagatacttaatcactgtcctacctgcaaatattagtgtctgccacctccaggagagaaatggacaaagcggtagccaggatgatcaatttccccaggacctcttttcataagattaacatatatttgtatagttttaaatgcatgtatagatgtgtacacatatatggacaaatatagatttagaaatatcctcaaacttaaagaca

SEQ ID NO: 387339 - DNA, 553 bp, Homo sapiens
ccaatcccttgaagttctttccttttttttttttttttttttttttgaaataatctcgctttgtcgcccaggctgaagtgcagtggtgcaatctctgctcactgcaacatctgcctccggggttcaagtgattctcctgtctcagcctccygagttattgggactacagacatgtgccaccacacctggctaatttttatatttttagtaaagacagggtttcactgtattggccaggctagtctcaaactcctgacgagtgttccacccacctcaccctcccaaagtgctgggattacaggcgtgagccactgcttcctgccctctattttcttaattctatagaagatacttaatcactgtcctacctgcaaatattagtgtctgccacctccaggagagaaatggacaaagcggtagccaggatgatcaatttccccaggacctcttttcataagattaacatatatttgtatagttttaaatgcatgtatagatgtgtacacatatatggacaaatatagatttagaaatatcctcaaacttaaagaca

SEQ ID NO: 387340 - DNA, 553 bp, Homo sapiens
ccaatcccttgaagttctttccttttttttttttttttttttttttgaaataatctcgctttgtcgcccaggctgaagtgcagtggtgcaatctctgctcactgcaacatctgcctccggggttcaagtgattctcctgtctcagcctcctgagttattgggactacagacatgtgccaccacacctggctaatttttatatttttagtaragacagggtttcactgtattggccaggctagtctcaaactcctgacgagtgttccacccacctcaccctcccaaagtgctgggattacaggcgtgagccactgcttcctgccctctattttcttaattctatagaagatacttaatcactgtcctacctgcaaatattagtgtctgccacctccaggagagaaatggacaaagcggtagccaggatgatcaatttccccaggacctcttttcataagattaacatatatttgtatagttttaaatgcatgtatagatgtgtacacatatatggacaaatatagatttagaaatatcctcaaacttaaagaca

SEQ ID NO: 387341 - DNA, 581 bp, Homo sapiens
atcttgctgaagtataatgtggataaaggaaactctgctattgattcctatccttcaaccacaactttgacaaagaagacaaatatttgatatttgttgtctagatacccaaggtttgtatgacaatgattttaaaacatccatactttattaaaggaatcatggctttacagagtgatattgatkgttggtacagaaattacagcaaagttatgattcttttttaagatgtttgtacacaatatgcaaaagaaaaacattttgtaacaatggatgctttaaagtcttactcaaaaaagttgtcaactttatagaactttggagtttgaaggataaactccactttctttgcccaaagctacatcaggagagccacatttgacttgtttattttctctcaattctcttgaaaaagtatagcctctttctctggagaagaaatttcatatgaacattttttgcataagtttacatataaccaaaacaatgaaaataaaatcattattataagtacaccatacacacatatacattatatgtacatatctctttgagaaaaagcatagttaaattattgtttt

SEQ ID NO: 387342 - DNA, 563 bp, Homo sapiens
tgtttatagtattctctgatggtagtttatatttctgtgggatcagtggtgatctctcctttatcattttttwttgtgtctatttgattcttttctctttattattctggttagcggtttacctattttgataagattttcaaaaaaaccagcaggcaggaggatttttaaaggacaggataaatacaaaaaataaaaaaaaatttacggacccaaattgatgagaactaaagcctggatatattgatagggagataaataattatcccattcaaagataactgagatttagagaatgaagagtcatagtaatatagccagaatgatcaaataggccctggttttagggtttgtagcagttgaattttgaggttaaagagcagggacacactcaagagcaaatatgtataggaaacagaagtgagactgtagttatgatagagatcagagctagagatttagattggaaagttgctccagaaacagcagtttaacatagcattagttattttcattatttctccttttctttcattttgttggcttccctgtgctttggttca

SEQ ID NO: 387343 - DNA, 497 bp, Homo sapiens
tgtttatagtattctctgatggtagtttatatttctgtgggatcagtggtgatctctcctttatcatttttttttgtgtctatttgattcttttctctttattattctggttagcgrtttacctattttgataagattttcaaaaaaaccagcaggcaggaggatttttaaaggacaggataaatacaaaaaataaaaaaaaatttacggacccaaattgatgagaactaaagcctggatatattgatagggagataaataattatcccattcaaagataactgagatttagagaatgaagagtcatagtaatatagccagaatgatcaaataggccctggttttagggtttgtagcagttgaattttgaggttaaagagcagggacacactcaagagcaaatatgtataggaaacagaagtgagactgtagttatgatagagatcagagctagagatttagattggaaagttgctccagaaacagcagtttaacat

SEQ ID NO: 387344 - DNA, 497 bp, Homo sapiens
tgtttatagtattctctgatggtagtttatatttctgtgggatcagtggtgatctctcctttatcatttttttttgtgtctatttgattcttttctctttattattctggttagcggtttacctattttgataagattttcaaaaaaaccagcaggcaggaggatttttaaaggacaggataaatacaaaaaataaaaaaaaatttacggacccaaaytgatgagaactaaagcctggatatattgatagggagataaataattatcccattcaaagataactgagatttagagaatgaagagtcatagtaatatagccagaatgatcaaataggccctggttttagggtttgtagcagttgaattttgaggttaaagagcagggacacactcaagagcaaatatgtataggaaacagaagtgagactgtagttatgatagagatcagagctagagatttagattggaaagttgctccagaaacagcagtttaacat

SEQ ID NO: 387345 - DNA, 568 bp, Homo sapiens
tgtttctactgcactcaaataaagtgtccatttaaataggtaaatgagctkgagatcactcatgctgagcatgaaaccccagccaaagtaaggaacaagaggcaatgataacccttgtctaactccagaaacgctctgcatgtagaaacaggatctgattattttaactgtacatccagactggctaaactaaaagaattatccatagcaatgttttgtctaaataacctgtgattgctgccatatagaaacagctccaggtagaaccgttttatcaaaaaaaaatttttttttttttgctaaaattaatgttcccatggtcttcactctcatcctcttttttttattgttgttgttgagattgagtcacccaggctggagtgcagtggtacaatcttggctcactgcaacctctgcttcctgggttcaagtgattctcaggcctcagtcacctgaaatataggcatgcgtcaccacgcctggctaatttttgtatttttagaaaagacagcatttgccatgttggccaggtgggtctcgaactcctaacctcaagtgatacacccac

SEQ ID NO: 387346 - DNA, 568 bp, Homo sapiens
tgtttctactgcactcaaataaagtgtccatttaaataggtaaatgagctggagatcactcatgctgagcatgaaaccccagccaaagtaaggaacaagaggcaatgataacccttgtctaactccagaaacgctctgcatgtagaaacaggatctgattattttaactgtacatccagactggctaaactaaaagaattatccatagcaatgttttgtctaaataacctgtgattgctgccatatagaaacagctccaggtagaaccgttttatcaaaaaaaawtttttttttttttgctaaaattaatgttcccatggtcttcactctcatcctcttttttttattgttgttgttgagattgagtcacccaggctggagtgcagtggtacaatcttggctcactgcaacctctgcttcctgggttcaagtgattctcaggcctcagtcacctgaaatataggcatgcgtcaccacgcctggctaatttttgtatttttagaaaagacagcatttgccatgttggccaggtgggtctcgaactcctaacctcaagtgatacacccac

SEQ ID NO: 387347 - DNA, 568 bp, Homo sapiens
tgtttctactgcactcaaataaagtgtccatttaaataggtaaatgagctggagatcactcatgctgagcatgaaaccccagccaaagtaaggaacaagaggcaatgataacccttgtctaactccagaaacgctctgcatgtagaaacaggatctgattattttaactgtacatccagactggctaaactaaaagaattatccatagcaatgttttgtctaaataacctgtgattgctgccatatagaaacagctccaggtagaaccgttttatcaaaaaaaaatttttttttttttgctaaaattaatgttcccatggtcttcactctcatcctcttttttttattgttgttgttgagattgagtcacccaggctggagtgcagtggtacaatcttggctcactgcaacctctgcttcctgggttcaagtgattctcaggcctcrgtcacctgaaatataggcatgcgtcaccacgcctggctaatttttgtatttttagaaaagacagcatttgccatgttggccaggtgggtctcgaactcctaacctcaagtgatacacccac

SEQ ID NO: 387348 - DNA, 605 bp, Homo sapiens
ttaatttgttaccacagcaagatggaacttacctgattaatacacccttttaatataacacttgtcatagtccatttacttctacttactttactaaattataagtttcttgggagaagtgttttggtcctagtgattttgaagatcatcaccaatgatcatcacccaattgctaaactaatgaatagacttctgtttttctcttctccatgatatttcataccctcaaacagaacaaactatttttttacaacagtcaaagaaaaactgtaatgaatgtaagctgtatagtagtagtcaagaacaaagattgtggagacaaattacctgtgttcacatccatttctgtcatatactagctatgtcctttggtaaattatatgtaaactctccatgcttctcttttctcacatrtgaaatatagaagacaacacttcactgggttacataatcaatgtatgtaaagtgtctagcacatagaaagtactatgtaaatgttgactattactatattgctaaaactttttaggagccctaaatttctatctatgtccttaatgactgacaaaatcaatgacctttcttttctggcaaagaaacttcat

SEQ ID NO: 387349 - DNA, 583 bp, Homo sapiens
acatacattatcagattagctttaataagaaaaatatgtatgttttgggaatttctcaagtgtgtgcagaattctaatattaataccagtcaaagaatggacacttcagtgtcaccatgataacacctggcacatttggaatcttcaaaggtttcatatttattttatttatttatttgttttgggacagagtctcactctgttgcycaggctggagtgcagtggtgcgatctctgctcagtgaaacctccacctcccaggttcaagtgattatcctgcctcagcctcctgagtagctgggactacaggcacccaccaccacgcctggctaattttttgtatttttagtagagacagggtttcactgtgttagccaggatggtctcgatctcctgacctcgtgatccgcccactttgacctcccaaagtgctgggattataggcgtgagccacggcacccggccaaaggtttcatatttaatcttacgaagatttgattaaagataatataaatagaatattaattgggtttttaacaacatggcacacactatatccaatttcattgcattccccatagtga

SEQ ID NO: 387350 - DNA, 548 bp, Homo sapiens
atgtatgttttgggaatttctcaagtgtgtgcagaattctaatattaataccagtcaaagaatggacacttcagtgtcaccatgataacacctggcacatttggaatcttcaaaggtttcatatttattttatttatttatttgttttgggacagagtctcactctgttgctcaggctggagtgcagtggtgcgatctctgctcagtgaaacctccacctcccaggttcaagtgattatcctgcctcagcctcctgagtagctgrgactacaggcacccaccaccacgcctggctaattttttgtatttttagtagagacagggtttcactgtgttagccaggatggtctcgatctcctgacctcgtgatccgcccactttgacctcccaaagtgctgggattataggcgtgagccacggcacccggccaaaggtttcatatttaatcttacgaagatttgattaaagataatataaatagaatattaattgggtttttaacaacatggcacacactatatccaatttcattgcattccccatagtga

SEQ ID NO: 387351 - DNA, 583 bp, Homo sapiens
acatacattatcagattagctttaataagaaaaatatgtatgttttgggaatttctcaagtgtgtgcagaattctaatattaataccagtcaaagaatggacacttcagtgtcaccatgataacacctggcacatttggaatcttcaaaggtttcatatttattttatttatttatttgttttgggacagagtctcactctgttgctcaggctggagtgcagtggtgcgatctctgctcagtgaaacctccacctcccaggttcaagtgattatcctgcctcagcctcctgagtagctgggactacaggcacccaccaccacgcctggctaattttttgtatttttagtagagacagggtttcactgtgttagccaggatggtctcgatctcctgacctcrtgatccgcccactttgacctcccaaagtgctgggattataggcgtgagccacggcacccggccaaaggtttcatatttaatcttacgaagatttgattaaagataatataaatagaatattaattgggtttttaacaacatggcacacactatatccaatttcattgcattccccatagtga

SEQ ID NO: 387352 - DNA, 583 bp, Homo sapiens
acatacattatcagattagctttaataagaaaaatatgtatgttttgggaatttctcaagtgtgtgcagaattctaatattaataccagtcaaagaatggacacttcagtgtcaccatgataacacctggcacatttggaatcttcaaaggtttcatatttattttatttatttatttgttttgggacagagtctcactctgttgctcaggctggagtgcagtggtgcgatctctgctcagtgaaacctccacctcccaggttcaagtgattatcctgcctcagcctcctgagtagctgggactacaggcacccaccaccacgcctggctaattttttgtatttttagtagagacagggtttcactgtgttagccaggatggtctcgatctcctgacctcgtgatccgcccactttgacctcccaaagtgctgggattataggcgtgagccacggcacccggccaaaggtttcatatttaatcttacgaagatttgattaaagataatawaaatagaatattaattgggtttttaacaacatggcacacactatatccaatttcattgcattccccatagtga

SEQ ID NO: 387353 - DNA, 599 bp, Homo sapiens
acatacaagctaccacgattgaatcatgaaaaaataggaaatttgaacagamccaataatgaaaagaaaattgagccagtaattaaaaaatttcacaatgaagaaaatcacaggaccagatggattcactggtgaattctaccaaacgtttaaaaagaagtaatatcaatctttcttaaattcttgcaataaattgaagggatacttccaaactcattttatgaggccagcattacctcgataccaaagctagatgaaaaagtattacactaaaagaaaactacaggccaatatccctaatgaacataaatgcaacaatcctaaaacaaaatgctaagaaacaaaattcaacagctcatacaggaccatattccatgatcaagtgggatttattttggggtggcaaggatagttccaacaaacacaaatcaactgatgtgatataccacattaacagaatgaaggatgaaaatcacgtgatcatcacgatagatgcagaaaaagcatgacaaaatccgaaattctttcatgataaaaactctcaaaaaactacgtacagaaggaatttacctcaatacaataaaggcaacatataaaaa

SEQ ID NO: 387354 - DNA, 613 bp, Homo sapiens
gtatattttgttaaattttattgtacagaaaacgtaaaatgagaaactccacatgaaattgtttccacatcatttcagaatcttcatctactaagaaattgtccttagtttaattatttgtgccataagtctctcccagaatttagtgctagggaaagtctgtccatccagatcaccctccataatcagacaggactaaacaacaataataatctttcctttttttgcccggtatgctatggaactcagagttaaatttaaaatctccagctatgatcttggctttggctatttctctcttargtctttcaaacgctttgccttattaattctgagactgttaaacagtacatatatatgttatttaggatcactttttactgaaacatgccttttatactcacgaaatgttcctctttatctttgtaataacctttgtcttgacattttgttttgtattaatatagccaaataaagtttttatacatattgtttgcagagtatatattttcactttcaatctatttgctttttttctaattaaaatgcacttcttgtgacaagatacacatggaccttggtttttatatccagtttgaaaatatatgccttt

SEQ ID NO: 387355 - DNA, 613 bp, Homo sapiens
gtatattttgttaaattttattgtacagaaaacgtaaaatgagaaactccacatgaaattgtttccacatcatttcagaatcttcatctactaagaaattgtccttagtttaattatttgtgccataagtctctcccagaatttagtgctagggaaagtctgtccatccagatcaccctccataatcagacaggactaaacaacaataataatctttcctttttttgcccggtatgctatggaactcagagttaaatttaaaatctccagctatgatcttggctttggctatttctctcttaagtctttcaaacgctttgccttattaattctgagactgttaaacagtacatatatatgttatttaggatcactttttactgaaacatgccttttatactcacgaaatgttcctctttatctttgtaataacctttgtcttgacattttgttttgtattaatatagccaaataaagtttttatacatattgtttgcagagtatatattttcactttcaatstatttgctttttttctaattaaaatgcacttcttgtgacaagatacacatggaccttggtttttatatccagtttgaaaatatatgccttt

SEQ ID NO: 387356 - DNA, 633 bp, Homo sapiens
tctaacaattaaaatgttgcgttgagatacttacatttccaagtaatgaagtgtccaacctaaagtgcttttataacttaaacatttaatgtcaggctaagtatgctttttaaaaaaagaaaaagaagaaatggtgattatttyaatcaccatttttctcttccaaaaagaagttatattatttgtaacggtgaaagtaaatagatcttaaaaacaatttatgtgaagtgactaaatattagagaccattattttatgagttgtgtttatgaacagtactattaggataggtgatagatgatgactccactgaggaagcaatttaaacttgtttttgttattcttaaagccaaaatgaaataggcaaaaggaaagggaaaaaaacctacattgggaccccatctctttggtatacatgagtttaacctttgttaataggatagagaactcattattcatatcaaaaggaaatggacaaacattttatgcctgataagatttttttctttatgcatcaaattctttaaaggatatccaactgaaagatattcttcatcgtgggaagtttggagaagggatttatccatatgctaaaatctatcaaagctattttgtgattctgtactaacaaaa

SEQ ID NO: 387357 - DNA, 633 bp, Homo sapiens
tctaacaattaaaatgttgcgttgagatacttacatttccaagtaatgaagtgtccaacctaaagtgcttttataacttaaacatttaatgtcaggctaagtatgctttttaaaaaaagaaaaagaagaaatggtgattattttaatcaccatttttctcttccaaaaagaagttatattatttgtaacggtgaaagtaaatagatcttaaaaacaatttatgtgaagtgactaaatattagagaccattattttatgagttgtgtttatgaacagtactattaggataggtgatagatgatgactccactgaggaagcaatttaaacttgtttttgttattcttaaagccaaaatgaaataggcaaaaggaaagggaaaaaaacctacattgggaccccatctctttggtatacatgagtttaacctttgttaataggatagagaactcattattcatatcaaaaggaaatggacaaacattttatgcctgataagatttttttctttatgcatcaaattctttaaaggatatccaactgaaagatattcttcatcgtgggaagtttggagaagggatttatccatatgytaaaatctatcaaagctattttgtgattctgtactaacaaaa

SEQ ID NO: 387358 - DNA, 510 bp, Homo sapiens
aattctaattaagtaaatcccataatgttataatcttatctaaaaaacagctgtgagataaggatacctgttggtgaactaacaattgtgataacaattaaggtcacctaaatttatcaatccctaatgaaatgtcatattttccagccaatgtaagaatgtatctcatggccaataataattctatactcacaatgtatttgtcttcataataggtcctacagagtatatacttttakgcagccaccacccttgaactcacttgctagcaacctagtaaagatagaaagtggacaggaggaaattaagaagaggaacagacaaatacatgtagcaggataatatacaaataaaactatgaaaaagataacataaaaaccagcacaaagtgattttctgtttcatgcagatgtatatatccagattactactgagaggtctttattaattaacagaatagttactccaaagcctctgcttgttctcatccttggacaattctggcaattt

SEQ ID NO: 387359 - DNA, 510 bp, Homo sapiens
aattctaattaagtaaatcccataatgttataatcttatctaaaaaacagctgtgagataaggatacctgttggtgaactaacaattgtgataacaattaaggtcacctaaatttatcaatccctaatgaaatgtcatattttccagccaatgtaagaatgtatctcatggccaataataattctatactcacaatgtatttgtcttcataataggtcctacagagtatatacttttaggcagccaccacccttgaactcacttgctagcaacctagtraagatagaaagtggacaggaggaaattaagaagaggaacagacaaatacatgtagcaggataatatacaaataaaactatgaaaaagataacataaaaaccagcacaaagtgattttctgtttcatgcagatgtatatatccagattactactgagaggtctttattaattaacagaatagttactccaaagcctctgcttgttctcatccttggacaattctggcaattt

SEQ ID NO: 387360 - DNA, 510 bp, Homo sapiens
aattctaattaagtaaatcccataatgttataatcttatctaaaaaacagctgtgagataaggatacctgttggtgaactaacaattgtgataacaattaaggtcacctaaatttatcaatccctaatgaaatgtcatattttccagccaatgtaagaatgtatctcatggccaataataattctatactcacaatgtatttgtcttcataataggtcctacagagtatatacttttaggcagccaccacccttgaactcacttgctagcaacctagtaaagatagaaagtggacaggaggaaattaagaagaggaacagayaaatacatgtagcaggataatatacaaataaaactatgaaaaagataacataaaaaccagcacaaagtgattttctgtttcatgcagatgtatatatccagattactactgagaggtctttattaattaacagaatagttactccaaagcctctgcttgttctcatccttggacaattctggcaattt

SEQ ID NO: 387361 - DNA, 582 bp, Homo sapiens
tctacatcaggctcagtattctcccgtctagcataacccctactataatagtgagcatgttcaatgcttaaatgggtgactcctcctgcagattttaytcccagctttttggcgaatttctgctagttcccttctcctctactccacctcagcaacacttcaaaggacatgctgggccttatcctcacttggaattgttgcacctgtgaagtttcaactccccaccatcctggatcttcccacatgctcctcttcttccagttcttaccaccttatctcatgttactatctattcattattcatttttttcaataaaaattgtatcacctatatgaccacattgagctctctgatttatttacttctcttaaattccattcctaataccctcaagcctcagtttttttctaaccagttcatatccaatgcactctggacactttctttccagcattctagacacgctttcttcaacccacaggaacagaatgaacaaaaggaaggaagaacatcgtatgtagggtaagaggaagaatgtgtcagaggcacagaatggaattattgctgggaagcaactgtcc

SEQ ID NO: 387362 - DNA, 593 bp, Homo sapiens
tttaagctccaaagtaatttccttagactccatatcctgtacccagggcatactagtgcaagggatgggctcccaaggcctcaggcaaccctgtggctttgcagggtgcagcccccacagctgctctcatgagatggagtgctgcatctttcccaggtgcagtgtccaagctactggtggatctaccatttttgggtctagaggatggtggctttcttctcacagttccactaggcagatccccastggggactctgtgtgggggctctagccctacatttctccttagggggctctagtagaggttctctgggggctctgcctctgcaacaggcttctgtctgggcacccaggcttttccatacatcttctgaagtctgggtggagagtgccaagccttattcactcttgcactctgtgcacctgcaagcttatcaccaagctgccaagtcttatggtttgtgttctccaaagtggcagcctgagctgtacctggccccctttgaaccatagctggagctggagcagctgggatgtagggagcagtgttcccaggctgcacagggcagtgggtccctggacctggcctacaa

SEQ ID NO: 387363 - DNA, 560 bp, Homo sapiens
tctttcttcaggggcacagttttgtgccttctgtgaagctaattctgctaagaaccttgacatgtcttatgtactctctgcctaacatttcttggcagccactcagctgcaaccttcagtagtattccctacatactctctttctgcttgggtctccctttttcagacagccttttgggcaggacctaacataactactatccttagyatctactcctcctatggaaacttacccactcttgtccagggtattttctgaatatagcttatgggctcaggaatcatcccttccttcttgcctgcagaaagaggaagctccagccatttcctgacttcagatgtcctcaggccagagtccagcaccagttgatctccctgcaaactaaaggggtcaatctccagttctcccacaaaaaaatgtatcactttcccttcttcagacattcccctgcatttcagggcctcttccatttgtcatttctcttccatgtgtcccttccccaaactgtccacttcagggggatataaacccagtcagttttattgcaaaaaaaaaaaaa

SEQ ID NO: 387364 - DNA, 560 bp, Homo sapiens
tctttcttcaggggcacagttttgtgccttctgtgaagctaattctgctaagaaccttgacatgtcttatgtactctctgcctaacatttcttggcagccactcagctgcaaccttcagtagtattccctacatactctctttctgcttgggtctccctttttcagacagccttttgggcaggacctaacataactactatccttagtatctactcctcctatggaaacttacccactcttgtccagggtattttctgaatatagcttatgggctcaggaatcatcccttccttcttgcctgcagaaagaggaagctccagccatttcctgacttcagatgtcctcaggccagagtccagcaccagytgatctccctgcaaactaaaggggtcaatctccagttctcccacaaaaaaatgtatcactttcccttcttcagacattcccctgcatttcagggcctcttccatttgtcatttctcttccatgtgtcccttccccaaactgtccacttcagggggatataaacccagtcagttttattgcaaaaaaaaaaaaa

SEQ ID NO: 387365 - DNA, 560 bp, Homo sapiens
tctttcttcaggggcacagttttgtgccttctgtgaagctaattctgctaagaaccttgacatgtcttatgtactctctgcctaacatttcttggcagccactcagctgcaaccttcagtagtattccctacatactctctttctgcttgggtctccctttttcagacagccttttgggcaggacctaacataactactatccttagtatctactcctcctatggaaacttacccactcttgtccagggtattttctgaatatagcttatgggctcaggaatcatcccttccttcttgcctgcagaaagaggaagctccagccatttcctgacttcagatgtcctcaggccagagtccagcaccagttgatctccctgcaaactaaaggggtcaatctccagttctcccacaaaaaaatgtatcactttcccttcttcagacattyccctgcatttcagggcctcttccatttgtcatttctcttccatgtgtcccttccccaaactgtccacttcagggggatataaacccagtcagttttattgcaaaaaaaaaaaaa

SEQ ID NO: 387366 - DNA, 543 bp, Homo sapiens
ccagctgtgctctactttaagaaaaactgatttataaaaattgaatttatcaaaaatataaattatgaaatgaatcagaaaacattatttatagaagtgttcaatataaggttgaattttaataagagtgcacccctagagcatgtaaaatatgacatcatttatgaaacttgaatcattcttctaccaaaacccattatttaaaaatccaaatttataaaaacagatgtattagggggttatttgttaaattcattaaaatatttctttaaatagcatgccaatgccacatcccacctccaggtactaaaaatatcatttgatttgctagcaattaattaaatgcaaattcagggaaacacaagctactgttagaactaaatatgcctgtctttgtgtctttgttcctktgggtaaataggaaaattgaagatctaaggaattcagcagtcactctcagattaatatttataattaaattctcctactctcttatctataaaatatctatcttctgtaatactgatacacaaatagacataa

SEQ ID NO: 387367 - DNA, 474 bp, Homo sapiens
gctgagtctgaaatatgtccaaaatgtaaaaaaggaaaacattgggctaatcagtgtcactctaagtttgataaagacaggaacccgatttcaggaaacaacatgaggggcccgccccgggccccattccaaacaggggcatttccagctcaggccattccctcacccctgtacaatgactgtcccctgccacagctggttgtgccacacacagtagatttatgctgcacaagagctgtgagccttctgcctggggaacccccacaaaaggycccaacaggagtctgtggacccttgccagcggagacaataggattacttctaggcaggtttggtttaaatttaaaaggggtacaaatacacacaggagtcattgattcagattacagtggagaaattaaaattgttttatctacttctgttccctggaaatcagagccaggagagttcatagcacagctccttattgtgcca

SEQ ID NO: 387368 - DNA, 474 bp, Homo sapiens
gctgagtctgaaatatgtccaaaatgtaaaaaaggaaaacattgggctaatcagtgtcactctaagtttgataaagacaggaacccgatttcaggaaacaacatgaggggcccgccccgggccccattccaaacaggggcatttccagctcaggccattccctcacccctgtacaatgactgtcccctgccacagctggttgtgccacacacagtagatttatgctgcacaagagctgtgagccttctgcctggggaacccccacaaaaggtcccaacaggagtctgtggacccttgccagcggagacaataggattacttctaggcaggtttggtttaaatttaaaaggggtacaaatacacacaggagtcattgattcagattacagtggagaaattmaaattgttttatctacttctgttccctggaaatcagagccaggagagttcatagcacagctccttattgtgcca

SEQ ID NO: 387369 - DNA, 492 bp, Homo sapiens
ttggtggagatatccgataacaaaaagttggaaaatatgtaaaataataacttggggtagaggttatgcttgtgtttctccaggccaaaatcaacagccgatttggataccatcaagacacctgaaaagttatcacaagccagatgccaaggaagagattctggggaggatcccgaggacccccagttgcagccatgtcgatactgacactgaggaggaccccaactgtcacgagcaacacccgttgaacacagacacccacctggggacagatcaaaaagctgtcacagatggcaaaagaaaacctaaggaaggcaggacagccagtcacaataagtaatttaatggtagctatgataayggtgatcaccactgccgtgagtattccttcaataagggctgactcagagaacaattatactcattgggcatatttatcaatcttggctggcaatagtgcctggatgtaatcactctataacacagttacac

SEQ ID NO: 387370 - DNA, 642 bp, Homo sapiens
aactttgagaaaataaacaattcaataaaatgagaaaaacaatgaccaaaattaaatagaaattaattttaataatagaaattattattaaaaacataaatggaaattctggagttgaaaaatacagtaaataaagtgaaaaatgtaayagagagtattaacagcataattgagtggaagaaggaatctgtgaacttgaagaaaggttatttgaaaatatacagtcaagaaaaaaagaataaaaatgaagaaagcttacaggatttatgggaaagcatcaaaaaaaagcaaatttttgagccatatgaatataagaaagggaagagaatgataaaggagtagaaaatgtatttatagaaaaaatggcagaaatctttataaacctggagaattataaatatccaggtagagaaagggcaagggacttcaataagattcaatctaaacaagactacttcaagacagaaaagaaaaatcttaaacaaacaatttaaaattgcatctcaagaaattagaaaaagaacaaagtccaatgttggaagaaaaaaataagattacaaaaattaatgcaatagaaaatagaaaaataaaagatcaacaaaacgacaagtttgttttttgaaagataaacaaaattaacaa

SEQ ID NO: 387371 - DNA, 612 bp, Homo sapiens
tcaatacatttttttattatgagatatagctctcaatgtttttttagacagagtctctgtcatccaggctggagwgcagtggtgtgatctgggcccactgcaacctccacctcccgggttccggcaattctcctgcctcagcctcccgagtagctaggactacaggcatgcgccaccacccctggctaatttttgtattttttagtagagaccgggtttcactatattggccaggctggtctcgaactcctgacctcgtgatccgcccacctcgacctcccaaagtgctgagattacaagcatgagccaccacacccggccacagttctcaattttaaaatggcttagattataaatatattatttgtttgatacccacaatgtgcaatgtgctttatatgggttatgtaattgaatagtcacaatagctctgcagggtcaggattagtattactgtgttattgttgaagaaacaaattagccaatttgctgaaggtcaaacagttgtaaagtttggaaccggatctgacccagttctgaatccaaattccatgctctttccaccaggttagtgattctccagaaaagtagagcttattctaaggcaaaact

SEQ ID NO: 387372 - DNA, 392 bp, Homo sapiens
gtgcaatccttggctggcttagtcaaactacaactggtgcttaatccacacaaatatgcagaggctgtctctttgctattctttaactataagaactgaatcacataaatacaatttgatctgttaatttttacaaaatgtataagaagaaatgaatgaccattctttccgactggacacattaccataagccttttctaaaatttcacagcaaccacacagtcaaagggtgttgctataacccatgaactaaatgaaatgatgggacagaaatttgatcgtggtctccttctccagtctctrtcttaaatgatgtcttcccattatttttttccagaagtataacttccctgtagaatcatctctttcccttaggaggggggtggggtatc

SEQ ID NO: 387373 - DNA, 505 bp, Homo sapiens
ttcaacactaactcacaggcagggtttgatttttcaacttgaaggtttattttgaaaagtagaaaaaaaagtttattttcccatggaagttgtctgggtttgcattctttagtgwaacaataaacttgaacttttcaaaatttattttagggcataaagatgtctttgacacattcctgtcacccttggtgatggggacctggtattattagaaggggcctaggagaagctaagataaggtggcttgtttagatgacaggggagggaaggggagtgggaggttattagtctaaatatagatacaaatgacatgtgtaacattgtaacaattggtaccattggcaccaaccactaagaatgaatgccagctgaaaacaagtcccacacccttacttgcacgtatctgttgctatcagctatgaacatgaagcaaaaatatcacaaggaaataaacatattcatagtgtcagttcagtagtcttacatttctggacttctttttggc

SEQ ID NO: 387374 - DNA, 505 bp, Homo sapiens
ttcaacactaactcacaggcagggtttgatttttcaacttgaaggtttattttgaaaagtagaaaaaaaagtttattttcccatggaagttgtctgggtttgcattctttagtgtaacaataaacttgaacttttmaaaatttattttagggcataaagatgtctttgacacattcctgtcacccttggtgatggggacctggtattattagaaggggcctaggagaagctaagataaggtggcttgtttagatgacaggggagggaaggggagtgggaggttattagtctaaatatagatacaaatgacatgtgtaacattgtaacaattggtaccattggcaccaaccactaagaatgaatgccagctgaaaacaagtcccacacccttacttgcacgtatctgttgctatcagctatgaacatgaagcaaaaatatcacaaggaaataaacatattcatagtgtcagttcagtagtcttacatttctggacttctttttggc

SEQ ID NO: 387375 - DNA, 505 bp, Homo sapiens
ttcaacactaactcacaggcagggtttgatttttcaacttgaaggtttattttgaaaagtagaaaaaaaagtttattttcccatggaagttgtctgggtttgcattctttagtgtaacaataaacttgaacttttcaaaatttattttagggcataaagatgtctttgacacattcctgtcacccttggtgatggggacctggtattattagaaggggcctrggagaagctaagataaggtggcttgtttagatgacaggggagggaaggggagtgggaggttattagtctaaatatagatacaaatgacatgtgtaacattgtaacaattggtaccattggcaccaaccactaagaatgaatgccagctgaaaacaagtcccacacccttacttgcacgtatctgttgctatcagctatgaacatgaagcaaaaatatcacaaggaaataaacatattcatagtgtcagttcagtagtcttacatttctggacttctttttggc

SEQ ID NO: 387376 - DNA, 599 bp, Homo sapiens
cttttttaacctggaatcccagttgtttatcgtttctagaaatcaatggcattgttttggaaatgggaatggaaaattctccagagtcctgataaggtcgggtcaggctctccctgaaggttgtttgagagcccaagtttgaatcagttgcatgaataacaatttttactgtgccagggtcaggatgatttttattcagcccaatgcctcgtcaatcggctagcctggctaaatataatgaatctttttaaaggggcttacctacttgtccttgaattcttgactgggctgataaatggccccagttgaggctcagttaccctgtttccaatatttatggagagagaaacgttacagtttagcaaggctgtctttagagattaacatgcctggccctttcttctttcatttgattgagttctgtagatttttcagtgctttctggagtgagcctctttccaggctgtactagctattctttgcctccttctccctttatccttcttgtacataaaaagaaatgaggttttatcctttgaatagartaatccacacagtctctgaaactctggtcccttaatttccactctgattctggt

SEQ ID NO: 387377 - DNA, 591 bp, Homo sapiens
agctggatagggccagatagccttgtatctacaaatggggtttttgtctattcaactggttattatcctcaactctaatcttaccaatttctccaagtctctcatacctggcctagctacaatcatgacttgatctctctttctctttcttcccatgactcctgataacctttcgtgccacaactcacccttccccccgccgctacttccaacatagccaagggatgcttctctcacttggccttgtgcaagctcacttggaaagccctctgctgcccccrtcagtcatcgtgaggcagcgcccacagactcaagcttctctcctgtccaataaacaatgaaaatttggtttctactgggttgtattaaaaggaaatttaatctgaactttacaacagcagagataaagaaaacatattgtgttatgttaatttttatgggttgcctgtgcaatatcatcctgaagtatgtttctaaggcattacagggagtgacagagaacctcctaattcatccaaactctttacaaagctggcaagcccgtttgatgaattccaacaacagattctaggatggtcttgtggctaagta

SEQ ID NO: 387378 - DNA, 574 bp, Homo sapiens
ttaattacagtttagtcttcccttggcattatgggttcttaraaactgcaacttaaggtaaaacaatacataacaaaaccaatttcttttattttaaaaaatattttcttttttttcccatttttttaatacttttaagttcaggggtacatgtgcaggtttgttacataggtaaacatgtgtcatgggggttggttgtacagattatttcatcacccaggtattaagcctagtagttgttatttgtcctgatcctccctctcctctcaccctccaacctctgataggtcccagtgtatgttgttctcctctgtgttcatgtgttctcaatcatttagctctcacttataagtgagaacatgtggtatttggctgtttctacattagtttgctaaggataatggccttcagctccatctatagccctacaaacaacatgatcttgttcttttttatagctgcataatattccatggtgtgtaagtactatattttctttatccagtctatcattgacaggcatttgggttgattctgtgtctttgctattgtgaatagtgttgcaatgaacata

SEQ ID NO: 387379 - DNA, 574 bp, Homo sapiens
ttaattacagtttagtcttcccttggcattatgggttcttagaaactgcaacttaaggtaaaacaatacataacaaaaccaatttcttttattttaaaaaatattttcttttttttcccatttttttaatacttttaagttcaggggtacatgtgcaggtttgttacayaggtaaacatgtgtcatgggggttggttgtacagattatttcatcacccaggtattaagcctagtagttgttatttgtcctgatcctccctctcctctcaccctccaacctctgataggtcccagtgtatgttgttctcctctgtgttcatgtgttctcaatcatttagctctcacttataagtgagaacatgtggtatttggctgtttctacattagtttgctaaggataatggccttcagctccatctatagccctacaaacaacatgatcttgttcttttttatagctgcataatattccatggtgtgtaagtactatattttctttatccagtctatcattgacaggcatttgggttgattctgtgtctttgctattgtgaatagtgttgcaatgaacata

SEQ ID NO: 387380 - DNA, 545 bp, Homo sapiens
aactgcaaatttgaaagaatctgaaatccgtgttaatccctttgttttcatctcactgagccccaaagatgaaaactggctgagaatgtgccgggatttgcttggccagctggcgaggcatccccgaataatgggagattattagaatcctgcccttttccagcaagcctttatccacattcatttttgtgttgtgccaattagggatggcacagtggtttgctttgtgtgcattctggcagccccacccacacatatttgggaggaaaatctcacagaacgtgtatgtcactttggctttctgtaacaaggcatgacagagggatctcgggtccctcatcctaagtgcataagtagctgtatgcctgaagagattatctgtgaaccttttagtgctctggcatctttaggcacgaaatgtctcttatagaggacyagtaatcacactgagtatggagtggaaatcactctctgaagtttatttttcagtgatgacattatatcaatccaaactggagccacagtgggacacagcaataaaatat

SEQ ID NO: 387381 - DNA, 603 bp, Homo sapiens
atgggcatttactttaacaaatttattttwaataaataactagcaacaacgtcaactgaaaagtgaaggcgaaaattatacataatctcgccagcatcaaaaaatctatttctccatattctcatctaatctttattcatatcatacatacttttaagtagctagtttttaaaataaggatgaatgtatctttggtttcaggagccatacaaccttctgaggcaggtttaaatttttaattccttaattttccacctattgtgactttttccaagtcttgcttaccatgctagaattacggagggaaaggtgaagtcctaactgaaatgcttcctgaaacccataaagaaaatgcatttcatgattataaaaacactagatatttatttactttctaacttaacacagcatccccaaaacattgtagcatttaagatatttaattatcactcaatgaatgttctgttaggccttgcccaatctggtacagaatgcagttgatgctctaagcaaataatgactaaaacaaatctgtataatcctctcaacagaaatgttatcaccttgtttaccaacaattgcaatctcacagtgtgcagaatg

SEQ ID NO: 387382 - DNA, 550 bp, Homo sapiens
ggccaagaaataccagctcttaccaagcactttaattcatttagtttttcactctggctacagtgagaaaagacaatgtttttacacttgatatactttttataagaaaaaatcaatgcaggatgaaaatatcctgttgctctagtaattcccacagaaggtcagcctcaataatagaagatgaaaaaagttttgtggtgtttgctgttttataaactcatatttggagaaggaacacaatatatatatgatttcctcataactgctgttggtgccccagatttgatattgttgcatgataacctgacattgcttcctgcttctgaaggaatgattggatttgaagccaacatgcttgctaaaccgggaagctgctattacagaaggcacaggaagtcaagctgcctatgcagttgtgctgagacatgagactcatacgttgtgacccgtgcctattgtatgtctccccatcwttataactgcttttgaaaactggcttcaaataagcaaaaggcctagtgttatttccatagcagcactaaaattaatg

SEQ ID NO: 387383 - DNA, 581 bp, Homo sapiens
ttttttggtaactagcagagtacaatgctagtcaagtgcagaataaacatacactgagtaactattctggtcttcacctcgcttccaaggttaaatttttaaaggtgttgttaacataactagataatgacatcatattatgttaattcatataatacttccatttggcttacatagacacrtaagatatggaagttatagtattccatattacacatatttcaaatggatatctgtgccataattacaaaaattaaacagacattgctatggtttgactgtgtccccctccaaatctcccatgttgtaatttaatccccaacgcaacagtgttgggaggtagggcctaataagaggtgattaggaaaagattactgtcagtatctcaggaggaggttatcaccagtgagcttgttataaaagaaagttcagtcctgtcttgctctcttctcttggccttcctccatataatgacactgcaagaaggccctcaacaaatgctggccttgaccttggacttgccagcctccagaactctaagaaataaatttcgtttctttataaattacccagtctgtggt

SEQ ID NO: 387384 - DNA, 543 bp, Homo sapiens
cccaaacccataagtctcggcagcgagtggtactaatttttttttttcttaaggccagaggccaaaaagagaaaagtgccggactgagagccaaccaactgcgcctggttctctaattcattcctacacttatycatcccccctaaattagacgggggatccgagacagctgctgctgccttggttgcttcccttccagtggaatagtgcctgggaggggccttctctcccttcacagaagcagctgcgccccgcttatccccactgcgcactcggccatccagctctcgccattgtttctgcccacaacagataccgcccctgcaaggaccgggaagaagaaaaggaggcccaagtcctcggacgcgctgcttttaaatgcctccttcaccccgcccgtgcatcccgctcctaaggggtcatctcctcgcccttccccgaagtttggtggaaactaaaaaccacattcagaggtaggagagggaattatgggagtctagtgggaaaaaaacgatgggtcccccgggccacggtaaccaagaa

SEQ ID NO: 387385 - DNA, 627 bp, Homo sapiens
aaatacacatcttacatggcagccagcaagaggacatgggcaggagaactgctctttacaaaaccatcagaccttgtgagacttatttaccatcacaagagcagcatgagaaaaacctgcccccatgattcaatcacctcccaccaagtcccttcgaggacacgtggggattatgggagctataattcaaaataaattttgggtggagacatagccaaaccatatcattccacccctggctctcccaaatctcctgtcttcacatttcaaaacctaccatgcctttctgacagccccacaaagtcttaactcagttcagcattaactcaaaagtccacagttcaaagtctcatctgagacaaggcaagtcccttctgcctatgagcctgtaaaatccaaagcaagttatttacttcctagaaaccatgggagtactggcactggataaataaamccattccaaaggggtgaaattggccaaaatgaaggggccataggccccatgcaagtccaaaatccaataaggcagtgattaaaacttaaagttcaaaattatctcctttgactccatgtctcacatctaggtcacactgatgcaagaggtgggctctcacagtcttgggcagc

SEQ ID NO: 387386 - DNA, 556 bp, Homo sapiens
actttataaggcaaaggggatttttcagatgtgattaagttaagggttttaagatgaagaaagtagcctggattactcaggtgtgctctaattgcaatgattagcgtgctttttcaaggaaggcagagggagatatgctgtagaggaaggtgatgtgactactgaagcaccgtgccacattgctggccctggagatggaggagtgtcctgagccaaggagcgcagctctagaaactggaaaaggtaagaaaatggattctcccccagggcctccagaaccaagtacagtcctgccyacaccttgattttctcctagggaaactggtttcagacttctgatatccagaactagaagagaataattttgtgtggcttgaagtcactaagtgtgtgagaatttgttaaaacagcaatagtaaaccaatacaccaatatttgctcacatatcaacttgtcagtgagcccttctctcacaactttactcaaaattgcaacccactctatttctctgtgttttaaattttctccgtagcttttttcatcatattatataatt

SEQ ID NO: 387387 - DNA, 519 bp, Homo sapiens
agtcactaagtgtgtgagaatttgttaaaacagcaatagtaaaccaatacaccaatatttgctcacatatcaacttgtcagtgagcccttctctcacaactttactcaaaattgcaacccactctrtttctctgtgttttaaattttctccgtagcttttttcatcatattatataatttatctgttttttcttgtttctctttttcccccagtgaagtacgttgcatgggagttgactttttgtttgtttggtaactgtgggaaataattcactcagcaaacgaggtggaacaaatgggtatctcttagcagagggggtgtgaaaaaggaaaggaatataggacaagaagtcatggaggatataatggacgctgaactcaagaatgtgtatgttttgaatatcctggaataagagagagagcttgcttagaggaggttataaaaaatcttttggaagtagtgtaccgagatggaactggtgagaggtgagcaagtgctccaactaagggttcctactt

SEQ ID NO: 387388 - DNA, 494 bp, Homo sapiens
caaataaacatgtatcatttaaaaatgtgaaaacgtggccrggtgcggtggctcatgcctgtaatcccagcactttgggaggcccaggtgggcagatcacctgagggcgggagttccagaccagcctgaccaacgtggagcaaccctgtctctactaaaaatacaaaattagccaggtgtggtggcacatgcctgtaatcccagctactaaggaggctgaggcaggagaatcgcttgaacctgggaggtggaggttgtggtgagcccagatcgcgtcattgcactctggcctgggcaacatgagtgaaactctgtctcaaaaaaaaagtgaaaacatatgaaataaaagagcaggcacaatagaatggtgtttcccaaacttaaacgtgcatacataacctgaagattttgttaaaaggctgtacatgattaagtaggtctaggtgacgcctttcattctgcatttctctcaggcttccaggtgatgctgacat

SEQ ID NO: 387389 - DNA, 494 bp, Homo sapiens
caaataaacatgtatcatttaaaaatgtgaaaacgtggccgggtgcggtggctcatgcctgtaatcccagcactttgggaggcccaggtgggcagatcacctgagggcgggagttccagaccagcctgaccaacgtggagcaaccctgtctctactaaaaatacaaaattagccaggtgtggtggcacatgcctgtaatcccagctactaaggaggctgaggcaggagaatcgcttgaacctgggaggtggaggttgtggtgagccsagatcgcgtcattgcactctggcctgggcaacatgagtgaaactctgtctcaaaaaaaaagtgaaaacatatgaaataaaagagcaggcacaatagaatggtgtttcccaaacttaaacgtgcatacataacctgaagattttgttaaaaggctgtacatgattaagtaggtctaggtgacgcctttcattctgcatttctctcaggcttccaggtgatgctgacat

SEQ ID NO: 387390 - DNA, 435 bp, Homo sapiens
tgcacatccagtaactatatctttgcaggagtgcagatctgtacttctacagtgcactgtggacttcaatggcttgcctaccaatggggtctcttttggctttagcagcagaagtgggtaaccagagatgaaaaggctcatttcctaagtttttactactggtgtgrcagtaagaatggaaatcacatttctgtgatgagccgacatggtttttaacagctagcattctttctccactcccacagcacattctctggcagatttctgttaaacagaagaggcaatgtaaaggtctgattattatagatttcttaaagtttagcccacataacaattgcacccaacctttctagaatagttgagagaagagagaggaaaagaaaagtctgatgtattgaaacaacaaaatctcattgtgagagacacatctgttct

SEQ ID NO: 387391 - DNA, 578 bp, Homo sapiens
aatgaataaatgaaacttatttgcctattatgcatgccaataggatgaatatcatttagaattcttatctctggcatcagtcatctgaagaatgaggtttttattgaattgaaactaattctagctgctatgtactcttacaaattttgcagggactggaatatctagtaattggccctgaggtttttttttttctttttaagtatttttctttaaaataaatacagatttttctatctgcattcctataaatcatctttcaaatttattgacattttggttgcatttgaataacaaaaaaattttccttgaattgtgaatggrtaagtttgcatccaggcctcagagcatagaagtaattattctattacatgttttcccaatgatcgatgacattgtgaagttagattttcactttccagtgcaaaatcaatttttcaactagggtaacctgcaactataatgagtttggaaaaatcttttctggtttcatgctgagattccattagctgcatttagagattgctatatacacagatgcacagtaccaatggaatgctgctttttgtagttgcccc

SEQ ID NO: 387392 - DNA, 536 bp, Homo sapiens
atattacccattacctgtttcagatatataaacaggatactcaattttagactcaccaagtaatatagcaatctcttaaatgagccaaagaatatgatcaaaagaaagggtaaaattgttccaaatatttccttaagataataaaamtcgcacgcataaatttcttgcatagatccataaagggtaaatggcaaaacgcttgggaaacctatctgttttcaaaaagcttatataaaaaatgataaaaacatcagattgagaactgaaaccaaagccacatttgcacaaatgtctcttagagttgtgataaatccatccagagccacatagaaatcagcaggtgtcataagaatcacttccatttcagtgtggtcacggagaatatctcactcttactaatactttgcaataacaaaaattagtattttagagcataacttgcattccattaataggttctttacaatttaaaatttttaattttagttatgaaacttctttgtgataggtaaatagatattgtttccactatttaa

SEQ ID NO: 387393 - DNA, 620 bp, Homo sapiens
ttatagaaatcttttcaggctaataagagttgtgtataatgcattccaaaacattaaacctgtctttaattgttaatctcatttatttgtagacaatattattgtgtacaaagtgcttttacctcccattatattgtttaaatctcagaataaccccgacaggcaaagtgggtttttactatattcatcctacagatggaaaatgggagactcaaaaataatcaattagcctaaggtcatgcagagtggtggcagagcactatggggtgcataattcatgtagagtgtgaggagagagaatccaatccgtctgtatttcctagtcaaaagcttctcaatggttatattaaagggaaggctctaaaaaaggttgcrctcagtttcaaataaagaactaattagatgcaaattaaactctttaaatctaatttactcaatattaatttattcaactaatatttattgtgtgtctactgtatgctagtcatgcttctgacactgtgaataaaatccaagagagtagcaatccctgagtttgggaaatttgtagtctatggttaagaatttttcctgaatatttatatccaggcttccgattgagtggtttggcattatgcgtt

SEQ ID NO: 387394 - DNA, 613 bp, Homo sapiens
ttgactttaactcattctctaattttatttattagtatttaaattaggcatgactccatgaaaaaaaaatcctattttcctttgtgtctcaatcaattccttttccagtgtgtgtggcttttctcgattgttgacaagaccttgcgagcagggcaggttatgcttaactgataccaatttacatgttccatttwatcttctcttgtcttgtgctaaaaagtatagttcaggatttctagggctttgatgtagagaaatagcaataaaacacatttattgagcactgttaagacaatgatactctgctatgcatcacctccttcggtttttcacaactgtttgaggtaggtatatattaccattctagtgatgatgtagaaagtgaggcacaaataaataagtcagatgacacacaggcatatattctagagccagaatttttaatcctgtctgatcccaaacatcatgagcttagttattacaaagattgctctttaaacttagaaaagcttgagactattaatacaatttccaactattatgtaagagagcagttccagaagaattgcatcgtagataagtgggatttttaccaagtgcttcaaaaaatagt

SEQ ID NO: 387395 - DNA, 613 bp, Homo sapiens
ttgactttaactcattctctaattttatttattagtatttaaattaggcatgactccatgaaaaaaaaatcctattttcctttgtgtctcaatcaattccttttccagtgtgtgtggcttttctcgattgttgacaagaccttgcgagcagggcaggttatgcttaactgataccaatttacatgttccatttaatcttctcttgtcttgtgctaaaaagtatagttcaggatttctagggctttgatgtagagaaatagcaataaaacacatttattgagcactgttaagacaatgatactctgctatgcatcacctccttcggtttttcacaactgtttgaggtaggtatatattaccattctagtgatgatgtagaaagtgaggcacaaataaataagtcagatgacacacaggcatatattctagagccagaatttttaatcctgtctgatcccaaacatcatgagcttagttattacaaagattgctstttaaacttagaaaagcttgagactattaatacaatttccaactattatgtaagagagcagttccagaagaattgcatcgtagataagtgggatttttaccaagtgcttcaaaaaatagt

SEQ ID NO: 387396 - DNA, 549 bp, Homo sapiens
ggcagaatattgtaattgatgaggctaagttatctgtaaactattgctttcaattttgtgtataattgaaattttacataatataaagtttaacagaataaggcaatcatgtaaacagaaataagagactatttctagtcctcacaatatcttagcttatcaacatagcccagctactatcctgcccttaggttacgtgaggtatcctcaaactgctctttctttaaattaaacttgcaccaagattgtctttgcaaccaaaatctctaattaatacatatagccaaycaaacagaatgccaatgagcttttttagaagaaatattaaagaactgaaaatgttttaatctacttaaaaaatatcttgtaaaagacatgctttatttaggcatcactgcttccattcaagtgtccatgatagtcttagactaagttttctgtgctatatgctggacatatgtataatctaaaataaataaaacagactattggagaagtgtcactaagaaaagaaaattagcaagaaacactaaaattatgtcagtgatt

SEQ ID NO: 387397 - DNA, 416 bp, Homo sapiens
ctaccagtaccaatttattgtattagtccattttcatgctgctgatagagacatacctgaggctgggtaatttataaagaaaaagaggtttaatggaytcacagttccacgtggcttgggggggcctcacagtcatggcagaaggcaaaaggcacatcttacatggcggcatggaagagagaatgagagccaagtgaaaggggtttcttcttataaaaccatcagatttcatgagacttattcactaccacaagaaccatatcagggaaaccatccccttgattcaattatctcccactggattcctcccacagtatggggggagttatgaaagctataattcaagatgagatttgggtggggacacagccaaaccttcctccttccccaaacacaacctagaattatgtggttta

SEQ ID NO: 387398 - DNA, 529 bp, Homo sapiens
taaaattcaagctttaaaaccctgtgtgaggacacagaactcttccaggattgaaagacaggtctgtttgacctcagagtccatgtgctctggaaccacactttatattatctttgcaagaattatcttgttaaactggaacatcacatgggaaattaattctgttttattcagtttgaatttgctggtcaaatcttaccaatatgtaaaaatatacacaaattaatcaaggatgcagcactgcaaaattcatagatgttattaggagcctattgtctttaaacaaaagattcgtctaaaagataaatgtaaaatggggatcctttatgttttgacatttccaggaatagagatgcagagagattgtttcagttatttgggatccatcttaaagagttatgggaaagtaaaacaaatcggaagcwgttccaactgccacataatcaaatcttacggagaactgagacgctatgccatgtgtaacagcagctccaaagcccagttatcctgttacccttctcagcagcac

SEQ ID NO: 387399 - DNA, 624 bp, Homo sapiens
tatggaaattttattatattccttcagtgagaaacaaaataatttgaatagttcaagtggttttgctcatcattctattcaatgaggatgtgcccagagacagtctcaaacgagagatatgaatctgtggaaccctcagtagctctcagttctggcatgcctctcatagtgaaagcaactaagtatgattcatcatcaaaagatggtattgcaaatttatattttgtacatatattctgttgtatttatactttactactactacagtagtgtttatatataaacatattcaaaatccttgtactctgagctcatttacaaatttagggggtaattttgactaataataatttgactaataattttcaagtcaggtactcaggtgcaataggaagatggtctgaattgcagctctaaaatgggtgtccagagagacagatgttgagagttggacttcaactgtatccagggaagaggacatcctggcccatgartacgagcatctagttaattttgcagtattagaggtagataaatctgcttataccatagtttgacatcacaaatcactgaaatcatccaagaaatgctccccttactctggtctctttttttttttttttt

SEQ ID NO: 387400 - DNA, 624 bp, Homo sapiens
tatggaaattttattatattccttcagtgagaaacaaaataatttgaatagttcaagtggttttgctcatcattctattcaatgaggatgtgcccagagacagtctcaaacgagagatatgaatctgtggaaccctcagtagctctcagttctggcatgcctctcatagtgaaagcaactaagtatgattcatcatcaaaagatggtattgcaaatttatattttgtacatatattctgttgtatttatactttactactactacagtagtgtttatatataaacatattcaaaatccttgtactctgagctcatttacaaatttagggggtaattttgactaataataatttgactaataattttcaagtcaggtactcaggtgcaataggaagatggtctgaattgcagctctaaaatgggtgtccagagagacagatgttgagagttggacttcaactgtatccagggaagaggacatcctggcccatgagtacragcatctagttaattttgcagtattagaggtagataaatctgcttataccatagtttgacatcacaaatcactgaaatcatccaagaaatgctccccttactctggtctctttttttttttttttt

SEQ ID NO: 387401 - DNA, 474 bp, Homo sapiens
actgggttgtagaacatttacatttcgaagcaatagggcaaaaattagcaattgcaagtttcctaaagtaaataagaaaagggaggacaagggcctatagtcagggattaacctgtctaaagctgagagaaacattacattcttcttggtctgayctcagttggttggttccagttttgcacccagaagactcagatatagataaaaacattaatctgaggaatcagaactgagctactctgaacccaagagagaaaaaatgaggaaaaggcagtcattctctcctctaggctaatatttggggttgtctaagagctatttgtgtaatagatcaggcttaaatctattctaatcttttctttaatgtgcttaaaggtataatttcatccttctgcttcttcctcccatctctcaaatgctacctcttttaggaggtacttaaagaacacaataagcacaaaaatgtgtattgat

SEQ ID NO: 387402 - DNA, 578 bp, Homo sapiens
atttaaataatgttcaatctcacatccttttttgatctgaaaaaatattatgctttaccccatattttcagttgtatatttgactacttttcaaactaatgctttctttcaaatagcctctttaaagtttatctgtgagttcaaggcccagcctsttttgtgagtcataaagcaatcctgggcgcatttgtgtgtgggaagtagctaggtagtgagagaccttgtgcatcaaagagagcataaaatttttgtgtgagatagataccagcttctatataacacaacatttaagatttagatcaaaatgtgggagttttcacagggtagatggtgtgtgaagccatgccactggatgagctcatagagagaatgagtgagatagaaaagagatggagtccaaggacaaagccctggggactccaagatttagagttcaaaataggcaaaatatatttagtaagagaatataaaaaggtataaagaataccaggtagatgccaaaagaagaaattattctaaggaaaatgtgatgaatagtattaaatgctattgacagtttctcgtccatatttcagtgg

SEQ ID NO: 387403 - DNA, 575 bp, Homo sapiens
ttatgtgcctgtcttttgctcaaagtatgagatcctactgaatgtattcacatttgcctgcccatgtttttacaattttattatttttaaatgaataagtaaatgattgtctgttggggaaaagaaaaccgaccaggagggtaagaaacctgtacraattttggtcttcacagtttttcctagttcctaatatagtcctaactatcaccaaacatatttgcattctaacattggcccgtatcgaatcaggtaatgtttgttggaggctcatttaaggtgaaggtagtttagctttttttttcttttctttttttttttttttaattaatactgttaaatccctggtgaagatagaaacgtgtgaggggccacaatagatgacaaaagctgcagagaaaggaatgaagagagaaatgaattagaaagttggtgttgaagatttaaaatgagaaaatagatacatgctggtgagtaaacacttcccactctgtttgatgtcattctgagatgcagatagagtggtgtaaaagggacttccaggcagagtgagacaagaagtggagtcatagcacatt

SEQ ID NO: 387404 - DNA, 565 bp, Homo sapiens
gacttccaggcagagtgagacaagaagtggagtcatagcacattaaaattgaaagcagtaacaattattaccaaataggaaagttttcttctattatcgcttcttctgtctacatccttgwattttaaattaaaaatttccctaaatttcaaagcatatttcaattcttaagacaataagatgtcagcattttgtattaaaagaaagaaaaaagatcacattggacccattttaaattttttcttacaacaaattttccacttgaacacggaaacattaaaccttgaaatagaattgaaaagtctatcctttaagctagccagtgtcaattatgtttctttgattacattcaaataaaaattaacttcatttgtcttgaaaaaaaagatatattgaataactgtgggatggctgtacacacactcaaagaaaaagctgaataactgggccttctaaagggtaggtcatagtgtagttccaaaagtagatcatagtgtagttttgaaattttgggtggcaagaagaaacaattagattctttagggcattactgatgagataaatc

SEQ ID NO: 387405 - DNA, 599 bp, Homo sapiens
gaattgaaaagtctatcctttaagctagccagtgtcaattatgtttctttgattacattcaaataaaaattaacttcatttgtcttgaaaaaaaagatatattgaataactgtgggatggctgtacacacactcaaagaaaaagctgaataactgggccttctaaagggtaggtcatagtgtagttccaaaagtagawcatagtgtagttttgaaattttgggtggcaagaagaaacaattagattctttagggcattactgatgagataaatcagacttcacccttttttaaaaaggtttttaaagttgaaataattttagacctactgaaaatttacaaaaatagcacagataattttcgtacagcccttatttataatccttaactgtgttgcaactatcaaaatctggaaattaacattggtgaaatactattaatagatgcatgtgaattgtcttttatccctttcttgcatgaaggtagcatactgtagatacttgtttttttaatttagtagtatatcctaaaaatccttatcagtttatagagatcatcttcattcttttgttatagctgcacagtacaccattgagtgga

SEQ ID NO: 387406 - DNA, 607 bp, Homo sapiens
ttttcgtacagcccttatttataatccttaactgtgttgcaactatcaaaatctggaaattaacattggtgaaatactattaatagatgcatgtgaattgtcttttatccctttcttgcatgaaggtagcatactgtagatacttgtttttttaatttagtagtatatcctaaaaatccttatcagtttatagagatcatcttcattcttttgttatagctgcacagtacaccattgagtggaaatgctagtttattcaaccattttcatatgtgtaaatatttagcttgtttcaatactttgaaattttgcaagtaatgtatcaatgaatgatgcatatttgcatatgtatttctgcatcattggacgtgtcttcagggtgaattccaaaaactgtgattgttgggttgaaaggtaattacatatgtagtttgttaggtgttgctaaatatccctctagaagggttgtaccactttgcattcctaccagtaatgcrtgagagtaattttttcccccagggccccaatgacagaatgttctgttgtgtttctaattttttttccagtctgatcggtgaaaaatggtaccttagtattgtcttatttg

SEQ ID NO: 387407 - DNA, 561 bp, Homo sapiens
attgttctaatctctgaatagtaataaatattttattattgtggcttctagaatttggctttattcaaactactgttggagagctagagctatagaaatgtaagtggtattaatgaagtaaatatacattcacaagtacaaaaataagtaacacctgttcagacagtggccaattgttttctgttgatagagcatttattttagcagtggtatcgaaatgtcggctagcaataaaaataacactactaactattcctacatagttataaggaygtgtgccaattattactactaataaaggtagaatgcagcattcagctttaacattcataagatgggtgaatttgaagaaattaactgctgtgtgcttcagtttctgcatgtttaatgtgcgtaacagtacctacctcaaaagatggctgtgaagataaaataagaatgtgcataaaaagctgttaacccattgcctagtatgtaagcacacaagtccaatttattagtataaagatagaaaaagaagcacatgcttattttattggcacagagtcctaatttatacct

SEQ ID NO: 387408 - DNA, 531 bp, Homo sapiens
ggtctggaggatggtggccctcttatcacagctccactaggtggtatcccagtagggactctgtgtgggggctccacacccacatttcccttccctactgcagtagcagaggttctccatgagagccctgcctctgcagcaaacttctgcctggccatccagacattttcatacatcctctgaaatctaggtggaggttcccaaaatccagtccttgacttctctacattcacaggctcaacaccatgtggaagctgccagggcttctgggttgcaccctctgaagccatggcccaagctccatgttggctcctttcagtcccagctagagcagctgggatgcaggacatcaggtccctaggctgcatacagtacgggaccctgggcccagcccatggtaccatttttcactcctaaacctccaggcctgtgatgggtggggctgtcacaaaggtctatgrcataccctggagatattttcctcattgtcttgataattaacattaggctcctggttaattatgcaaattt

SEQ ID NO: 387409 - DNA, 595 bp, Homo sapiens
atcagtattttggtcaaagccattcaacaagtttctaggaagttccaaactttcacacattttccttctgtcttcttctgagtcctccaaactattccaacctctgcctgtgacacaattctaaagttgcttccacatttccaagtatcttttcagcaaatttccactctactggtactaatttagkgtattagtccattttcatgctgctgataaagacataccctagatcgggcaatttacaaaagaaaggtttaatggacttaacagttccacatggctgcagatgcctcataatcatggtggaaggcaaagagaagcaagtcacgtcttaaatggatggcagtaggtaaaaaagaaaacttgtgcagtgagactcccatttttaaccgtcagatttgtgagacttattcactatcatgagaacagcatgggaaagacctgcccccataattcaattacctccttctgggtttctcccacaacatgtgagaattcaagatgagatttgggtggggacacagccaaactatatcaaaaatctacatgtcctgtaagaaaactatttgtttggggactttgtgattgacaggca

SEQ ID NO: 387410 - DNA, 595 bp, Homo sapiens
atcagtattttggtcaaagccattcaacaagtttctaggaagttccaaactttcacacattttccttctgtcttcttctgagtcctccaaactattccaacctctgcctgtgacacaattctaaagttgcttccacatttccaagtatcttttcagcaaatttccactctactggtactaatttagggtattagtccattttcatgctgctgataaagacataccctagatcgggcaatttacaaaagaaaggtttaatggacttaacagttccacatggctgcagatgcctcataatcatggtggaaggcaaagagaagcaagtcacgtcttaaatggatggcagtaggwaaaaaagaaaacttgtgcagtgagactcccatttttaaccgtcagatttgtgagacttattcactatcatgagaacagcatgggaaagacctgcccccataattcaattacctccttctgggtttctcccacaacatgtgagaattcaagatgagatttgggtggggacacagccaaactatatcaaaaatctacatgtcctgtaagaaaactatttgtttggggactttgtgattgacaggca

SEQ ID NO: 387411 - DNA, 607 bp, Homo sapiens
aactacatttatcttattaaagatttttctgatcatgttgcctgtgatagtaaattttgtttcaacttggttgggccatgggggcaaaatatttgattaatattattctgaatgtctctgtagtgatgtttggattagattaacatttaaatcagcaaacactgagtagagcagattaccctccatcatttgggtggggttcrtccaaacagttgaaggccttcatagtacaaagagtggcctctgctgagtgagagaaaatccttccaggtgactgcctttaacttaaactttaactcttccctcagtcacttagcttttgtgtcagtggaagacagggatgttgttcagagcttgtgtcaggcccttatacctgaatcaaagtgcaggcccttaggattttataacaaagccccaccatcctcagcagattactattctccttttgaaaaacagtttttggcctgctactgggcctcagtagaaactaagttcttagacatgggccaccaagattccatgtgacatgagcagcccatcatgaactgctattatctgactccaataagtcataatattgggcatgcatagaagtatgacatcatca

SEQ ID NO: 387412 - DNA, 522 bp, Homo sapiens
tgcccctgaatgatgggattataggtaatgtttctgttttgtttttgttattttctctactttcaaattctttaaataacagaaaaaaatttcacatgaaatatatttaaaatgaacaatgaagactaatgcaccagccccacagatcattaaaaataccccaaaatattaaaacaagagtccgtgtcaaacctggaaaagatccattatcatttcagttgagattatgagtgtcatcaaactataacacttaacatatgagaaaaatgttaagcaactatacacatggagaatatttcatagttcacaatgaggtagcttcaactcaaaatacccaaggattgaaagttatatttttcaaataacacttaatgattattttgtggactggagcatttctgtaaagcatttgttttcaccatctaatatctttagaacacaactcacattcatttattttaccctcttttttacctccctgttttaygttctctttgaacttaaagggactagttcatattc

SEQ ID NO: 387413 - DNA, 568 bp, Homo sapiens
gcaacgaggcgagattgtgccactgcactccagcctgacgasagagcaagactccatgtcaaaaataaataaataaataaaagttttcttttatatcaaacaagccctaaatctctgtagcttaatcactctcagtactttgcatccaatacatctcatatgacatctcatcattatatcaaaataaaatatccattcatcacactggtttgaacatgtaaaagtcagtgaaagattggagagatgagggaagagcaaacatagaaaaatgaacaaagaacaaatctaaatgtcattaggctagttgaggtttttaatttagccaaggcgttatctcattagcaaggtgtctttataccctgaaaatgtcttcatttcctctttctttattttcttcattagaaacaaattactcagttggttctttacataaacagctaagacctgcagtaatcaagtcatagatttctcgtggtttgtaacatgaggacaggaagactaaaggactgctcaatttcatcatgaatagggtcccatagaaattatatggttttatttctaggaattt

SEQ ID NO: 387414 - DNA, 569 bp, Homo sapiens
tgcaacgaggcgagattgtgccactgcactccagcctgacgacagagcaagactccatgtcaaaaataaataaataaataaaagttttcttttatatcaaacaagccctaaatctctgtagcttaatcactctcagtactttgcatccaatacatctcatatgacatctcatcattatatcaaaataaaatatccattcatcacactggtttgaacatgtaaaagtcagtgaaagattggagagaygagggaagagcaaacatagaaaaatgaacaaagaacaaatctaaatgtcattaggctagttgaggtttttaatttagccaaggcgttatctcattagcaaggtgtctttataccctgaaaatgtcttcatttcctctttctttattttcttcattagaaacaaattactcagttggttctttacataaacagctaagacctgcagtaatcaagtcatagatttctcgtggtttgtaacatgaggacaggaagactaaaggactgctcaatttcatcatgaatagggtcccatagaaattatatggttttatttctaggaattt

SEQ ID NO: 387415 - DNA, 573 bp, Homo sapiens
aaatccatgggagcctacttcttgcatcagcaagaatggatgtgagatatggagacaaaagagatcactttgaaacttcaagatttaatgactgctctactagatttttggactttcatggggctgtagcccctttgttttggccaatttctcccatttggaaaaggtgtatttatccattgcctataccccccattgtatgtaggacataactaacttgcttatggttttacaggctcataggctgaagggacttgcactgtctcagatgagactttggacttggacttttgggttaatgctggaataagttaagactttggggggacttttggaaaggtatgaytgtgttttgaaatgtgaggacatgggatttgggaggagacagtggcagaatgatatggtttggctctatgtccccacccaaatcttaccttgaattttaataatccccttgtgtcaaggacaggaccaggtggagataattgaataatgggagtagtttaccctatgttgttcttatgacagtgagtgagttctcacgagatctgatggtttaataaggggcttccc

SEQ ID NO: 387416 - DNA, 573 bp, Homo sapiens
aaatccatgggagcctacttcttgcatcagcaagaatggatgtgagatatggagacaaaagagatcactttgaaacttcaagatttaatgactgctctactagatttttggactttcatggggctgtagcccctttgttttggccaatttctcccatttggaaaaggtgtatttatccattgcctataccccccattgtatgtaggacataactaacttgcttatggttttacaggctcataggctgaagggacttgcactgtctcagatgagactttggacttggacttttgggttaatgctggaataagttaagactttggggggacttttggaaaggtatgactgtgttttgaaatgtgaggacatgggatttgggaggagacagtggcagaatgatatggtttggctctatgtccccacccaaatcttaccttgaattttaataatccccttgtgtcaaggacaggaccaggtggagataattgaataatgggagtagtttmccctatgttgttcttatgacagtgagtgagttctcacgagatctgatggtttaataaggggcttccc

SEQ ID NO: 387417 - DNA, 509 bp, Homo sapiens
tatttggtcaggttatatggtacattagcataaaatactaagcaaaatttctggcaagtaagtatgtgctaaatattagctaacggcagttaagcagtttgtcttctttgcttgatattgctaaaactactcagattgtttttccaaatttgatcattttgaagattcaattttatatttataactaactaagaggggatttttacaaaaatgaatgtaatatattcctgcaatgtagacaaagtagtttgactgagttgytgttaaagaaggcaaaatgtgaaagaaatcttcattatttacatgtatttatataccagttcttggattacttgatttttgaatgcttctagtaatatcattttaactggaagtatgtgatataaatgtaaaaatgttttaagatgaaatgtggaaaagcattataaatcctaagcatgacccttaaaaatgctaaccgaatgatctcccttatgattatttggttattctaactctggagtccaaca

SEQ ID NO: 387418 - DNA, 524 bp, Homo sapiens
agtaacaatctatgactgttacatgcattatgattagaacacttgatttgagagaatgttagtcataaagacatactaaacttaccatattttatggtaagtagaaataacaaatgctttataggtgaagcctaccttagatcacacacttaatcaaattcctgatatttactgcctaaggtgttcattgacagcttatgatagatggtttacaaataacaaagaaataaaacacaataaaacaaatacacatttcttttatcacaaaaggttgaattgccatatcagaattaggcaatttacatatatttatatatgattctatagatatatatgtgtataatcatatatgattatatataaaatyatagtaaaatataatttttatatatttattacatagatatataattttatatttatattattgacataaaaaacatataaacatacatatgcacacacaaacacacacacacacaccatatatcaacatataacatatctagtgattcaaaagagat

SEQ ID NO: 387419 - DNA, 587 bp, Homo sapiens
tttttctctgccatcattgattgaaagtcttagaaattggaaattctggaatgagaaaggtggccactacctctcctgctgcattagtcagagttttcagagagacagaaccaatggatatatagatagttatagatacacacatagatgatatagstatatcagagggtttttattaagcgaattggctcagatgatattggaggctaagaagtccctcaataggacatgtgcaagttagagaactagagaagcccatagtattgttcaatccagcttggaaagcctcagaaccaagaaagctggtgatctctcagtctgaaattgaaagcttgagagcccttagaggccactgatgcaaggtgcagaatccagactgaggaatctggagttctgatgtgcaagaacagcagaagaaggtatctagcactgtaagggagagagagaaatagagagagagaatttaccattcttccacctttttgttctgtctgggcctccagctgattgatgccctcccatattggggcagattttccccactcagtccatgaaattgcttgtcaatctcccaaaacactctcatg

SEQ ID NO: 387420 - DNA, 570 bp, Homo sapiens
taagatactgggttgtggagaccraagttcttgttatgcagaggtagcctccaggtagcaggcttcagagagaatagattgtaaatgtttcttacgggactttaaaaggtgccaaactcttagttagttctctcctggatcaggaaaaagacctaggagcaaaagaaattctctacagaatgtaaatttttccccacaaaagacagttttgcagggccatttcaaaatataaaaaagaatagattttgggacaaaatacttccatttctttcaggcttgctatctgtcatgttattgtcttattgctacagagagtcttggttttcatgttaactctagacagctatgcttgaatttcaaaaagaggagggtatgatgaggcatgtctggccatccatttccatcgtaacatgaattagtgtttcaggttgattttagaatgcccttgaccaagaggagaggtccgttcagttggtggggggtttaaaattttatttttggtttacagcttttattttgcaacctagcaaactctgagttaaaaatattttttctaagacttgaaatttg

SEQ ID NO: 387421 - DNA, 552 bp, Homo sapiens
tgattgttttctttgttatgcagaatatttttaacttgtcgtgatcccatttgtctatttttgctttggcgcctgtgctttagggatattactcaagaaatttttgcccagaccagtgtcctgaagggtttcccgaatgttttattttagtagtttcataggttgaggtcttagatttaagtcttaaatccatttagatttgatttttgtgtatggtgagaggcaggatctcatttcattcttctgcatatagctatccaattttcacagcatcatttgttgaagagactgtctttagcccaatgtgtgatcttgacatctttgtcaaaaatgagcttactgtagatgtatggatttatttrtgggttctctgttctgttccattggtcaatgtgtctgttttcatgccactaccattacatatgctatgccatttaatcctggtaatagccttgtgtgatacacatatttatttctattttacaaatagaaaagaatagaactcttgcaggttatttaatttgcccaaggtcaaatgacaaaggctgtttg

SEQ ID NO: 387422 - DNA, 384 bp, Homo sapiens
tatttactagtattttgttgaagatttttgcatgaatgttgatcgggaacactggcttatagtggggkgtgtgtgtgtgtgtgtgtgtgtgtatctgcttttggtgtcagggtaatactggcattgtagagtaagtttagaagaatcttcccttcttttattttctggtttagtttgagtaggactggtattagccctttcaaatgtttgacaaagatcagtagagaagccattgggtcctaggctgcttttttttttctgagagactttttactacagctttgatctcattacttattattggtctattcagttttaggtttactaatggttcaataatggtatgttgtatgtatctaggaatttatctacttcttttaagat

SEQ ID NO: 387423 - DNA, 555 bp, Homo sapiens
tagctcacatttttctcttcttttctatcttcttcctctggaactttcattacatatatgttataccttttggagttgttctatcattcctgaatattctgttatgtttcttcagtcttttttatctctgtttttaagttttggcagtttctattaagacatcctcaagctcaggaattctttcttcagctatgtccagcttaccatgaagtccatcaaaggcatttcttcatttctgttacagtattttttttatatatctagcatttctcttttgttctttgttctaatacatctctctgcttccatcagccatctgtttttacatgtgttttactttattcattagttcgtttagcattttactcatagttcttttaaattcccattctgaggattttaatattcttgaaatatctgagtctggttgatrtgcttgcttgacctgactcttcaaactgtgtttttgctttttagtgtggctagtatatttttcttcatagccaggcatgacacactgggtaaaattaactgttataaataatcctttactga

SEQ ID NO: 387424 - DNA, 546 bp, Homo sapiens
ccaaaactaatttacattttacagataacgtttctaaaattacatcatttattcatttattatcaggggataaaaaaattgccttatgttatctactcatcttttttaattgacttttttttttagctttttgttattcacaatgggtgatttttatcttgctatcttttaacgttaaagattccgaggtgatttaggaaacggtaaacccacagggtacagttaaagtgatcgtgaaaagaggcaaataatggaaatcttgaatttgaaagaatacattctgttcatatcacccttttccccacatctgtatattttaagaattgcttgaccaagtgctgtttcccttatccagactttaggacgttgagctttttattttgtgttcaattattccagaaattttggctttattattacttttgtccgtgtcgaattagtggttttgtgtgattctttatgtaagtatcaactgcataaattaaaacatgaatstaatacttaatattcttttaaagatttttattaaaatggtggccttagcat

SEQ ID NO: 387425 - DNA, 508 bp, Homo sapiens
tatgcaatttttcacatagcctaatttatacacatatattcacaattgttagaataatcttctttggctttcttttttctttctttttttttttttttggatggagtttcgctcttgttgcccaggctggagtgcaatggcgccatctcaggctcaccgcaacctctgcctcctgggttcaagcaattttcctgcctcarcctcctgtactttggctttctaactcctaaagctatagtaaaacataagtcctgattaaagttaaaaataaatgtaaccttattttataggatactatcaaatcctgcaatggcagtaattcctagttgcttattctactgttctttcaaagaagaatcttcccattttattcaaatagaggagatacggcaaatgtttattagaaaataagtattacagttctcagtgtctcttagaattatctgcaggcgagagacacaagaattcactaagtggggctaataagtaagttttcaaaagatacatt

SEQ ID NO: 387426 - DNA, 529 bp, Homo sapiens
tgaaaacatataaaagcaaactcttactaataaaaatgagtayacaaattcaaaataatctaactctcatggtggtgcataaaccatttctgtctgaagcatgaaggttaagagataaaacaattaaaaaatgactgcaatgatacattaagaaatgtaaaatttaaaatgtaatttgtgacataaatcataaaatgtggagtgatggagtaaaaatgtacagttttttaaatgtaatcaaagttagttaatttatcatcagcttaactaacctgttgcaactataagatattttatgtaattcttacagtaagaaaaggcaaaaacatatagtagatatataaaacacaacaagtaaggaatcaaagcataccactatagaaaatcacctaaatacaaaagaagataggatgataggacaagaggaagaaaggaataaagaatctacaaaacaactgaaaaagaatgaacaaaatgacagtagtaagtccttacctatcagtgattacctcgaatgtaaatgaattaa

SEQ ID NO: 387427 - DNA, 529 bp, Homo sapiens
tgaaaacatataaaagcaaactcttactaataaaaatgagtacacaaattcaaaataatctaactctcatggtggtgcataaaccatttctgtctgaagcatgaaggttaagagataaaacaattaaaaaatgactgcaatgatacattaagaaatgtaaaatttaaaatgtaatttgtgacataaatcatmaaatgtggagtgatggagtaaaaatgtacagttttttaaatgtaatcaaagttagttaatttatcatcagcttaactaacctgttgcaactataagatattttatgtaattcttacagtaagaaaaggcaaaaacatatagtagatatataaaacacaacaagtaaggaatcaaagcataccactatagaaaatcacctaaatacaaaagaagataggatgataggacaagaggaagaaaggaataaagaatctacaaaacaactgaaaaagaatgaacaaaatgacagtagtaagtccttacctatcagtgattacctcgaatgtaaatgaattaa

SEQ ID NO: 387428 - DNA, 604 bp, Homo sapiens
gtattacggcctattctaatgccctcgtcttaacttgatcatctgcaaagacaaaatttccaaataaagccgcattcacagacaatggatgttagcattttaacatctttttgagggacacaattcaacccagaacacactccaatcaatatattgcctccatatcgtcttcacattgaaactgctctggccggggtcactgttggccctacattgctaatgccaatgatcagttctgtttttttttattaagtagcatttgatgaagttgaccctaccttacttcctgaaaagcgttcctcacttggttttcatgttaacacaggctcctggtttttctagtacattgttgctcacgctgcaagactgtttttttctcttcttttttttttttgttttgttttgtttttttattatactttaagttttagggtacatgtgcacattgtacaggttagttacatatgtatacatgtgccatgctggtgcgctgcacccactaactcgtcatctagcattaggtatatctcccgatgctatccctcccccctcccgccaccccayaacagtccccagagtgtgatattccccttcctgtgtccat

SEQ ID NO: 387429 - DNA, 584 bp, Homo sapiens
gatatacttaacagaaagctcatcaaattgaaaaggaggggctgaggagggattacattccagctagaagaatgagcatataaagtgtgcagaggcaaggattatcataagagttacaaaaattacaaacgtttaakagctctagaaaacaaaatttgcatataactgtgacatgattgggttgtacccaggtcatcataggccttatatgccaggggtttggattttatgttagagagataatggaaactattacacatatttgaacagcaagatcatctagttgatcttttaataaaatcattatggtggtacaatagaggcacagttttcaactattttggatgagtatcttttttatgttaaaatatgttgtgataatgttgcagtgtttcagaattgggaaatgttgcagtattttagagttggttggaaggcctgaagccatttagagcagcttctcaaaatttaatgtgcatatggatgacctaagcatcttgttaaatggctttttgcacatttttcacaagctccagctgaacatattgagtattagtatattgctctttgtacagccaaattaa

SEQ ID NO: 387430 - DNA, 536 bp, Homo sapiens
aacgtttaagagctctagaaaacaaaatttgcatataactgtgacatgattgggttgtacccaggtcatcataggccttatatgccaggggtttggattttatgttagagagataatggaaactattacacrtatttgaacagcaagatcatctagttgatcttttaataaaatcattatggtggtacaatagaggcacagttttcaactattttggatgagtatcttttttatgttaaaatatgttgtgataatgttgcagtgtttcagaattgggaaatgttgcagtattttagagttggttggaaggcctgaagccatttagagcagcttctcaaaatttaatgtgcatatggatgacctaagcatcttgttaaatggctttttgcacatttttcacaagctccagctgaacatattgagtattagtatattgctctttgtacagccaaattaaaaagtccagttactagttataattactgttctccaattctggagagagattttagtaattctcaggctaaatcatcgta

SEQ ID NO: 387431 - DNA, 536 bp, Homo sapiens
aacgtttaagagctctagaaaacaaaatttgcatataactgtgacatgattgggttgtacccaggtcatcataggccttatatgccaggggtttggattttatgttagagagataatggaaactattacacatatttgaacagcaagatcatctagttgatcttttaataaaatcattatggtggtacaatagaggcacagttttcaactattttggatgagtatcttttttatgttaaaatatgttgtgataatgttgcagtgtttcagaattgggaaatgttgcagtattttagagttggttggaaggcctgaagccatttagagcagcttctcaaaatttaatgtgcatatggatgacctaagcatcttgttaaatggctttttgmacatttttcacaagctccagctgaacatattgagtattagtatattgctctttgtacagccaaattaaaaagtccagttactagttataattactgttctccaattctggagagagattttagtaattctcaggctaaatcatcgta

SEQ ID NO: 387432 - DNA, 536 bp, Homo sapiens
aacgtttaagagctctagaaaacaaaatttgcatataactgtgacatgattgggttgtacccaggtcatcataggccttatatgccaggggtttggattttatgttagagagataatggaaactattacacatatttgaacagcaagatcatctagttgatcttttaataaaatcattatggtggtacaatagaggcacagttttcaactattttggatgagtatcttttttatgttaaaatatgttgtgataatgttgcagtgtttcagaattgggaaatgttgcagtattttagagttggttggaaggcctgaagccatttagagcagcttctcaaaatttaatgtgcatatggatgacctaagcatcttgttaaatggctttttgcrcatttttcacaagctccagctgaacatattgagtattagtatattgctctttgtacagccaaattaaaaagtccagttactagttataattactgttctccaattctggagagagattttagtaattctcaggctaaatcatcgta

SEQ ID NO: 387433 - DNA, 644 bp, Homo sapiens
gctgcaattcttttgccgtaaagtgagttccatggacaaaaataataagaacaaaatgtctgggaataccttgacagcaaataaggtagtcggtgagtccaccaacattggtttgtcaaagcattgcatacaggggaggcaaatccataactggagtacgttttggttccaataaggagtccaaaggtcagaaatcctggagttctgatattcaagggcaggagaagaagggttccaggaaagagagggactcattggccttttcttctgtttttgttctatccgagagcccccagctaattggatggtgctcatccatattgagggtgcattttccccacttgatccattcagactcacatgccaatctcctctggaaataccctcacagactcactccaaaataattatctgtttagttttctaagtattccttaactcagtcaaactgacacctaaaattggccatcacattttgtcaagaggtcatatcattctgggtttttcaaatcaactgataacatgtctataataaaaytgtgatggtatgtattgcaaaaactcagcaggaatgtgcttggaatatacatatattccttgaagtataagatatatatatatatatatatgtattccttttcaag

SEQ ID NO: 387434 - DNA, 556 bp, Homo sapiens
tacggctacatgaacatcaataagttaatatttcacatataaccaattgtttttattttcaatatctaatacttcatatacttcataaaattatagtgatcatagaaagtattaatagtagtcatttgctttttttgtacaaaatattgcaccttgaaaccccaacatagtaagaaggaagatagcacaaatattgatggaatgaacagttgatgatagatggtaggactatggatgaaaattatggcaaatggtagaaatatgatccaaatatgagccaaacctcattggagtcaatcacaaggtggctggcctcttcagagtgatyggcctttaatcttttagaaacaagttaacagagaaggaccatattccttgggatttattaagataaaatatttaataattgttattgcctgtggcatttattgaatgcaaaccacggataaagcatttcacgtaaattctcatttatcttcatcaaacagtttcaacataagcattactatactcttgttacaagtgtataaacctatttccaaatgttaatttgttg

SEQ ID NO: 387435 - DNA, 556 bp, Homo sapiens
tacggctacatgaacatcaataagttaatatttcacatataaccaattgtttttattttcaatatctaatacttcatatacttcataaaattatagtgatcatagaaagtattaatagtagtcatttgctttttttgtacaaaatattgcaccttgaaaccccaacatagtaagaaggaagatagcacaaatattgatggaatgaacagttgatgatagatggtaggactatggatgaaaattatggcaaatggtagaaatatgatccaaatatgagccaaacctcattggagtcaatcacaaggtggctggcctcttcagagtgattggcctttaatcttttagaaacaagttaacagagaaggaccatattccttgggatttattaagataaaatatttaataattgttattgcctgyggcatttattgaatgcaaaccacggataaagcatttcacgtaaattctcatttatcttcatcaaacagtttcaacataagcattactatactcttgttacaagtgtataaacctatttccaaatgttaatttgttg

SEQ ID NO: 387436 - DNA, 495 bp, Homo sapiens
actcttcacaacatgtggagtgctattgttataactgctcctttacaaatgataaaacctaagcaaaaaaagtttagaaatgtttctaagagtctcgcagatagtaagtggcagagtctggatgcaaaccagctattttaactccatgttctgtgccttaactactatgctatataggaaataatgataataaacaacaagttttaaaaaacggatcatacctctaaagcctctgaactaaaccagttgataatgtatttttaatttgagcttctagcaaatcaatataataaatgtatgtgstaatcaccgtgtttcactctgtggaatcacaaaatgatttacaaagaacaatttctctgtcagaaaatttacagtgaaatttgaggcagatgtgtacaaccaatgataacgagtcaaatgaattaagtgccacaatagagagacactttgtgacgtgagaggtcactattagaaacaattggtaatggaatt

SEQ ID NO: 387437 - DNA, 556 bp, Homo sapiens
agagagggaatagtaggaaaacaagtagagagatctatagctagttgtccatgataaaagactgacatgtgtagtgtgcttattatatgccaaccactattctgtgctcatttagcaccttaactaatttactttttataataaaattgtaagataaataggtacttgtgcaggtttccacttcactctcaaaactgtcctggtttgcacaatacattttatgatcacccattcacgtggcacttttttcctgagtaarggtagcaggaagcagtaaggtgaaacggctatagtgcagcaactacagtactcagttgatgtgttgggaaggtttggaagacaggagccttgaatataagctctagttctcttctggaattgattcttttatcaattattcctgatcatgggaagcaaagattgttataggtagaagggatatagagagtatctattccaataggtatatataatatactttacctgtatgtgaacacatacagagcgtaagtaatatttcaggaggttataacacccccaccccaaccttgcagac

SEQ ID NO: 387438 - DNA, 556 bp, Homo sapiens
agagagggaatagtaggaaaacaagtagagagatctatagctagttgtccatgataaaagactgacatgtgtagtgtgcttattatatgccaaccactattctgtgctcatttagcaccttaactaatttactttttataataaaattgtaagataaataggtacttgtgcaggtttccacttcactctcaaaactgtcctggtttgcacaatacattttatgatcacccattcacgtggcacttttttcctgagtaaaggtagcaggaagcagtaaggtgaaacggctatagtgcagcaactacagtactcagttgatgtgttgggaaggtttggaagacargagccttgaatataagctctagttctcttctggaattgattcttttatcaattattcctgatcatgggaagcaaagattgttataggtagaagggatatagagagtatctattccaataggtatatataatatactttacctgtatgtgaacacatacagagcgtaagtaatatttcaggaggttataacacccccaccccaaccttgcagac

SEQ ID NO: 387439 - DNA, 599 bp, Homo sapiens
ttttacatatttcttgtactgggtaataaaacacacacacacaatatgaaaagtttttattaaattccaggatagtaattcttttaaaattattttgatatatttaaactagattaaatatccctgaatcctttttaatgaattgttagctttaaaaagttatataaaatggcttttgtaatgcagaataaaagcatgacatataacttttaataataagtaggtcaaaagtcttgaaaaggtgaataakgagcaaaatgcctcatttaattataaatgttataaaaggtattaatatttaaaaattgtcagatattggcctgagaatacaccatttttaactaaatagtatacaattcaaggaaacctctctctttttctctctctgtcctgctctaagaagatattcgtgtggctctatgtatcatttagggttatggtatgtcaaatatcctgagttttaggtatgattatcaagtcatacgcaaaattgtgggatggattgggaaagagggggcatcaacagatatttattgaacatgattgttaaaacacagagaaaattcaaaatggtataaaatttgacacatataaaataa

SEQ ID NO: 387440 - DNA, 533 bp, Homo sapiens
tttgtgcctgcaactcatacaaaacaggtttaatattggacaggtgtatgcaactagttaatccctgaagtttaacagtagtgggggtactcaacaacacctracaggggcccttccattttggttgtaattgatcttcagggtattcttctttccaacattttagcaagattaaatctcctggttgaatagagggttacttctttcccttgtgtgagggggcaatattttgtttccatatgcatggagggccttttgaacctggtctaagttgataatatgggtgagcattctctgtgtctcttcatcaagcaggaggtctgaagttaaatagggcctcccgtaaatcatctcaaatggactaagttttagagttacctttggggcaatccttatgcataaaaggggtatgagtaggagagaaacccaggctgctgaaatctcctgacagagttttcctaatgtccttttgaaaacatcattagctttttctaccttacctgaggattgaggtctccaggagaagtgaagct

SEQ ID NO: 387441 - DNA, 533 bp, Homo sapiens
tttgtgcctgcaactcatacaaaacaggtttaatattggacaggtgtatgcaactagttaatccctgaagtttaacagtagtgggggtactcaacaacacctgacaggggcccttccattttggttgtaattgatcttcagggtattcttctttccaacattttagcaagattaaatctcctggttgaatagagggttacttctttcccttgtgtgagggggcaatattttgtttccatatgcatggagggccttttgarcctggtctaagttgataatatgggtgagcattctctgtgtctcttcatcaagcaggaggtctgaagttaaatagggcctcccgtaaatcatctcaaatggactaagttttagagttacctttggggcaatccttatgcataaaaggggtatgagtaggagagaaacccaggctgctgaaatctcctgacagagttttcctaatgtccttttgaaaacatcattagctttttctaccttacctgaggattgaggtctccaggagaagtgaagct

SEQ ID NO: 387442 - DNA, 533 bp, Homo sapiens
tgtttcctattaagcctgcagaaccgtgagtcaattaaacctcttttatctacagattgcccagtctccaggtatgtctttatagcagtgtgagaatgtactaatatggcctatatccacaatgcattccttaggttttattctagggtttttgtagttttaggacttacatttaagtctttaatctatcctgagttaatttttgtatttgtcgttataaaggattccagtttccatcttctgcatatggctatctagttattgcagtaccatttattgaatgaggagtccattcctattgctcatgtttgccaactttgttgaagatattttagttgtaggtgtgcagatttttttcacaggtctctattctgtcccattggtctctgtgtctatttttgtaccagtaccatgcttttttgattactgtagccttctagtgtagtttgaagtcaggtattgtggtgcctccagttttgaactttttgctttgkattgttttggctatttagactcttttgtggggccacatg

SEQ ID NO: 387443 - DNA, 558 bp, Homo sapiens
gaggactctgagaaaggataaacatgccactgttgcccaagttgagagagcaagggggtaggatccaagataatgtctaaaggacaggcaggcagggactgattacataggccatgttaaaaatgttggcctgtatcctaccagctaattcctaggagcctctgggtattctgggtaaattgcaggactcaacgaatagttgttccattctatttgtatgtcatctaygcttttcaattccatttaaaactgataaaactcattcttctgaactggaattgatgcagcagagttggtcagacagcaaagacaatttctgaggacactgcttgataatgttttctgtgtctttaggaaaagcctctgtcttgtaaaggcatcttagttctgtccactcagaagactcagtagctattgtatacgtatgttcaaaaggaatcattttttctatccattcacattaatgaatttagaatagtaaatggacttaaaaactttagggagtctttggacaattttatcttttaccatcctactccaaattttatatttgggaaa

SEQ ID NO: 387444 - DNA, 558 bp, Homo sapiens
gaggactctgagaaaggataaacatgccactgttgcccaagttgagagagcaagggggtaggatccaagataatgtctaaaggacaggcaggcagggactgattacataggccatgttaaaaatgttggcctgtatcctaccagctaattcctaggagcctctgggtattctgggtaaattgcaggactcaacgaatagttgttccattctatttgtatgtcatctatgcttttcaattccatttaaaactgrtaaaactcattcttctgaactggaattgatgcagcagagttggtcagacagcaaagacaatttctgaggacactgcttgataatgttttctgtgtctttaggaaaagcctctgtcttgtaaaggcatcttagttctgtccactcagaagactcagtagctattgtatacgtatgttcaaaaggaatcattttttctatccattcacattaatgaatttagaatagtaaatggacttaaaaactttagggagtctttggacaattttatcttttaccatcctactccaaattttatatttgggaaa

SEQ ID NO: 387445 - DNA, 522 bp, Homo sapiens
taacctaaaaagaaaggcaaaattataattttcacaatttggggttataaagtactctgatctctcagtctagccactataaatctacctttgcttggatttaattgattacttcataatggttatcttaaccatactaaaacctgtgaaatcagacatcttaaaacgtgttccaagaaacatttcaattcagtctgaaaaccatctcaaatagtctcagagatgtgatttctactcagaaccttggcctaccactgcccatactcctcctctgacayacttacaatattgcattgctttggtagggtgctagtgtgcatgatttgtctttcttttacagagtcagttttttaaatgcttgcattgttccttttttgttttttgtttgatctctacattcaattaaattaaaccagaaaccaggttctcatctgagcatctgagttctgtgaataatttcctatgaggctctcagaaattaatactttagtcaaagcttttctttgcaagcaacaaaattat

SEQ ID NO: 387446 - DNA, 632 bp, Homo sapiens
ggttggaaattcttttctttaagaatgtggaatattsgtccccaatctcttctgtcttgtagggttgttgctgaaagtttggctgttagtctgatgggcttccctttgtaggcgaactggcctttctctctgactgcctctaacattttttttcccttcatttcaaccttggagaatctgataagtatgtgtcttggagttgatctcctcatagagtatcttattggggttctctggatttctcgaatttgaatgttggcctctcttgcttggttagggaaggtttcctggatgatatcttgaaatatgttttccaaattgattccattctcctcatcccttttgggtacctcaattagtcatatatttgagttttttacataactccatatttcttggatgttttgttcattcctttccattattttttctctattcttgtctgcctgtcttatttcagaaaaacagtcttcaagctctgagcttctttcctttgcttggtctattctgctattaatacttatgattgcattttgaagttgttgtagtgtgtttttcagctctattacattggttttgtttctctctataatggctattttggctgtaagttcctgcattgttttatcatg

SEQ ID NO: 387447 - DNA, 632 bp, Homo sapiens
ggttggaaattcttttctttaagaatgtggaatattcgtccccaatctcttctgtcttgtagggttgttgctgaaagtttggctgttagtctgatgggcttccctttgtaggcgaactggcctttctctctgactgcctctaacattttttttcccttcatttcaaccttggagaatctgataagtatgtgtcttggagttgatctcctcatagagwatcttattggggttctctggatttctcgaatttgaatgttggcctctcttgcttggttagggaaggtttcctggatgatatcttgaaatatgttttccaaattgattccattctcctcatcccttttgggtacctcaattagtcatatatttgagttttttacataactccatatttcttggatgttttgttcattcctttccattattttttctctattcttgtctgcctgtcttatttcagaaaaacagtcttcaagctctgagcttctttcctttgcttggtctattctgctattaatacttatgattgcattttgaagttgttgtagtgtgtttttcagctctattacattggttttgtttctctctataatggctattttggctgtaagttcctgcattgttttatcatg

SEQ ID NO: 387448 - DNA, 613 bp, Homo sapiens
atctattatatttaaagaaatataattaattttcagtgctcactttcaattaagttgtgtgtgtgtgtgtgtgtgtgtgtgtgtgtgtgtgtatactaatggatataaaggcaaaataaagtctgtggtttgttttacaataatttgggataaaaaattaagtatagatgaagcaaatgtggtaaacccataagaaatcacaacatgtaatagcaaaagtcccaaaataggcttttagtgtttaaagattaggatggaaggaagtttcacccaggattcagtctgtcagttagatccatttcttttgcctgaatacaaagaaagactataaagttacctttaaaaaatatggtgtaaaagtcttgaggttagattttctatcctagttgaggaaatgtgagctttggaaagagaaataataatctgatcaattccatacacttgaaacwgaagcctaatttttttagttgcttgcctcttgttgattttaaaaaaaaactcacgttgctaaaagccaggctgctaaacgctatcacttagccttcactagcatccttacagacaacatctctggcatctatgtcactacagtaataattgtttacgttgtttt

SEQ ID NO: 387449 - DNA, 629 bp, Homo sapiens
acagacttctggcttctaatgtggaaattccaatctggtcaatgatttcaaccaatcggagctgaacaagtttgaaattttcatttacatgaaaggatttgatggagaaccaggatragaactttccctatttgagccagaccctccctatggtcttctgagagcacattttcacttatactagaggctgtgcctccccaatctgaagactgcattcttttatagaaaataaagctttccctttttctctgaacatctcatatttctttttcaaggtatttaaggttgtaatgaaagggaaaaatctactaaataaagtcataacaaaataacatgtcttgaagattgtaaagcacaattgtacaaaagacattaacataaaataacaaaaactcagttccatactgttttgattaccatagctttgaagtatattttgaaatcaggtattgtgtgcttccagttttgttcttttttgctcaagcttgccttggctattcggagtcacttgggattcaatacaaattttaggaatactttttctatttccgtgaaaaatgttattggaatgttaactgtgatgtgtagaatactttagttggtatggacattttagttatattaattcg

SEQ ID NO: 387450 - DNA, 575 bp, Homo sapiens
gaaatgggtggccggagattttgatggcaaactttactttataagtatttcctgctcgattgactttacttatccttattctgatgtatatgttgaagggcaaataaatttcatttatgccacctccccagcctccgtttaattatgtcttattgttaagttgctaggaaaatattttctaattctgtgcaagttcagattcctgaaatattttacacaaaatgattaaagaaaaaatgggagcttttctttagcaagctgtagactagcaatgtctatggggaggggtcgggactcaggaagtccatttataatctagtagcagtgrctaacttcttatatgaatgaaaagaacattgtgaagtcagagtccaagctaataggttagctaatgaacttccctttgtagttaccgatatattagtgaaatattaattagaaatgaatgagaatatgttcttcctctacttgagttacaggaagaacagcataattctcttgagaaacctaaaacactgtgaatgacacgatgctcattaatagtcaatcaattgaatgctttgcaaattagtgtg

SEQ ID NO: 387451 - DNA, 575 bp, Homo sapiens
gaaatgggtggccggagattttgatggcaaactttactttataagtatttcctgctcgattgactttacttatccttattctgatgtatatgttgaagggcaaataaatttcatttatgccacctccccagcctccgtttaattatgtcttattgttaagttgctaggaaaatattttctaattctgtgcaagttcagattcctgaaatattttacacaaaatgattaaagaaaaaatgggagcttttctttagcaagctgtagactagcaatgtctatggggaggggtcgggactcaggaagtccatttataatctagtagcagtggctaacttcttatatgaatgaaaagaacattgtkaagtcagagtccaagctaataggttagctaatgaacttccctttgtagttaccgatatattagtgaaatattaattagaaatgaatgagaatatgttcttcctctacttgagttacaggaagaacagcataattctcttgagaaacctaaaacactgtgaatgacacgatgctcattaatagtcaatcaattgaatgctttgcaaattagtgtg

SEQ ID NO: 387452 - DNA, 471 bp, Homo sapiens
actttagaccaagcatcttagaagaatttgagatatctatgtaaagttcacataaaatgttgagtgggtatttgtgtataaatttctggcatttaagggagaaatctgkgctgaatatagaaattggatagttttctgcttacatggtattttgaaagtcataagactagaatgtgtaaccaatgagtgactatagactgaaaaggagtacaagacacaagatttggacatctgatcaataaggatttattatagccttatcagtagataaataattgtctgattacctaatcaatttgtattaaatattaaatatttaagatggtatgctataacctagctaatttccctcaaaaataaataatgtattattttgccagatagaaaatgactcaacagaaaatataaaggtgattatgagatggagaataatattttgtggtatggacaaatgagattaattcacttgaa

SEQ ID NO: 387453 - DNA, 544 bp, Homo sapiens
atgtccaacatatcaaagtctcatggctatgctcctacaaacatatccttcttctgcctttttcttcctcttatcttttcttcaatctcttaagctttgagaatccaaagtgcagtctttggatctctacactcactcaactcttttggtcatcttttcaagtctcatggctttacatatgtcatctaaactcaaaactatgcaattaagatttttggcccacattttttccctaagtgccaaacctgtatatctaaatactattcacatctttacttgagctttaaatagacatctcaacagtaacatctaaacttcccccaaaataccaaatcttccctgtctcagctgatggtaatttcatctttcaacctactcaaaaccaatgtattttaatcaccctcaatgattgtttttctcytatatactacattcttctgccagaaattttccctttttcccttcagaataatgcctgaatcttgatagttttttcatctttactgctgcaatcctgttccaaattgtaagcatttctaaccaa

SEQ ID NO: 387454 - DNA, 627 bp, Homo sapiens
ctatataaaatagtacttatgagattactgaatcatccaatataactttcattctataatgaatgatctttatatagacaatacttccaatatcactaaatattttatttgttgacaatactaccactttataatgtgatgaaacttctttaatttttaaatatggaactcatttcttattatagatttcataataattatggagacaaatttactacatacaattttaacattgttgatttagtttacacattcaaatattcatcagttttaacaatatgtttacaataaatatatataattatatttgcaacatatattatagtcatgtaccacataagaaaatttcagtcaacaatagactacatatatgactacataacaatttcagtcaacaatagactacataatctaygtggtcaggtagattacaataccatattttttctgtaccttttctaggtttagatatgtttatgtacacaaatacttcacattgtgttaaaattgcctacagtgttcagtacagtaacatgccatacaggtttgttgcctaagaacaatcggctgtatcatatagttagttgtgtagtagcctataccatctatgtttgtgggaatacactc

SEQ ID NO: 387455 - DNA, 631 bp, Homo sapiens
tctgccttctcccagtaacccactggttactccatttcttaagataagtattgtttacatgttggcatgtaacatcccagaccctttttctatgcaaatctaacatatataggatataattataaaacattttatgagccaaaaatccagttttatataaatacccaataactctttttcacatactaaattccatacatatttacttaggctcctatgctgtgacagatctgtaggcttatcagaattactgaaaatattaatataaactttgctggataaattatacccatatttgatgtaaaatctatttccaaagaggtatgatccttcgaccattatgtacttgttaaatattttctcttgtattagtttttattatggtatcttaacaaattactacaaatttagcagcctgaacaacacaaatttattatcttgcagtttccgtaagtcagggactcaggtaaaaattaattggtactctgcacagaaactaaccaggctgatgtcagctagaagtgctatctcatttaaggtgggagatcttcttccaacctcgttggttgttggtagaattcagtttytagcagacacaggattgagacccttacctcctagaggttgccca

SEQ ID NO: 387456 - DNA, 570 bp, Homo sapiens
agtatttaaaatacaaaagcataatctaatttctaacaaggttgacatggatagctacttcttaaaactcagaacttaaaaggaagtatttataatgctaaaagcctatgaaacttaggtttaaagtacctttaaaaacactaaacatattctctgttttttattcatttgtcagtacaaatatcagtaaatagtcaaaatgtaaccttagtttatgagagaggtgtctccaatgtgacttgactaaaattattttaggtgtaataccagcaattgtgtttaaggttaaggtttctaagacatatacccatgatacagaaattaaagaagtacaacaagtaaccaaagacattatatgmaatatcatttctacatataaagtgataaaaaaatagtagagtttcaaagtttgagatcttagatttaagtttttaatccattttgattttactttttcatatagatatccagttttcccagcatcatttactgaggagacagtcctttccccaatatatgtccttggcactttagttgaaaatgggtgcactgtaaatgtatggatttctt

SEQ ID NO: 387457 - DNA, 528 bp, Homo sapiens
attgagagaagagaaggtaagaaactggtcaggcaggcagttaaggtgggtccttggtaaaactccttcaaacaaagaacaagctgaaaatcaaactgcaggccctagataagaaatattctgtgtccttgaatggaaacagctactgtgtgaacccagatgaacaaattccactccttttttggtcatatttctctctccttgtcacrccttagtctcttacttttcacctacattatatacgcctacctttctgtgattggccataggctgagtcttcatttacttaggataaatcatcacttcagcccctgattggtcttatgccaaggtctcggaccaagccttcacctctgcctctaattggttctttgcactatcatacctctttctaagtggtgctttctccaagatggcctacagaccagtcagcacactcatctccctccagttcataaaaaccctcagactcagcttcatagctggcagccatctttcaggccccctctccactgtgaggatctttcc

SEQ ID NO: 387458 - DNA, 559 bp, Homo sapiens
aactcatccaaataggtaaagaggaagtcagacactcgttgtttgctgatgagatgattgtatacccagaaaatcttaaagactcatccaaaaagctcctagaactggtaaatgaattcagcaaagtttcaggatacaaaattaacatacacaaatcagcagctctgttatacaccaacagcgaccaagctgagaatcaaatcaagaactcaacccctttcataatagcagtaagaaaaataaatgaatactttggaatatacttaaccaaggayatgaaagacttctacaaggaaaattacaaaacactgctgaaagaagtcatagaatgcacaaatggaaacacatcttatgctcatggatgggtagaataaaagttgtgaaaataaccatactgccaaaaacaatctacaagtacaatgcaattgccatcaaaataacaccatcattcttttcagaaatagaaaaaacaatcctaaaattcatatgaaaccaaaaaaagagctcacatagccaaagcaagactaagcaaaaagaacaaatctggaggtattaaatt

SEQ ID NO: 387459 - DNA, 546 bp, Homo sapiens
gaaaatcttcacaatctatacattcaacaaaggagtcttacccagaatctacaacgaactcaaacaaattatccagacaaaaaacaaatgatcgcatcacaaagtgggctaaggacatgaatagacaattctcaaaacaagacatacagatggccaaaaaacttgaaaaaatgctaaacgtcactaattataagggaaatgcaagtcaaaaccacaatgtgatacctcactcctgcaagaatggccataatcaaaaaataaaaaaataatagatgttggggtggatgtggtgaaaagggaacacttttacactgttggtgggaatgtaaactagtacaaccactatgaaaaacagtgtggagattccttaaagaactaaaagtagacctaccatttgatccagcagtcccactattagctatctatccagagtaaaagaagtcatyatatgaaaaagatacttgcagcacaatttgcaattgcaaaaatatggaacaagcccaaatgcccatcaatcagtgagagataaagaaaatgtggtgtttc

SEQ ID NO: 387460 - DNA, 554 bp, Homo sapiens
ttagtgcccttgtaagaagacaatgatctctctttctcagctatgtaacggtacaatgagaagacagccatctacagaaagatasgccctcaccagacactgaccctgttggcaccttgacctttggattcccagactccaaaattgcaagtaatgtatgtttgctgtttaagctgaccagcctatagtattccattatagcagcccaaactgactaagacatcatataactgtttataattttattataacattgtcttataaaatttataatatatgttggtgtaccacatatacaattatatcataagagatagagagatgaatttactaagtggtaagatttctattttttatgtgcagtagtgcattgtaattatatactgtgaaagttatgaatgtatattgaaatctctaaagcacccctataaaatgaaattataaacaataactaaaattcaacaggaaaattaagataaaatctaaaaaataatagaataatacaaaacgggggcaggaaaggaaaaccaaaacacagaagtaaatggttggaa

SEQ ID NO: 387461 - DNA, 561 bp, Homo sapiens
tttgggaacatgcacctaaatctcagaggatgcatggaaatgcctggatgtccaggcagaagttggctacaggggtgagcacagaagtcaagaatttaggtttgggaacctgcacctagatctcagaggatgtagggaaatgcctggatgtccaggcagaagtttgctacaggggtgggaccctcatggagaacctccactagggcagtgtggaaagggaatgtagggttgaagcccatacacagagtcccaactggggcactgcctagtggtgctgtgagaagagggccaccatcctccagatcccaaatggtagatctactgacagcttgcagcgtgcacctggaaaagcaatagacactcaatgccagcccatgaaagcagccaggaggagaggtgtaccctgcaaagccacaggcacagagctacccaaggccataggtgcccacctcttacatcagcatgacctggatatgagacatggagccaaagaagatcrtttcagagctttaagatatgactgccccactgaattttagacttccatggggcctgcagccc

SEQ ID NO: 387462 - DNA, 431 bp, Homo sapiens
tttcttcacagcctatagcaacattctctctgaggactcccttcaggtttctgatgtcttcatgggargcagagctgagggaggtcctccctgttccctccaccatggggcttcattctattgtctttaagtcctcctcaaccaaccagttccacaaccagtgtgggtcctgaaggctgcttcaggcacagaaatgcacagttatccttcagctcaaatgaaaatcaagtcccagcccctgaagtcaacagaggacaagagttgctcttccagacttacagatagatcttgaccaagaaagaaaaacaggatttctttcttcccaagcaccaaaacatgtggtctaaaatgaccaggaggtaagaaggttctccccaagcagagcctgagaaaggagagaagttgagagctgtgaggaaagtaaccataag

SEQ ID NO: 387463 - DNA, 647 bp, Homo sapiens
agtacctcatatatcaaaactaacgttgaaggcaaagtggtctaaatgttccacttaaaaaatacagaatgacagaatacataaaattccaccaaccaagtatctgctgtctttaagagactcaccatacacataaagactcacataaacttaaagtaaaagtgagggaaaagacwttccatgcaaatggaaaccaaaagcgagcaggattagctattcttatatcagacaaaacagactttaaaacaataacagtttaaaaagacaaagaaggatgttatataatgacaaaaagattactccaacaggaaaatataacaattctaattatatatgcacctaacactggagttcccaaatttataaaacaattactaccagacctaagaaatgaaatagatagcaacagagtaatagtggggaacttcaatagaatactccactgacagcattagacaagtcatcaagacagaaagtcaacaaaaaaacagtggacttaaactataccctataacaaatggacttaacaggtatttacaaacattctacccaaccaatgcagaatatacattcttttcatcagaacatggaatattctccaagatagatcatatgagaggccacaaaacaagtctcaataaatttaa

SEQ ID NO: 387464 - DNA, 519 bp, Homo sapiens
gggcatggacagggggaggcttatttctatttggacaatcttttttaaagtgtctttgtagactgcactggaagcaatccctattaggcattcaatttgcccaggctttccgtgttccagagccaccaaagtccacttgcctgagggccatgactcaagcagtggcctttttcttatgtcgtttgtcccattctgcctgttcctcctgatctctattataaaaaaccaaggttgccaagttcaatagggtttytaagttttgctctggacctaaggtggacttttgaagtttttttttttaatgtctgcagctgactgagtgataaacttatcctttaagattagttggccttcaatagagtcaggtgagagagaggtatacttcctcaatgcctcccttagtctctccagaaaggcagtaggattttcttcctttccctatgttataggggacatcattgaataatttataggcttcttcctagttttccttagtccttctaccacgcaagttagtaa

SEQ ID NO: 387465 - DNA, 477 bp, Homo sapiens
ggtcttgcttttttgtccattcagtcactctgtgcctttgaattagagaactgaggccatttatattaagtgttactattgataagtaaggtcttactactgccattttgttgcttgttttctggttgttttgggacatctctcttccccccttcttttcctactatcttcctttgtggttaagtgggaatatcttttagtttgttcctttttatttttgtgaatctattataggttgttgcattgcagttaccatgaggctattttaaaaaatcttacagcaagttattttaaagakatgacaacttatcttagatcacaaacaaaagaatagaaacacaggcaaagacaaatacacaaaaaaattctacgctttaactccatccccgcccaactcccatatttttacttttagttgtctcagtttacatattattatagtacctgtctcttaaccggttgctgtagctattattg

SEQ ID NO: 387466 - DNA, 555 bp, Homo sapiens
ttatgaaccatggccatgattttgctgcagatgttgaggtggtggcagtagagggtgatgtgctgcaggtgggctagcaagtgcggcttccaggctgagtctgagcagtagtttgtaacgataaagttaagctgatccatcctagatcttgtcttagcaattttcttggctgcactgatcttgtctgatgaatttttgagcagtccttcacattgggtaaagtcagtcatctctatcattagcatgtacattaccataagtctgcttggccagcatgatgatgtcattgccactgttaycccatttggacatgtcagcatccagattgctcttttgttcttcttctagttgtctgactaagtcattttactcaacaataaattgtatttattgtctgtctttcatgtctcactcttcagaaatctgaaaattcttatctatgggataatttttttagattagatttcctgttccataatggtctttgtgcatctcactaaagaaaattgggtgaagctactattaagttttatgctttgaactgttttctctgag

SEQ ID NO: 387467 - DNA, 610 bp, Homo sapiens
gtttaactgagcgttgattgcttcactaatagcattttttcgaacaggtttattgtgtttactttgaataaagaaattatcttgtctacataaaaaatgagaacttgtagtcagtttcttgttagagtgcctattgtacttctactgaaattagtttacatgtatttaacttaatagaagaaggccagacttcgtttttcgtttttgttttgtttttgtttgagacraagcctcactctgttgctcaggctgaagtacagtgccgggttcatgactcaccacagcctggacctcttgggctcaagccatccttccacttcagcctctcgagtagttgggaccacaggcatgcatcaccatccccagctattttttttttcttttctttgtagagatgaggtctcactatattgcccaggttggtcttgaagtcctaggctcaagcgatcctcctgccgtggcctctcaaagtcctgggataacaggggtgagccgctgtggctagcctcttcattgttttaaaatgggctttttgtaggcaatctgttttggttcaaggtttttttttttgcttaaaaatctagctcttaaaatgagtttaaacgttata

SEQ ID NO: 387468 - DNA, 610 bp, Homo sapiens
gtttaactgagcgttgattgcttcactaatagcattttttcgaacaggtttattgtgtttactttgaataaagaaattatcttgtctacataaaaaatgagaacttgtagtcagtttcttgttagagtgcctattgtacttctactgaaattagtttacatgtatttaacttaatagaagaaggccagacttcgtttttcgtttttgttttgtttttgtttgagacaaagcctcactctgttgctcaggctgaagtacagtgccgggttcatgactcaccacagcctggacctcttgggctcaagccatccttccacttcagcctctcgagtagttgggaccacaggcatgcatcaccatccccagctattttttttttcttttctttgtagagatgaggtctcactatattgcccaggttggtcttgaastcctaggctcaagcgatcctcctgccgtggcctctcaaagtcctgggataacaggggtgagccgctgtggctagcctcttcattgttttaaaatgggctttttgtaggcaatctgttttggttcaaggtttttttttttgcttaaaaatctagctcttaaaatgagtttaaacgttata

SEQ ID NO: 387469 - DNA, 594 bp, Homo sapiens
taacctacatccttacttgggtcctgaagtttaaaaatacacatattgaagttttcccattaaatataatatttgctatgaatttttttttaaaaaatgaatgattccaccaagttaaggaaactactatatactagttttctaaattgttttgtattttcttgaaaaatactaaagttcataaatagttttttttaatttacttgggagttttttttttttagactattagactatgaagtaagtgacatgattgatttaactctctttactgtctggaataaatcttaattgattatgatgtttatgcaccattacattttgttatttaatagcttatttaaggcttttaactaagttctgaagtgaaatgttagtataatgtattgtttgtactctggtaaggatatttttttgtcctggtaaagatagtttcagaggacaaaaaatatattataaaaacttttatgagtagactcattmaagtttttcttgaaagaatggaaaggagaagtaggccttcaacccactggctgtgctggagaagaaagcatggttcctttcttaaagaaatcttccatgttttctctaagt

SEQ ID NO: 387470 - DNA, 594 bp, Homo sapiens
ccaattgcaattgatattaatgaattgctatactaaatataaataaagaaaaaaatgccttcttcaaaattcatttttacatatgcaaaattatccctttcaaatttgacacctgtcacttgattaatgatctaatctgtatgaatatatttcagtgtctgaaataaagctacaagtctgtactaatctaacaaatatgaacataaatgttaacatttagacatttttcggatgcatactttaaaattacaagtcctgcaagaataaactaagattggtaacctatgggcaaccttgctatagactttcagtttgttcttctggtgaagagtcctttgttttcatttttctccagtgccatttcacttcttcatgcttctgctttccttcttttgttgttttttttttttttttagaaatcggggctcattgcagttttctaccaattaacccttgggcccatcatgtgttttccagtggttaatacctgacttaagtatttgatcctattattttgtttttaaatctaaatggcaatattgccttgatttaatggcaattcttattytttctttttccaacgtccataagaag

SEQ ID NO: 387471 - DNA, 591 bp, Homo sapiens
acagtgaaattttaactatcagttgtcaactatgataactgacctgtagttgtacaattaaaagtggctggtgtgatattttaaataatatgtgaatctcctaaaagccattatgtttgcatcccaagagttttaacaacaaaaaaaattragtttaatatacatattttaattttaattgtaattttagatttgtgttgagaatcacaagatataaattgatatgtgtcatagtaaaacatattacttccatatcttagacacaatgacatgggcctacatagccccagctacttgagaagccaaggtagaaggattttttgagcccaggagttcgaatatagcctggggagcatagtgaaaaccatgtctcttaaaaaaaaaatagagagttttaagttttatactagagaaaacaagtaaggcttgtgttacacatgcatatccttatagatgaagatgagatagtgtactggcccaaggccacacaagtagcactgatggtaccattgcttctctcctgacatgtgtcctatgctgcttcaacaccatgactaagaataacagtgatttgttattaagaataaatta

SEQ ID NO: 387472 - DNA, 571 bp, Homo sapiens
agtctacaataaatagaaataaatttgagactagacagaaggtcatatgaatacaattgtggagcctacatctcacaagtttaggatgagacaggcaagtttttgtaagtcaatcaaaaccattttttatctcctcccaccccccaaaaaaatcaacgctcttttgaaaatggcagttgttaaattagcttgaatatacaataagaataaacattcattatcattttgttcccttgattgctcaacacacctgagtacagttacttttttctgattcaaaggttgcaactaaaaagtcctgagggtaaacaagagaggaaattttgaggaccaatatgctgaccgcttagagtgtagagctgattttgtcaggtcttattaatgatcatggtgctacaatatatcaaatgatacrttgaatcatgccagcaaaaccatgttccctctagctcttcggtattttgaattctaaaatggagtttcaaatcatctccttgatttctgtaaagattttaatgaaacttcagatgacataaaagatgtagcatcttgtccaaatttaaagtagact

SEQ ID NO: 387473 - DNA, 622 bp, Homo sapiens
taccacattcatagaaggtaatttacaaccctggaaaatcactggagaattacgaaagatttgagaggatatatagatagaaggaagatagtcaatcttgatttagaaaaatagaaacaatatgtttcctgaatcagcctcagtctaaatagaacagagctgattatgatcatagtataaaataagccttctgtaacattatcaaaaatctctttattcacggataccttatttgaattcatgtctattttgttcagacacacttttcaaatatagcttccaatttaaaagatcaaattttagtcacgacagaccttctgcatgtaagattatataatttgcacaatattaaaaatacaccaatactgggcagtgagttatactaaatgtcatatttttttcactttggtaaattattttgtctttattaataatatgttcatttgttctgcattttgttttatttcagcacaaattcacaagcaatktgtgagtaacagataaatatagctataggattgactacataccattagcagactatcaaataatctgatttagaggaaatgaattgagttgctactgtgtgaatgacaaagataaatattttttgctaagtgcc

SEQ ID NO: 387474 - DNA, 544 bp, Homo sapiens
tcaactagttcttaccaagaacagtatacacaattgaaaatattttttaggatattaggatggaaaggtttctatgtttcttctgcttggttgattgatyatgctttcttaagcatgaataaattggatgattagaaccattatatttaaatttttttaaaataataattccttcagttaagcaatgctaaaatcatttcactaatgaagaagaaaacaaatcaatgaaaaagtttatttatttttagtactgatttatgattgtacttaaaactaaatttagtgatactgatattgtgggaattcccaatgttcacataaccaacatttgaaagagttgggaagttatatgtagttatattttgccacaaagctattattagacaatttcattatgaaaaaaaagagtctgtcacttctaaacccaaggcaaagcactggcctaaacatttctctttcaggaaaagtttacctgattagatgtagataaaatcattatttttattagaatctcaatcatgtgtttgtgccttgagagttaact

SEQ ID NO: 387475 - DNA, 544 bp, Homo sapiens
tcaactagttcttaccaagaacagtatacacaattgaaaatattttttaggatattaggatggaaaggtttctatgtttcttctgcttggttgattgattatgctttcttaagcatgaataaattggatgattagaaccattatatttaaatttttttaaaataataattccttcagttaagcaatgctaaaatcatttcactaatgaagaagaaaacaaatcaatgaaaaagtttatttatttttagtactgatttatgattgtacttaaaactaaatttagtgatactgatattgtgggaattcccaatgttcacataaccaacatttgaaagagttgggaagttatatgtagttatattttgccacaaagctattattagacaatttcattatgaaaaaaaagagtctgtcacttctaaacccaaggcaaagcactggcctaaacatttctctttcaggaaaagtttacctgattagatgtagawaaaatcattatttttattagaatctcaatcatgtgtttgtgccttgagagttaact

SEQ ID NO: 387476 - DNA, 556 bp, Homo sapiens
ttggtgtctaaatgggagggttctggcaaggactaagcttctgctcagcagtctaactttagggggaaactggataattagcagggtctggtgggactgtcaaatagttggttggacaacttgaaaactgaaggatcttagcttgaggcctcagatcctcagcagttgcaacctcagtagatatactgtgctgtgcctggttctgaggtctgtacattggaatcagtggaagaacttaatactgatggccagcctcacctgctgagtgcttgagcagaaactctggggtgaaggtgatattttggcatttttagaagctgcagtgatgactctaatgcacagccaagggtgagttacaccagttactaaatggtcctgttaatcccagctcttctcactgctacaatgtggctgtgagtgcattgcctctcttagtcacaactggctcaataatggagcagamcttactatatctcattatgtctaattactataactactttaagtcagtacacatctgaagtagattttgataagttaccaggtatatgtaagc

SEQ ID NO: 387477 - DNA, 537 bp, Homo sapiens
caaactggtctacttttattcatgatgtaagggaaaccacggtgctttatttagtttcatggtgctttatttagtttcaatcatggtgctttatttagtttcaatctctatctacctatctacctcggttgctagccatttcaaagatgaactaggactaaaagaagaagtgtctctagactacgattacatcttcccttccagcctctgatttttattctttatccttttttraatggtcttattgcatgtgacttttagtctaagcaatttcaaacttttatttttaagtaagcactgtgtagtaatcaagctattgtgtacatttgcaaaagatgaacccacagaatgtagatctggagaggaattacaaatcaggagaaagccagcactaactctactcccagcacccctggctcaggagaaacctccagagccctggaagaaggccactccgcagatccctagggcctcaggcacagcccgcaagggcagaagggtgctgcatggaagctctagccctcaaaaggtgcaggg

SEQ ID NO: 387478 - DNA, 603 bp, Homo sapiens
ttacaatcccatttatatgaaatagacaaatccatagagacagaactcacattggtgactttcagaggctgagaggagggggaaataaggagaaactgcttaatgggtaaggggttttaccttggagtaatggaaatgttttggatctagagagaggtggtggttgtgcagtgtgtactaaatgccacctaattgttcactttaaaatgatttaacaaaatcccctcccaatctactgcttccacttggagccttcccttaggctgggagtggacggtgaccaagtgtcccagaacaggtgctgttctacctctaagagagtctgttgtttttctttagagagcgtgaccagtgctgttcacctggggccttggtgaatgatcctgttactgtgctctgtgatctgtgttgaggctcccaagcaggggctccactctccagagggaggtgtgtggcagartggagcctgtgactatcagtgaaatgggatgtgatgtgctccttggtctctcaaacaaatcttacactctttcaactaatcgaataacataatccaagccagggccagcaccatagcctgattttgcaagatcacatgaaaaa

SEQ ID NO: 387479 - DNA, 593 bp, Homo sapiens
tgtcagcagcatcccaggaggatgttgcaaaactgattcctgtttatggacgtggagggtgaaggaggtgttcatggggcatcacccaggrtgtagtctgatattaacttgcatgtaagtaggcaacctcttcttttaaacatcaaaaatcacttaaaaggattatctctgtcatttctattataggggaattactttgctcagataatgaaattgcttgtttcttaagagtttaactcaattgtgctgagagaatggggcaatggggtgatttgggagatgaaggcattgtataggaaggaagcccgagacacctctccccacaaatcttctcctcagggacacagcgataggtacggacttggattattaaaagtatgtgtttctccaagtgtatagaacaccagtctctgcagaggggttctgggtatttggtgggaaaaagcactgaggccaaacacattggacatgttaggcaggcttccttcttgtagaacctccaccaaggctatggcgtatgccccccattccaatcacatttgagcaaagggccccgtttttcctcataaacacacattttggaaacgttgttg

SEQ ID NO: 387480 - DNA, 593 bp, Homo sapiens
tgtcagcagcatcccaggaggatgttgcaaaactgattcctgtttatggacgtggagggtgaaggaggtgttcatggggcatcacccagggtgtagtctgatattaacttgcatgtaagtaggcaacctcttcttttaaacatcaaaaatcacttaaaaggattatctctgtcatttctattataggggaattactttgctcagataatgaaattgcttgtttcttaagagtttaactcaattgtgctgagagaatggggcaatggggtgatttgggagatgaaggcattgtataggaaggaagcccgagacacctctccccacaaatcttctcctcagggacacagcgataggtacggacttggattattaaargtatgtgtttctccaagtgtatagaacaccagtctctgcagaggggttctgggtatttggtgggaaaaagcactgaggccaaacacattggacatgttaggcaggcttccttcttgtagaacctccaccaaggctatggcgtatgccccccattccaatcacatttgagcaaagggccccgtttttcctcataaacacacattttggaaacgttgttg

SEQ ID NO: 387481 - DNA, 584 bp, Homo sapiens
cccatgtgtgcacaatgaataaatgaacagatcagagctttactttttgaaaagtaatctcacagctggggggaaatggatgaaagttgtgaggaagagggaaggtctgaaggaactagaaccaggaattcagaagcccgattccagcagtgcgtgttgaaggagaatgagaagcaaagatggattggaaagaaactgtacaggaagtaccaatacggctcgatcagacatgagaaataaaaatgaaggggaaattaaattgacttcaagcgtttgctcccaggcatcaagaggcctggttgtgctgggggtcagctgaaaccctgcctccagaggactccrgccctatcagagcaggaacttcactgttcgctgcttttttcactgctgtgtccctaacatcaagaacacagatgtctaggcactcaacgttttttgaacaaaaaaataagtgaacatgttgccttaagatgacattccaagccctcataaatgtctgatttagttagaaataggagcctggtatttagcactgaaagtttagctttaagagtcatctgcacaaaggcagttgtgggagtgcg

SEQ ID NO: 387482 - DNA, 610 bp, Homo sapiens
tactgtattttgacagtacctcttctgtgttcacatttgagatacacaagtaccactgtgttataattgcctatagtattsattacagtaacatgctgcacaggtttctattctaggagcaacaggcttgaccatatagcctaggtgcataataggttgtaacatgtaagttatgtgggtccactctatgatgttcatacaacaatgaaattgcctaatgacacatttctcagtatccccatcattaagggatgcatgactgtattcattcatgtaacaacataaataaacctccaaaacattatgctaagtagaagaagccagatctgtggttcctcaactgtgcacgaaaccaccccagggcccccagtgaactcacagacatgccactggatattttaaatcttggagggaaacagcaataattgtgggacaccatgtaagctacttttaatgagttctctggatctaatggaactggtaggtatcccttttaactttcaacaccataaaaaattatggattctaaaggcactgtgaaccaaggaagtttgcaaacctctaaaccagacacaaaaaaagtacatactaaatgactgaatgtatagga

SEQ ID NO: 387483 - DNA, 610 bp, Homo sapiens
tactgtattttgacagtacctcttctgtgttcacatttgagatacacaagtaccactgtgttataattgcctatagtattgattacagtaacatgctgcacaggtttctattctaggagcaacaggcttgaccatatagcctaggtgcataataggttgtaacatgtaagttatgtgggtccactctatgatgttcatacaacaatgaaattgcctaatgacacatttctcagtatccccatcattaagggatgcatgactgtattcattcatgtaacaacataaataaacctccaaaacattatgctaagtagaagaagccagatctgtggttcctcaactgtgcacgaaaccaccccagggcccccagtgaactcacagacatgccactggatattttaaatcttggagggaaacagcaataattgtgggacaccatgtaagctacttttaatgagttctctggatctaatggaactggtaggtatcccttttaactttcaacaccataaaaaattatggattctaaaggcactgtgaaccaaggaagtttgsaaacctctaaaccagacacaaaaaaagtacatactaaatgactgaatgtatagga

SEQ ID NO: 387484 - DNA, 437 bp, Homo sapiens
agcttctcttctcccttcctgagtaccagttattttcatattttaaaggactttctctttctctgatctaacacaatgacaactaagcaaaggcatgkaccattttataatatatgcagggtctctttgctccactctatacatgtgaaagattttaattcaagtacaagttactactcagaaagacaaatgctattaagaaatgacagtaatattgacaaactagaccactaaaatttatgagaacaataaacccatttcctgcaggaactatctattctggatattacttagtattataaatctgcctcttaagaaaattaaacctggggaagagagaattaaaaaaaaaataaggactataaaagacttgctgcaaaaactgactgagaaagagaaaaataaagtttttttttcttctcaacagtatgcaaaga

SEQ ID NO: 387485 - DNA, 549 bp, Homo sapiens
gtcaaattgtgaatacaaaggaaaagttattgaaggaaattagaagtgctactccagtaaacacacaaatgataagaaagcaaaacagccttattgctaatatagaaaaagtttgagtgtctggatagaaaatcataccagccacaatattcacttaagccattctatgaaggctgagaagtgaggaactgcacaagaaaactttgaaaccaacagaggttggttcatgaggtttaagaaaagaagccatctccgtaatataaaagtgtaaggtgacgcagcaagtgctgatataaaagctgcagcaagttayccagaagatctagctaagatcattgatgaaggtggctacactgaacaacagattttcagtggagatgaaacagccttctattggaagaagatgctatctaggactttcctagctggagaggagaagtcaatgcctggcttcaaagcttcagaggacaagctgacttccttgttaggcactaacgcagatggtgtctttaagttgaaaccaatgctcatctgccatttgaaaatcct

SEQ ID NO: 387486 - DNA, 458 bp, Homo sapiens
ccacctgatttccaaaacgttaacattttaaatcgacaaaatgtattaacttacttgactttgagccaagtaaaattgttctcaagtgccttggactcttccaaggaagcttattaaaatgcagatcctgggggcactctaagagactcggattctgaagattggaaaaggctagagatttgcatttttaacagatagttctgacgcagatgatgggaagactgcaaatttctgaaatgttgactgagtaaaatcaaaatagtaataaaattagccaggcagccctgagggaatcttaacagcaaacataaaaattgagccacccattctgaaagacatccaggttggaactaggaaaattctaattaatgagttaaatacttgttgaatcctaatctagaaatcaaaagamctggtttctgttccagttctgctggtaattagctttgagactgtgg

SEQ ID NO: 387487 - DNA, 544 bp, Homo sapiens
cactctggatattggatatggaaagaatgtatgattaagttctgcacagcaattgcaacaaaccaaaaactgacaaatggaacctaattaaagaacttctgcacagcaaaagaaacaacaaacaaggtaaacagacaacatacagaatagcagaaaatatttacaaactatgcatctaacaaaggcctaatatttatggrgcttaaacaattgggcaagcaaaaaataaatgacccgattaaaaaggggcaaaagacatgaacagatacttctaaaaagaagacatgcaagcagctaacaaacatattaaaaaatgctcgatgctcgatatcactaatcatcagagaaatgcaaatcaaaaccacagtaagataccatcttacatcagtcggaatggctattattaaaacgtcaagaaacaacagatgttggtgaggctgtggagaaaagggaacacttacacacactatttgtgagaatgtaaattgattcatccaccatgcaaagtggcttgaagatttcccaaggaacttaaaacagaact

SEQ ID NO: 387488 - DNA, 544 bp, Homo sapiens
cactctggatattggatatggaaagaatgtatgattaagttctgcacagcaattgcaacaaaccaaaaactgacaaatggaacctaattaaagaacttctgcacagcaaaagaaacaacaaacaaggtaaacagacaacatacagaatagcagaaaatatttacaaactatgcatctaacaaaggcctaatatttatggggcttaaacaattgrgcaagcaaaaaataaatgacccgattaaaaaggggcaaaagacatgaacagatacttctaaaaagaagacatgcaagcagctaacaaacatattaaaaaatgctcgatgctcgatatcactaatcatcagagaaatgcaaatcaaaaccacagtaagataccatcttacatcagtcggaatggctattattaaaacgtcaagaaacaacagatgttggtgaggctgtggagaaaagggaacacttacacacactatttgtgagaatgtaaattgattcatccaccatgcaaagtggcttgaagatttcccaaggaacttaaaacagaact

SEQ ID NO: 387489 - DNA, 544 bp, Homo sapiens
taatctttaggaagatgtgatgctggaaaaacagggccatttttcccttttatggcttttgcacagtgcttgttatagggaacccacaattattactgttcttaccaataactgaaaaaaggctgttagaggatccttgcttagttcctttgatgaggccattggctcagtgacaagaatattactgaggatggagaaccaaacattgagctgtttagcagaacttgcagcagagctatcattgcatcattctgctgagatgtgaagtaatgtctgagccttcggttcccactgtagggcagctcagcctgtgctcccagttcggacagygacataaaccctgcatcctgtctcctgacccttgctctagaggctccaggtcagtcccacaagaggcaacttggcagccaggcccattaggaagtacatgcagccccaggaggttctcacaagtatagatcaacactgtgtttgccatggaaagtttggaggaaagactgtacaccactcagtgaaatcctttcctctaattctctgctcctgt

SEQ ID NO: 387490 - DNA, 544 bp, Homo sapiens
taatctttaggaagatgtgatgctggaaaaacagggccatttttcccttttatggcttttgcacagtgcttgttatagggaacccacaattattactgttcttaccaataactgaaaaaaggctgttagaggatccttgcttagttcctttgatgaggccattggctcagtgacaagaatattactgaggatggagaaccaaacattgagctgtttagcagaacttgcagcagagctatcattgcatcattctgctgagatgtgaagtaatgtctgagccttcggttcccactgtagggcagctcagcctgtgctcccagttcggacagcgacataaaccctgcatcctgtctcctgacccttgctctagaggctccaggtcagtcccacaagaggcaacttggcagccaggcccattaggaagtacatgcagccccaggaggttctcacaagtatagatcaacactgtgtttgccatggaaagtttggaggaaagactgtacrccactcagtgaaatcctttcctctaattctctgctcctgt

SEQ ID NO: 387491 - DNA, 309 bp, Homo sapiens
ggaccatatcccacacgttgcagggtgtttactgcctctggccccacccactaaacgctagtggtgcctccccatcagtgtgacaatcaaatcctcccacaaatttccatatggctccaggggtatatcttttcatttgagaattgagttagtcaatcctctgcttctcaagaatttttaaagcaaagttttttaggcaacctccataggtctccatttcaacaaagtggtccagagtaaggaggctacacggtggccatatgaccacatagtggasaccaaagtcacacctgggttcctgcagtcttg

SEQ ID NO: 387492 - DNA, 487 bp, Homo sapiens
gacatgatcagatctgcattttgaaaagctcagcctcattttctttgaagttttatagataattatataattcaggtaaactactggaatagaaccttttaattctaggaaaatttaaagagtgacatgtattcagtgatgaactataagtttctgagaagctttctaatattacagtggtttgtattattgtygtgttgctgaagttagaaaagaatgatactatagataattccccctgacccacattctttttctagacctatttattattacatataaattccatacatttattgaacatataaattccaaaatttttgatggcttaattaatagttaaataatgcatcagaattcacaaacagttgaacttaatctttaccgtggcactccattctccttggtagctgaaaatgtaatcttccaaactcaagggaaacagtccacgtagtgatgacccagtcatttcctgcctagatttagt

SEQ ID NO: 387493 - DNA, 487 bp, Homo sapiens
gacatgatcagatctgcattttgaaaagctcagcctcattttctttgaagttttatagataattatataattcaggtaaactactggaatagaaccttttaattctaggaaaatttaaagagtgacatgtattcagtgatgaactataagtttctgagaagctttctaatattacagtggtttgtattattgttgtgttgctgaagttagaaaagaatgatactrtagataattccccctgacccacattctttttctagacctatttattattacatataaattccatacatttattgaacatataaattccaaaatttttgatggcttaattaatagttaaataatgcatcagaattcacaaacagttgaacttaatctttaccgtggcactccattctccttggtagctgaaaatgtaatcttccaaactcaagggaaacagtccacgtagtgatgacccagtcatttcctgcctagatttagt

SEQ ID NO: 387494 - DNA, 593 bp, Homo sapiens
tgttttattctttctgagtttcaagagttctttgtatattttggaggccagtcctttaccagataggtgtttttacaaatattttatccttctgtggcttgtcttttcattatcttaatctaatttatttttaatgagacaaacatcatctcatgtgaaatcgacacccaaaaactgtttttcttgaccagtttattttcccattttcccagtttacagacacatgttgttacttctggaacaagtttagcatcatatacaccattaatactttactgtgccttactgaatttctataatcactgattccttgaactttaagatttcactctgttgaaaactgtgaaggctctgaggtttatcctactcgcagactaacaagttaactccccatagtttgatggttgccatcaaaagacatgagactcctgggtaagacagaaatgactttacaactcatggcacagcaagctttacaagcttcatgtttgtgcaggttctctttgtttcccaagtcccactggggagatgccgagaagcccaggyggatggtgagtatgcaataaatttgtatcacacagagggactctgag

SEQ ID NO: 387495 - DNA, 598 bp, Homo sapiens
ataattttaataaacaatcatcttctatcaataaaacaactgtttctcaactctccaactttttttcatcactacaataatcagagatttttttagaccttcctggtattttaggacacaacccagtgcttccttttattaaacctgctgcaacattttaactgaatgtgaaagtagaaaagcaaaataaaaaactgcattctggcttgtcaacatccctcattttatctcttttatctccactaaaatccttcctcaactttcctaactgtttgacatcctttgagtgctttcatataagcattgcttgtcatgaagtcaccttgcacaacccagccctcccaagaagagggcaggtttcaattaagctaacagacagcagggtgataacagtgtccactgggatcagaataacacaatgttttcaagaatgaagggtttataactttctccagaaactaacaagcaaggcagctcggcttgcaaggaagacaagatggctccatcacagagactgtaaaggggcaaaacaagggtkaaaactagctactcagagatgcaaaccaaaggcttttggcaaaagcatggactttatttt

SEQ ID NO: 387496 - DNA, 554 bp, Homo sapiens
catggctcaatgaaccagggtcattagaagcaaataaaccttcctctcaggttgcttcagaaggtagtagtagcctaatgctgcagcacaatacctatattattcastttacttcattatcacaagaagggtgaatacagtacaaaaaggtattttgagagagagaccacattcatgtaagttttattatagcatattattattaatataattgttgtactttattaatagctgttaaccttttactgtgtgtaatgtataaattgaactttatacatatgtaaagtttatatatatgaaacatatatgtaaaaaatataaacatatactttaatttcaatggtttttgggatactggtggtttttggttatatggatgaactgggatactggtggttttggttacatggatgaattgtataaaggtgaagtctgagttttagtgtatgtatcacctgagtagtgtacattgcacacaatatgtagttttttttatccctcactcccctatctttctcccccatcctgagtctccaaattccatcataccactt

SEQ ID NO: 387497 - DNA, 516 bp, Homo sapiens
cctgcttgcataaagtgtaaatgttccgtgttaacataaggtacgcctgcattttgagtgttgagtaactcaagaccctgacaaacttgtatgttatccaaaatatgtttgcagacttttccccgttgcctataaaatagcattaaaggaagtatctcactccataaataaaactgtcgagtatttaagtgacttacacttcatcaycatcatcaccaaaactgtaaagtgccctttctctccagggctgggatcataatatactgggcatattcaacagatatttgagtaacccactgagaagatgcagtactaagttttttttcatctttcttttctttgattccttgacagcaggaatcatgccacctactaatctccagatataatttctgtattacaaatgtaaagcttaattttatgtgataacttcactgggccgtggggtactcagatattttgtcaaacattattttgggtgtttacatcagagcatttttgagtgagaccaaaatt

SEQ ID NO: 387498 - DNA, 582 bp, Homo sapiens
aaccaggcaaagatgttccaaacaaagcaaaagataaatttctagaaaccagctttaatgaactggagttattaactcacagagaattcaacataaaaatgctgtcataaaaaatgctcactgaggtcaagaaaacaatgcatggaaaaagtaagaattttaacaaagagatagaaaatacaaaaaataccaaacagaagttatggagctaaaaaggacaaaaattgaactgaaaawatgcactagacggattcaacagcagactacatcaaacagataaaaggatcagtaaatctgaagacagattattgaaaataatttggtcagaggagcaaaaagaaaaaggaataaaaaagagtgaataaaatgtaaggaacttatgggacactatcaagcagtttaatatatacattatgtggtccaagaagtagagagagagcaagaaagaaaaagagagctgactcaaagaaataatgactgacaaattccaaaatctggggaagaaaatggacttccatatccaagaggccaaagagacacaaaataagacaaacataaagaaatccatattaagacatgtta

SEQ ID NO: 387499 - DNA, 519 bp, Homo sapiens
tagaacaccaagcacatttaacccaaataagactacctcaggcatttaataataaaactcccaaaggtcaaggataaagaaaggattctaaaacagcaggagaaaagaaacagataacatatamtagagctccaataagtttggtagcaacttttcactggaagccttacagcccaggagagagtggcatgacatatttaaagtgctgaaggcaaaacaaaaacaaaaaacacttttatcctagaataccatatccagtgaaattattcttcaagcaagaaggagaaataaggaccttcccagacaaacaaaagctggaggatttcatcaacaccagatctatcatacaagacatgctaaagggagttcttcaatctgaaagaaaaggatgttaatgagcaagaacgaatcacccgaaggtacaaaactcactagtaatagtaagcatacagaaaacacagaatattataacaccataattgtggtgtgtaaactactcttatcttacatataaaggct

SEQ ID NO: 387500 - DNA, 582 bp, Homo sapiens
aaccaggcaaagatgttccaaacaaagcaaaagataaatttctagaaaccagctttaatgaactggagttattaactcacagagaattcaacataaaaatgctgtcataaaaaatgctcactgaggtcaagaaaacaatgcatggaaaaagtaagaattttaacaaagagatagaaaatacaaaaaataccaaacagaagttatggagctaaaaaggacaaaaattgaactgaaaaaatgcactagacggattcaacagcagactacatcaaacagataaaaggatcagtaaatctgaagacagattattgaaaataatttggtcagaggagcaaaaagaaaaaggaataaaaaagagtgaataaaatgtaaggaacttatgggacactatcaagcagtttaatatatacattatgtggtccaagaagtagagagagagcaagaaagaaaaagagagctractcaaagaaataatgactgacaaattccaaaatctggggaagaaaatggacttccatatccaagaggccaaagagacacaaaataagacaaacataaagaaatccatattaagacatgtta

SEQ ID NO: 387501 - DNA, 519 bp, Homo sapiens
tagaacaccaagcacatttaacccaaataagactacctcaggcatttaataataaaactcccaaaggtcaaggataaagaaaggattctaaaacagcaggagaaaagaaacagataacatataatagagctccaataagtttggtagcaacttttcactggaagccttacagcccaggagagagtggcatgacatatttaaagtgctgaaggcaaaacaaaaacaaaaaacacttttatcctagaataccatatccagtgaaattattcttcaagcaagaaggagaaataaggaccttcccagacaaacaaaagctggaggatttcatcaacaccagatctatcatacaagacatgctaaagggagttcttcaatctgaaagaaaaggatgttaatgagcaagaasgaatcacccgaaggtacaaaactcactagtaatagtaagcatacagaaaacacagaatattataacaccataattgtggtgtgtaaactactcttatcttacatataaaggct

SEQ ID NO: 387502 - DNA, 418 bp, Homo sapiens
caaatctgtgggatatagcaaaagcagtactaggagggaagtgtatagctgtaagtgtctacactgataaagaagagaaacttcaaatgaataacctaaaaagtatgctaagaaactagaaaagcaagagtaagctgaacccaaaattagyagaagaggagaaataataaataaataaataaataaataaataataaatatcagagacaaaataaatgaatttgaaatgaaacaaaaataatacaaaagaacaactaacaaaaagttggtttttttaaaaagataaacaaaattgacaaagttttagccagactaacaaagaaaaaaaatgggagaagattcaaataaataaaatcagagatgaaaaaggaggcactaaaactgataccacacacattcaaaggatcattagtatata

SEQ ID NO: 387503 - DNA, 582 bp, Homo sapiens
ggaagtgaggcacagaggtaaaacatctgcctcagctggtaagaggcagagctgggattccaactcaggctgtctggttcagattctatactctaacctttgcattataccactgtttcctatcttcctggtccttctcatcctatcactacataatatgactgagctgctttggtgcatggtacgttctttgagatggtctctacttctttttacttgggactctaattctggaggcaaggctcaggtccctactctccagaaacagactggccagcattctagaataaatcaagtgatactttccagttgaataatttaagacaatttcataaagaaaatatagaaagagttttggaaaagcaacaagagatgagatcrggagccatcaccaccctacaccgcaacctgaatgaatgaagggaggaagtggcccaggaactgagaaagtgagctgtgtggagagtgccctctcagaggagctgtggctttctgaggaagagcatagctgtgaaggcctgggagacataccctgacctgactttcttcttgttctccagatctcttgccggtgccttctac

SEQ ID NO: 387504 - DNA, 588 bp, Homo sapiens
tagcctccttgttcagttctcgaatagactccatccataaacagttctaaatctgggttgtctaaaagaattttaaagagatcagagaaaggccagaaaaactgttgcctaagtacatgacagtaatgagattctctctcctatgggagagagacaaagcttgggggttttaggggatacagagatgaatagaaatatgtatggatgaaaagagaaaaatttctcaggttaatctagaagcaaagaagcattgggtgctttcagttatgagtaaggtctgaatgatatgagggaccataaggttaaggtggaggtcaaggactaggtcagcagaagcctcaagtaactgtgctgtkgttgccactacacacacagagctaggcttctgccatcagcaaagtcagaggttattataaatgtcagatgtctgatacttatcatactgttaggttagaatcgcagaagcttcttcatatctttcatgtgcaaagagaaagaaaggtctatcgtaactgggaatcctaagcataggcacttttgaaggatattttttaagttacagaaggctctagtgagtctggcccagat

SEQ ID NO: 387505 - DNA, 594 bp, Homo sapiens
gcaatatattggaaatgacccaaatgttcacaagtaagggactaaatgatggtccatcattggggtactatgcatttgtagaaaagaatgaggagtatctytatgagctggtgtggactgatatctaggctatattgttaaggaaaatatcaatcaatattataatatgctatttttgtgtgtaagaaacaaagagaaataacatgtatatatatttgcttatgtgcttacatatatttgcttatacatatttgcaaaagaaagccaaggaaagataaaacagaaatcaatgaaaatgattatctataaaggaagcatgaaaatgaagtggtgggataagaatgagagtgagagttcctggaatatattcccacaaaagtatgttctgttgacttttttatatggttttaaattaagtgcttcacatatgcagaattaaatgtaaaataaaccaaagtgaacaccaaaatttaacacaaatagaaacaaaggactcaaatgcacaccttctcctcaacttacggtggggttatatacagataaacccattgtgaattgaaattatcccaaattgaaagtggatttttgacatga

SEQ ID NO: 387506 - DNA, 594 bp, Homo sapiens
gcaatatattggaaatgacccaaatgttcacaagtaagggactaaatgatggtccatcattggggtactatgcatttgtagaaaagaatgaggagtatctctatgagctggtgtggactgatatctaggctatattgttaaggaaaatatcaatcaatattataatatgctatttttgtgtgtaagaaacaaagagaaataacatgtatatatatttgcttatgtgcttacatatatttgcttatacatatttgcaaaagaaagccaaggaaagataaaacagaaatcaatgaaaatgattatctataaaggaagcatgaaaatgaagtggtgggataagaatgagagtgagagttcctggaatatattcccacaaaagtatgttctgttgacttttttatatggttttaaattaagtgcttcacatatgcagaattaaatgtaaaataaaccaaagtgaacaccaaaatttaacacaaatagaaacaaaggactcaaatgcacaccttctcctcaacttacggtggggttatakacagataaacccattgtgaattgaaattatcccaaattgaaagtggatttttgacatga

SEQ ID NO: 387507 - DNA, 569 bp, Homo sapiens
tgtgttgctcagaaaacctaaccagtataattttaatctttttacatttattagtgtytactatgtatccaaacatatggtctcttttgccaaatgctgagtattcttcagttgtctggtatgatgttctataagtgtcaattaaagcaagtggagtaataatgtcattcaagttttctatagacttatttttgttgcgtcttctgttaattactgaaaaaatattcaacttctgttaattactgaaagatctgattatgggtttgtctgtatttcttttatattctgccattttttactatgttattaggtgcaaatacattttgaatgattatgtcttgttgatgaatttattaaaagacatagaacaaatagagagagataaaacagtttaaaataaatatgataagctttccaaattaaacagtaagctaaatgaagaccaatcaaaataccaacaacgttcttttcttgaaattgtcatgctcattccataattcatatagaagaattaaaagtcgaaaatagatgaaacaactctgatgaatgaatataaaaagggaggattt

SEQ ID NO: 387508 - DNA, 572 bp, Homo sapiens
gatttccagttgaattttgtgttgctcagaaaacctaaccagtataattttaatctttttacatttattagtgtttactatgtatccaaacatatggtctcttttgccaaatgctgagtattcttcagttgtctggtatgatgttctataagtgtcaattaaagcaagtggagtaataatgtcattcaagttttctatagacttatttttgttgcgtcttctgttaattactgaaaaaatattcaacttctgttaattactgaaagatctgattatgggtttgtctgtatttcttttatattctgccattttttactatgttattaggtgcaaatacattttgaatgattatgtcttgttsatgaatttattaaaagacatagaacaaatagagagagataaaacagtttaaaataaatatgataagctttccaaattaaacagtaagctaaatgaagaccaatcaaaataccaacaacgttcttttcttgaaattgtcatgctcattccataattcatatagaagaattaaaagtcgaaaatagatgaaacaactctgatgaatgaatata

SEQ ID NO: 387509 - DNA, 477 bp, Homo sapiens
aagacatggttttgccatattgcycaggcttgtcttgaactcccgggctcaagcaatccaccggcctcagcctctgaaaatgctgggataacaggcttgaagtcactgctgccggaaaaaacaacatattttcaaaatcccttaatatttatcagggttatttttatcttaaaaagaaaaaacttactatgtctaccactatgccattactttagataaaaaagagaaattaggaagttgcctctctgctacatttttgaaatgtatacaatccaggatgcattttcatgcttaaaacattttggactagacctaataacttcaagaattgtaaattatgtgaagaattttttaaatggaaaaagactacacagtataattgtgttatttttgtactgccctgaaatatattatccctttgatggtcatatatgtgcaaagggctaacaaagtattgctatttgttaaataaaataa

SEQ ID NO: 387510 - DNA, 477 bp, Homo sapiens
aagacatggttttgccatattgcccaggcttgtcttgaactcccgggctcaagcaatccaccggcctcagcctctgaaaatgctgggataacaggcttgaagtcactgctgccggaaaaaacaasatattttcaaaatcccttaatatttatcagggttatttttatcttaaaaagaaaaaacttactatgtctaccactatgccattactttagataaaaaagagaaattaggaagttgcctctctgctacatttttgaaatgtatacaatccaggatgcattttcatgcttaaaacattttggactagacctaataacttcaagaattgtaaattatgtgaagaattttttaaatggaaaaagactacacagtataattgtgttatttttgtactgccctgaaatatattatccctttgatggtcatatatgtgcaaagggctaacaaagtattgctatttgttaaataaaataa

SEQ ID NO: 387511 - DNA, 477 bp, Homo sapiens
aagacatggttttgccatattgcccaggcttgtcttgaactcccgggctcaagcaatccaccggcctcagcctctgaaaatgctgggataacaggcttgaagtcactgctgccggaaaaaacaacatattttcaaaatcccttaatatttatcagggttatttttatcttaaaaagaaaaaacttactatgtctaccactatgccattactttagataaaaaagagaaattaggaagttgcctctctgctacatttttgaaatgtatacaatccaggatgcattttcatgcttaaaacattttggactagacctaataacttcaagaattgtaaattatgtgaagaattttttaaatggaaaaagactacacartataattgtgttatttttgtactgccctgaaatatattatccctttgatggtcatatatgtgcaaagggctaacaaagtattgctatttgttaaataaaataa

SEQ ID NO: 387512 - DNA, 512 bp, Homo sapiens
aagatcttgttatgttgcccaggctggtcttgaactcctggactcaagcgatcctcccaccttggcctcccaaagtgctgggattacaggcctgagctgctatgcccagcccactttttaattagattatgtattttttgctcttgagttatttgagttcctcatgtactttggatattaatccttcattaggtgtacagtttggaaatattttctcccrttccataggttgatttttttccttttctgtgcagaaacttttcagtctgatgcagtttcatttgtctgtttttgctttttttttttgcctgtgcttttgctgtcacatacaaagcatcattgctcagaacaatgacaagaagctttatccttatgttttattcttagtgttttacagtttcaggtcttacatttaactatttaatcaattttgatatattcaggagagagaagatggcagataggaggcaggactaacttgcagctcctgctcagacagagcagtgtgtggg

SEQ ID NO: 387513 - DNA, 582 bp, Homo sapiens
aatgtttcagttgtattgccttatttcctctctttcatcacagcttacctacccttgaatatgagctacttcttgagaatatactcaagaaggccaatcattcttctccctgcaagttccaggactgagtaataggatcaataaggctttcatcatgtgcctatccccttcctcacaaccgtggcctacatcagaatgacaactgcatattggaggttccattctgaaatgtctctgggatttgttctgactttttctgtcccagagaaatagatcctctaaatgctgaccttagtttttgcctcctgcttctttctagtccttcctctgtactagttttgactaattactatggtgaatccaattcaatctatgcactcacttgcttacagcagctgtgctccctctcattactttccagatgaagtcctttgcacataagcacatattcacaatctgatttctgttcggactttagraaaagattctctactgttttctctcactgttaggatgtcatggatattaagttaccctcctgaattaatgcaagcttttcaaggaaaaacaaaaacaaaaaaa

SEQ ID NO: 387514 - DNA, 354 bp, Homo sapiens
aaagtttttttaaaaaaattagaaaataagcccagctctttatctaatgtttagactcaaaatatttcmccataatgtagaaataagatatgaggtattttcccatgctgggctcaaaaactttagcataaaattattctgcaagaagcttctaaagaatagaaatgttgataaaacagcacatgcaagtaccatatattaataactaatccatgaacaatttatttcaactcaggcatttagaaagtaaatgttatccattttatatagttaaaattttcagccaaaaatattttaaccatataactttacaacatacagaaaaaatacatataaaagtgaaaaatgtgtttt

SEQ ID NO: 387515 - DNA, 618 bp, Homo sapiens
tcttgctaatgccctggaataggattgtgagtgaatttgatctacttgatattaaaattacccaagatctkggatgattccaaaatgcttctctgaagcagttttaattcattttcttggcaaagatttttaggccatgtgaaaagtatctttcaggtttttttttttttttaaaaaaaaacatgccaagaaagttcatcaagacaaaaatcctatgtgggatatttttccaacatcaataattaaagtgatgaaagtaatacataagcctcaattttccttgaaaatttctccaagtgagtcaatagtacttaagctgaggaaatcagagacaattacctctactttttagaacttcttggatttctctagaatgtaataagtaacaaagaaagagctcctcacactcttgagttcagtttttattttctgtttcaaaatcaagatgagaaataagaaattgtaaaggtcgtattttgctttgtttggtgctttttcttctaactttggaaaactgtaaccccgtgctagttttcagtgggaaaaatatacctggcactaagaactatgtgaaaattaattctatctttttcccggtagagaggtcattcagaagca

SEQ ID NO: 387516 - DNA, 618 bp, Homo sapiens
tcttgctaatgccctggaataggattgtgagtgaatttgatctacttgatattaaaattacccaagatctgggatgattccaaaatgcttctctgaagcagttttaattcattttcttggcaaagatttttaggccatgtgaaaagtatctttcaggtttttttttttttttaaaaaaaaacatgccaagaaagttcatcaagacaaaaatcctatgtgggatatttttccaacatcaataattaaagtgatgaaagtaatacataagcctcaattttccttgaaaatttctccaagtgagtcaatagtacttaagctgaggaaatcagagacaattacctctactttttaraacttcttggatttctctagaatgtaataagtaacaaagaaagagctcctcacactcttgagttcagtttttattttctgtttcaaaatcaagatgagaaataagaaattgtaaaggtcgtattttgctttgtttggtgctttttcttctaactttggaaaactgtaaccccgtgctagttttcagtgggaaaaatatacctggcactaagaactatgtgaaaattaattctatctttttcccggtagagaggtcattcagaagca

SEQ ID NO: 387517 - DNA, 553 bp, Homo sapiens
ctgaatggagtacagagaaggcaacctcaagaagaacgaatttggtggtgtatcacagcaattgtagggagaggatgctaagaccactgaactcctctggaaggtttgactgttggatccctggggtggttctagacttgtcagcgtatcatatcttggcaacactgacccctttgccaaatgtatgccccaagacaccatctgtgtatggctctggcttctgtgctgttttttttttttttttcagggagagagttttctgatcagctactgtcttatgctggatggatagtctgatgggtgcatttctcatgataaagtaggaaattgacattctggctcctgtgagagcwtttaaggtgaatctttcccaagaagcagatcacccctggaaaagctggcaaagtggagcttcagggctgccaagccaaggacctgaccctggttcccacccagcagctggtctcttaacctgctgtaaaaggagtataaatgccatagtgaggcttaataagaatccacagcatctctaatctgccatggttataaactg

SEQ ID NO: 387518 - DNA, 616 bp, Homo sapiens
tttgaagtctttggggaaaaacatttttaaaaactatgaagagggaaaagagccgaaaacatttttaactaacagtcaaaactacttagttaattcaatgaaaacagaacttgtgcctgaattatctttaaatttccactttgctttttatgtgagctggtctaatcattatacctctcttataaagaaataaaaatactttccattgcctttacttttgctattttgataggtgttttgggaggaattagaaaaaggaatagtcacaatgactcaaaaccatgccatgtatgtgtgtttcctttgtttgcatgttatccttattattcttaagaggatactaactcaaattcttttggaatagccaggatcataaaaacatcaagtgtgtttcttacaaaccatttctataattcataaagaaagaatttaatagttggaaatgtgtgtgttgttaatatagtataaaacaggttattgcttatccccaagtaaatgcatactacagattgataggaaacttagctaccaaattacaaaacygtagaaaaatctcaaaatgcaatttcaaaggaaccaattgtgtaaaagcagacatcaagatggaattcatcat

SEQ ID NO: 387519 - DNA, 488 bp, Homo sapiens
tatggtgcctgagacttgctcttggagctcctgtcttccatctgcaggccctggtcctcacctctggtatgtctcttggcacctaggctggctctttttgcagtgaccctggtgtgggcctgcacaaaaggaaacaagccctggaattgttaagcttctcaagggcacacaattttcatcctctttagaaacataatttctcaaattctttcttaaaaaatcaagacgaggtctcaccatgtttcccaggctggtcttgaattcctgggcacaggcaatcgttcgtccttggcctcccagaatgctgggattacaggcatgagtcactgtacctggctcaaattcctattagacttaaaaatagtttttattaattccaaaaagtataaacwtattggagaaataagaaagatgcatttatcactccagagattccaagggttttaagagctgtgtgtctggaaacagggatgaagaccaaatatgta

SEQ ID NO: 387520 - DNA, 423 bp, Homo sapiens
ttccccaccgcaatgaaacaaatactgcgatagagcaagccacacaaattttttggtttcccagtgcatataaaagttatgtttacactatctgcagtctgttaagcatgcagtaccattatgtctaaaaacacaatgtacatatyttaatttaaaaatactttattgctaaattttctaatggtcacctgagccttcaaagaatcataatctttttgctggtagagggttttgccttgatgttgaggctgctgactgattagagtggcggttgctggagtgtggaggtgctgtgccaatttccaaggacagcagtgcagtttgccacatcagttgactcttcctttcacaagagatttctctgtagcatgcgctgctgtttgatagcattttactcataattctttcaaaattggaatcaat

SEQ ID NO: 387521 - DNA, 538 bp, Homo sapiens
aaattacataatatctagcaaccaataaaaaagtagtagagatgatgaagcaggaaaatacgacccaggagcagaagcagtcagtagaaacagagatgatggaattggcagaaaaggatctcaaagccacgactacrtttatactcaaggatttaaaagaaaaaaactaataagagaaatggaagatataaaacaactatttgagatgtctaggggtaaaatgtacaatctctgaagtgaaaattttgctgcatttatttacttcagaaattgtaaattttggaagtaacagcagattaggtactgtagaagaaaagtttagtgaatctgaagacacagaaatagacaccgtggaaaccagagtacacaaagaaaaaagacctaaaaactataacgaacagagcctcagtgacctgggtctattgtatatacatattatcaagtggtccagtggatataacagtagaagtggggaaagaaagaatattttaaaaagtaatggccaaaacttccccaaattgagtgaaaattaattttt

SEQ ID NO: 387522 - DNA, 552 bp, Homo sapiens
tcattgttcaattcccacctatgagtgagaacatgcggtgtttggttttttgtccttgcgatagtttgctgagaatgatggtttccagcttcatccatgtccctatgggattgttttcttgattttatttttggattgttcattgctagttcatagaattacaayagatttttatatcttgatgtctggcagaagcacagttatttactctgaactgattttttagttctaatcttcttttagtggtttccttaggagtttctataggatcctgtcatttgcaaagagatagttttacttgttcctttccaatctggacgcctttatatttttttcttgtgttatttccctggctaaaacctccagtgtaatgttgaatagaaatggcaagagcagacatcttgtcttatccctgaccttattcctgactattacttataatgtgaacagtggattttttttttatggaggcccttcatcaggttgagaaaattcctttctatttgtactttcttgagtgtttgtttttttttttaaatcaagaatgggtgt

SEQ ID NO: 387523 - DNA, 580 bp, Homo sapiens
tatcttcccccatcctctgtgcttttattgtcatacacattaaatctttatgcactgtaagttcatcagaacagtttataattattgctttatgaagttgtcttttaattggagaaaaagaagttacaaatgaaatgaaagttacaaatgaaaaatatacttacactgtctcttatatacatagttacctttaccaacactcttttttttaaaaactgtggatttgagtaactttctagtatcttttcatttcaatctgaagcactccctttagtatttcctgttgggcaggtccgctagggacaaattctcaatttttatttatcttggaatgtctcaatttttctttcatttttgaaggatgattttgttagtcatagggttcttgattgaagcctttttccttcagcactttcaatatgtcatcccactgccttttggcctgcatggtttctgatgaaaagctatcttaattttattgtgaatctcttgtgcatgatgggtcacctctcttgatgctttcaagattctctttttgwctttgtcttttgacaatttgagcataatatgtctcagtgcg

SEQ ID NO: 387524 - DNA, 501 bp, Homo sapiens
acagccacgtttgtgtcaacaccagcacagtactgaacacaccatacagaaggaagtcactggaacgtgctggatatatgaacacatgcacagatgaactgakgaatcaataaataagtggatgaattttaaagtttttaccaaatgcctaaattcaacactgggctctctcttcccttgttgctctgtctcaagatcccgtggctcagttcctcttctgtaaactcctggggatgatttaaccatagaagcaaccctgactgtattaactccccagagggcaggtccatggaatccaggagggaataaaaaacatgtcagacacgctgctggcatcctaaatgttcttgtaagttgttgacacgacaagaaaccatcaggaacactgtcactcccaatgttttttctatttctccactgacttacatacaatttctaacaaagttcatttgacacatatttaaggacaagcacaaatgaaggtagaaattgtgggcgaca

SEQ ID NO: 387525 - DNA, 594 bp, Homo sapiens
cttatattaaaagagcatcttgtgaccctagaaacttagtatcagaattttttttcataatttactaaaactatgaagagttaatttattgatgctactaatccatctagatattggtttcagggtcaaatttattgtcatggacaaataagccagagtttattgatttgttggcaacactgtagttttgcaaattacaaggcccgatacacacacatcacataattttatacagatattatggtaaaagaagcatgtgaatgagaayttccaaattaaccaaacacattcttgtatgtctcattgttttgattaccacatcaataacccttttcgtgtattttctctgaagtgttcatccagttattctctgaacagatggtcccctgaaattacctcattcaggataggttaattaagcatgaaaattatgatacaaaatatggttccaccttccataagaaatgctaccaaatcctgcaaacaaagtagatttgaacaaagtgtcctcaggttgtgcttagaaaagagagtaagagaagcccatgcttggataaaacaagttacaagaagagtagaggctgttgttcctgt
